United States Patent Application Publication US 2004/0123343 A1 - sequence listing, part 26

SEQ ID NO: 72421 - DNA, 1989 bp, Oryza sativa
  Clone ID: PAT_MRT4530_72800C.1
atggcagggtgtccctgtcagctcctgctctctttcctctcttctcttttttttttttctcttctcctttcctccctctcgctctctgctctcgcacaggcgacggcgcgcgcggccggcgacggcggctcccgggtggcggcgcgcgggttcagggcggcgcgcggctacggccatcatcacatctcgacgacgccgccatcagtcgctgccatcggcgatggcggcacgctgcagtgggccatccaaaacttcatccgcgccagtgactacatcacgctgttgcacgtctgcccgccagcgaggttgcgcagcctacgcctcggcggcttccagctcgccctcgccttcagggagctctgcaacggcatcgcggaggcgaaggtggagatagtggttagggaggggaaggtcggggagacggtggtggtgacggcaggtggcgcggcggaggtggcggcgggatccgccgggaggtcgcggaggtgggacgccgcggacgaatggagcggcggcgcggcgggcgaccaggacgatggccactgcgccacggcgggatccagcggggacgagggggacgacgacaccgacgaggaagagaggatcccgtcgggaggagcgggcgctcgcgcccaactcctcgcccactgtcgttgcctcccatctcttcccccggcggcagccgcccgcgcccagctattccccctttggccaccgcccgtgcccagctcctcggtcgttgtcgccgacgcccatctcttcccccgccgcccatgcgcgcgcggctgtgctcaattgaccaagccttcctccctcggcggccgccgacacgcccgcctcaccggccatcccccgccagccgccggtagggtttactgcccggcgatcatctccgccgccgcctccgtcgccgtcgccggcgaccgaggcgagggcctgcgggacctccacccgccgcccttcctcggcgccttcggcgaccccgacggccacgacggcctcccggtcttcctccccgcgcggcgcacccgcgaccgggaccgcggcggcgacttcctcctcacctgcctccaggaccccgaccacgacgcgcccctccgctggcgcgtcgccgactgccgggacggctacctcctcctcttcaactccgacgcaggattggtcgccaccgtcaaccccatggccccgcggatgacggatctcatcaaaacgcccttccggatcaacaattcggccagcaatggcgccatccaagacgaatccttgccaatctccctcgacgtgcacctgatttcctcggaagaggatcccatgtcattccaactggtctggctttgccacgacgagttcagggttcaggtgtccgtcttctcgaacgacacaagggattggtgctttctcccatgggtggacatcgaggagagggtttcttcgccggatgtgccacaagatggcaccaaatactggcttatgtccgggatgcaagccaatggcctcatattctggcccttccagaatgggaagcacatgctggtgctggacactggcaccatggagttctccgtgtatgagttcccaatatactctaagctcgtgcaaggttgtagcttcggtgtcggcgagaccaaagacggcatcccttgcattgcttatgtcaatggagccaccattgttgtgttgatccgcagattcgacaagaagcagggtgttcaggggtggaggtttgtcgacggcgtcaattgcgacgacgaggcggaccaactgggtattaatggtgggcttgatgtggtggccataaaggatggctttgtgtacctggccgcgacagggatgatcctttcgctctgcttagaaacaaggaagcttgagaagctgtttccaatgagtttccagttccctctccatccctacatcatggcgtggcctcctactttggtaggaaactatgggagctttgcagagatccaagatgatattagcaatgtttaa

SEQ ID NO: 72422 - DNA, 2199 bp, Oryza sativa
  Clone ID: PAT_MRT4530_72801C.1
tagtggatccccgggcggccgcgtgggcaccggaccatacccaacaagcgtcaaatcgcgtcaaagccaaaaacctcatacaagtccaggaatctgtaatatattccgagacttttacacgcattccagtcatcactagtgtagcggttgctgcttcttccccggggaggtttatcggatcttgatggagacccatatcggatccgtggacggggcggcggcggcggcggacaacggcgcggtggggtgcccggcgtcggcggtggggtgcccgatgacctcggcgcgccccgcgcccgtgtcggccggcgaggcgtcgctgggacggcacctggcgaggcggctggtgcaggtgggcgtcagcgacgtgttcgccgtgcccggggacttcaacctcacgctgctcgaccacctgatcgccgagcccgggctgcgcctcgtcggctgctgtaacgagctcaacgccgggtacgcggccgacggctacgcccgcgcgcgcggcgtcggcgcctgcgccgtcacgttcaccgtcggcggactcagcgtgctcaacgccatcgccggcgcgtacagcgagaacctgccggtcatctgcatcgccggagggccgaactccaacgactacggcactaaccgcatcctccaccacaccatcggcctcccggacttctcgcaggagctccgctgcttccagaccgtcctttgcattgcagggggtggtgaccaatctggaggatgcgcaagagcagatcgacaccgccatcgggacggcgctgcgggagagcaagcctgtgtacttcagcatcaggtgcaatctcccagggctgcctcaccccacgtttagccgcgaccccgtccccttcttcctcgcccccaggttgagtaacaagatgggtctggaggctgcggtggaggccactgtcgagttcctgaacaaggcggtgaagccggtgctcgttggcggccccaagctgcgtgtggcaaaggcagggaaggccttcgtcgaccttgttgatgccagtggctacgcctacgcggtgatgccctcgggcaaggggctcgtgcctgagacgcaccccaactttagcggcaccagctgggggtcggtcagaaggagcttacggaggcgatcgggatggcgctgggggagaaggactgcctgtgcttcattgaggtgatcgcgcacaaggacgacaccagcaaagagctgctggaatggggatcgagggtttctgctgccaactccaggccaccaaatcctcagtagaaacttttagtacttgttgcaagctgggctcaatcataataatgtaaacactttgcccttcagttatgttccttgtgtccattccctcgggtttctgttcttccagtttcggtagctctgtatctacttgtgaacatctgtttctccaatcaaatgctacgagggttatgagaggttttcagcttgcaaaaaaaactcctggttcaattgccagaagctgaagctccctgagggctgcgggtatgaattccaaatgcagtatggttccattggatggtcagtgggtgcattgctcggatatgctcagggcgctaaggacaagcgtgtgattgcctgtattggtgatgggagtttccaggtgacggcacaggatgtgtcaacaatgattcgctgtgcacagaacagcataatcttcctgatcaacaacggcgggtacaccattgaggtggagatccatgacggtccatacaacgtcatcaagaactggaactacactggccttgtggatgccatccacaatggagagggcaaatgctggacttctaaggtgaagtgcgaggaggagctgacggaggcgatcgggatggcgctgggggagaaggactgcctgtgcttcattgaggtgatcgcgcacaaggacgacaccagcaaagagctgctggaatggggatcgagggtttctgctgccaactccaggccaccaaatcctcagtagaaacttttagtacttgttgcaagctgggctcaatcataataatgtaaacactttgcccttcagttatgttccttgtgtccattccctcgggtttctgttcttccagtttcggtagctctgtatctacttgtgaacatctgtttctccaatcaaatgctacgagggttatgagaggttttaaaaaaaaaaaaaaatccaaaaaaaaaaaaaaaaaaaa

SEQ ID NO: 72423 - DNA, 1104 bp, Oryza sativa
  Clone ID: PAT_MRT4530_72802C.1
atggggcggcttgcaaattggttggatgacagaaccagtaagtcaactccagactacagaatccaggctggatcattcctgctcaagctatggttcaggccaatttttatcattttttttatgcccacttcttcatgtcagccaatgatgtccagttcatacaccttccaagaatctaagcacactccacagtctgcctactcacttaggcacttcgcattagcaaaagccatggggcaacctagggctcaactcctaccctccatgtccatggcagctttgtatctcatcctagccacctccccagtaatcagcgacatgaccgacagccttgacatgctgtggggcaatacacaggtgctctatgacagcactggccaccaaattgtatcactgtcccttgaccgctggactacttctgcattccgctcaaagactaagtatctctttgcgaggattgacatggacatcaagcttgttgccaaggactcagccggcactgtcaccacattatatatgataactgaggggctgtgggacatacatgatgagattgatctcgagttcttggggaacaccaccggtgagccctacaccttgcacactaacatctatgccagaggaacaggtggccgagaaaagcagtaccggctttggtttgatccaacagaagacttccatacctacaccatcatctggaacccgcagatgatcttaatacttgttgatggcacaccaattcggcagatgaagaatcagctaaggaatgatatacccttcccgctatatcaaccaatgaggctgtacgccagcatctgggatgccgatgactgggcaacgcagggtgggcgtatcaaaaccgactggtctcaagcaccatttaccgcattcttccggaactaccaagctaacgcctgcattccgtacaaaactgcctggatttgcagccaagggtctaatgacagcagctggtttacccaggatttggatgaggaagggaagcagaaacttaaggacgtagatgataactacaagatttatgattactgcactgactcaaggaggtacccaaatgggtatcccccagagtgcgggtcacagtag

SEQ ID NO: 72424 - DNA, 519 bp, Oryza sativa
  Clone ID: PAT_MRT4530_72803C.1
atggggactaaaaatataacttctatgaccaatcccaccatcaactccgtccttcaaactcccacggcctgtttggcaagagaaggccgccctcttccaccgcacgcagctgggttcttccatcacctggaggctggagcgctgctggttctccccctcatcgccgcatcatcagagttgccagatatattctcttcaggtttgtattcaacttttgttttccagaagcctgacccagatgcgatgccaacaattctgacgcccaatttgcctgaccctgagaatgctcaggaagtgggatgcctccggaggcagcaggcatcagtggacgatggaaagggctcagagcctcagatgctgatcgatatgattcccatggaatggtcagaagggtatctctggtcgtccccgggcctgctgatatcagtggacatagaaggggctcagatgctgattgtaattcccatggatcgtgcgaagagcatccttggtcctcggcctgcagatgtgaggctttag

SEQ ID NO: 72425 - DNA, 4050 bp, Oryza sativa
  Clone ID: PAT_MRT4530_72805C.1
atgtcgacctccgacgacgcggccctctccgcggcaatcaactccgtcaccgacgccgctacctctgctattcggaaaaccctccgcccggccgatgacaccgtctctccggacgatcttgccgctgctcaagccctcgtcgaagccacgactgctgcaaccgtcaaggctgtccaagacgccatctccgccctcgtcgtgcgtccgtccgccgcgacggccgcggcggcatcgccttcgttttccccaaccatggtcaccatcgacgcagtggcgctccgcgccgccctcggtcttcctccgactactcccgtcgacaacacctccggagcgcccgtcgacaattcctccggtgcacccgtcgacaacacctctggtgcgcccgtcgacaacaccggacctgacctgtcaagcctcttcaccgcgctcggcctcaatcctcctcaacaacatgacaacctccctgctggttttgtgtccgggggggcgccgtccggcgccgacaccgtcgatgcgctccacgctcaggctgtctccgtcctcaacgtcaaggcactcgttcccgtcgtcctcgacctcggctcagcgaactactccaagtgtcgatgcctcttcctcatcacgctcagcaaatatgccctctccgaccacattctctccgacgccttccccaacaatggggcatgggctcggatggattgcgtcgtcctcgcatggctatatggcaccatcgccgctgatcttctggagactgttctgcagccggtcgtcaccgcacgccaagtctggctctgccttgagcagatgttcctcggccaccacgagcaacgcgccatgcaaaacatgcaaggcggcggcggcggcaatcaaggtggtggcggcggcaacaaccggagccggcaccgacgcaataacaactctggcggcaacggcgggacgaacaactccggcggcggcgctggtcaggcgtcccagggcaacaatcagggcgccatgcagactcatggcccgccaggttggcccacgccccagcacccatgggctggccccatccaaatgtggcctggaggcccacttctgcgcgcgcgcggcatcctcggcccactgcccagcagcgctccgttcgcaggcgcagccgtcgctgggctccctgcaggaaccttgtcgactccgccatccaccgactggtacatggacactggtgccacctctcacatgacatcggacaccggtatcctatcctctcccattcaccctagcccctctactccttcacatatcattgttggtaatggttctttcttgcctattactgctaccgacgatgcctcctttattcctgcaaaccgaatgtttctccttaacaacgttcttgtttctcctggcatgataaagaatcttatctctgttcatcgctttattaccgacaacaatctttccatcgagtttgacaaatttggtttcactgtgaaggatcttcctaccaggaccgtgatcgccaggacacagttctctacacccattcgtaacatccaatgtgataacggccgtgagttcgacaactccgccgcccgcacattcttccttactaacggtgtctccatgcgcatgtcctgcccccacacttctccccataatggtaaagctgagcgcactctccgttctcttaatagcattgttcgctcacttctcttccaagccaacctccctggatcgctctgggctgaggctctccataccgccacctacctcatgaaccgccaccccaccaaaaccctcctacgccacactccctacttcgcacttcacggtgtccacccctcctatacacaccttcgggtcttcggttgccgatgttatcctaacctctccgctaccgcacccaacaaattagccccccgctccaccatgtgtgttttccttggataccctagcaaccataagggatatcggtgtttcgatccagtcactaacagggttattatttctcggcatgtcgtgtttgacgaaaacacgttcccttttgctgagaacgctcctgctaacaattgtgctactgatctctctttcttggatgatttttctgctccagtacaggcaccgatcagctccggccgccccagtggcgcgcggcctgggccctctccatcaccaactcggtctcttggtgggccgacattgtctgggccgccccctgctcagcctccaagtacacgctcggctggctcactgggcagtactactcctcggccggactcttctccagcaccagctcggctggcccatgactcggctcggctggcctcgcctgctccagctgtctcgagtggacgcgttgcctctaggccgttcccctcgccaagctccccaagatcggcccatgatgattcagtgtctcacacagctgcaacatcccctcttctcccaccgctcgcgattccaacttgtgcgcggcgtgcacgcgttcccccaccgcgcccgatcatcaccggcttcggcaagtctcccgtcgacaatgaccacggcatgatcaccagaggcaaggccggcgtcagggttcccatcactcgcatgaaccttcacgccaccgtcttgtccccagtccctcgcacctaccgtgccaccctcgccgaccccaactggcgcgatgccatgcaagaggagtactcggcgttgctggcaaacaacacgtgggatctcgttcctcctccgcccagcgccaacatcgtcacagggaagtggatttttcggcacaagttccatgccgatggcagcctggatcgttacaaggcccgttgggtgcttcgtggtttctcccagcgccccggtgtcgacttcgatgagactttcagccctgttgtaaagccggctacggtacgcactgtcctcagccttgcagtctctcatggctggcccatccatcagcttgatgtgaagaatgccttcttgcatggcacacttgccgagacggtctactgcatacaatcttctggatttgtagacactgctcaccccaactctgtctgccgcctcaacaagtcactctatggactaaaacaatctcctcgggcctgttttatttcgacgagttcttgctttcgggttgagctgcatcggtttcgatattcaacaagaggatcaaatcaactggaagaattctctatgaaggaccctggtgagttgcatcacttccttggagtctcagtctctcgtcagtcctcagggttgtttctctcacaacggcagtactgcctggaaatcttggagcacgccggcatgacagattgcaagccctgcagcacaccggtagatactacctccaagctgtcctccacagacggttctcgggttgctgaccccacagattatcgcagtcttgctggagcattacagtatctgacattcactcggccagacattcagtatgctgtccagcaagtttgtcttcatatgcatgatcctcgagagtctcatctcatagctctcaaacggattcttcgctatgtccgcggcactatggaacttgggttgcacattcgcacgtcgtcttctcacgacttggtggcttattcagatgccgactgggctggatgtgccgatacacgcaagtccacctcgggctatgctgtattcttgggtgacaatcttgtctcctggtcatccaagcgccagcaaactgtctcccgttctagcaccgaagctgagtaccgggctgttgcaaatgctgtcgctgaaacctgctggcttcgacaattgctgcatgagcttcactccctgccagaacgagccaccttggtatactgtgacaatgtcagcgccgtctatctatcaactaaccctgtgcagcaccagcgcatgaaacatgttgagattgatttgcacttcgtgcgtgagaaggtcgccattgggtcagtccgcgttctacatgtgccaactacatctcagtttgctgatatcttcaccaaggggcagcctactacagttttcactgagtttcgatatagcctgaacgttcgttctcacgacgctccgtctgcgggggggtgttaa

SEQ ID NO: 72426 - DNA, 537 bp, Oryza sativa
  Clone ID: PAT_MRT4530_72806C.1
atggcggctgcgggctttttggtggcggaggcgagcacctcgagcgcttcggttgtcaaggtaagggtattcctcaggaggttgatatcaggccacctgaatgtcacgaagcttctagagcgagatagaagttcggggaaccatggcttggatggagccaccacaacttcacagctaccgtccaggttgcctgctacagcgatactcaccttgcggtgggccttagatagtacacttagcctcttaggtacctggcacttggtttttattgtgataaaaacacttccagattacttaagaacttgtcttagccactgcttcatgcacatcgatggttctccattacatgatattgtttggagctattatattgagaaattgaaatgtgcaattgtaatttgtggggaggttgatggctgccttaatggcaacaaagctagagttttgaaggactctgttgctggtttggaactatgcttgggaattttgctgctgcgtgttacaagtaatataagcaatttattttgtcacaagtaa

SEQ ID NO: 72427 - DNA, 3798 bp, Oryza sativa
  Clone ID: PAT_MRT4530_72807C.1
atgtcgacctccgacgacgcggccctctccgcggcaatcaactccgtcaccgacgccgctacctctgctattcggaaaaccctccgcccggccgatgacaccgtctctccggacgatcttgccgctgctcaagccctcgtcgaagccacgactgctgcaaccgtcaaggctgtccaagacgccatctccgccctcgtcgtgcgtccgtccgccgcgacggccgcggcggcatcgccttcgttttccccaaccatggtcaccatcgacgcagtggcgctccgcgccgccctcggtcttcctccgactactcccgtcgacaacacctccggagcgcccgtcgacaattcctccggtgcacccgtcgacaacacctctggtgcgcccgtcgacaacaccggacctgacctgtcaagcctcttcaccgcgctcggcctcaatcctcctcaacaacatgacaacctccctgctggttttgtgtccgggggggcgccgtccggcgccgacaccgtcgatgcgctccacgctcaggctgtctccgtcctcaacgtcaaggcactcgttcccgtcgtcctcgacctcggctcagcgaactactccaagtgtcgatgcctcttcctcatcacgctcagcaaatatgccctctccgaccacattctctccgacgccttccccaacaatggggcatgggctcggatggattgcgtcgtcctcgcatggctatatggcaccatcgccgctgatcttctggagactgttctgcagccggtcgtcaccgcacgccaagtctggctctgccttgagcagatgttcctcggccaccacgagcaacgcgccatgcaagtctcggcagaattccaccacttcgagcaaggggatctcagcgccaacaactactgtcgccgtctcaaagctctggcgggacactcgcggcgagctcggcgacctcgtcaccgacaaacaactcgtcctcgcgatgcttcaatccagctcatcctcgccgagatcaacaaaggctccaagaacatgcaaggcggcggcggcggcaatcaaggtggtggcggcggcaacaaccggagccggcaccgacgcaataacaactctggcggcaacggcgggacgaacaactccggcggcggcgctggtcaggcgtcccagggcaacaatcagggcgccatgcagactcatggcccgccaggttggcccacgccccagcacccatgggctggccccatccaaatgtggcctggaggcccacttttgcgcgcgcgcggcatcctcggcccactgcccagcagcgctccgttcgcaggcgcagccgtcgctgggctccctgcaggaaccttgtcgactccgccatccaccgactggtacatggacactggtgccacctctcacatgacatcggacaccggtatcctatcctctcccattcaccctagcccctctactccttcacatatcattgttggtaatggttctttcttgcctattactgctaccgacgatgcctcctttattcctgcaaaccgaatgtttctccttaacaacgttcttgtttctcctggcatgataaagaatcttatctctgttcatcgctttattaccgacaacaatctttccatcgagtttgacaaatttggtttcactgtgaaggatcttcctaccaggaccgtgatcgccaggacacagttctctacacccattcgtaacatccaatgtgataacggccgtgagttcgacaactccgccgcccgcacattcttccttactaacggtgtctccatgcgcatgtcctgcccccacacttctccccataatggtaaagctgagcgcactctccgttctcttaatagcattgttcgctcacttctcttccaagccaacctccctggatcgctctgggctgaggctctccataccgccacctacctcatgaaccgccaccccaccaaaaccctcctacgccacactccctacttcgcacttcacggcaccgatcagctccggccgccccagtggcgcgcggcctgggccctctccatcaccaactcggtctcttggtgggccgacattgtctgggccgccccctgctcagcctccaagtacacgctcggctggctcactgggcagccgttcccctcgccaagctccccaagatcggcccatgatgattcagtgtctcacacagctgcaacatcccctcttctcccaccgctcgcgattccaacttgtgcgcggcgtgcacgcgttcccccaccgcgcccgatcatcaccggcttcggcaagtctcccgtcgacaatgaccacggcatgatcaccagaggcaaggccggcgtcagggttcccatcactcgcatgaaccttcacgccaccgtcttgtccccagtccctcgcacctaccgtgccaccctcgccgaccccaactggcgcgatgccatgcaagaggagtactcggcgttgctggcaaacaacacgtgggatctcgttcctcctccgcccagcgccaacatcgtcacagggaagtggatttttcggcacaagttccatgccgatggcagcctggatcgttacaaggcccgttgggtgcttcgtggtttctcccagcgccccggtgtcgacttcgatgagactttcagccctgttgtaaagccggctacggtacgcactgtcctcagccttgcagtctctcatggctggcccatccatcagcttgatgtgaagaatgccttcttgcatggcacacttgccgagacggatcaaatcaactgtcatgtgatatatctgctgctgtatgttgacaacattgttctcactgcttcgtccggatcactgctccgttggaccatctcctatgtgcaggaagaattctctatgaaggaccctggtgagttgcatcacttccttggagtctcagtctctcgtcagtcctcagggttgtttctctcacaacggcagtactgcctggaaatcttggagcacgccggcatgacagattgcaagccctgcagcacaccggtagatactacctccaagctgtcctccacagacggttctcgggttgctgaccccacagattatcgcagtcttgctggagcattacagtatctgacattcactcggccagacattcagtatgctgtccagcaagtttgtcttcatatgcatgatcctcgagagtctcatctcatagctctcaaacggattcttcgctatgtccgcggcactatggaacttgggttgcacattcgcacgtcgtcttctcacgacttggtggcttattcagatgccgactgggctggatgtgccgatacacgcaagtccacctcgggctatgctgtattcttgggtgacaatcttgtctcctggtcatccaagcgccagcaaactgtctcccgttctagcaccgaagctgagtaccgggctgttgcaaatgctgtcgctgaaacctgctggcttcgacaattgctgcatgagcttcactccctgccagaacgagccaccttggtatactgtgacaatgtcagcgccgtctatctatcaactaaccctgtgcagcaccagcgcatgaaacatgttgagattgatttgcacttcgtgcgtgagaaggtcgccattgggtcagtccgcgttctacatgtgccaactacatctcagtttgctgatatcttcaccaaggggcagcctactacagttttcactgagtttcgatatagcctgaacacagaaccagagttcaactccgcgtccgatccgtctccgcaccacaagctccacaactcccctgcgatcccggcttag

SEQ ID NO: 72428 - DNA, 520 bp, Oryza sativa
  Clone ID: PAT_MRT4530_72808C.1
cgaattctgctgcattaccgcccatatggccggatcctgcgacacccgccggaccacaacgctgccatctccctcgccgatctcctccgtgtcgacgttgaggactgcctaagccagtgacgcccacctcgccgatctcccccagggccgttgccgaccggcatcgcaggggagaggaggggcgccgtcgtcctgctgcatccctgtataatctctcggcaggctatgcatctgtctatttggacatcctctttctcatggtgacctgcacggtgggtactatagcaagacatgttggaggttaaggaggagatgagcagctaatgaagaaaatgagtcaccttccaccttctacgaggatgtccgaacatggctgctcagggatggaggtgatggtctgcatctgcttctttcctacctataccgcaggctctggctggtacaaatgcaatcattcaccagttcttatgtcatggaaaacgtctgagttttctttaattactcacctccatctaatcgt

SEQ ID NO: 72429 - DNA, 369 bp, Oryza sativa
  Clone ID: PAT_MRT4530_72809C.1
ggcatcgaccaccgaaaccggcgacaccggttgcggcgtctcaatgggcctcctacctagtttctgatccatggaatatgatgttaaggcacacaagacgtggagggaaagcacttatgcctcaggaacagagcagaacatgcgcactgcgtgactgtgagaatcccaaagcacaaggtgtgggacaggcaccagaggacacaccaacctaacttaatgggtacgagcgaacacccatgaacggctatgcataatgagcaggccttggtatatatcactccagagattgaaggtcatgaagataaatatgcatttgcagcatatgactacccttcaagcggagaaagtgaaggagagccttggcaatgc

SEQ ID NO: 72430 - DNA, 575 bp, Oryza sativa
  Clone ID: PAT_MRT4530_7280C.1
ccacgcgtccgcaggaaccccaccgcaccagcagcttacgccgcaaccagcccatgggcagcatcggcggcgacgaggcggcggtgctgcgggcggaggagtcggcgtcggggggcgtcgacgtgtggagcgacgccgtctcctcccacgaccccgaccacctcctcgtcatggtccacggcatcctcggcagtaatgctgactggcaatatgcggctaacgaatttgtaaagcaacttcctgatgatgtaatcgtgcactgtaagttgctacattttattctttccattactgactacagttgctagtttcagtgactttttttttcaatttacaggcagtgagaaaaacattaataccttgactctagaaggtgtagatgttatgggggaacgtttagcagatgaggtgatcgatgtaatcattcgaaagccagaactcactaagatttcctttcttgcacactctgttggaggattagcagcaagatatgcaattgcaaagctttatagacatccaagtgacacatccaagagtgaaacgaaaggaaccattcgcgggttgggaagcaatga

SEQ ID NO: 72431 - DNA, 2372 bp, Oryza sativa
  Clone ID: PAT_MRT4530_72810C.1
aaatgtaatggtcactccgtttagcacaaccaaaaagagtattacagaagatacagaacaggcagttcagaaagaactagaaattttaaagaaaatacaacgctacagcgttgccggcgtgctgcaaaaactacatgacgattctacagcctggttataacctataaccaaaaccacctcctgaactccgaagcttgtatggcagatacattatagtttaacagctagtgcacataaataaacaacaaagccttctaggtaccacagattgtacacatctcatctcctggagagggcactaggcattcacttgcaaccttcttggtaccacagattgtacacatcccatctctttcttacctcctagagaggactttagagattctcttacaacagggattggtccgaatagcttcctcatgggggaggattgcgttaacaagagcgctgcggagatggcccctggtctgcacaagagccgtatgaatgacatagtttgcgtaagggtcttgcagcagttgctcaaaatgggaggctgagattaattcccatattatggcagctttgtcatcatctgggaaaaccttcaagcatttctccaccacattgctgcccaccttttgcttcgaaagatacacataatttccttgaaacagagatgccagctgtgcatttgcaaaaggaattttcagatccaggacatattggatcacataattcgttaaaacattcagagaattcttgtagtgagtgtcagcaccgtcataaatgatcttgttctcttctgcatcaaaatttttcaggcatttttgtataacatgattaccattaggatcattgacaagatgaataaagcctggttgtagagccgaaataatgagcatgatctgcttcctggttttaacagtctcaatcaatttctgtatcgaccttgtcccgtgcgagtttagagagactctcagcagcttcacagggtcctcagtcagtacagcaataattctcagcctctgctcctcatcacacacatctagtagtttctgtacaagataatttgcaaacgagttggccataagttcaggaatgtggtcgatgataccttcaaatatcagatcggcttgatctttcccttcctcaaacttttgttgcaagaaccggcacccattctggtccttggccatgaagtagatatagcccttggctccaaccatgttctcatacctcagcatcctaggactctccagctcaactatgttctcatacatcagcataccaggactccccagctcaactgacctattgttgacatgctgctgaaatctcctctcctttgcacggttcagaaaaggcacattcttcctcccatcacaaaatggctccatttgattgaaaccacctttcatgtacccaatgtctctcgctgctgcaacactgtattcgtagggcgattttggcaaacttctgccacgggagtccagggaaatctgacccgtaccagcgtacccccagttgtgttctgcaccagactgtccaggaagcaagaccggtcgagcatgatcagggtgcactagcccttgttcccaaccaatgccggagctgttcctagtcctagtgtacatgaagctgccaacactggtacccaagcttggagggaagccgccgtagccatccaagccgacgtccactggaaagcactgagatggggcgacataaccggacgccatggcctgatcagctaatacgccgggctcatggtgaagcgagtaacccggctccccaaagttgtagccattgttatacgcaccgtgcaccgcggagacatctggcaggtacacgttcttggcggcggacgccggcgagccctgcggcggcatgagcgctgcggcgagcgcgtccgcggcgggcgcgtccccgacaagcaagccgtcgagctggctcgccagcctctccgtgtcctcgtcggtcgtcgcctgcaccatcggcgacggcgagcggccgacgaaccggtccgaccccggcgacggcgcgctaccggcggacgtgctcgacgccggcgacgacgcgaagccccccgatagcggcacgtggatggcgccgcgagcgccgccctgctggccaccaccatcgtcgcgacggttcaagaccagggggaagcacggatccccgccgtagcgcgcgggcgcccccgcgtgcgcatggtaacgcgtaggtccatgcaagccgtagcactgggcagcaccaccaccaccaccgccgccgccgccacggccaccgcgctgcccatgcggcgcggtgacctgagggatctcgctgagcagcaactccatctccctctcctccgccgccgccgccgccaccaccttcgcacacatcat

SEQ ID NO: 72432 - DNA, 407 bp, Oryza sativa
  Clone ID: PAT_MRT4530_72811C.1
cttaaacaaataaaaggggaagacaaagggacttcaagtgggaaaacacatgaccagagagacttttttttatggggggaccaaagaccggggaaaattatggacaagggggggagggaaccccgtggaaaagatgctccaaaggcccccaaggaacccctggtgccttggccacctaggcctgcccaagaggggggttaccctgggaggccccccccgccccaaccctgggctccctggggaggcccccacccccaacgccctggggtattggggagacaccgggggggaccgtgccctgcagatccccgaaacccccagggggcgcacataattgcggcccctggaacccgtatccgaatcccagatttccaaagtcgggaacacggatcccattcgcccgttgg

SEQ ID NO: 72433 - DNA, 681 bp, Oryza sativa
  Clone ID: PAT_MRT4530_72812C.1
gcacggggaccgtgcacacgcccacgcttcacaggcgcacacacatcacgtaggcacacaaaagctagcgatggcgtcggttggtttcggcaccacggtggcgccggcggtggccgccgggagacgcctgagccaccgtcgggcggcggcgccgccgccgccgtccgcacgcgtggcgcggccgtcggcgacgaagagcgtcacggcggcggcggcgacggaggagaagggcctcttcgacgccatcttcggcgcgctgtacaaggaggagcagctgctggagaccgaccccatcctcaacaaggtcgaggagaaggcccccgccgccgcgtccagggccaccaaggccagcggcgctccggccaagaaggcggccggcgacggcgacggcgacggcgggttcagctttggcgggctcttctccaagaaagagtagacgccgaactcatatctgctactgtctgaagaagaaagctccatgacttgattctgataatctgatttaagggctcgcaaacatacataccactttgttgattctgatccatgatgcgattacttctctacttctcatgtgatatgtttcatcaatcaaagagtagtacagtatttatttcgatctcttgataattcacaaatataaatatacatcagaggaagttaattcaaaaaaaaaaaaaa

SEQ ID NO: 72434 - DNA, 363 bp, Oryza sativa
  Clone ID: PAT_MRT4530_72813C.1
atgtcggccggaacccgccctcggcgccggggccgcttcgacgcagcgccgctctcctgccaccgccgtccaccgcgccacgcgacgaggcgacaacgccagatccgaccgctaggtcccggatccactccggcctccaccccgctggccgccagcacatgcaccgccgccccacttactccgcgccccgtcacaccgccgcggacggcaatgacgctcgcctccggccaggtccagcggcagggcgccgaatccagccacgggggtgccagatccggtggcggcactgccggatccgaaacttcgcgccgcgccgtcgccgtcgcccgcccatcgcgcgccgcgtcgtcgtcctcgtgctga

SEQ ID NO: 72435 - DNA, 208 bp, Oryza sativa
  Clone ID: PAT_MRT4530_72814C.1
gagcaaagagaataatgaaatgtttacaaaggaagtcacactagataaaatggaacaggctaattcggacatcaaaccagatagaaaatagacatggatgatgatccatcattcacctataacctacccaagccaagcaagcataccaccctattctcctagccacatctaaaattcaacctcaccttaacaattactaacaatccaa

SEQ ID NO: 72436 - DNA, 424 bp, Oryza sativa
  Clone ID: PAT_MRT4530_72815C.1
attagcgctaacagggcagcgcagcttgtccttgagggtaagcagaagtacagcgagcagaaaacttcagcagataaagtagcacatcatgtgttaagtgaagctaggaaattgcgaaccaaggacaacacatcagtaatatttgtagacctggacactctgagaagtgatccctgatcctgaatccccaattgcttttgtcaggtccggagatcgtcctacctgctgctcgaacagttgaacaacactatttcttttgtttcactggtagttaatatcctttgtcaaagttgagccaggtgctccggtgttgcagaggatgaatgctacagttctccttgtatgcaaatacccagggagccccttgtgcggttatgcctgtaaattgtgagtgaattggttaaaagaaatgtttatgaacttt

SEQ ID NO: 72437 - DNA, 1077 bp, Oryza sativa
  Clone ID: PAT_MRT4530_72816C.1
atgcagccggcggcagatggggagaggtggcgtggagcgcatcccagtccaggcctccgagctgttgttcgacgtcgacgagtcggcgcggcggagcgcgccaccggggcggtcgccagggtccgggcgcttgcgagggacagcgagcggaaccggcgatgcttcgtgtctgtcggcacggggcgcatgctggccgcggcgttcgagtctctcgccgccgcggcattggtttgcatgatgccattggacaaggaagcggccagggtcaccaaggccgccatggtcgccaccacccacctggtgagctccgacaagcgcgtcgcgacgagggtagcgtccacggggctcatcccaacactaatcgaggccctcgtagacgctgacaagagcgtgtccgagaaggccctggcggtgttcgacgcaatgctcacctcggaggaaggccgcgcgagcgcgcggggccacgccctcgcaatgccggtccttgtgaagaagatgttccgcgtgtccgatgtggccaccgagctttgccgccgccaccgctcattgggctcggtcaagggaggggccggtgagcccgttcggacgcagcagctgagtctcgtggaggaggaggtagcgtcgtcggtcggcacgcgtatggccatggacctcgtccgccgggaagcggaccggggcgccgcgccggagttcgtggcggtcgacatcgggggcgaggcggagacggccggggcagaagcggagcccaagaagatggagtcctccttcgctgggaagggcctcgagcgggagaggagcggagacgccaatccttctaccacaggtgtgttggccgtgtatgagaagcaggtggtgcctgtgcacgttgatggtagcccaaaggagcagttccacccttcaacaccaacagctggtggggcaaagcgccgacgaacaggcagacgggtcccagggtggcgtgacccgaggaagatcctttttgccttcgcagcactgtctagtgtgggcacgttgatcttgctctacttcacactctcaatggggaggatgacaggaggtcaggctgatggccagtga

SEQ ID NO: 72438 - DNA, 246 bp, Oryza sativa
  Clone ID: PAT_MRT4530_72818C.1
cgaccgccacgccgccacctctgtgccgccgcgccgcgccgcgccgcgccgtgtgacgctccgccttgcgccgccgccgagctcgagggagttgcagatccgagagaggatcaagacccgcaggactatgagtaaggcaagtcatcactattccttgaacatgttgaacccaattgcgaaattattttgtttacaaataaaattgcatgcaatgataaacatcctacttgtgattatgccatgcct

SEQ ID NO: 72439 - DNA, 162 bp, Oryza sativa
  Clone ID: PAT_MRT4530_72819C.1
gtctcacgcagggcagttgcaggggcacagctccttaaaatcaggcagctaatgcactgtgttcacgcacggtttgcgacacaggtccagaaacacgcccctccaaaccgtccatcagggcagtgcacatcctatgccacagatccttggtccaaacccctg

SEQ ID NO: 72440 - DNA, 743 bp, Oryza sativa
  Clone ID: PAT_MRT4530_7281C.1
caagggtgcctgacgtatatctcatgcaatgttgttacattccacatgagaagttctctgggggaaatgaacattgtcaggtcaacagtggccattctctgaaagagtcttataagatttttgtttttttctatgatattcctcttatgtacagctctgggagattttggtgtacaacaaagcaaatctggattctaattttctgtaagtagagtggaaaaccatctgcagctctgctccatgtttccaagagtgaggaactatcagacttggaagtggtctattatgtgctgtatgacatccgcgccttcgttcataaactggtacttgacctggattatgctgtgtgcagcaaatctctgcatgctggtatggaagctaacatctactttttcccatgatactcgtcgaagtcctgtcaccattttttcttccaatatgtctgaatcacaaactgttgccgaattttgacatgtttcatcaccgagttcttctgagtattcctcatgtacaatgtgggggtacttttcagatatcgattcctcccacttaggcagctcagtctttcttctgatagacgatgttctccagccaacaatgtgatcgcagtcggcatttgcataagccactcgtcgtctaaatgcatgcaaagcagatctgaaaaaagtgttagatgaaataaagatcaccataatcttcagccatgcgctgcattaatgggtggttctccctcatcatcatca

SEQ ID NO: 72441 - DNA, 252 bp, Oryza sativa
  Clone ID: PAT_MRT4530_72820C.1
gaccgtccgaattccggtcgccacgcgtcggcaggtacgagctctaccgactatggagacatagagccactgccttacagaagagcgtgtgcaagctaactagggggtatgactgaggcagggagctgggcggtagatgcttgagcgatcgacaagcaggactgtacactgagagaaaatcaccgatttaggtgggactgttgcgatgacgatgctctgtgtggcaaacagtgaatgcctgcctatgtgaga

SEQ ID NO: 72442 - DNA, 314 bp, Oryza sativa
  Clone ID: PAT_MRT4530_72821C.1
aagctttttttttttggagaagtgaaacaaagtttattgattattaaagtagatttaaacacaaacaaataaattgaatttacataattaaaaaatggcaacaataaaaaaaggtgctcaattataaaaatacattacccgataatatttacatgctttcaacatatgttgaaatatgctccatggctttcttcgaagcactttcaacttctaaaagttgttgtttggtgcaataaccctagtttgaagaagaacggggtcgagtatctcgaagaccaacggatcgttcttggtgatacatcgttgagaagctt

SEQ ID NO: 72443 - DNA, 598 bp, Oryza sativa
  Clone ID: PAT_MRT4530_72822C.1
gggaggaaaaaaacccttttccccaaaaaaaacccggggaggggggaaaaaccaaatttaacccgggccccccccggaagggaaaaatggcaggggaaaaaaaaatcccgtgggacccaaacccccgggggaaaagccccatttgggtgaaaagggggccaaaaccccccaataaaaccccccccggggttggtaaaaaaaaaaaacccccccttttttttttgggggggggggtttgggaaaacccggaccttttccttaagggggcccaaaacttgaaaaaatctccccccccctatttaaaaaggggggcctgggggaaaaccccctggacccgggggggggaaaaaacccctggttccttaaggggggggggggccttttttttgggggggccccccctttttcccttgaaaaaaaccggaaagccccgaaaaggggccctttccaaccccttttggtaaagggccccgggggggggaaaaaacccctaaaggggaaaatttccttggccaaaaaaaaaggggggtcacaaaaggggccaaattgcgggggaaaaaaactggggcccctgtttttcaacccctttttgggcccc

SEQ ID NO: 72444 - DNA, 107 bp, Oryza sativa
  Clone ID: PAT_MRT4530_72823C.1
cacgatctcagcctccagagaaagccagcgtaaaaggggccaactacattctgaagcgcccgctaggcaccccgctcgaaaaaacggaggacaaccgaggtcccaac

SEQ ID NO: 72445 - DNA, 168 bp, Oryza sativa
  Clone ID: PAT_MRT4530_72824C.1
atggctagcggcggcccgaggctccaaggtggccctccgcgctcgacgagctcggtgagggaggcagtggcggtgacggatggtttaggtgacggatacggatccacctgggccaccgctgttgaggccctccccttccactacctgccagagcaagttgatcgttga

SEQ ID NO: 72446 - DNA, 234 bp, Oryza sativa
  Clone ID: PAT_MRT4530_72825C.1
atgggagaagggatgatgctgcggctgctcctggtcgtgacgaccatcggtggccacagatccgatggcgtccctgccaacgaccaccacgccaccgctgctccaccccaccaggtcgcccagtcaccggccaccgctcgggatggcctcgcccgcacggctgccaccgccgcactgtcgccagatcagcgcctcagcctctacatgcggccgtatgagctaggacgacagtga

SEQ ID NO: 72447 - DNA, 945 bp, Oryza sativa
  Clone ID: PAT_MRT4530_72826C.1
gcacgctgctccctcccctttgccccgccctctcgtccggccgtttcgtggccgtttccgtgggtcccatccacttgtcctcccgtgcaatttacgaaattgcccctatcatcttcgggtggtccccacactccacgactttctcttgccccctcccttttctccctccctttgtttattccccaatcgctatcgccgagcgattccgtctcgtctcgtctcgtctcgccgctgctctgctggcgtggcggcacgggggccgtcgagatgtcgatctgcgcgagggcggagccgccacgtggcggcgggacgctcggcaagcggaaggagcgggaccgcccgtcgtcggaggagcagcgggcgccgccaccgccgccgccgccgctgttcccggcgatgtccgctaggccccagccgcccaggccggctcaccccgctcggttcgtcaagcccatgccaccgccgccgccgccattccccaagggtggcggcgggagcagcttcaagctcatggcggggtacctggcgcacgagttcctcaggtccggcacgctcctcggtgagcggccggagtcgaacagcaaggcccccgcccccgcggcgagcgccgggccggcggcgcccgatccccgcacgcggtacgccgaggcgtagatgcgcttacacaggacgatagaaacacaaagagcccctgaagataacacaggggatcatcatatcccaaatagaagagaagagcaacaatggagccattggtggtcaccattagccatgatacttgcaacagaacctatgaccaaaatccgtctaaaatgggaagaatcgaagggaaatgagttatccgggttagcccgtggtgttaaggcctcgtccaggaaggaagaatcaattattgatgatgagaagggcatcgaagaggaaaaggaagaaggccacctcaactag

SEQ ID NO: 72448 - DNA, 414 bp, Oryza sativa
  Clone ID: PAT_MRT4530_72827C.1
atggagcagcgtagcagtgccggcgtcgacgcgccgccaccgcgtagccctagccgccgccttcgttgtcgtcgttccaaccgcgtcgcgctggggttgtggtcgccgtcgccgcttaccgtcgtcgccgtcgggttcgcgcggtggaggagcacctcggccgccccttttcagccgccgaagaccgtcggagcgccgtcgccgaggttgacccgagccaagccgccgttggagttcgtcgccggccttcgttcgtcgtcgtccgtcgttgtttttcgcaccggtgagttcgcgtcgtcgtcctcttcgcatgggtgtcctcggaagacccggccatgtcctctagctccggcgacatcatggttcagagccatggccggcgatctcatggttcagagccatggccggcgatga

SEQ ID NO: 72449 - DNA, 1254 bp, Oryza sativa
  Clone ID: PAT_MRT4530_72828C.1
tcaatggcagatgtcatgtcgagtcgattgcgccgagtcgccggaggcggaggcggaggtggcggtgctgacgccgccgccgccggagctggagctggagatcgcgtccatggtcgccatgtacgcgaacgggttgacgggccgcgcgatctgctcctccccttcgagcatcctgacgacgctgctcatcgacggcctcgcctccggctggtactgtatgcaccagagcgccaccttgcacatcctctccgccttctcgccgtccttgctccggatccccgacgccgccatgacctcgccgaaccggccctggtcgaacctctgccacgcccacctggggtaccactcctggctctccgccgggcgctgggtgtcgaggttgcgccgccgcccgaggatctcgaacaccagcatgccgaagctgtacacgtcgcacttgtgcgtcaccggcagcggcagccacagctccggcgccgcgtaccccggcgtgccccgcgcgccggtcatcgtcaggtgggtgttgtcgcggctgcagagcttggcgagcccgaagtcggccaccttgggcgcgtagtcgccggcgagcagcacgttccccggcttgatgtcgtagtggatgatccggtgctggcactcctcgtgcaggtacctcaccccgcgcgccgtgccgacgacgatgccgtgcagcgtgtcgaactcgagggcggccgccgcggcggcgtcgaacaggacgcggtcgagcgagccgttctcgaggtactcgtagacgagcgccttggtggtggcgtcgaagcagaagccgtagaggcggacgaggttgatgtggtaggtgcgccccgcggtggcgacctccgccatgaactgctcctcggcgcggcggtccagcgtgcggtgcaggatcttgacggccacctgcacgccgccggggaacctgccgcggtacaccacgccgaagccgccggcgccgagccgctccgcgtagtcccccgtgaactcgcggaggttctccggcgtgaaccgcgccggcttctcccggaggatgtcgtccaggaagcggtccaccgaccccatctcgacgcggacgtcccaaacaaaatgaccaataaaaatatcctcacaactcacaaggtaggaaggcacgcaaaacggggtgagccattagctcatgattaattgagtattaactattttaaatttcaaaaatggattaatatgattttttaaaataaataacacacaagcagatgcatacag

SEQ ID NO: 72450 - DNA, 311 bp, Oryza sativa
  Clone ID: PAT_MRT4530_72829C.1
tttttttttttttttttttttttttttttttttcatttttttttttttttttttttttttttttttttttttttttttttttttttggtttttttttttttttttttttaataaaggggttcccttaaaacaatcagacaaaaacccccattggaaaggggggcaacattcccaaagatgggacaaatccccaagggcccggcatttttggggggtttcccaaaagaccccaaaaccatttaacctaaggacaaaaaaaaaggggactgggcaaaagggtgaccaggctttttggcacaaatgcaatatgg

SEQ ID NO: 72451 - DNA, 1110 bp, Oryza sativa
  Clone ID: PAT_MRT4530_7282C.1
atgccgccgctgccccgcccaccgccgacaccgacctcggccgcaccagctccgtgccctcgccagatcgccgccgtcgtgctgaaccacccttcgtccgccctcacgccggcctcgacgcgctccctctcggcgtccctcctcgccgtcgcgccgtcgctcccgacccccgtggccgactccgtcctcaagctcctctggcaccacgcgccgcgcgcgctcctcttcttccactcgctcctccacctcccgccgcgcgcgcacgccgtgggtccctccacgctcgacctcgcgctcgacctctccgcgcgcctccgccgcccgcgccagctcaccaactccatcctcggcctcttcccgcgccaccgcctcgccttcaccccgcgcaccttccccatcctcttcgagcgcctcgccgtgtcgcagcgccgccccgacctcgccgtccgcctcttcctctcgctccaccgctcccaccgcgtcgcgcaggacctccccctgttcaactccctcctcgacgctctgtccaagtcgcgccacgccggcaaggccgcctccctcgtccgcgctcttgagcagcgcttcacccccgacgtggtgacgtacaacacgctcgccgacggatggtgccgcgtcaaggacacctcccgcgcgctcgacgtgctgcggctgatggtcgagtccggtattgcccccacgaagaccacctataacatcatccttaaaggcttcttccgtgctggacagctacggcacgcatgggacttcttcctccagatgaagaagagggggagtaaagacgagagctgtaagcccgacgtcgtctcgtacactaccatggttcatgggctgggtgttgccgggcagctggagaaagctcgcaaggtgtttgatgaaatggctaaagaagggtgtgctccatcggttgctacctacaatgcgcttattcaggtgatctgcaagaagggtaatgtggaggatgcagtaacggtgtttgatgtctttgagcgggctcctacagagattttttctttatctctactagtgcaattgcagtttggaatgataggttccaaagctgtgtaccaaatgatttatggtgactggtaa

SEQ ID NO: 72452 - DNA, 789 bp, Oryza sativa
  Clone ID: PAT_MRT4530_72830C.1
cttctgctgttgtgctaccctccaaagctggagtcctagctaggcagacggcagcaagcctgtcccgcgcgccctcgagctgtgatcctcacgcaacacgcgcacggcgtaggtagcgcggctagccctgcacgcgtgggcatggacgtggaggcgaccaaggacgtggtccacgagcaggcggcggcgccggggcgcggcagggcggcgcgatggctcctcgtggcgctcaactgcgggatgctggtggtgggcaccacgggcgggccgatccttagccggctctacttcagcaagggcggccacaggaagtggctctcggcgtggctcgagaccgccgggtggccgctgctgctggtgcccgtgtcggcgtcctaccacagccgccgcgcgcgcgaccgcggcgcgccgctgttcctcacgccgcggcgcgtgctgctggcgggcgcggtgctcggcgtcctcaccggcgccgacgacttcgtctacgcctacggcctcgcctacctgccggtgtccacctccgccatcctcatctccacgcagctcgcgttcaccgtcttcttcgcgtgcctcatcgtgcggcagcggctcaccgcggcgacgctgaacgccgtggcgctgctcactatcggcgccgtcgtgctgggcctccacgcgtccaaggaccgacccgccggggtgaccaccgggaagtactggatgggcttcttcctcaccctcggcgccgccgcgctgtacgggctcatcctgccgctcgtcgagctcgcgtacaagcacgccgcgggc

SEQ ID NO: 72453 - DNA, 366 bp, Oryza sativa
  Clone ID: PAT_MRT4530_72831C.1
atggccctaattaataggaaagttgtattgatggataggttggtgaggggtattaaatggataattttttttgatttgccaatggatggtgttgctcccagtgttcatggaggagagcctgtggagtgggccagtggcgagcacggtggctacgctgtcgtcaccaagctcgccgtggaccctctcgagctccatgggttccagctcttcgaatgtgctgatcaccacgccattggagttcctcaccgtttcggcgatccgagcaagcacttcgaaaaccagttcatcacggtgctgaaaaggtcccttactcgcagtggtggtagctccttcactggttcgtataattgtgattctggttcataa

SEQ ID NO: 72454 - DNA, 3217 bp, Oryza sativa
  Clone ID: PAT_MRT4530_72832C.1
ggttttagtagtacatgaaatgaatgaatcaaggcgcactcaatctgagaagagaatgaatgtactttcggtggtcaatctcaaccaaagactcgactactcaactcatcaactgtacagcttccagttctcatctctcagagagtcaatcacattcacacgcacacacttgttgctctactgaagtagtagtaccgttacaataccaaccagttcacagctccatccatacacagggcaaaactgatgatccctctcataattttagtggaggtgatgccttgcctggcagagcctttcattcatcattacactcacaggtcacaaactttggctccctgatagtcaaataaatacttagcaaaactgggaattccctagtttatcattacagcttcttgtgccctccagttagtgattaggtttgctccaaggtcgtacggcaagttgagttcgcggtgccgacagaattgctttcttggtctggggagcttgatggacttgcatctttagtgtccaagctgatgagcgacctatttctcccagccctagaccggacattgttccccacaggaaaaggctcctgatctcctgcatttggaccatctttgtggaaaagcataggtcgacaccatttgtcttcattcatcaggctagaattctgaaaatgagcaatcaaagcactccttccttgaatccgggcgtatgcgagcgacgccaccttttcactattgaatttctcccatttcttgccattaaatgtcttatagaatgggattatgtgctgcggatcagtcatattgataaaagcataccccacattacatttgttctgagaaaagtgaacattgcaaaagtcagtcctgaaattgtactcacagttgcaatcttttacactaagaaaaaaaaagtagaccttaaaatcaattgggagatagatgaaatcgtaggttccacggtggttctcatcaatgacagccaaaagcagcttacagttgtacttgtttggtatgttcttgatcatcagggtggtgcgtgaatcttcaccctttgctatgcgatcaatgtcaagctcaaattgccgtttgttttcagactgtgcaggatttccatcatgtctgcgactcctcatccgatcattagtagcatcgtatgaagtggaaacatggatcataggattccgaccattgattgcattgcacatttgctgaagggattgaaatccaccgccaactggggagaacaaggcctccctaaaatttcctctgctggatgcaaaggcagataattctgatggatataactgagggctaccatgcaaacctatgcttccgagagatcctggatgaaaagagtgcacatttccaaaactgcctccattgtcaggagctgaacccaagtgatgcaggataactatgcacgtgcattgggtgctgcaagttcgaccacagtattggagctgagggactttgtggaaaaacatttgtgtggttccaggtgtagtgatatccatgaagggggcaacttccaatttcagtaaagccaaatgtgtcatggacttagagttattacaaatgcggttgtgatgctctggcaatgagcgtgggtggagggtttgtattccacgtccaaagtttccttgaccaagaggtccactaagatcgccaacagaggcttgattattgtgctgaagtgtagatttaattctgataggtgaagataaaatttgaggaccagtcgtagagatgcactgggttgggctctccaattgttggttaactggagaaaataaattatgaacagtgctgttgtcctgacatttggtgcccaactttccaatggtcccaggtgaagagtttttaggttggtgaggcaaactgtcttgcttccattctctagaatgttgctgcctcaagcaagatcctgcctctccatgttggctaagttcaaccttgaactttgggcctgaaattccacccttattaaggtcatgtagtgcttcttctgctgctctaacatcatagaactctacaaacttcttggtgcagcttataggagagctggaaatctcctttacatcaccataaacactgagcatttggagaagatcatcattggagatggaagaatcaatgttagataccaccaacattcccttatcaatatccttgcctggaacattttccttaggaaaagaaaattgcacatcaagtttcatcagccccagaggcttgctatgcagcgctctcattgcattttgggctgctcttatgtcataataagaaacagttacaaacccatggtgcttgaaggaggtatagagcatgcgaatgtccccgtattgctgaaacagaaccgtcagatcagaatcctcgatgttagcagtaatatttctgactacaagagttcgggaaggttgtttattgatggagtgtcctgaagaaatttggctcttgaaggatccatcctgaactttgtcaccttttacggaatcattgttttcaagttccattcctcctccagtgcagaatatatcttcatcggcatcatcctggttggtcgacatgccagtaaattcaaatccatcggcaatacctgatattaaatcatcatcatcatcaggaaggagatctccaatagtttgagcttctatcgcttccatggactctagaggttcatcactgtcgtagatggaggtatgtgtcccagtagattgacaaagaacaccacttactatttctctcgatttgccactgaatacttcagagagggagctggatgaaagtcccttcccataaccaggcacatgttgatcagcagtagttggttcaacaaaagctgtttctcttgtagacaagccaagcctcgatatggggtttgtgaggatctcaccccaagaaagtgacggtgaacctgaagcattttcttgccgcatcaaattgctgaggctaaggatgtccaggcccttgaaggcttgacctcctggagtttccggatctcctgcatgatttgctccattgggttggatcttttcaagtggagaagcaaaaactgacttgctccctttgtgatccaccattgactctgaattccaaaatccaacttgcctctctgtagggacaaggtcctgagagaagaatgaagatgaggagtcgtctgaagttggggtgaatggcgacaggtgcctcctgtcaatggctccagaagctatcaccat

SEQ ID NO: 72455 - DNA, 156 bp, Oryza sativa
  Clone ID: PAT_MRT4530_72833C.1
atggttgacacgagccttggctactggtgcggaggagttgttctaggcagggacgaccttcgcgcggcgaggcttcggacacttgctattgctgcgacggagttgccaccggacgtggagcttggttgcggttgttgttgcccgcgttgttgttga

SEQ ID NO: 72456 - DNA, 1111 bp, Oryza sativa
  Clone ID: PAT_MRT4530_72834C.1
ggtggttctcatcaatgacagccaaaagcagcttacagttgtacttgtttggtatgttcttgatcatcagggtggtgcgtgaatcttcaccctttgctatgcgatcaatgtcaagctcaaattgccgtttgttttcagactgtgcaggatttccatcatgtctgcgactcctcatccgatcattagtagcatcgtatgaagtggaaacatggatcataggattccgaccattgattgcattgcacatttgctgaagggattgaaatccccgccaactggggagaacaaggcctccctaaaattcctctgctggatgcaaaggcagataattctgatggatataactgagggctaccatgcaaacctatgcttccgagagatcctggatgaaaagagtgcacatttccaaaactgcctccattgtcaggagctgaacccaagtgatgctggtccatgggataagaacctgtgttcagcatgtgaggcggcacaccaggataactatgcacgtgcattgggtgctgcaagttcgaccacagtattggagctgagggactttgtggaaaaacatttgtgtggttccaggtgtagtgatatccatgaagggggcaacttccaatttcagtaaagccaaatgcttcattattttgatcaaaagaatgaccgcaaaaaccagcagggcccactttttggatattgtgatccactccgtcttgtctagagctagcattcctaccacttactgtcatggacttagagttattacaaatgcggttgtgatgctctggcaatgagcgtgggtggagggtttgtattccacgtccaaagtttccttgaccaagaggtccactaagatcgccaacagaggcttgattattgtgctgaagtgtagatttaattctgataggtgaagataaaatttgaggaccagtcgtagagatgcactgggttgggctctccaattgttggttaactggagaaaataaattatgaacagtgctgttgtcctgacatttggtgcccaactttccaatggtcccaggtgaagagtttttaggttggtgaggcaaactgtcttgcttccattctctagaatgttgctgccacaagc

SEQ ID NO: 72457 - DNA, 428 bp, Oryza sativa
  Clone ID: PAT_MRT4530_72835C.1
tccctgttactactgcattttgccattaatcttctctctccctttccagctcctgcaacctcttcatttctttgctgctgctgcttcaggaagttgatgaaaaggggccaaaagtttgagagattgaggcggtgaagaaaccacaaaaacaggaatcccaaagtgacccaaggcaggaaaaaaaagggctcttccattgcacctatggtgatagcttctggagccattgacaggaggcacctgtcgccattcaccccaacttcagacgactcctcatcttcattcttctctcaggaccttgtccctacagagaggcaagttggattttggaattcagagtcaatggtggatcacaaagggagcaagtcagtttttgcttctccacttgacaagatccaacccaatggagcaaatcatgcaggagatcc

SEQ ID NO: 72458 - DNA, 270 bp, Oryza sativa
  Clone ID: PAT_MRT4530_72836C.1
aaaaaaatatttttatagaaacaggaagttaaagttgggttttggagaccgggtcgttgtaaaaaacgatttcagtttggggggggtacatccagttaagcaaagctggccttgttgttggatttacaacggggtaagcaaaaaaggccatccgacgcctggtcgggcagaagagcaaaacaaaacagagactatttccggccgttacgttgggacttttaagatttcttctttttctggggtttgtttttggagctggggccggagttg

SEQ ID NO: 72459 - DNA, 414 bp, Oryza sativa
  Clone ID: PAT_MRT4530_72837C.1
aacaccagtttttttgttttaaaaacatttaatttttcattttttgttttgatcactatttcgttgcatgcaaaacagaaacggggtgatcctattagttttgagggaagccagttaagcttagttttggccggggggaaaaatgttgcattgttggggtttaacccggcacattgacgggagttgcgccgggtattgccttgccttggtaagcctaacgcgggtaatccccggttgttgttgttgtttgccgtagtagccttttttcgacgacccttcgccgtagtacccttgtttcgacgacgaccctttggcgccgtagtatttcgacgacaacaacaaccagctttgtttcaggggcatgggaatgctttcctcgtagctcctcaccatccgggggatgggggggcaagg

SEQ ID NO: 72460 - DNA, 738 bp, Oryza sativa
  Clone ID: PAT_MRT4530_72838C.1
atggctagtcctcgacagggagaaggcggatccggtggaggtggtcctgtaggcggcggcggcggcctgggcatcaaggcagaagacctcctcgacggcggcggctacaaccctaggggcggcggtagcctgggcaccggtgcaaggttctcaacgatgaggaggcggatcccatcaggtgtggaaggcctcggagtccgggtggaagaggatttcctcagtggcagcggcggccctaggggtagcggcgggctagaaatctgggagacggagaaggatatagtcgaaggtggcagccctatggcctatgggtggcagaggcctaggaatccgacgaagcggaagcagatcctgtcagcttgcgtctggtcggctagttctgattggatgatgacgaatgaaggagaggatgtcgagaagcagggttgtgctgaggtctccaatcaacaatttttcgtcaaggcaacacagctcaagcgcgcctccgtagcatgccccgcgtcaaggccgatgagctccaccgcaagtggcacatcctcatggatagggacgacatgccgctgcccgcttgggacttgcgacctccgtctgcacccaagcccatgctgtgcaaagctctacaagaagggcatcatccagccctctcccatctgcacacacgtgccggcggaggccgagaaggagggcaccgtggcgaaggctgaggagttcggctcggtagggaaggttgtctcatga

SEQ ID NO: 72461 - DNA, 1544 bp, Oryza sativa
  Clone ID: PAT_MRT4530_72839C.1
catatgcctcgaagtttagcccatccccgatcgccgcaccatcatggtccaagaattcttgctcatatcgccgtgcaacgtctgaagaggtgttcaatccggacgaacaagatgcagcagagccggcaggacgtggacgagcatgtcgccgagctccgcggcgagctgcgcaaggcgcgcgaggagcgagaccgcgcgtaccgcgtcctggaggtgagcgagtggaaggcgctggcgtcggccaacgaccgcaccaccatagagacgctcgaggcggagctcgacgcgtccagggagtccgagaagcggatgctcgagtccctggcgatgcagacgaagcagctcgagatgaccaagatcgagctcgaggaggccaggctggagaacgcgtcgctgcgtgagaccatccagaggctcgaggccatagcggtgcccgtcgcgacgacgccgagaggaaggtacgatcgcgactaccagagggttcacggcgagctgcggatggcgctggtggcggaggacaagaacaagaaggcgatggaggagctggtgctggcactcaaggaggtgaacggggagctgcacacgacgcggcagctgctggcgcggtcgcagcacgaggccgagacggcgcggctggagtcggaccggctgcacgtctcgctcaagcgcaaggacgacaagctccgcgcgctgtcggaggagtccaccgagtccgagctcgccgagacgcggcgcgagaacgcgcgcctcctggagtcgcagcggtccgggcgggacgagatcgccaagctgcgcgacatcctgaggcaggccgtcaaggacaccaaggtcgtgaaggaggcgctggaggaggcgaggggcgagaacgccgcgctcaaggagatgctcggcgacaaggacaccgccatcaagtgcaccaagcaggagctcgagtgcctccgggtgacggaggcggcggcgcgcgacagcgtcaaggagctgcagagcctgctcgtcgccacgtcgtcgagccccacggccgccggcatgaagctatccgcgtcgccgagccccacagcttccgggataaagctggacatggaggattcctcgtcgtcgcacgggtcgagagaactgcacgggctgatcaagtgccactcggaggcgagggtgaagccgccggcggggctcaccctaccgcggcggaggtcggataacttcgaaggatcggtgtacgacatattcgggtcgatggaagatcagaagagcgagctaagcgcgttctcgacaatgccgaggtcgttgcccgcacggcggcgggtgatgatgcgcaaggttggcagcttgttccggtttaagagcttcagtatcaagtagtagctgctactgccgagattcggggcctgtcttctcttctcactacctgtttgggcgtgtcagttttgattgatcggtgctttctgtgtactactactgggtttaccttcctttcgcctgatcatatcatcagatcatgagctggtaaagtgtatacgagtacatcatttcataaaaaaaaaaaaaaa

SEQ ID NO: 72462 - DNA, 1270 bp, Oryza sativa
  Clone ID: PAT_MRT4530_7283C.1
actattcgaatagccatactcatggaattgagtaccgggactcatatggtaccccggatagaaatttaaagtctactgaagaaccagctatattgtatgtatcaatatttattgatccagggattgatacattaatcttagtcggatccaagtaattagttttgggacccgacaaggcagggcaccgccgccgcccaccgcctcccatcaccgccgccgaagcccgtcgcccgccgcctctcctccctccggatccggcagaggggagggcatcgctaccacccatctcgccgcccgaccgccgccgcctcgccagcggcccccctaaccagcctcgcctcctacctctctgtcactcgccgccggcctccccgcctccttccctggccccacctactccatctccatgcgcgctcactgccggcctccccggtcgatcctcaacgggcacgcctcctccctctccgtctctcaccgccggcctccccacccccctcactagctcaccccctcctctccgtgagcgctcactgccgacctcccccgacccttctcctgcgttgccgcctcctcctctactcctgcgctgccgtcgtcggcgtgttgcccgttgccggtggccgatgccctcctccgcgcatgtgacgcctcccctttcccacgttgccgtcgccgctgcatcgcctgtcgctagccgccgccaccctcctcctctagccgccgccaccctcctcctctcccaccttgccctgccaccctcctccaccagaacctcctccataaccacctccaccaccatagccactgccaccgccatatccaccaccgtagccaccgccgtatccaccgccgtaaccgctaccaccaccatagccagggctaccatatccgccgccatatcctgggctaccatatccaccaccatatccgggtccagagcccccaccaccatagccagggccataaccgctaccatacccaggctggccataaccgccaccatatccaggctgtccgtaaccgccaccatacccgggttgactataccctccaccgtgttcgtatcctccaccatgcatgtatccacctccccaattgttttgttcaacctcaggtttcacattctttcccttggattcatgggcttcagtgagctccctagcagcaactacatcctgggagacgaggaggagggaggcaaggaggacaccaaacagaattagagacttagcagccattgcttagtttttgttgatgagtttatttgtaa

SEQ ID NO: 72463 - DNA, 475 bp, Oryza sativa
  Clone ID: PAT_MRT4530_72840C.1
cgcccactcctccctttctcatccccctccttgatttctcccctctctctgtcatttctctcttcctctccccctctctttctttcaccacgagcgggagcggcgggccgatgacgaggaggccccgggccgatctggctggcgctctccccggccttcctctacggcgacagtggcgacgaaaatgtggtggggcacgacagcggcgtcgacgacgaggtggcgcgtgatggctgcggcagatccagcggcggccaccccacgcgcggatccggcggcgcgacggcggcggcggccaccccccgcgctgatccagaggcggctagcccacgcgcggatctggaggtgtgacagcggcggcggcggccagcccacacgtggatccggaggcgcgacggcggctaaggccgcccccagcatggatccggcggggcgattgcggcggcggctagcccacgcgcagatccggatgcgc

SEQ ID NO: 72464 - DNA, 332 bp, Oryza sativa
  unsure (1)..(332): unsure at all n locations
  Clone ID: PAT_MRT4530_72841C.1
attgggccttttggcgcacaacgatcatgtatgcaggttctatcctttagttctaggaaaaagtacaccgaaggtccctcaacttatcatcaagttacaaaatcgtccctcaatcacaacatgctcggttttcaccccggttttgtctgacatgacggctgatcgtagtacccacgtgtaagatgccacctcatcacctctctcttatttcccctcttcgatctttctcgcgctctctctttactcaggccggcgacgggcggcgctgtggggaggaggccgccgtggggagaggaggaggtacggcggtctttttangaaacaccttctgt

SEQ ID NO: 72465 - DNA, 1163 bp, Oryza sativa
  Clone ID: PAT_MRT4530_72842C.1
tgacactatagaagagctatgacgtcgcatgcacgcgtcgtaagctggatcctctagagcggcggtcgcgatctagaaccggacgcgtgggttttttttttttttttcaggggtgaatagatgtgtctgtgtatttatcatacatctgttcactttaagccaatattcgagcctttgccctgttacatcaaatgcattcttcacttaaataaataggtatgaataaggttacacaaaaaatttttttttttttttttttttttttaaaactgcaaaagttcacccttaagaagagggatatatatatagcattggttctgcacttctgcatgctaaagtactccacatgatacagcaggctggctttccatccataaggttacaaatgggcaggattgccgtttctgttataaaccaaaggagttgcaagttagagtaaagcatttatagtcgcatcatgcatacagtttcagtacaagatacaacacacagcgaactggcaatagattgcttttttgtaaatcttagcactccaatgcagcttgagcttgattagttccaggtgttgacagacggtcctgtgactggttgctcatctagggcacggcgcaactcctcagagaagttcatctgatgaggaagtttcatgtgaccatgaccccatgatgatccactagatccagagtacatcaccggcttatcaggggaatcatatgactgatcattgtacaagttcattgctgcagcccaacggtcattgagaagctgggcagcctcactggcacaacatccctccaagggtattaatcttgtttgactgtaatcattctgaggattgctgaaaaaagtctcatgagggataattggtggaaggttctttaatgaaggagcatggctcttctctccatcattattgtacaaataactagccttctcagccctatctccagacttgcgtcgattgttagcacggttcctgtgcacgggaggggtgtatctcttgatgccgtccgggttgccgtccgccatcgcagctcagcgcaggggagggaggaaggatggggggggcctcctcctcctcctgccaccctcttccttcctttctcctcccgacgagagagagatgcagagaagagagcccggccggcgccccggcctcgtgc

SEQ ID NO: 72466 - DNA, 557 bp, Oryza sativa
  unsure (1)..(557): unsure at all n locations
  Clone ID: PAT_MRT4530_72843C.1
gagaggccaggccacttgtaattttgtagttgttttctcgtaagttgtaaggtcagatatccttttgtctaaaatttaattttaggtttgtaggagaagctattcgaggaggcgaggacacacttggagctgcctctagctctgtcctcaagatttataaggtgatcctaagctcttcggaagcgtcatgcatgcaaggtatatatatccactgttgtgagaattatatataccactgatgtacacggttttgagcttgtttgactctctcgtgcttagtgggtttgggcctttgttttatatatttgttatgcaggtcgtcaaggggtcctatgatttgtaggtttaagttgggaatgagattaatataacatagagctgttcctacttgcttcgtaggaatagaattgcccaatcccttttttggggcttcggccaatcagatatctaggattgtagcttttcattgttttccacataatatgcttgtgaactatactgctgatgaagaagcctcntggtatgatggtttaatcgactttaaaaaaaaaaaaaaa

SEQ ID NO: 72467 - DNA, 213 bp, Oryza sativa
  Clone ID: PAT_MRT4530_72844C.1
atggcgtgggcggtgcgtggcttcctcgggcttgtaggctactaccgtcacttcatctacaactttggctccatcgccacgcaactcacaacactactccgcaaggaagcccaaatggccaccctagtgcttcaactaccagacttcaacatggacttcatcgtcgagagagacttcgagaacatacatgggccctgtgctccaggaaggtag

SEQ ID NO: 72468 - DNA, 945 bp, Oryza sativa
  Clone ID: PAT_MRT4530_72845C.1
atggtaacgagcttggtggcagggatctgccaggaaagggagctcggaggcctgtacagtaaccagagtggaaaggggctagaggatgtccgagctcttgtattggcggcgatcgggcggtcggcacaggtgataggaaacgccgacgtgggggctcaggggccgacgggagccgccgccgtcgccattgcgtcgctcgggccgaggggacgagccgctgaggggagcgtcgccggggacaggaaacgcggacgcgggggctcagcggccgatgggagcagctgccgccgccgtcgtcatcgcgtcgcttgggccgaggggacgagccgtcgaggggagcgccgccggggacaacggaagagcggagccagcggcaacactacacagaaacctaatgttaggggcatggaagggatcaacggtaaaactgagaggtatagaagggagcgtgcaaaattggaggagctaggcctagagatccaagcccgacagatccaagtccgacctgattccgcgcccttgcatggtgagaataatggcaatggttttggttgtgagtcagaaacaatggccaggctggcactatgtgagtcagctctctgccgaacaaagacgaagctacgggaaaatataattctcagcaatgacgccgaaatcctcttgcttgagaatgacagttgtgacggttggaaaggtcggtattacccaccaactgccattggggaatcatctcagccgtccaggagaaacctggatcgaacgacgctgcggatggttcggccgaacccaatggttcagccgaaccatgggtagggccggcctggcccaaaatcggtaggtggcctcctccgttgctctctttcgcagacttatgaattctggcccaattcatcgcgtcaattttgagttcttggcccattcatacataagtttgattctcgacat

SEQ ID NO: 72469 - DNA, 774 bp, Oryza sativa
  Clone ID: PAT_MRT4530_72846C.1
atgctgatgacgaccacgacaacgcgcgacgatggcggttgcggcaactgcggtgtggcggtgactgcgccttcgctgcgtggggcggcagtggcggagggtgaggacgacgacgaggaggcggcggcggaaggtctcaagatcaagatcctggcgcacggtggcgacggcggtggctttgacggcggcagtggcatggcggtggtgctacgtgcaggtgacagctgcgtcggcatggtgacggcgaatgcggcagcggcaatgacgacggcacgaagacagacagcggtggtggccggccggacgagatcgagagagtttggagagggaggagaggtcgcgatggggatccgccgcgcatccaggaaggcgcggtgctcgggacggggtgcagctgctgctgcggctcccgctgctgatgtactcgatcttgccataagagagcaagtggtgggcgagctacgggcgggaggatgtgccatcggcaagcgacctgatgcggatgtggagatgttgcagtcaccgatctctgaaaaaagtgcgcacacactggcagtggcggatggaaaggcatcaaacaccaacgacgatgatgtagcaaaaatggacgagattgttccacaacctcaacctccacaaataagccgcacgctccaccctcttgataacgaagccaagcccaagggttccgccatccgctggagaagagggcatcacgacaacggcgccgataagaatagatccaaatcaatcctctcttctctgcgtgtgtga

SEQ ID NO: 72470 - DNA, 432 bp, Oryza sativa
  Clone ID: PAT_MRT4530_72847C.1
ctcgatctcacctcacctgtgcgtagagactagagagaggagaggagacggatggacttgcgctgcacataaccaactggttcttgcttccacgcttgctccactccccactccccgtggagtcgcgcggtttccccccgcttccacgcaatttttttttctttaatgagattagtataatctgcttgattcgtccaagactatcgggagcttgcgcttattagcttcttcttttcattccgatttggtggggtttgagtttgattgattctttccccccacgtttccttgttcttgatgtgtatcgattcgagggtgagatcaaagtatcaaaccatacgattcttggggtatttgggttgttttagcttctgatgatttcttgatctggaagcttgcgcgatctcacaatcccgaatcttttagctcgga

SEQ ID NO: 72471 - DNA, 129 bp, Oryza sativa
  Clone ID: PAT_MRT4530_72848C.1
tcagttcgtggtgttgctgctacccttttgtcgccggagcagcctttgcttcccggtggtgtatcctgtattgcttccctgttgtttgctgttgttcctgctgcaaaattgatgatggtcaatgctcat

SEQ ID NO: 72472 - DNA, 213 bp, Oryza sativa
  Clone ID: PAT_MRT4530_72849C.1
atgcacgtggaggtgaaggttttcatttggcatacagatggtgttgtgtacgtatggaaagatgagtcaaatttggatttggagtccaagtttggaacgattgaagtgcggagttatcccgatggtttgaccggaggcaagcggtcagtccgacagcggcaagtaggagcagataggaaggcgtggtccgaccggccaaccaacaccagttag

SEQ ID NO: 72473 - DNA, 2666 bp, Oryza sativa
  unsure (1)..(2666): unsure at all n locations
  Clone ID: PAT_MRT4530_7284C.1
agacacgaccaaacccctcgtctcgtctcgtcgcctcgcctcgcgagttcgcccgccgcctgcgccgagcagccgccgatctccgccacgcgagcagcggcgccggcgtcctgctacttccgccgcgtcctcgccgaaggaaggatgagtaggcgctggagcaggacaatttatgtcgggaacctcccgggcgacatcagggagagggaggtagaggatctgttctacaagtatggacgcattgttgatattgacttgaagatccccccaaggccgcctggttttgcttttgttgagttcgaagatccccgtgatgctgaagatgcaatccgtggacgggatggctataattttgatgggaaccgtttgagggtggaacttgcacatgggtgggagaggtaactcttcctcctnttaacaattctgggggagggggacgtccgtggggggtgtatctaggcatacgnagtatcgcgttctggttactggaccaccttcttcagcatcatggcaagacctaaaggaccatatgcgaattgctgggtgatgtttgttactctgaaagttttcccgttgaggttggtggtactataggaattgtagactacacaaactatgatgacatgaagtatgctatcaggaaacttgatgattctgaatttaagaatgctttctcaaggcctatataagggtgaaggagtatgatggaaagcgcagccgttcatactcacgaagccgaagccgaagtcgaggtcgcagctacagcagaagcaggagtccaagcaagtctcccaagggaaagtcatcacgccgttcagcatctagatctcgatcgagatcagcttcttcccgttcaagatcagagtcaaaggggcgctctccatcaagatcaccagcaagatctcagtctccaaatacttctcctgccaatggtgatgcagcaagccccaagaaacgcagcccaagcaggagcccccccaagaaacgtagcccaagcaggagcccatcacgttcccgatctcctgatgccaagtccgaatgatgctgatgtgcttctggggacggagtgtcgaggaatcatggtcctgaaacgttttgacatctgtcgccctcgactacttctgaatcgcttccaaagtactatttcatacgttcagtgctctttcagattactggatgatactgtacgcctatttatagatttgaacttgggatttgtcttttgttcattttgacactgtacttgacttaggtatattattgtggtactggtaagaaagttgaacagagtcattccgtcgtttgtttgcttaatgcacttcctagctcaagttgcaggtaataaatacatttatattcaaaaaaaaaaaaaaaaaaggggcggccgcccttttttttttttttttttacaacaaaaagatatgaatataggaaaacaatgtaattctttactgcccagtggaaatttttcaccgaggaacagaattcatcaaatgtgagtataatgtaagctccaatgtttgctcacaggtgaagtgaaaaatgcaaaacgtatcctgactgttgcatcttattacaatctcaaggcctagaaaacaaacttcatattcatggtaaaatcacgacactgaaccagtttctctcgtctaagtggacttaacgatgaagttttggcggctgatggggttcatgatgactggtggtccagcggtgcgaggccaggcctggaacttggtgtcagtggcttgccaccactccttgtcagagacagtctttggaatggaacctccaaatgccttcttgtcagaaacaaatgtgtcacacaggtaagcaatggcgaaggatccaaccaaggacccagcaatgtatccggccgtcatttttgcttggttcggatcggattccgccgccgccgccgccggagagagaagagaagagaggagaggagacgcgttcccctcgtgccgaattcggcacgagggagagagagaactagtctcgagtttttttttttttttttttgtagtagaagacgagcaccatacatcccctcagtgtcacatgcatatactgagaacacaattcaaatatatgttaatatgttacacaccacggttaggacaaaaggatatataaaaggatattaagtgcaatggctgttatgtcagcaataacaagtcatcacaaacacacgatgagagctgataacaggagaacaagtgcttcctttcccgaatcgtttgcatgcatacttacgcactcccatctattttagcactcaaagtcccaactgcactggacgcaataaatatcgctgcaacattaccgccccacattagcttatctcgaaactccccattgggcaccccccaagaagttaacagcctgttgagataatttctatcttcgctcttcagtttcctcacttcctccacatcttcaacaatctccctttgtgccatcgcctcaaattcatcaaatcgcctgatacttttgacctctcccggggaggaagatgaggaggataatctgctgctgcagaaagagcgggtgcggtgggggagaagcctctgcagggcgcggcggagcaacaaaggcggcgacatcgcgggcaccgtgttctgactctgagctagggtttcctcttcctccctctctctctctcc

SEQ ID NO: 72474 - DNA, 2051 bp, Oryza sativa
  Clone ID: PAT_MRT4530_72850C.1
atgaaggtcgacggcagcgccctcgccgggcgcgcgctggccgcggccggggcgcggcacatgttcggggtggtgggcatcccggtcacctccctcgcgtcccgcgccgcggccgccggtgtccgcttcctcgccttccgcaacgagcagtccgcgggctacgccgccgccgcctacggcttcctcaccggctcccccggcctgctcctcaccgtctccggccccggctgcgtccacggcctcgcgggcctctcccacgccaccgccaacgcctggccgctcctcatggtctccggctcctgctcccagccagacgccggcaggggcgacttccaggagctcgaccagatcgccgccaccaagcctttcatcaagatcgccgtcaaggcaaccaccatcgccgacatccctcgcctcgtcttccaggccctcgccgccaccgtctccggccgccccggcggctgctacctcgacatcccatccgacgtcctccaccaaaccctcacggaatcggaggccgccgccctcatcgacgctgccgccgccgattcggccaaatccgattcttctccacccaagcacaagtccctggacgagggaatcgagaaggcggcggagctgctccgccgcgcggagcggcctctggttgtgtttgggaagggcgcggcgtattctcgcgctgaggacgccatctggaagctggtggataccacgggcatccccttcctcccgacgccgatgggaaagggtgttgtgcccgacacgcacccactgtcggccaccgcggcgcgctctctcgccattgggcaatgtgatgtggcattagtcgttggtgctcggcttaattggttgcttcacttcggtgagccacccaaatggtccaaagatgtgaaattcatacttgtggatgtctgcgaggaggagattgagctccggaagccgcatgttggaattgttggggatgccaagagagttgtggagcttatcaatagggagatcaaggaccagccattctgcttggcaccatcacacccatgggttgaagcaatcaccaagaaggccagggacaatgttcttaagatggaggctcagcttgccaaggatgttgtgccattcaatttcctgacacctttgcggattatccgggatgctatacttgctgagggaaaccctgctcctgtagtggtctcagaaggggcaaacaccatggatgtcggcagggcagtgcttgtgcagaacgagccgaggactagactggatgcagctgcagttgctgagcctgatcgacttgtggttgctgtggagggtgattctggatttggattcagtgcaatggaggttgagatgtacatggataaaagagttgaggatggtccaagctgtaagacattggtaaggtaccagctgcctgttgttgtaattgtcttcaacaataatggagtttatggcggtgatcggagaagccctgatgagataaccggaccgtacaaagatgatcctgccccaacctctttcgttccagctgctggttaccataaaatgatggaagcttttggaggaaaaggttatcttgttgagacaccagatgagctaaaatccgccctttcagagtcgtttcgtgccaggaagccagcggtgataaatgttatcattgatccttatgctggtgcagagagcggtagaatgcagcataagaactgaaggtgtttgtatcataccagaacgcaggtcccagttaataagcaatgtcctattgaaattaaaacggacacccatggaagaacatcttatatcactgtccctgaaataagaaagatcctgggtagtactccgtacttaatggcatgtgagatatcgaattcaagctgtctgttttgtaatgtaccgtacccgtgttaccgtgtacagtatactaaagaaaaaatgtttgtggttagtaattcactcatgatgtcgatgcatttataagtttgtacctgtatgactataaagtttatatacagtaaattgcgatgtgtctccattttgttgaaaaaaaaaaaaaaaaaaaa

SEQ ID NO: 72475 - DNA, 924 bp, Oryza sativa
  Clone ID: PAT_MRT4530_72851C.1
ttccttcacacccatgggttgaagcaatcaccaagaaggccagggacaatgttcttaagatggaggctcagcttgccaaggatgttgtgccattcaatttcctgacacctttgcggattatccgggatgctatacttgctgagggaaaccctgctcctgtagtggtctcagaaggggcaaacaccatggatgtcggcagggcagtgcttgtgcagaacgagccgaggactagactggatgcaggtacatgggggacaatgggagttggattgggattctgtgttgcagctgcagttgctgagcctgatcgacttgtggttgctgtggagggtgattctggatttggattcagtgcaatggaggttgagacattggtaaggtaccagctgcctgttgttgtaattgtcttcaacaataatggagtttatggcggtgatcggagaagccctgatgagataaccggaccgtacaaagatgatcctgccccaacctctttcgttccagctgctggttaccataaaatgatggaagcttttggaggaaaaggttatcttgttgagacaccagatgagctaaaatccgccctttcagagtcgtttcgtgccaggaagccagcggtgataaatgttatcattgatccttatgctggtgcagagagcggtagaatgcagcataagaactgaaggtgtttgtatcataccagaacgcaggtcccagttaataagcaatgtcctattgaaattaaaacggacacccatggaagaacatcttatatcactgtccctggaataagaaagatcctgggtagtactccgtacttaatggcatgtgagatatcgaattcaagctgtctgttttgtaatgtaccgtacccgtgttaccgtgtacagtatactaaagaaaaaatgtttgtggttagtaatg

SEQ ID NO: 72476 - DNA, 148 bp, Oryza sativa
  Clone ID: PAT_MRT4530_72852C.1
cgaaaacctggtcgccgatctcctgctcctactcgcgagatcttcgatgctcctttgtttttctgtctcttcggtccccgtgggggcggtgctctggatcctggcggcggacgagatggctgctaacaacgttcttatgatcgacggt

SEQ ID NO: 72477 - DNA, 296 bp, Oryza sativa
  Clone ID: PAT_MRT4530_72853C.1
tggcacgcacgatctgcgacgccggtttggctcaacgccaagccgccgtcgaccacgagtcccaccgccttgctatcccgcgcctcaccggatcgccggctcctacacaacgacctgctgcacactaccgcacgcatcctgacgaattcaccccaaacaccctgctcgactccgacatactcctccggcgctaccaagatttgcaaactagtacaagcgatcaccgcaaggcattagcattaggtgctgcgatcgtggttgtcaacttgtcacaaaaagttgccaccacccactag

SEQ ID NO: 72478 - DNA, 333 bp, Oryza sativa
  Clone ID: PAT_MRT4530_72854C.1
atgggatcccgtctggacaggatgataccaggtggggccaaccagaagcaacaagtcctctccctcatcatcagtgtcggggcagcattagatgaggctgtggaggagggggagggggagggagaggcggaggaggcggcacacgaccgcatggaggctcgacggccgtacgactgcaacgggggctccagcgtcgacgttgatgccattcgctctgcatctcgcctccttcttcgataccagctctacgccgccattgtagatgaatgcggcacttggcaggccacaggactactcaccttgtccggagataatcttaataggctggcttag

SEQ ID NO: 72479 - DNA, 404 bp, Oryza sativa
  Clone ID: PAT_MRT4530_72855C.1
tatgctgtatctgtcagtgttaaggataaggcataccctctgtcctacgacttacggaatataccaataaggtataccctcacgtatacggttggtttccggatatgccgttagaaatttacctcaaattatcggaaatatctctacgagttaaggaattgctgaaatcttactcggaatcttacttgagggtcaaggtatcccacggtataaaagggacccctagggataggctatgggcatcgcatctcatcgccaacacacccaccaaagtttacgaagccggagtccacagagccaactcaccaggagatctcgtcgaatccctcgactacgatctcatcgctgttccaacgtaccccaataccctattcctccggtctgcgagtatcactcgtcgacag

SEQ ID NO: 72480 - DNA, 394 bp, Oryza sativa
  unsure (1)..(394): unsure at all n locations
  Clone ID: PAT_MRT4530_72856C.1
tctaccgttccagcgtttcaattgcttgatcatttcctgcaacacttacccgttgtctttgaagtaaagcatnaccattgaagagatacccaatacgtgtgtgggggggggggccaatnncaatttttcttttttttttcctttcttttcttggtnaagaaccctcaatattccntgcccattgcccagtggatgtgtatccgctaatgccccacccgcactactcgagggagcanagcactgatgcctttaagaataattaggggagaagagctctttgcncttcactcctagatgtgggcaacagacctacctattttttttttatgagtcggagaacgaggcctcagagtgatgtactaatgaaatactatacgtgtatcaaaaaaaaata

SEQ ID NO: 72481 - DNA, 582 bp, Oryza sativa
  Clone ID: PAT_MRT4530_72857C.1
acaccccccccccccccccccccccccccccccccccccccccccccccctcttcttttttttttttttttttttttttttttttttttggggggggaattccccaaaaatataaaaccccttaaaaataaaaaaagcaaacaaatttttgggtccccaccctttttttaaaatttttttttaaaagggggaaaaaccccccccttttggggatcgggggaagaattttacaaaaaggggggggggggaacacaaaaaagggggggacccaggcaggaactaggggaaattttaaaggggaacaaactttcaaatggaggggggaacagggggtaaaaaaaaactggagcttggggggaaagggaagggccccggaacaacccggttaactttttttttgggggccttgagcgcgagggggggctccaactccccctccttgaaggggttgcccaaatccccgggaaagggggccccggcccacattttggggggggggctcgcctttttggctttggggtaaatgaaagggtgaaactcttgggggggcaaaacgggggggggggacccttccttgggggg

SEQ ID NO: 72482 - DNA, 354 bp, Oryza sativa
  Clone ID: PAT_MRT4530_72858C.1
atggaagttgcggtgcgagagattgctgctgtcgactggttcgggaaccagcgagcgagtagaatcatctctcgaataccaatggaagttgcgatgcgagagattgctgctgtcgactggttcgagaaccagcgagcgagtagaatcatctctcgaacaccaatggaagttgcgctcaatgacggttgtagatcggttgttaagtcgataaacactcctatcgtcattgggaacctgatagtgaggcaccacgtggaagtcggtggccgggagcaccaaggctgccaggccaccaccttcagccaccaacctttccttggtgaggctgaaaagtggccgttatggcggagttga

SEQ ID NO: 72483 - DNA, 400 bp, Oryza sativa
  unsure (1)..(400): unsure at all n locations
  Clone ID: PAT_MRT4530_72859C.1
attcggcacgagcaggagctccgggagangaaaatggnatcngcggangaagtgatncncgtnaggaaaganatcgtccatctccncggnganatggtgctgctcnanaattacagcgcgctcnactncnccggtgagccgcccccnctctgaatttttcncnctgaaatttgcagcagtttatataattttcngaatttttgttctatccntgccnggtgctatcncgttctgttttcctgaaatggcncttcccatganatnaacntggcnagttttacnttcntttttttttcnacngttgttcntaggacacntnggaattnaanctgttggggccngcctttgtgtngtttttgtccccacccaccctttttttgtgtgattttttttgtccnga

SEQ ID NO: 72484 - DNA, 444 bp, Oryza sativa
  unsure (1)..(444): unsure at all n locations
  Clone ID: PAT_MRT4530_7285C.1
annnntggtttttttttggaaattnnnnagggacgggggggggggccaagaatttcctaacgggaccctgatggaaaccaatctttttttttgtgaaggggttttaaagtgggggataattatgcccttacattttccctgggaaaaaaaatttcccgccaaaaatccaaaacaaaaaacgaccggaaaggaaaaaaaataaacccgggggggcttaacaaagaaccaacttaacataaatggattgggccccactacccgttttaaagaaaaaaaaaatgcccggcgagaggctttattaatttggccacccccggggggaggggttttttttattgagacgcccaggagttttttttttttaaaaaaaaaacggaaaaaaattttttgccttcccccccccgcccttaaaaaaaaaaaacaaaaattccctccctggttggc

SEQ ID NO: 72485 - DNA, 1215 bp, Oryza sativa
  Clone ID: PAT_MRT4530_72860C.1
atgagcgttttctgaggaagacgcctgggctgagaacccgaagaagcccgacgactccggaatcgggggctcgggcagtcgagctcaccgcgcgcgcgtgtcacagtgaagccgaggtagcagcataaggacactatgagctccacaagccgtgtgatcaatggtgatgggacagaagcggcactgttagagcagcggctgtccaagattggtgaagagagagcggcccaaggacaactctcaggaaaaggtgggctatgttgctcagctgatcgcgattgcgcggcacgtggtagcgaggacattggaagttaagaaggccacgaaaatgatggaagagaaccttgaaatggagttcagagtaataagccatataagatccgtaagaaggacaaggggcagatcagatatttggtatactgaatggacaatgcaattctgaatcttccgcatgaccagagtcagatggtttggctcattgattttgctggattctcattatctaacatatcacttcatgtgacaaagttgacagcagatgtcctacaaggtcactatcctgaaagattgggtgttgcaattctttacaatgctcctaagttttttgagtctttctggaagatcgcaagccccattcttgagccaaagactttcaacaaggtcaaatttgtatacccagataggcctgagactaacaagatcatggaagacctttttaacatggaagaattagaatctgcatttggtggcaaaaaccaggctacttttaacataaatgattatgctgcaaggatgagagaagatgacatcaagatgccattgttctggagtcctgaaaattctgctcttgcttcagagccatatgtgatggtgaacaaggacatggcacaagaaggtagttcaggtttgaagagtgaagagactgcatctgaaaagagggaagaaacagatactgaatctgaaaacagggaagaaacagagagtgaatctgagagggcagaaatagactctgtatctgggaagagggaagaaacagtggctgtatctgacaagagagaagaaaaagagactgaatctgaaaatgggaaagccgcagtgacttcatcaaacggagttgagctgacaagcttgccaggcgaaggtaaagtcggcaccaccatcccaaccttcgtgacctcatttgagaaccctttcgcaacaatatctgccagatga

SEQ ID NO: 72486 - DNA, 487 bp, Oryza sativa
  Clone ID: PAT_MRT4530_72861C.1
gcgtcttgttccaaccatggcgacgaggccggcgcggttgtctgctcccgcagtggcggctatacttgtcgccgccttagccttgtgcgcagccacggcgtcggcggcgaacgtcacgacgacgacggcgacggcgccgagcggcgggtgctacagccacctgttcaccttcggcaactcgctgatcgacaccggcaacttcatccactactccacctcgccgggccccgtcgcccgctccccctacggtgagaccttcttacgccgccccaccggccgctggtccgacgggcgactcatcgtcgacttcatcgtggagaggctggggttcccgtactggacgccgtacttggccgggaagagcagggaggactttcggtacggcgccaacttcgcggtggcgagcgggacggcgctgaccagctgctgttcaagcgaagcaccttagcgtcgccggcattacgccctacttccttggcggtcaggt

SEQ ID NO: 72487 - DNA, 126 bp, Oryza sativa
  Clone ID: PAT_MRT4530_72862C.1
cagagaaagagaacatgtagaagcttaaatgatctcgtgtgagctttagagatttgaccaacaccatagtgacgccaaacaagaagcaatgagaacatggggacataaccatgaccgatcttacac

SEQ ID NO: 72488 - DNA, 660 bp, Oryza sativa
  Clone ID: PAT_MRT4530_72863C.1
cccacgcgtccgaaaagagggaagaaacagatactgaatctgaaaacagggaagaaacagagagtgaatctgagagggcagaaatagactctgtatctgggaagagggaagaaacagtggctgtatctgacaagagagaagaaaaagagactgaatctgaaaatgggaaagccgcagtgacttcatcaaacggagttgagctgacaagcttgccaggcgaaggtaaaggtataaccccggcagattgaagtgtctgttcatcgtctgatccatgaataccaccatgaaaaatgcaagccaactgttgatatgaactccaacacagtgaattctcagctctcaccaagagatgaacaccaaatgttaactagaaacgctttaacacacagcaggaatgtgttgcctgacttgttttgtagtcggcaccaccatcccaaccttcgtgacctcatttgagaaccctttcgcaacaatatctgccagatgataaataacagcacgacactttgttgcactcagtttcctcctgtcatttctctcgagggtttattcacttactgcctgctatatcttgcaatccttttttttttcgaatcggagaaatgttttctgctttctttgaacatcattgcaatagaaaactgtttactgctttctttg

SEQ ID NO: 72489 - DNA, 596 bp, Oryza sativa
  Clone ID: PAT_MRT4530_72864C.1
gaccaacatgagcaacccttattaacccggattttccaactccatattaccaacaatagagaaccatattttttccaccaacttggttttaaccctttcacaaattaaatttgatcgcaggtttcagcacacaagtaggagtatagtaggaacattgcaggttgagaaagcaatggggcacaaagggtacaaaagtgcctgacccagcataggtgctacagctaaacataactgggaaaaaaaagtagttcagatcttctgggtgttgcattcctccagctccttcctcagctgaagcgagaagtcgtcattgacgtcgtcatcatcccaatcatcctcccattgctggatggcctcatcaccatcctccttgtcatcccattcttggtcgatctcaaactcctcgaactcgtcgtcgtcctcgaggaggtccatcttggccgcctccgccttcgcgtccgccggcgccgccgccgccatcaccctctgccgctgctgctacacctgaatcgcgtcgcgcgcgggtggaaaccctagatttttggaggcggtttgttcttcttcgggtgcgaagtgcggtggcggcttggataagt

SEQ ID NO: 72490 - DNA, 2046 bp, Oryza sativa
  Clone ID: PAT_MRT4530_72865C.1
atgccgtcattacaaacggcggcggcggaggcggtcgtggatgaagcggtggtcgctggcaagggcggcgccatgccaacctccacccaagatttactatttcgaccttgccccaccaccaccctgttgactctcctcagagacacgtcggagaagcgcgctgcggcggcggagcagaagatggagtggctccggtcgcagctcgtcggcaaggacgtcgagtttgacacgccgttcggccgccacctcctcacctacgccgaccacacggcgtccggccggagcctccgctacatcgaggactacctcctcaacgaggtcctccccttctacgggaacacgcacacggaggacagccatgtcgggaggaagatgacgcggctgatgcacagggcggcgcggtacgtgaagcggtgcatgggcggcggcgccggcgacgcgctgctgttctgcggcgccgggacgacggcggcgatcaaacggctgcaggaggtgatgggcgtggccgcgccgtcggcggcggcgccgctgcgcgcgcgcctcgccgcggggctccggtgggacgagcggtgggtggtgttcgtcgggccctacgagcaccactccaacctgctgtcgtggcggcgcagcctcgccgacgtcgtcgagatcggcctcgtcggcgacgggctcgtcgacgtcgccgcgctccgccgcgcgctcgcctcgccgcagtacgccgaccgccccatgctcggctccttctcggcgtgcagcaacgtcaccggcatcgtcgtcgacacgagagagatcgcgcgcgtcctgcaccagcacggcgccttcgcttgcttcgacttcgccgccagtggtcctcatgtgaaaattgacatgaagtccggcgaaatcgatggctatgatgcggtgttcttgagcccccacaaatttatcggggggccgggtacgccaggtatccttcttatgaacaaatcgttgtatcggctcaattctcagcctccctcaacatgcgggggtggcaccgtgaactatgtcaatggcttcaatgaggaggatacattgtactatgatgacattgaggagagagaggatgccggtacaccagcgataatacaaaagatccgtgcatcccttgcattttgggtcaatgagtacattggatatgacacgatagacctacacgaacaaatatacactgaaatggccatgaaaaggctagtggacaatccaaatgttaaagtgctaggaaacacaagcgcgaaccgcctaccgatattttcattcctcatctaccctcctatggtagattcattttttcatggggatgatagattggcgatcgtgaggcgcaaaaggcttcctctccatggacgatttgtcactaagcttcttaacgatctttttggcatccaagcaaggggaggttgtgcttgtgcaggcccttatggcaacatcttgctcgaaatcaataacgagctttctcttcgcatacgctctgcacttgttgaggggtatcttggacttaagcccgggtggaccaggttgagttttgcttactacatctccaaagaggaattcaaattcatcctagatgccattgagtttttagcagcatatggtcatcgattcctctcgttgtacaagttcgattggaggagcagtaactggacgttcagtaaacaggcagccaaggagttatctgctgccactggtgtgcttttaggtgaagatctccagttcaaggctgaagataaatcagataataataaacccgagccaaatcatacaaaatttgcaacatatatggagaatgccaagagaattgcactctccttgccggatatcaatcaacaaattattagtattccccaaggagtagaccctgatattattatttttcatatgattggaaatggcctaatcccaccacgaatcattgcattgattgaagctgtcggatattttgtactgtcacgtgatggtgtaacaaagagagacagacacaaagacagccgcaagaaaaggccagatgagccagcgatgcgtgtctga

SEQ ID NO: 72491 - DNA, 1399 bp, Oryza sativa
  Clone ID: PAT_MRT4530_72866C.1
gcacgagggataagattatcgttgtatggcgacctcgccggagattggatggtcggctgcgactttggaggacaagaacaccaatggcgtcgcggagccagtgcgccaaggtgagcggcgaggcggggacgacggcttccccctccgccgccggcggcggcgaaggcggcgcgcggcgctgccggcggacgtgctgttcgaggtgctgctgcggctggggcccaaggacgtgtgccgcctccgcggcgtgtgcaggtcgtggcgggcgctcaccaccgacgcgacgttcgtcgccgcgcacgccgcgcgccaccgcggcccgctcctcgccggcggcgtgctcgacttcgacgtgttcccctccgtcgacgtcctcctcatggacctctccggcagcgtcgtcaagtgcatgggaggagccgccacccacctcgtcctccccaccaccaacctcgacctcctctgcgtcaccgaggtctacacctgcagggccaccctcctcaacccgatcaccggcgccgccgtccacctgccggagccgctgtcgacgccgcactccctccggggaagatctctgagcgacttcgacggctccttcaagtacggcagggacagcaatggcgattacaaggtgctccgcgtcctcacggattgccacaacaagcaattccccgaacagctgttcgagatcttgagtctggacgagagcagcagataccatatgcggtggagggccaagaaggcgctgccgatgtgcgtccggagggacgccatcggcggcgtcgtcatcaatggcgtcgtctacttcttgctggatggccgtcccaatggcgtcaagaacgcgcatcgcgaatcctacgagatggatcacatggccctgttcgatctctgctccgagaggtggatatcatacctggagggaccaatggcgacccatccggagatgaacaacatcgatgagatcctccctgagccccttgagatgtcggtgtaccagaatctgtcattgtccgagctgagtggtgcattggttgtagctcagtacacggattatcgaagcgcggagatcaaatcctacgtagacctctggtatctgatggactcggagaagcagatttgggagaagaagtataggattgttttggagatggatacctgggacactgaacacattttccctcatgcacatccctcactgattctagatgatggcaggatactcatctacataactgtgcacttagccaacttcgaagggcaatacacgaggcgggtgatgcggttatatgatccggagacggacactttgggttcagacttggtggatgttaagaatattcactcaattggtttcttttcaggaagcttgttgagcatacagaatggccaggggttgtga

SEQ ID NO: 72492 - DNA, 207 bp, Oryza sativa
  Clone ID: PAT_MRT4530_72867C.1
atgtttgtgaagcccatccatgcacctcatcgtgttgctcctatctgtgaactacgaaggctcgtgccccagtacatcggcgggctgaagctccgtctcactgtcaacaagctagagtatctccaactgcaacaactgaagtggcatctggtgacctccgtgattggcagcaaatatacagacgacaatacaggatccaagcactaa

SEQ ID NO: 72493 - DNA, 290 bp, Oryza sativa
  unsure (1)..(290): unsure at all n locations
  Clone ID: PAT_MRT4530_72868C.1
cacgcgtccgctatattacaaaccattcctatagatttaactgcttatcgctagtccagcctagtacttgtataaaaaaannattcattttttttatatattttattttanngnnncaggacaaattcacatcctcttcagctcctgggattaaggcagatttttttttttatggtgattatctatatgaagttcgttttatctcataaactacttatgaaactcacagtactcgcactttacttttatgataatataccagaaaaatgttcttttcccattttccacta

SEQ ID NO: 72494 - DNA, 441 bp, Oryza sativa
  Clone ID: PAT_MRT4530_72869C.1
atatatatatatatatatatatatatatatatatatataccaaaggaagaagtgtcagtggtacaagagtatttggatgtatttcctgaagaactaagtgaattacccccagatcgggagatagaattcatcatagagttacttcctggaacgacacctatatcaaaaagaccttataggatgccaattaatgaattagaagaattaaagaaacaaatagccaagttagaaacaaaaggttttattcgactaagttcttcaccttggggagctcccgtgctatttgtcaaaaagaaagatggaagcttaagaatatgtgttgactaccgagctataagtgaagtgactgttgagaacaaatatcccttgccaacgaacgacgatctatttgatccattaaaaggagcttgcgtattttttaaaatagatcttcgatcgggg

SEQ ID NO: 72495 - DNA, 550 bp, Oryza sativa
  unsure (1)..(550): unsure at all n locations
  Clone ID: PAT_MRT4530_7286C.1
gattcggcacgagatttctgcaacaaaaatatggcttccaacaaggtagtgttctcagtgttgcttctcgccgtcgtctccgtgctcgcgggganggggancatggcggagtacaccaccaagacaggtggtctacaccccgggcccgctctgtcagccaggaatgggctacccgatgtaccgctcccgcgttgccgggcgttggtgaaacgccagtgcgtcngccgtggcacggccgccgccgccgaacaagtccggnganantgctgccggcagctcgccgccgtcgacaaacaactggtgcaggtgcgaagagatcaaccacatgctgggangcatctacngggaagctcggcgcccccnatgtcgggcacccatgtncnaagtgttccgcggctgccggaaaagggacttggancgcgcggcggcnaacctccccgcgttctgcaacgtgganatccccacggcgggaagtggtgtctgctactggctggcgaaatctggctactaactangctactgtnnctactntgcatgtntgtggtgtggt

SEQ ID NO: 72496 - DNA, 1435 bp, Oryza sativa
  Clone ID: PAT_MRT4530_72870C.1
attcggcacgagggttgtttgtttgttgctaggtttgtctgggggtttggttagttataaaaagagagctagcaattctccacatttctctcccggttcctccgctgcaaccgttctcttgcttcaattctcgattcgccatgcatgcaagagtctgctgaacgccgattgattaattgtcttgtagtatctaggaaagcaatccgctgctgtatcctcctcctatctggattctggagtgatccctgcccgctggctccatcccgccgctgccgacacacataattaaacagctactagttgatcgatattatttcttctcttctcttggggtcatccctctcaaatcaagctctactactctacatactctctatcgggtgccggcactgcagtcccccaggtgagtgagtgagtgagtggagtgcggtggcagagagctagctaggcatgaagtacagcaaggaagcaaagcccgagagggcggcgggagggcggtcgagagccgtgccggtggcgctcctgttggtcgtgctctgcgccttctccttctacctcggcgggatctacagcaccggccgcagcttgctcgatgtcaatggcatcgtcgtcaagggggcctcttcttcctcctctgcctctgccgttgccattcaaaaggacaccaacaccaaagccgtcgtcgtcttcccagagtgccccgccgactaccaggactacactccctgcaccgatcccaagcgttggcgcaagtatggcaactaccggctgagcttcatggagcgtcactgcccaccggcggtggagcgcaaggagtgcctggtgccgccgccgcaggggtacaaggcgcccatccggtggcccaagagcaaggaccagtgctggtacaggaacgtcccctacgactggatcaacagccagaagtccaaccagcactggctccgcaaggaaggcgacaagttcatcttccccggcggcggcaccatgttccccaacggcgtcggagcctacgcagacctcatggcggagctcatcccgggcatgacggacggcacggtgcgcacggcgctggacacgggatgcggcgtagccagctggggaggcgacctgctggggcgcgggcggggcatcctgacgctgtcgctggcgcccagggacaaccacgaggcgcaggtgcagttcgcgctggagcggggcatcccggccatcctggggatcatctccacgcagcgcctgcccttcccgtccgcggcattcgacatggcgcactgctccaggtgcctcatcccgtggacagagttcggcggcctctacctgctggaggtgcaccgcgtgctccgccccgggggcttctgggcgctctccggcccgcccgtcaactacgagaaccgctggcacggctggaacaccaccgtcgtcgcgcagaaggccgacc

SEQ ID NO: 72497 - DNA, 185 bp, Oryza sativa
  Clone ID: PAT_MRT4530_72871C.1
taacccaagccacactgttattggcacaggagatctgtgtgtacgccattcaatatccaccaccctttacttatcaacactgagcccaatctaattacagccacactgtccccccagcgagagtacgcgactgctctgatgagagtgatgagatactaatcaaccgatacatgatatgtttacat

SEQ ID NO: 72498 - DNA, 418 bp, Oryza sativa
  Clone ID: PAT_MRT4530_72872C.1
tgggaccccattgtcagcctcacatccctctccacacaggcccacgactcagaccccgcgcgccatcactctctctcgcccctgtctcgtttcgcgcaagaaccgaggtaccccgcctcggattcgccgggaacgggggtgccaactccggcgccggtgagagccgtccccgacgccaccaagaacgcctcatttggtgcagccaatctccgggaacgcgaccgcgtcaactcggaacaccgtcgcgctctggacgccgctgcttcgcctttgctcgtcgcccagcttccacgtagaagcccgggagtacaccgtcgacgacgaccgtagcagttgcgccgtcgccgaaccagtacaccgtcgccaagacttcgccgagccgcgtttgattcttggtgagcctcctagtagtccctag

SEQ ID NO: 72499 - DNA, 379 bp, Oryza sativa
  Clone ID: PAT_MRT4530_72873C.1
gctgtttcttctccctttccttgtctatccttggcttcctctgttcttgccgatacccaccgcccgctgttgttgccaactctgtctttcacataaagaagcgcggagtaacttaatagaataaggcacgcctgcattaattaggacgaatagctaactatcaagggcacaccaaaacctttgaagtgcgtgcactccccacagtgatcaccctttaccggactaatcgaaagcgctctctttctcactgacaaagagaacgtcttaaaccatgcagaactttatagagaaaaaatcgatggccatcaactgactggggcaagaggaccactactgatactcattttatttccgctattaaatgaggcgggtggagcca

SEQ ID NO: 72500 - DNA, 282 bp, Oryza sativa
  Clone ID: PAT_MRT4530_72874C.1
tcaataagcattctgtaattccctctcaatgccgtctctaacgccaccaagaacgcctcttttagtgcagccaatctccgggaacgcgaccgcgtcaactcggaacaccgtcgcgctctggccgccgacgccattcctttctttctccttctcgtcgacgacgaccgtagcagttgcgccgtcgccgaaccagtacaccgtcgctaagacttcgccgagccgcgtttgattcttggtgagcctcctcaagggcctttgtgcatattggtccctcacagccat

SEQ ID NO: 72501 - DNA, 309 bp, Oryza sativa
  Clone ID: PAT_MRT4530_72875C.1
atgctccctgctactatctctatgactcaaactgtttctctctctacgccgtcgcggtggccattgacgggcacgtactacgtccgtaactccgtcgtccacccggccaccagcccaccacccaccgggggggctgaggtgtggggcccaatttcacgtggctcccgcgtggtgcgtgatcgtatgcgttgcatgcatggaaggagccaaagaaacggcggtgggggtgggcgtgatggggggatggcgtctcgcgagagggagaagacgaagaatttagttgacttggggtttgaccgtctggcttaa

SEQ ID NO: 72502 - DNA, 252 bp, Oryza sativa
  Clone ID: PAT_MRT4530_72876C.1
atgccgtctctaacgccaccaagaacgcctcttttagtgcagccaatctccgggaacgcgaccgcgtcaactcggaacaccgtcgtgctctggccgccgccgccattcctttctttctccttctctgtagaagcccgggagtacaccgtcgacgacgaccgtagcagttgcgccgtcgccgaaccagtacaccgtcgccaagacttcgccgagccgcgtttgattcttggtgagcctcctagtagtccctag

SEQ ID NO: 72503 - DNA, 394 bp, Oryza sativa
  Clone ID: PAT_MRT4530_72877C.1
gctaataccctcttttcgatgccctcatggtgctttgagaagccatccccaattgccgagtttcttacgacaatccgtcatgaccatccaaccggggctaaatacggagaagtaccctcctcgggaaattaacttaggactatatacacgctcggaggaatattcgtactgagttgtcaccatcagtggcacacctcgcttgcgcgacatataaccacaaataatgatatccagtaatctaaacaccacgcttaaattaccaaatactactctaatatcatcgtaatgacatagtcatcgtatacacgatcattatacccacactattccatctcccagataagctagcatcataataaatattactcggatatataataaaactgatattcat

SEQ ID NO: 72504 - DNA, 142 bp, Oryza sativa
  Clone ID: PAT_MRT4530_72878C.1
tttattttccaccccgaatcccggttgacacggccgggacccttacaacctgaggttgggccatcatcagagagaagccctgcatccttgctcaatccgagaaaattctgaaatcattgaactgcgaaatagcgatggcatt

SEQ ID NO: 72505 - DNA, 335 bp, Oryza sativa
  unsure (1)..(335): unsure at all n locations
  Clone ID: PAT_MRT4530_72879C.1
ggggaggcaagaacaccagcagctgaaagtgagtcntggtttgagctgcctgggcgggaaananaggaggcgaccgcgaagaagaagaagaagagaagagagaaaaaggagaaaaaaggaggcggtttttngnttcttctgcntttctncgactcgagctctatctcgtcaaaagagtggcctttttcctcctcctcctttcttgggatggtgtcattcatggtgatgctgctgctctgacttcagtgatccaaaccatgtttttgatggtggtggagncaagtgatcactattgatntttgattgctgatgccggtggttcaagtggtctcaag

SEQ ID NO: 72506 - DNA, 1932 bp, Oryza sativa
  Clone ID: PAT_MRT4530_7287C.1
aacccctcgtctcgtctcgtcgcctcgcctcgcgagttcgcccgccgcctgcgccgagcagccgccgatctccgccacgcgagcagcggcgccggcgtcctgctacttccgccgcgtcctcgccggtgagcaaccaaaggaaggatgagtaggcgctggagcaggacaatttatgtcgggaacctcccgggcgacatcagggagagggaggtagaggatctgttctacaagtatggacgcattgttgatattgacttgaagatccccccaaggccgcctggttttgcttttgttgagttcgaagatccccgtgatgctgaagatgcaatccgtggacgggatggctataattttgatgggaaccgtttgagggtggaacttgcacatggtgggagaggtaactcttcctcctttaacaattctggtggagggggacgtcgtgggggtgtatctaggcatacagagtatcgcgttctggttactggactaccttcttcagcatcatggcaagacctaaaggaccatatgcgaaatgctggtgatgtttgttactctgaagtgtaccgtgagggtggtggtactataggaattgtagactacacaaactatgatgacatgaagtatgctatcaggaaacttgatgattctgaatttaagaatgccttctcaaaggcctatataagggtgaaggagtatgatggaaagcgcagccgttcatactcacgaagccgaagccgaagtcgaggtcgcagctacagcagaagcaggagtccaagcaagtctcccaagggaaagtcatcacgccgttcagcatctagatctcgatcgagatcagcttcttcccgttcaagatcagagtcaaaggggcgctctccatcaagatgaggatttgtgcggagatctagggattgcataatgggaaatcgaggttgggatttcttctatatgcaacagttctattggttgtctgagaatcagagcctgggcctaagaattgctttgggacactggagctagagcattaaggattgatgctatggattatggtggcgcaatgactgtgtttgcttggattgagtaaatgaggaatgaagtttctcgcttgctctctcgttgggatcactttggaggaatgttctagcgaatatgtcacgtaacatttgacactaaacactctgaatgttttgaacttaaggaatttgttctcttctaatttctatgagctctttttgcttgcatctggccattccaatgattgggaggcgtgaaggctttttggaagcaaactgttaaagctgcattctggaatctggatattgaatcgtgttatttctggaactttttgcagatcaccagcaagatctcagtctccaaatacttctcctgccaatggtgatgcagcaagccccaagaaacgcagcccaagcaggagcccccccaagaaacgtagcccaagcaggagcccatcacgttcccgatctcctgatgccaagtccgaatgatgctgatgtgcttctggggacggagtgtcgaggaatcatggtcctgaaacgttttgacatctgtcgccctcgactacttctgaatcgcttccaaagtactatttcatacgttcagtgctctttcagattactggatgatactgtacgcctatttatagatttgaacttgggatttgtcttttgttcattttgacactgtacttgacttaggtatattattgtggtactggtaagaaaaaaaaaaaaaaaaaaaaaaaaaaaaaaaaaaaaaaaaaaaaaaaaaaaaaaaaaaaagataaaaaataataaaaaaaacgactgaaacaaaaaaaaaggttcagtagggtaaacctaaactgaattgaatgcgacacactttttacaattcgaaaaactggtaaagaccgctactctttacccaacttaatac

SEQ ID NO: 72507 - DNA, 678 bp, Oryza sativa
  unsure (1)..(678): unsure at all n locations
  Clone ID: PAT_MRT4530_72880C.1
gcagcacgctacgtaagctggacctctagacggccgcccttttttttttttttttttttaaggtatagcctctctgttctaaaataaattaacttttatatagtacaaatctgtctgtttacggtgcagatgtanccaatctgaaactagtagcaaggaaagagagcctcccgtactcaaattgacatcagattaaggataacaacaaacttaattaacaacgagcatacactgaaatgcatcatatgcatcaggggcggggcagcctgaatactatgctttgcaaactactaacaactttagttccaaaatgcagcataagagggggaaaaaagaaagaagagtagcaataaatcgatgccattacaaccagtagcagctggtcttgcatggtatcagataaatcttcacaaccgaagctgctccgtccccccttgggccttggcaaagtcttggtatgggtacaacctagaagtttgttaggttacttgtttcattgcttggttggtcaactcgccaacccgttggacactatagcctgtagacatgagtggggcgggcctgtccaactcccgtgccgattgcatcctgttttcatatgcttgaaagcgataatgggggcggaaagcttgtatataactcagttggagcctcgtgccgaattcctgcagcccgggg

SEQ ID NO: 72508 - DNA, 478 bp, Oryza sativa
  Clone ID: PAT_MRT4530_72881C.1
gcacgaggcttcaacgagcaggcgggcgccgcggtggcgaggctgtcgtcgtcgctggcgaacgcgacgttcaggttcggggaggcgtacgactacttccaggacatcatcgaccgccccgcggcgcacgggttcaacaactcgcgggcgccgtgctgctcgctggggcgggtgcggccgacgctgacgtgcacgccgctgtccacgctgtgcaaggaccggagccagtacgtgttctgggacgagtaccaccccaccgaccgcgccaacgagctcatcgcgctcgagacgctccgcaagctcaacatcaccgtctccgccaacaactccacctcaacctagctaagtagtagtagtagaactagtagtatattggttcaacgtacgttgtcagcgtttttgttttggttcgtacaaacattgtaaaatccttgcgttccaaacgaaattcgtgattcataaaaaaaaaaaaaaaaaa

SEQ ID NO: 72509 - DNA, 189 bp, Oryza sativa
  Clone ID: PAT_MRT4530_72882C.1
atgaagcacatgggcttcgctaaagatgggccttgttggagggccatacggacgaagattgcggggcgaaagccttgctgcgaagggcacgggtttcgccaagaaccggacctcactggaagaagaaatattataccattcaaaatatttacagaaatagtccttgccgcccaagtggagggcggcaag

SEQ ID NO: 72510 - DNA, 491 bp, Oryza sativa
  Clone ID: PAT_MRT4530_72883C.1
gggcaacgaataaaatcattcttgcaaaaacatcctcattttcatcatcttattagtgtacacaacaccaactcgagcatcatctggtcttactaaacccaagttagccaacccaaagacaacgaactcgctggccacaaacccatccaaccacaaataaccactgctaagctaccgacccccacttgacttgccggagacgaagttggtggcgtacgcccaggcgttgttgttgacggtgtcgtacaggtggtcggctaggttctcgagggggcccttgccggtgacgatggcctgtacgaagaagccgcacatggagaacatggcgaggcggccggtcttgatctactctaccttgagctccgtgaacgcctcggggtcatcggcaaggccgagcgggtcgaaagctcctccagagtagagcggttacactaacttgccgtgcggtccgtcggagatgcggtaccgatggactgtgcacatgagcacca

SEQ ID NO: 72511 - DNA, 1293 bp, Oryza sativa
  unsure (1)..(1293): unsure at all n locations
  Clone ID: PAT_MRT4530_72884C.1
gcacgagggcggttctcgcctcctcctcctctctttcctttttcctctctctgctcctcgttgttgcagtcacctctcctctccttgttcttgcagtcagctcagctccggacgcagcaccagtttctcggagtgccatcagctcgcgggagagttgccggaagagaagctcgccgccggcgtacgacggtnaagggggaacgtacgagcgcgagtgcgggggtgtggtgcgccgccgctgtcgaggtagctgacgcggcctctggaaggctctcagcctctcaggcaggcacaatagtttctagggagtacaagtagcagaactggtgtgcttgggatccaactattacgcgatggccttcttccctaacattcccgaggcaaagcaggagattcagtccttgtacagaaattatgcacatttgtttgacatgtcatcggataatgccggtgtagactcccgcataatgcggcgccagcctgccatgttgatagatcgttctgttttcctcactggaagcgcgatttggactattgccctccactacaaggctcacatttacagatggttactgcagaagttttctgccatccagacaacaagctcccagcgcaatgctgcagttgtcggtaacatcgtgattgttttggtgaactcctttggcattcttgggtctgacttcacaacaaagcaccacggacgggaggtcacattcaccgtgagcgccattctgatggtgttttgccagatcacaatcccattgcttgtggaagcgcaaatcgggctgggcggtggaactcggatactgacgggctacaccacggcgacattcctgctcacatgcgtcgtctcctatggtctcagctggtcatggggctcattgttctgcactattcctggtatgaagattcagtcagctgggcaggttatcggcatgggtctctgtttcgggctctgcttcgtgcaaatgcagtacttcctgctgatgctgtgccggctgaagaacgccatccttgcatactacgcaatgtggatttggtcttgatttaaactaggatctcaagagaagagatgggatagatggctagatatctgcccgtttaactgctagcgtttgatggatgtaaatatgctcattttctttgcctgttctgtacagtttttgtattggttgctatttcagtgtagattctcccaaccagtttctgcgactatgaggcaatttaacaaatgttatgctaaaaaaaaaaaaaaaaaaaaactcgagactagttctctctctctctctctcc

SEQ ID NO: 72512 - DNA, 570 bp, Oryza sativa
  Clone ID: PAT_MRT4530_72885C.1
atggggttcgccccgcacggcgggtactggcgccggctgcgccgcctggcgtccgcgcacgcgctcgccccggggaggctcgcggcccgccgcagggcgatcggcgaggagacggtgcggcgcgtggcggccgccatggcgcgcgacggcgccgtcggcgtgaggcggctgctgcacctggcgagcctggacaatgtcatggcgagcgtgttcggggtcggcctcggcgagctcggcgcgggcgccgtgtcggagctggaggagatggtggggcaagggtacgagctgctcggcaccttcaactggggcgaccacctgcctctgctgcgcctcctcgacgtccatggcgtcaggaggaagagcagggcgctggcgtctagggttaaggtgttcgtctccaagatcatagaggagcacaagacgaggagagatgccaagtacggcggctgcgacggcgacggcgatttcgtggacgtcttgttggggctggaaggagaggagaggctggaggaggaagacatggtcgccgtcctatgggtgacatacaagaaacaaggatatcgtctgtaa

SEQ ID NO: 72513 - DNA, 140 bp, Oryza sativa
  Clone ID: PAT_MRT4530_72886C.1
gggttcctggggagttttacactagtttaaattgggcaattggggttattgatattgttagtgtaaaagagttgtataaaaaatttggaaaaataaccaattacgtacatggtgggaaaaggtggaattttctgattaat

SEQ ID NO: 72514 - DNA, 2508 bp, Oryza sativa
  Clone ID: PAT_MRT4530_72887C.1
atgccatgggacatgatggaacaactgccacgtattacggtgccatcgaggacatatgggaacttgactatggtcctctcaaggttcctctgtttccggtgccaatgggttaggttgactggtggaggcgtaatgattgatgacagtgggatgacaactgttgaccttaacaaggttggatactcggacgaaccttttgtccttgccaatgatgtaacgcaagtctttttcgtgaaggacatgtctagcaaaggaaagaagggcagagggcctgatgagcctaagcgtcaagtggttctcccaggcaaaagaaaaatcgtcggagttgaggacaagactgacgaggattacgatcagttggatgggcaaccccctttcacggtgacgattgaccctagcatcctcctatcaaatgaagacatcccttactcacgcagcgatcacaaggagggaacaatagtgaggagaaagtacgtgcggtcaaccgtcaccgccgatgtaatgccgccgattccagcaggatactcgaaggtcgaagttgagttggtcgaaggcgcgtacgaggacctcgagctggattaccctggaggagacggatcctacaccgtctcctcctcatactccgccagcaccgtctccacctcaggctccagcatcgactcctcctcaggatcctgcatcgactcctcctcgtgctcctacacctactcctccgcaagctcctcttccggcaccttcaaagtcaagggccccccagctccaccgcctgcccacacaggggcaacgaagaaggcgaaagttgacgccgccaagaacaaggacccggggtacgattgcacgcaagaggagcttgacgcttacgttgcatcagaagtcaagagacaattcaagcctcgaagtccagaaaagaagattcctatagaccccagtgtcatgaacttcttcaggggtatgtctgcacctgtcaaggaggccatcaagctatcggactatgagcgaacgctgaagaaagcatcttctggaaagtccaaaccagtctctcagcttggagagcaaccaaaccaggagatcgagccgttggtgaccgggaaagacatgacgatagaagaatttattattgacaccggtctaactacggatcaattgctaggagttgaaccaatagaaaaggcggaattgaaatacatgtacgaactcggtaaaccgcttgtcaagcccgagctggtgcagtccctacccacacaaatgtacaagttccatcagctgtacgtggagatgagcgccaccggtagagagatgatcggagcgaggatcagggacccggacttcttgcaaggagatgatattctctggatcaatttcaaggaaatctacaaagtataccagctggacgccttcgacgtctctattatgagttgctggactttaatggagattcaaagggcccgacggcggagggttttcgatactggatttatcgaccctcggagagtaaacgttgcaatgctcgaccaatatccgcaggaaacagaggacaatctcatccatctcctgacggcgcagcattacaagacgttcatactgttaccgtacaacacagaattccactgggtgcttttactcttcgacctgtcggcctgcaccgtcaatgtatatgactcaatggataaaaaagagtctatgtttgacaagccggagcgtgccgaagatcgcatctacctagtgctacgacgtcgacaagacgtcgagcgtccttactttgctggtcgcaacctatgcattgcgacatcatcaacatctactcaacctatgcaacgtcggagcgccactactgcttggtgcccgtgcatcgtcgtcaagccgaggtcgtcgtttcgtgcatccacgatgtctttctctccgccgcgccaaggctacgagatgccatccggccgcgatgcccttcacctcgtcaggtcggagtcgtcgtgttgtccatccgtgatgctttcactttattacgccaaggtgagatgccgcccgtccgtgatgctctccctcttcgtggagattaatgctgtcgctcatctgcgtattggagcgtcgctcgtctacgtcaacatgaagaaagaatggtgttcgagcttaggtaatgaccatagacggcaacaagacctggtccggcgagctccccgtagccggcaggttcactcactccactatccaatccatgattcaagagctccgcagcagctggtcgtcttcgggtctgggcagaggcctctcgtcatcaccacctcaccgccgccggtggggagggaggaggcgccggatccgctccccatcgccccctcccccacgccgctgccgccgagagccgctgccgccaccgccctcttccccgcgcggctgccgacgcctcatggtggcggatctggcctcttcccaagcttgccgcgcagagaatgccaccaaggagaggagaagaccccggtgcctagagcgccgctgctcaccgaggaggagtaa

SEQ ID NO: 72515 - DNA, 527 bp, Oryza sativa
  Clone ID: PAT_MRT4530_72888C.1
atagggataagctggcagcgcctggacggacccggtcacggaatatcactgggtcgaccgcacgcgtacgttgattcgtgggcggacggcatggggagtactctgtagtcgtaatagcttgacgtatagatagcggatttgtctttgccacaggcgccagtggccggctttacgggggggagtcaagttaaccaaggtgcttgaggggggtaaggagtggggaagattatcagttattttaactaagatgttgctaaattccccattcctaaaccggtccggggcagaaacccaatcttccattgccccactaatcgacgccataacgccattgactaagcttttcccgcactgatgggtctaatttgtgcacccagccccgttgcttttcccccaagggtttaccctttggcgatcgccgttgactctttttgccgtactgtttagcctgttggcgaacttgagcttgactctgatccaccttctgggccagaagatgggccgacatccattttgcaccggaaccc

SEQ ID NO: 72516 - DNA, 2703 bp, Oryza sativa
  Clone ID: PAT_MRT4530_72889C.1
atggctgaccgcgatgaggaacagatattgtacgatacaatcgcggagggaagcagccagtactggaatgaagaagaggggaacgaggatccaaaccagtacttgaacgaggaagggaacgtggagagggatgcggaggggaaccagcaggggcacgtggaaagggatgtggaggggaaccaggaggaggaggctagtggtgaacaagggcaggcgatgatggaaagaaacaaagaaaatgccgccaagaagaagtaccatcaccacttggggtcaggaggctatagcgtcgcgatgccgaagtgggagcagatggaggctagcttgattgagaggggtatcgaaccggcaacagccaattggccggaacgatcgaagttctggtactatgctcacggtggaacgctcgacccagctgatggctcactggtcttcggctatcagatacaagaggctgcgcgacgactaacagatgcagtggaagcctcctctcagggcacgttccgaccagacagagatagggacgagctgacactcgccctgcagactccagagcatccaggacgaactcgagggaaaggggtgattccttggaagattggttttaaggaggacatccacacgtacaggagtcggatgaggagcaagagagataccgaggcgaagattgcagacctagagttccgggtatcgagctacgaactcaacatgcaagaggaggtggcaaggaaggttgatgaacgcatggccgcacatcggtcccatgatccccagccgaccattcctcctgcaatggtgagcccgtcaggaaaccgtagcagctgcgcctcaacggggcaggtaggatcacagagcatggacgccatgcaaacacaggacgaatcgacctgtcccgttgatgacatcactcagcggacaccatgtgagctgcatattcctttcaagaacttatcaataaaggtggcgtcgggcatagccatcccaacggaccctttaggtacttaccactgcaggccgattccagcaggatactccaaggtcgaagttgagttggtcgaaggcgcgtacgagtacctcgagctggattaccctacaggagacggtgagacgcatctacgagacacatgccatgccattattctatggcgcaggcggtacatcatcctccctgggcgacaagcggcgtctcgtgcaccatctcctccggctccgccatctcctcctcaggatcctgcaccgtctcctcctcatgctccgccagcaccgtctccaccgcaggctccagcatcgactcctcctcaggatcctgcaccgactcctcctcgtgctcctacacctactcccccgcaagctcctcttccggcaccttcaaagtcaagggcccccccagctccaccgcttgcccacacaagggcaacaaagaaggtgaaagttgacgccgccaagaacaaggacccggggtacgattgcacgcaagaggagcttgacgcttacgttgcatcagaagtcaagagacaattcaagcctcgaagtccagaaaagaagattcctatagaccccagtgtcaggaacttcttcaggggtatgtctgcatctgtcaaggaggccatcaagctatcggactatgagcgaacgctgaagaaagcatcttctggaaagtccaaaccagtccctcagcttggagagcaaccaaaccaggagatcgagccgttggtgaccggtaaagaaatgacgatagaacaatttattactgacaccggtctaactacggatcaattgctaggagtcgcaccaatcgaaaaggcggaagtgaaatacatgtacgaactcggtaaaccgcttgtcaagcctgagctgctgcagtccctacccacacaaatgtacaagttccatcagctgtacatggagatgagcgccaccggtagagagatgatcggagcgaggatcagggacacggacttcttgcaaggagatgacattctctggatcaatttcaggggaatctacgaactataccagctggacgccctcgacgtctctattatgagttgctggattttaatggagattcaaagggcccgacggcggagggttttcgatactggattcatcgaccctcggaaagtaaacgtcgcaatgctcgaccaatatccacaagaaacagaggacaatctcgttcatctcctgaaggcgcagcattacaagacgttcatactgttgccatacaacacagaattccactgggtgcttttactcatcgacctggaggcctgcaccgtcaacgtatatgactcaatggataaaaaagagtctacgtttgacaaggttttcgaacttatagacagggcttggtatcggttccgtcatttggtccgcggcaaatggagagaaagacttaggcggaagtttaaatttccttgcgcaaagcaaaagcagggaactaacttgtgcggctattacgtgtgcgagtattgccactgccttgcagaccaaatcatcaccacaagagagctcgattttattctcatgagggataacctgaccacacacaaggaatttatcgcggcggttcaagaacaactcatgggattcatcaacgaagaaatccttgatcccaagggtgaattctactacgacggaaacacaattcaccggtccttagcttctgagctagcagcgagtactactacgtcgaaatcgtag

SEQ ID NO: 72517 - DNA, 2789 bp, Oryza sativa
  Clone ID: PAT_MRT4530_7288C.1
catggcgcgcctaacccctccaacccagctcccgcggaggcaagccgaggtcctcctccgcggacgccatggcggagcacaagccgctgccggggcggccgaagcgggagggggaaggggcgagcaagaggaaggccaagtcgggcgggttcgagtcgatggggctgtgcgaggaggtgtaccgcggggtgcgccacaaggggtaccgcgtgcccacccccatccagcggaaggccatgccgctcatcctcgccggccacgacatcgccgccatggcgcgcacgggctccgggaagaccgccgccttcctcgtgcccatgatccagcgcctccgccgccacgacgcgggcgccggcatccgcgcgctcatcctctcgccgacccgcgacctcgccacgcagacgctcaagttcgcgcagcagctcgggaagttcactgatctaaagattagcctgattgttggtggagatagcatggagagtcagtttgaggaattggcagaaaatccggatatcataattgcaacacctggcagactcgtgcaccatctggcggaggttgaggacttgaatcttcggacagtggaatatgttgtgtttgatgaggcagattccctctttagcttggggttaatccagcagctgcatgacattctacataagctgagtgatacacgacaaacattgctcttcagcgccaccttgccacaagcccttgcagattttgcaaaagctggtctacgtgacccacaaattgtaagacttgatttggacaaaaagatcagtcctgatcttaaacttgcctttttcacgctgcgtcaggaggagaaattagctgctttactgtacttggtcagggagcgaatcagctctgaggaacagacaataatatttgtttcaaccaagcatcatgtggagttcctaaatattctgttccgggaggagggcttagaaccttccctttcctatggtgctatggatcaagaagcccgcaatattcatatttcaaaattcagggcaaggaaaactatgatacttattgtgacagatgttgctgcaaggggtctggatattccattgcttgataatgtggtgaactgggacttccctgcaaagcctaaattattcgttcatagggttggcagagtagctcgacaaggtagaagtggcacagcatatacttttgtcacttcggaggacatggcatatttattggacctacatcttttcctttcaaagcctcttagacctgctccaacagaggaggaacttctgaaggatatggagggaatgaatttaaaaattgatcgtgctcttgcaaatggagaaactgtgtatgggcgttttcctcagacaatcattgatcttgtatctgatggaataaaagaagtcatcaatggatgtacagatctaattgcattggaaaagccatgcactaatgctttccatttgtatctgaagactcgtccaatgccttcaacagaatcaatcagaagggtaaaagatttgcctcgtgaaggtcttcatccaattttcagggacgtacttgggtcagatgagctttcagctcttgcattctcggaacgcttgaaatcatttcggccgaagcagacgattttagaggctgaaggtgaagctgctaggggttcaaatcaatggctagatgtgatgaagaagaaaagagaagtgcatgagggaattataaatttagtacatcaaaagaataatgttgatcatgagccaaaggaagaattggtagagaatatttcaaactgggagagaaaagatgtttgtggtaataagcggaagttacagagctttagagatgaggaatactacataagttcagtgcctcaaaaccaacatttggaagctggactgtcagtgagggccaacgaaggatttgttgaaaatagattggatgctgctgttcttgatctagttgatgatgaaacttctggtatgcaagcacagaaaactcgatatcactggaaaaagaacaagtttgtcaagttaaatagtggggatcgtgtcactgccacaggaaagattaagacagaaagtggtgcgaagttaaagccaacaaaaacagggatatacaagaaatggcaacagaagacacatagatctatcgatactggtagaaaatttggtggctttgcagaagagggtgcatccacgacaggtagccatcaaagaggaaacagaaaacacactgcagtgggacgggggcgtcgctatataccgaacgccgacgtaccgtctgagattagaaatcccgaacaaatacagaagagcaggcagcaaaaagcaatggatattgcccgcatgaagaacagatccacaaaagagagtaaattccagaaattccagaagaacaacaggaggcacgatggacccttgaaagatggcaaattccagaagaacaggagaccggatggcaatggaaagaacaggagaccggatggcaatggaaagggacgggggaaaggcaaaggaaatgcaaatggatttggtaaagggaagggaaaaatgaaagggaagggcacaaggtgatttgacgaagaaaatgttgcaccatctgatgcctggaccagcggctgccgggaatgccagcaaccatttgataatcctgattttgctgacttgttcttcttccgcactcagcagctagcagtgccccttcgttggttggttgatgccatccaacgtaaggactgacgttactaatttaaaccttggatagttttgtcatcttttcttctgtttcccgttttaaaaaaaaaaaaa

SEQ ID NO: 72518 - DNA, 2304 bp, Oryza sativa
  Clone ID: PAT_MRT4530_72890C.1
atggctgaccgcgatgaggaacagatattgtacgatacaatcgcggagggaagcagccagtactggaatgaagaagaggggaacgaggatccaaaccagtacttgaacgaggaagggaacgtggagagggatgcggaggggaaccagcaggggcacgtggaaagggatgtggaggggaaccaggaggaggaggctagtggtagtcaaccctccgttggacagaagagggcacgcgggcaacgaggtgcagcgaagaagcttgagggtcggcacatcataacggaagtggaagaagatggacgtcctagtgccccggccgaagccgccaagaactatgtacgtcacagcggttgggttgtgcgggataacgtgcctatcagtacggtgtactggcgaagaacaagggcacgcggagatcatgagagttttgtcccagattcggagaaagagatgctgtggaccacaatgctcgagacattcacccttcctgcgggtacagaggacaaagtgaaaaggtggactctgaagaaaatggcagaacagtttcagagcttcaagggagatctgtaccagaagtatatactgaaggggcagacaccgaacttcgacacattcccaaagctaagggatcactgggacgagttcgttgcatataagacaggtgaacaagggaaggcgatgatggaaagaaacaaagaaaatgccgccaagaagaagtaccatcaccacttggggtcaggaggctatagcgtcgcgatgccgaagtgggagcagatggaggctagcttgattgagaggggtatcgaaccggcaacagccaattggccggaacgatcgaagttctggtactatgctcacggtggaacgctcaacccagctgatggctcactggtcttcggctatcagatacaagaggctgcgcgacgactaacagatgcagtggaagcctcctctcagggcacgttccgaccagacagagatagggacgagctgacactcgccctgcagactccagagcatccaggacgaactcgagggaaaggggtgattccttggaagattggtttcaaggaggacatccacacgtacaggagtcggatgaggagcaagagagataccgaggcgaagattgcagacctagagttccgggtatcgagctacgaactcaacatgcaagaggaggtggcaaggaaggttgatgaacgcatggccgcacatcggtcccatgatccccagccgaccattcctcctgcaatggtgagcccgtcaggaaaccgtagcagctgcgcctcaacggggcaggtaggatcacagagcatggacgccatgcaaacacaggacgaatcgacctgtcccgttgatgacatcactcagcggacaccatgtgagctgcatattcctttgaagaacttatcaataaaggtggcgtcgggcatggccatccccagtgtcaggaacttcttcaggggtatgtctgcatctgtcaaggaggccatcaagctatcggactatgagcgaacgctgaagaaagcatcttctggaaagtccaaaccagtccctcagcttggagagcaaccaaaccaggagatcgagccgttggtgaccggtaaagaaatgacgatagaacaatttattactgacaccggtctaactacggatcaattgctaggagtcacaccaatcgaaaaggcggaagtgaaatacatgtacgaactcggtaaaccgcttgtcaagcctgagctgctgcagtccctacccacacaaatgtacaagttccatcagctgtacatggagatgagcgccaccggtagagagatgatcggagcgaggatcagggacacggacttcttgcaaggagatgacattctctggatcaatttaaggggaatctacgaactataccagctggacgccctcgacgtctctattatgagttgctggattttggcttggtatcggttccgtcatttggtccgcggcaaatggagagaaagacttaggcggaagttcaaatttccttgcgcaaagcaaaagcagggaactaacttgtgcggctattacgtgtgcgagtattgccactgccttgcagaccaaatcatcaccacaagagagctcgattttattcgcatgagggataacctgaccacacacaaggaatttatcgcggcggttcaagaacaactcatgggattcatcaacgaagaaatccttgatcccaagggtgaattctactacgacggaaacacaattcaccggtccttagcttctgagctagcagcgagtactactacgtcgaaatcgtag

SEQ ID NO: 72519 - DNA, 632 bp, Oryza sativa
  unsure (1)..(632): unsure at all n locations
  Clone ID: PAT_MRT4530_72891C.1
cttcttcgttggccgggactcttccttccccccatgaactctaggagggacttccgcagccacagagctgctttatttgatggtattgaggagggtgcgatcagaagttcagcttactcttctcaaattcatgagcatgagaatgaccaagctatggacagtctgcatgacagggtcagcgttctcaaaagattgacaggagatatacatgaagaagtggagaatcataaccgaatgctggacagaatgggtaatgatatggatgcttccagaggatttctatctggaacggtggacaagtttaagatggtttttgagaccaaagcaagtcgcagaatggctaccatggtggcttctttcatttctgtcttcttccttatatactacctaaccaagtagcagaattgtctgactctgcctttcattttcctcttgcttgcacgttatgtacttccctgccggggtgtagcatggtctgtccccgccttgcccgttcctctggcttgctcgtctcgtactgggcggattgattgtaaggcgagctgaacgttttctgaatgtggtgagaactgttntaaaactttgtgacggcaaaagatgagttacgagttgatgataaaaaaaaaaaaaaa

SEQ ID NO: 72520 - DNA, 2184 bp, Oryza sativa
  Clone ID: PAT_MRT4530_72892C.1
gaaggtgtccccgtgtgggacgaggacaaacaggaggagtttaacctacgggtgctgctgttcgtaaccatcaatgattggcctgcacttagcaacctatctggacagtccaacaaggggtacaaggcttgcactcactcaaaccacccggtacggaagaaaggcaagcacttcgaacataaggccgaccaccgtacgaagcctaaacatcgcagcgagaaaacagtgtttgctatggttaaagatcttaaagtagtgttcggaaaggggcctggaagccagcctatagagagcgaagatggtcacgcggcgatgtggaaaaagaactctatattttgggagttaccatattatgaattcttggacgtacgccacgcaatcgacgtgatgcacctcactaagaacctttgcgtaaaccttcttggcttcctaggtgtatacggaaagtcgaaagatacactggaagcacgtaataatctgaagcatatggaacaacgcggcgaccttcacccggaaccaaaggagaaaggaagccattacttgagtccagccagctacactcttagcaaggcagagaaggaaagtatgtttgaatgcttggagagcataaaggtaccgtctggatactccacgaatatcaagcgaataataagcacgaaggagaagaagttcacaaacctaaagtctcatgactgtcacgtgttgatgacacaactgctaccagttgtaataaggggtatccttccagacaatgtccgggcaacaataacaaagctatgtgcattcatgaacacaatttcgctgaaggtggcgtcgggcatggccatcccaacggacccttcaggtacttaccactgcaggcggccgattccagcaggatactcgaaggtcgaagttgagttggtcgaaggcgcgtacgaggacctcgagctggattaccctggaggagacggcggtacatcatcctccctgggcgacaagcgggcccccctagctccaccgcctgcccacacaagggcaacgaagaaggcgaaagttgacgccgccaagaacaaggacccgaggtacgattgcacgcaagaggagcttgacgcttacgtggcatcagaagtcaagagacaattcaagcctcgaagtccagaaaagaagattcctatagacccgagtgtcaggaacttctttaggggtatgtctgcacctgtcaaggaggccatcaagctatcggactatgagcgaacgctgaagaaagcattttctggaaagtccaaaccagtccctcagcttggagagcaaccaaaccaggagatcgagccgttggtgaccggggaagacatgacgatagaagaatttattactgacaccggtctaactacggatcaattgctaggagtcgaaccaatagaaaaggcggaagtgaaatacatgtacgaactcggtaaaccgcttgtcaagcccgagctggtgcagtccctacccacacaaatgtacaagttccatcaactgtatatggagatgagcgccaccggtagagagatgatcggagcgaggatcagggacccggacttcttgcaaggagatgacattctctggatcaatttcaagggaatctacgaactataccagctggacgcccttgacgtctctattatgagttgctggattttaatggagattcaaagggcccgacggcggagggttttcgatactggattcatcgaccctcggaaagtaaatgtcgcaatgctcaaccaatatccgcaagacacagaggacaatctcgtctatctcctgaaggcgcagcattacaagacgttcatactgttgccgtacaacacagaattccactgggtgcttttactcttcgacctgtcggcctgcaccgtcaactgcgcaaagcaaaagcagggaactaacttgtgcggctactacgtgtgcgagtattgccactgccttgcagaccaaatcatcaccacaagagagctcgatttctatgaaaccatccaaggtggagcattgagaatgcccttacctatgcttggacatctgcagtttgtgaaggcggcggcggcgcagatggggaagaagggagcggcgcacgtgtgcatcactggtggcagtagcacagatgtgaagaagacggtggcggcgcagatggggaagaaggaagcaactacacatgcctag

SEQ ID NO: 72521 - DNA, 3165 bp, Oryza sativa
  Clone ID: PAT_MRT4530_72893C.1
atgccgctgccggcacgccacgccgccgccttcgccgccgcgcaacgccgccgccgcatgccaacgccacgccgccgccgccgtcgccacgccgccgccgccgccgccacgccgccgcgccaaccgccgccccgatgccgccacaccgccgttaacgaacgagaacgagaacgatcgaacgaacgagagcgagaacgaacacgtcaacgtacattgccgcgagaacgtgaacgagaacgagaacgatcgaacgaacgagacatacgcgggcaacgaggtgcagcgaagaagcttgagggtcggcacatcataacggaagtggaagaagatggacgtcctagtgccccggccgaagccgccaagaactatgtacgtcacagcggttgggttgtgcgggataacgtgcctgtcagtacggtgtactggcgaagaacaagggcacgcggagatcatgagagctttgtcccagattcggagaaagagatgctgtggaccacaatgctcgagacattcacccttcctgcgggtacagaggacaaagtgaaaaggtggactctgaagaaaatggcagaacagtttcagagcttcaagggagatctgtaccagaagtatatactgaaggggcagacaccgaacttcgacacattcccaaagctaagggatcactgggacgagttcgttgcatataagacaggtgaacaagggcaggcgatgatggaaagaaacaaagaaaatgccgccaagaagaagtaccatcaccacttggggtcaggaggctatagcgtcgcgatgccgaagtgggaggagatggaggctagcttgattgagaggggtatcgaaccggcaacagccaattggccggaacgatcgaagttctggtactatgctcacggtggaacgctcaacccagctgatggctcactggtcttcggcgatcagatacgagaggctgcgcgacgactaacagatgcagtggaagcctcctctcagggcacgttccgaccagacagagatagggaagagctgacactcgccctgcagactccagagcatccaggacgaacacgagggaaaggggtgattccttggaagattggtttcaaggaggacatccacacgtacaggagtcggatgaggagcaagagagataccgaggcgaagattgcagacctagagttccgggtatcgagttacgaactcaacatgcaagaggaggtggcaaggaaggttgatgaacgcatggccgcacatcggtcccatgatccccagccgaccattcctcctgcaatggtgagcccgtcaggaaaccgtagcagttgcgcctcaacggggcaggtaggatcacagagcatggacgctatgcaaacacaggacgaatcgacctgtcccgttgatgacatcactcagcggacaccatgtgagctgcatattcctttcaagaacttatcaataaaggtggcgtcgggcatggccatcccaacggacccttcaggtacttaccactgcaggccgattccagcaggatactcgaaggtcgaagttgagttggtcgaaggcccgtacgaggacctcgagctggattaccctggaggagacggtgagacgcatctacgagacacaagccatgccattattctatggcgcaggcggtacatcatcctccctgggcgacaagcggcgtctcgtgcaccatctcctctggctccgccatctcctcctcaggatcctgcaccgtctcctcctcatgctccgccagcaccgtctccacctcaggctccagcaccgactcctcctcaggatcctgcaccgactcctcctcgggctcctacacctactcctccgcaagctcctcttccggcaccttcaaagtcaagggcccccccagctccatcgcctgcccacacaagggcaacgaagaaggcgaaagttgacgccgccaagaacaaggacccggggtacgattgcacgcaagaggagcttgacgcttacgttgcatcagaagtcaagagacaattcaagcctcgaagtccagaaaagaagattcctatagaccccagtgtcaggaacttcttcaggggtatgtctgcatctgtcaaggaggccatcaagctatcggactatgagcgaacgctgaagaaagcatcttctggaaagtccaaaccagtccctcagcttggagagcaaccaaaccaggagatcgagccattggtgaccggtaaagaaatgacgatagaacaatttattactgacaccggtctaactacggatcaattgctaggagtcgcaccaatcgaaaaggcggaagtgaaatacatgtacgaactcggtaaaccgcttgtcaagcctgagctgctgcagtccctacccacacaaatgtacaagttccatcagctgtacatggagatgagcgccaccggtagagagatgatcggagcgaggatcagggacacggacttcttgcaaggagatgacattctctggatcaatttcaggggaatctacgaactataccagctggacgccctcgacgtctctattatgagttgctggattttaatggagattcaaagggcccgacggcggagggttttcgatactggattcatcgaccctcggagagtaaacgtcgcaatgctcgaccaatatccacaagaaacagaggacaatctcgtccatctcctgaaggcgcagcattacaagacgttcatactgttgccgtacaacacagaattccactgggtgcttttactcttcgacctgtcggcctgcaccatcaacgtatatgactcaatggataaaaaagagtctacgtttgacaaggttttcgaatttatagacagggcttggtatcggttccgtcatttggtccgcggcaaatggagagaaagacttaggcggaagttcaaatttccttgcgcaaagcaaaagcagggaactaacttgtgcggctattacgtgtgtgagtattgccactgccttgcagaccaaatcatcaccacaagagagctcgattttattcgcatgagggataacttgaccacacacaaggaatttatcgcaaccggtcaagaacaactcatgggattcatcaacgaagaaatccttgatcccaagggtgaattctactacgacggaaacacaattcacccggtccttagcttctga

SEQ ID NO: 72522 - DNA, 693 bp, Oryza sativa
  Clone ID: PAT_MRT4530_72894C.1
atggaggcgcgatgcgggggcctcgccgtcgtcgccgtgcggcggccgctgcagccgcgggacaccaacgtggtggcctccccagccgcggcgctcgccgggaaggcggcgaaggggaaggggaaggggaaggggacggcgagggcggcgtcgtctccgccgtcggtgaggtcgtacgcgaaggccgggggatgcagggtggggttgagggaggtgtcgctggcggaggagctggagaaggcgcgggagcggcggggccggatgcgcgcggcgagggaggtgacggggagggccctggaggagcgcgccgcggcgctgcggcgggaggcgagggagtgggagcggcgggccgacgagcagcggcgcctcgtcgcggagctcatgcggctgatcggcatgccggaggtttacactccagtggaatcactgagatcgaaggaagagaggaagagaaaggaagggattgcgcactctggttcgctgacatggccagagctcctcggaaaggaccaggacacggcctacgacaccataaagcgtgagaatccgcaggtgacaaatattgtgtacttgatttcgaatagtattgggcgagaggaaaatgatgaattctgttgtaatcgcgtcgtgctggtgattggagcccttccaaccggtggcgaagggatcagcaaggtgccgcaagttggctag

SEQ ID NO: 72523 - DNA, 1260 bp, Oryza sativa
  Clone ID: PAT_MRT4530_72895C.1
atgaacgaacgtgaacgaacgaaacaaaaaacgacgtcgtcgtcgtccctcaagccggagtggtcgctagccctcgaaggaattcgcactcctcaggctcctacaccgactcctccgcaagctcctcgtccggcaccttccaagtcaaggcccccccaagcttcaccgcctgcccccacaagggcaacgaagaaggcgaaagttgacgccgccaagaacaaggacctggggtatgattgcatgcaagaggagcttgacgcttatgtggcatcagaagtcaggagacaattgaagcctcgaagtccagaaaagaagattcctatagacccaagtgttaggaacttcttcaggggtatgtctgcacctgccaaggaggccataaagctatcggactatgagcgaacactcaagaaagcatcttctggaaagtccaaaccagtccctcagcttggagagcaaccaaaccaggagatcgagccgttggtgaccggtgaagattttggaatagaagaatttattactgacatcgggctaactacggatcaattgctacgaggcacaccaatcgaaaaggcggaagtgaaatacatgtacgaactcggtaaaccgcttgtcaagcctgagcagctgcagtccctacccatacaaatgtacaagttccatcaactgtacatggagatgagcgccaccggtagagagatgatcggagcgaggattagggacacagacttcttgcaaggagatgacattatctggatcaatttcaagggtatctacgaactataccagctggacgccctcgacgtctctattatgagttgctggattttaatggagattcaaagggcccgacggcggggtgttttcgatactggattcatcgaccctcggaaagttaacgtcgcaatgctcgaccagtatccgcaagccacagaggacaatctcgtccatctcctgaaggcgcaacattacaagacgtttatactattgccgaacaacacagaggcttggtatcggttccgtcatttggtccgcggcaaatggagagaaagacttaggcggaagttcaattttccttttattcgcatgagggataacctgatcacacacaaggaatttatcgcggcggttcaagaacaactcatgggattcatcaacgaacaaatccttgatcccaagggtgaattctactacgatgaaaatacaattcataggtccttagcttctgagataacgactattactacgtcgaaatcgtag

SEQ ID NO: 72524 - DNA, 3155 bp, Oryza sativa
  unsure (1)..(3155): unsure at all n locations
  Clone ID: PAT_MRT4530_72896C.1
acgagaacgagaacgatcgaacgaacgagagcgagaacgaacacgtcaacgtacattgccgcgagaacgtgaacgagaacgagaacgatcgaacgaacgagagtgagaacgagaacgatcgaacgaagacaagcgagaacgagggaacgaacgtgaatgagaacaagcgaacgaacgtgaacgagaacgagcgaacgaacgtgaacgagctagggaacgtgaacgagctagggaacgtgaacgagcgaacgaacgaggacgaacaaaagacgtgttgtcggagtcgtccgtcaagcctgagtggaagagctagccctagaaggaattggagcaggcaagtgaccatacgcgggcaacgaggtgcagcgaagaagcttgagggtcggcacatcataacggaagtggaagaagatggacgtcctagtgccccggccgaagccgccaagaactatgtacgtcacagcggttgggttgtgcgggataacgtgcctgtcagtacggtgtactggcgaagaacaagggcacgcggagatcatgagagctttgtcccagattcggagaaagagatgctgtggaccacaatgctcgagacattcacccttcctgcgggtacagaggacaaagtgaaaaggtggactctgaagaaaatggcagaacagtttcagagcttcaagggagatctgtaccagaagtatatactgaaggggcagacaccgaacttcgacacattcccaaagctaagggatcactgggacgagttcgttgcatataagacaggtgaacaagggcaggcgatgatggaaagaaacaaagaaaatgccgccaagaagaagtaccatcaccacttggggtcaggaggctatagcgtcgcgatgccgaagtgggaggagatggaggctagcttgattgagaggggtatcgaaccggcaacagccaattggccggaacgatcgaagttctggtactatgctcacggtggaacgctcaacccagctgatggctcactggtcttcggcgatcagatacgagaggctgcgcgacgactaacagatgcagtggaagcctcctctcagggcacgttccgaccagacagagatagggaagagctgacactcgccctgcagactccagagcatccaggacgaacacgagggaaaggggtgattccttggaagattggtttcaaggaggacatccacacgtacaggagtcggatgaggagcaagagagataccgaggcgaagattgcagacctagagttccgggtatcgagttacgaactcaacatgcaagaggaggtggcaaggaaggttgatgaacgcatggccgcacatcggtcccatgatccccagccgaccattcctcctgcaatggtgagcccgtcaggaaaccgtagcagttgcgcctcaacggggcaggtaggatcacagagcatggacgctatgcaaacacaggacgaatcgacctgtcccgttgatgacatcactcagcggacaccatgtgagctgcatattcctttcaagaacttatcaataaaggtggcgtcgggcatggccatcccaacggacccttcaggtacttaccactgcaggccgattccagcaggatactcgaaggtcgaagttgagttggtcgaaggcccgtacgaggacctcgagctggattaccctggaggagacggatcctgcaccgtctcctcctcatgctccgccagcaccgtctccacctcaggctccagcaccgactcctcctcaggatcctgcaccgactcctcctcgggctcctacacctactcctccgcaagctcctcttccggcccttcaaagtcaagggcccccccagctccatcgcctgcccacacaagggcaacgaagaaggcgaaagttgacgccgccaagaacaaggacccggggtacgattgcacgcaagaggagcttgacgcttacgttgcatcagaagtcaagagacaattcaagcctcgaagtccagaaaagaagattcctatagaccccagtgtcaggaaattcttcaggggtatgtctgcatctgtcaaggaggccatcaagctatcggactatgagcgaacgctgaagaaagcatcttctggaaagtccaaaccagtccctcagcttggagagcaaccaaaccaggagatcgagccattggtgaccggtaaagaaatgacgatagaacaatttattactgacaccggtctaactacggatcaattgctaggagtcgcaccaatcgaaaaggcggaagtgaaatacatgtacgaactcggtaaaccgcttgtcaagcctgagctgctgcagtccctacccacacaaatgtacaagttccatcagctgtacatggagatgagcgccaccggtagagagatgatcggagcgaggatcagggacacggacttcttgcaaggagatgacattctctggatcaatttcaggggaatctacgaactataccagctggacgccctcgacgtctctattatgagttgctggattttaatggagattcaaagggcccgacggcggagggttttcgatactggattcatcgaccctcggagagtaaacgtcgcaatgctcgaccaatatccacaagaaacagaggacaatctcgtccatctcctgaaggcgcagcattacaagacgttcatactgttgccgtacaacacagaattccactgggtgcttttactcttcgacctgtcggcctgcaccatcaacgtatatgactcaatggataaaaaagagtctacgtttgacaaggttttcgaatttatagacagggcttggtatcggttccgtcatttggtccgcggcaaatggagagaaagacttaggcggaagttcaaatttccttgcgcaaagcaaaagcagggaactaacttgtgcggctattacgtgtgtgagtattgccactgccttgcagaccaaatcatcaccacaagagagctcgattttattcgcatgagggataacttgaccacacacaaggaatttatcgcaacggttcaagaacaactcatgggattcatcaacgaagaaatccttgatcccaagggtgaattctactacgacgganacacaattcaccggtccttagcttctgagctagcagcgactactactacgttgaaatcgtag

SEQ ID NO: 72525 - DNA, 2893 bp, Oryza sativa
  Clone ID: PAT_MRT4530_72897C.1
atggctgaccgcgatgaggaacagatattgtacgatacaatcgcggagggaagcagccagtactggaatgaagaagaggggaacgaggatccaaaccagtacttgaacgaggaagggaacgtggagagggatgcggaggggaaccagcaggggcacgtggaaagggatgtggaggggaaccaggaggaggaggctagtggtagtcaaccctccgttggacagaagagggcacgcgggcaacgaggtgcagcgaagaagcttgagggtcggcacatcataacggaagtggaagaagatggacgtcctagtgccccggccgaagccgccaagaactatgtacgtcacagcggttgggttgtgcgggataacgtgcctatcagtacggtgtactggcgaagaacaagggcacgcggagatcatgagagctttgtcccagattcggagaaagagatgctgtggaccacaatgctcgagacattcacccttcctgcgggtacagaggacaaagtgaaaaggtggactctgaagaaaatggcagaacagtttcagagcttcaagggagatctgtaccagaagtatatactgaaggggcagacaccgaacttcgacacattcccaaagctaagggatcactgggacgagttcgttgcatataagacaggtgaacaaagggaaggcgatgatggaaagaaacaaagaaaatgccgccaagaagaagtaccatcaccacttggggtcaggaggctatagcgtcgcgatgccgaagtgggagcagatggaggctagcttgattgagaggggtatcgaaccggcaacagccaattggccggaacgatcgaagttctggtactatgctcgcggtggaacgctcaacccagctgatggctcagtggtcttcggctatcagatacaagaggctgcgcgacgactaacagatgcagtggaagcctcctctcagggcacgttccgaccagacagagatagggacgagctgactctcgccctgcagactccagagcatccaggacgtactcgagggaaaggggtgattccttggaagattggtttcaaggaggacatccacacgtacaggagtcggatgaggagcaagagagataccgaggcgaagattgcagacctagagttccgggtggcgtcgggcatggccatcccaacggacccttcaggtacttaccactgcaggccgattccagcaggatactccaaggtcgaagttgagttggtcgaaggcgcgtacgaggacctcgagctggattaccctgcaggagacggtgagacgcatctacgagacacatgccatgccattattctatggcgcaggcggtacatcatcctccctgggcgacaagcggcgtctcgtgcaccatctcctccggctccgccatctcctcctcaggatcctgcaccgtctcctcctcatgctccgccagcaccgtctccaccgcaggctccagcatcgactcctcctcaggatcctgcaccgactcctcctcgtgctcctacacctactcccccgcaagctcctcttccggcaccttcaaagtcaagggcccccccagctccaccgcttgcccacacaagggcaacaaagaaggcgaaagttgacgccgccaagaacaaggacccggggtacgattgcacgcaagaggagcttgacgcttacgttgcatcagaagtcaagagacaattcaagcctcgaagtctagaaaagaagattcctatagaccccagtgtcaggaacttcttcaggggtatgtctgcatctgtcaaggaggccatcaagctatcggactatgagcgaacgctgaagaaagcatcttctggaaagtccaaaccagtccctcagcttggagagcaaccaaaccaggagatcgagccgttggtgaccggtaaagaaatgacgatagaacaatttattactgacaccggtctaactacggatcaattgctaggagtcgcaccaatcgaaaaggcggaagtgaaatacatgtacgaactcggtaaaccgcttgtcaagcctgagctgctgcagtccctacccacacaaatgtacaagttccatcagctgtacatggagatgagcgccaccggtagagagatgatcggagtgaggatcagggacacggacttcttgcaaggagatgacattctctggatcaatttcaggggaatctacgaactataccagctggacgccctcgacgtctctattatgagttgctggattttaatggagattcaaagggcccgacggcggagggttttcgatactggattcatcaaccctcggaaagtaaacgtcgcaatgctcgaccaatatccacaagaaacagaggacaatctcgtccatctcctgaaggcgcagcattacaagacgttcatactgttgccatacaacacagaattccactgggtgcttttactcatcgacctggaggcctgcaccgtcaacgtatatgactcaatggataaaaaagagtctacgtttgacaaggttttcgaacttatagacagggcttggtatcggttccgtcatttggtccgcggcaaatggagagaaagacttaggcggaagttcaaatttccttgcgcaaagcaaaagcagggaactaacttgtgcggctattacgtgtgcgagtattgccactgccttgcagaccaaatcatcaccacaagagagctcgattttattcgcatgagggataatctgaccacacacaaggaatttatcgcggcggttcaagaacaactcatgggattcatcaacgaagaaatccttgatcccaagggtgaattctactacgacggaaacacaattcaccggtccttagcttctgagctagcagcgagtactactacgtcgaaatcgtag

SEQ ID NO: 72526 - DNA, 2874 bp, Oryza sativa
  Clone ID: PAT_MRT4530_72898C.1
atggctgaccgcgatgaggaacagatattgtacgatataatcgcggagggaagcagccagtactggaatgaagaagaggggaacgaggatccaaaccagtacttgaacgaggaaggaaacgtggagagggatgcggaggggaaccagcaggggcacgtggaaagggatgtggaggggaaccaggaggaggaggctagtggtagtcaaccctccgttggacagaagagggcacgcgggcaacgaggtgcaacgaagaagcttgagggccggcacatcataacggaagtgcaagaagatggacgtcctagtgccccggccgaagccgccaagaactatgtacgtcacaacggttgggttgtgcgggataacgtgcctgtcagtacggtgtactggcgaagaacaagggcacgcggagatcatgagagctttgtcccagattctgagaaagagatgctgtggaccacaatgctcgagacattcacccttcctgcgggtacagaggacaaaagcttcaagggagatctgtaccagaagtatatactgaaggggcagacaccgaacttcgacacattcccaaagctaagggatcactgtgacgagttcgttgcttataagacaggtgaacaagggcaggcgatgatggaaagaaacaaagaaaatgccgccaagaagaagtaccatcaccacttggggtcaggaggctatagcgtcgcgatgccgaagtgggagcagatggaggctagcttgattgagaggggtatcgaaccggcaacagccaattggccggaacgatcgaagttctggtactatgctcacggtggaacgctcaacccagctgatggctcactggtcttcggcgatcagatacgagaggttgcgcgacgactaacagatgcagtggaagcctcctctcagggcacgttccgaccagacagagatagggacgagctgacactcgccctgcagactccagagcatccaggacgaacacgagggaaaggggtgattccttggaagattggtttcaaggaggacatccacacgtacaggagtcggatgaggagcaagagagataccgaggcgaaaattgcagacctagagttccgggtatcgagctacgaactcaacatgcaagaggaggtggcaaggaaggttgatgaacgcatggccgcacatcggtcccatgatccccagccgaccattcctcctgcaatggtgagcccgtcaggaaaccgtagcagctgcgcctcaacggggcaggtaggatcacagagcatggacgccatgcaaacacaggacgaatcgacctgtcccgttgatgacatcactcagcggacaccatgtgagctgcatattcctttcaagaacttatcaataaaggtggcgtcgggcatggccatcccaacggacccttcaggtacttaccactgcaggccgattccagcaggatactcgaaggtcgaagttgagttggtcgaaggcgcgtacgaggacctcgagctggattaccctggaggagacggtgagacgcatctacgagacacaagccatgccattattctatggcgcaggcggtacatcatcctccctgggcgacaagcggcgtctcgtgcaccatctcctccggctccgccatctcctcctcaggatcctgcaccgtctcctcctcatgctccgccagcaccgtctccacctcaggctccagcaccgactcctcctcaggatcctgcaccgactcctcctcgggctcctacacctactcccccgcaagctcctcttccggcaccttcaaagtcaagggcccccccagctccaccgcctgcccacacaagggcaacgaagaaggcgaaagttgacgccgccaagaacaaggaccccgggtacgattgcacgcaagaggagcttgacgcttacgttgcatcagaagtcaagagacaattcaagcctcgaagtccagaaaagaagattcctgtagaccccagtgtcaggagcttcttcaggggtatgtctgcatctgtcaaggaggccatcaagctatcggactatgagcgaacgctgaagaaagcatcttctggaaagtccaaaccagtccctcagcttggagagcaaccaaaccaggagatcgagccgttggtgaccggtaaagaaatgacgatagaacaatttattactgacaccggtctaactacggatcaattgctaggagtcgcaccaatcgaaaaggcggaagtgaaatacatgtacgaactcggtaaaccgcttgtcaagcctgagctgctgcagtccctacccacacaaatgtacaagttccatcagctgtacatggagatgagcgccaccgaatggagattcaaagggcccgacggcggagggttttcgatactggattcatcgaccctcggaaaattccactgggtgcttttactcttcgacctggaggcctgcaccgtcaacgtatatgactcaatggataaaaaagagtctacgtttgacaaggttttcgaacttatagacagggcttggtatcggttccgtcaattggtccgcggcaaatggagagaaagacttaggcggaagttcaaatttccttgcgcaaagcaaaagcagggaaataacttgtgcggctattacgtgtgcgagtattgccactgccttgcaaaccaaatcatcaccacaagagagctcgattttattcgcatgagggataacctgaccacacacaaggaatttatcacggcggttcaagaacaactcatgggattcatcaacgaagaaatccttgatcccaagggtgaattctactacgacggaaacacaattcaccggtccttagcttctgagctagcagcgactactactacgtcgaaatcgtag

SEQ ID NO: 72527 - DNA, 2910 bp, Oryza sativa
  Clone ID: PAT_MRT4530_72899C.1
atggctgaccgcgatgaggaacagatattgtacgatacaatcgcggagggaagcagccagtactggaatgaagaagaggggaacgaggatccaaaccagtacttgaacgaggaaggaaacgtggagagggatgcggaagggaaccagcaggggcacgtggaaagggatgtggaggggaaccaggaggaggaggctatgcaagaagatggacgtcctagtgccccggccgaagcagccaagaactatgtacgtcacagcggttgggttgtgcgggataacgtgcctgtcagtacggtgtactggcgaagaacaagggcacgcggagatcatgagagctttgtcccagattcggagaaagagatgctgtggaccacaatgctcgagacattcacccttcctgcgggtacagaggacaaagtgaaaaggtggactctgaagaaaatggcagaacagtttcagagcttcaagggagatctgtaccagaagtatatactgaaggggcagacaccgaacttcgacacattcccaaagctaagggatcactgggacgagttcgttgcttataagacaggtgaacaagggcaggcgatgatggaaagaaacaaagaaaatgccgccaagaagaagtaccatcaccacttggggtcaggaggctatagcgtcgcgatgccaaagtgggaggagatggaggctagcttgattgagaggggtatcgaaccggcaacagccaattggccggaacgatcgaagttctggtactatgctcacggtggaacgctcaacccagctgatggctcactggtcttcggcgatcagatacgagaggctgcacgacgactaacagatgcagtggaagcctcctctcagggcacgttccgaccagacagagatagggacgagctgacactcgccctgcagactccagagcatccaggacgaacacgagggaaaggggtgattccttggaagattggtttcaaggaggacatccacacgtacaggagtcggatgaggagcaagagagataccgaggcgaagattgcagacctagagttccgggtatcgagctacgaactcaacatgcaagaggaggtggcaaggaaggttgatgaacgcatggccgcacatcggtcccatgatccccagccgaccattcctcctgcaatggtggcgtcgggcatggccatcccaacggacccttcaggtacttaccactgcaggccgattccagcaggatactcgaaggtcgaagttgagttggtcgaaggcgcgtacgaggacctcgagctggattaccctggaggagacggtgagacgcatctacgagacacaagccatgccattattctatggcgcaggcggtacatcatcctccctggtcgacaagcggcgtctcgtgcaccatctcctccggctccgccatctcctcctcatgatcctgcaccgtctcctcctcatgctccgccagcaccgtctccacctcaggctccagcatcgactcctcctcaggatcctgcaccgactcctcctcgtgctcctacacctactcccccgcaagctcctcttccagcaccttcaaagtcaagggcccccccagctgcaccgcctgcccacacaagggcaacgaagaaggcgaaagttgacgccgccaagaacaaggacccggggtacgattgcacgcaagaggagcttgacgcttacgttgcatcagaagtcaagagacaattcaagcctcgaagtccagaaaagaagattcctatagaccccattgtcaggaacttcttcaggggtatgtctacatctgtcaaggaggccatcaagctatcggactatgagcgaacgctgaagaaagcatcttctggaaagtccaaaccagtccctcagcttggagagcaaccaaaccaggagatcgagccgttggtgaccggtaaagaaatgacgatagaacaatttattactgacaccggtctaactacggatcaattgctaggagtcgcaccaatcgaaaaggcggaagtgaaatacatgtacgaactcggtaaaccgcttgtcaagcctgagctgctgcagtccctacccacacaaatgtacaagttccatcagctgtacatggagatgagcgccaccggtagagagatgatcggagcgaggatcagggacacggacttcttgcaaggagatgacattctctggatcaatttcacacatatctacgaactataccagctggacgccgtcgacgtctctattatgagttgctggattttaatggagattcaaagggcccgacggcggagggttttcgatactggattcatcgaccctcggaaagtaaacgtcgcaatgctcgaccaatatccacaagaaacagaggacaatctcgtccatctcctgaaggcgcagcattacaagacgttcatactgttgccatacaacacagaattccactgggtgcttttactcttcgacctggaggcctgcaccgtcaacgtatatgactcaatggataaaaaagagtctacgtttgacaaggttttcgaacttatagacagggcttggtatcggttccgtcatttggtccgcggcaaatggagagaaagacttaggcggaagttcaaatttccttgcgcaaagcaaaagcagggaaataacttgtgcggctattacgtgtgcgagtattgccactgccttgcaaaccaaatcatcaccacaagagagctcgattttattcgcatgagggataacctgaccacacacaaggaatttatcacggcggttcaagaacaactcatgggattcatcaacgaagaaatccttgatcccaagggtgaattctactacgacggaaacacaattcaccggtccttagcttctgagctagcagcgagtactactacgtcgaaatcgtag

SEQ ID NO: 72528 - DNA, 699 bp, Oryza sativa
  Clone ID: PAT_MRT4530_7289C.1
atgtctcctgtgccgagtccgcatcaatcacaccatctaggccatggctcaaggaaagagaagcgcatgaggaaggtggatacctttgcgccgcacaacgacggccaccagtggaggaagtacggcgagaagaagataaacaactgtaatttccccagatactactacagatgcacctataaagataacatgaattgcccagcaacgaagcagattcagcagaaagattatagtgatccaccattgtactcagtcacctactacaatgagcatacatgtaatagtgcttttcttcctcttagcccctcagagttccagctgcagactgcatctgggaaggcagtctccatctgctttgaatcatctggggctcaagaaccaatgaccaatgccagctcaccttcttcaagcgcagcacggcgtagcacaccttcagagaacaagaatcagcctcttccacggcattcggaagcctattcttggggggttggtgttgtagaacaaaagccgtcctgcactgagctccaatcttgcagcaccgaatgtcaggatgcattttcagctggtacgattcctgaagagacagtagatgcaggaagatttggttctatcagattcttccattttttgtaaatgaattaatggaagacagtttattttatttcaaagagctaatatgatacacatgttttttcctct

SEQ ID NO: 72529 - DNA, 338 bp, Oryza sativa
  Clone ID: PAT_MRT4530_728C.1
ggggaaaaaaaacttttttttaaaacaaaggttttacaaaaaaaacttttaaaaaaaaaagggggaaaccccccatttttgtttggtggagcccctggtggtggttggttggttttttttaacaaaaaaaaggggggggaagggatccctggacattggtgtttggcaaggggggcttgaagggccttaggtcttcaaaccaaatattggccttgtgggaaatttaacgggggggggggaaaatattttttttcccataaggccccttgagggacaagggcaggtcctcccaccataaaatgggtaaaaccctaattttttttttaaagaaaattagg

SEQ ID NO: 72530 - DNA, 441 bp, Oryza sativa
  Clone ID: PAT_MRT4530_72900C.1
atgggccaagcccacaagccaaaggagagagaagggggggtggctgactgggcgctgacggggcaggcgcgaccggtcaacttgacttggtcaagccgacgtggctgccacgtcggatggggagggagaggaggccgggcggcgcatcggacggccgacggcgcgcagcggaatccggcgaacggcgatgaaccggagtgggcaccaggcaccggaagtggcatggcacgggcgcgactggcgaggcgggcgacggcggcggtgtgccggggaagttcgagagggctcggggatggtggcggcgccgggaatcaaggagtggagggaggccgacggctggggaggcacagcggaggtggccggtcgtggggcacggccaagcgcggcagcggcgaaacgggcgacgtgacgcaagagcgagaggggaggccggcggcctag

SEQ ID NO: 72531 - DNA, 313 bp, Oryza sativa
  Clone ID: PAT_MRT4530_72901C.1
tttttttttttgagagagcacaagccgcgattattttaccctttcatagtcacaaagtaggattaacctaatcttcattcttttaaacctaaaatctacaaatatttgtatacagagtgcaaatagccaaatgcactcttacactaaacaatccataaaaaaaagctcatatacatagtacacaatacaatttccagcacaagcaaaatgtattttttactcatggctgctgtttggaagacgacgaccaagtgctcggatctttgcgagaatacatcgacggtggaggagatggatatggcggtaaaagctt

SEQ ID NO: 72532 - DNA, 159 bp, Oryza sativa
  Clone ID: PAT_MRT4530_72902C.1
atggcggggagcaagcgtccaaggggttggcgaaatatcagcgcaaggcaaacaaatggccaggcttcagtcgctccagtagatgaggtgtcggcctcaggtcaagcaaagctactccacctcctcagcaatggcaggagcagaacaaatcgcagttaa

SEQ ID NO: 72533 - DNA, 1635 bp, Oryza sativa
  Clone ID: PAT_MRT4530_72903C.1
cccctctctctctctcctccacctcgctcccacctcctcctcctcggctttgctgatccaggacgagccaatcgagctcgccggcgggcggagccaccaccaccaccacccatccccggcgccgccatgctggcttccgcgagggggttctgggggcggcaccggcggaagatactggtctcgctcggggtcgccggcgccggctacgccgcgtacaggtacttggactcgcaccggaggcagctcgtccgggtggagcagcgcgcgctggaggagcgcgccgccgaggagatcatcaagaaccaattgcagacccactttgaaaatgtgcagaagatctcagacacgaccacactgccttttgctatgcattatctccgttcaaggatcatggaggaattggatatttcacacctgactgagaagctaatgcacgggaagggagaatccagtgcccctgccctgacaccaaaggagaagtatgacacttgggagaagatcaaaattttgagtttcacaaggactgtttcttcaatatgggcgatgacgttgcttagcttatatgttagagtccaggtcaccatattaggcagacatctctacttagattttgctcgtgttacggatggtgcgcaattacaggagggttctgacacctttagcaaaagcgggcacaaagactttcttgcaactgctgattaccttgccacatatggtatcaatgcattaattacaaagatgcagcatgctgcaacagaaatcttgaaagagaaacaactgaaagaccctatgggcattgatgaagtcctagaaacaattttacaaatattgaagcagttcatgggtctttgtgaagataactcttggataaactaccttgtacctgagaatgccaatgtgtatgcacagttgatggctgtgtccagtagtggctttgatgattcttcacttctgaaggatgttaggaagcttgatcagttaatgtctgagacacgtatagttttgtcaagaaatatcatggatagatcattgaagaagatagctagcgtggtggtagaggacttggctgtacagattggagctccaattcctccacctggattgcccttagcaaagctcttggccaaagtagctcaactgagtttgccattgctcgaggagccagataagaacaagcacattcagattatccgaagtatgcctgaagtggaactcttttacactttcctctacgcaaacatgccaccagaaacataatgaagcacactaatgtggaatgcaatacattggtcccgaattttgccattagaacaagtctgatattttgagcactttctgaactccggaaacagaaggcggagagaagactgatttatgctccttgcccctatgtatgctggagatgtccagttgtcactaacacggatctaactgagcgcagtcctttcttaattcatttctcggcttgtgtgcttctagctagaaccagcactgtttcagccctttttttatatatatttttgagatcttactatggaaattgtacttgaccagggtttcaatggtttatgtaaagtgtgatatacatgtgactatttctttgctccttcattcagaatgtaaaattttctaccc

SEQ ID NO: 72534 - DNA, 122 bp, Oryza sativa
  Clone ID: PAT_MRT4530_72904C.1
gattccatcaggccagattgttctcttcccccttattagcaagggcactagaggagatgacacatttcacataagctatggcaagatacaacacacattgcttattactggtatcgagcgga

SEQ ID NO: 72535 - DNA, 183 bp, Oryza sativa
  Clone ID: PAT_MRT4530_72905C.1
atgacgtttgtccgttacttctggctggtggggcccagttctattcatggtggggtgggctgccagctgttcctctgtttcgtcgtcttctccagcccggaatatgaagccttgccggatttttttgggaaggacaaaaattggtttttgctaaaattttcgagaatgattgccatcgggtga

SEQ ID NO: 72536 - DNA, 366 bp, Oryza sativa
  unsure (1)..(366): unsure at all n locations
  Clone ID: PAT_MRT4530_72906C.1
tccgtccagttngggaggangcctgtctganttctcctggtgnacnatctcctcgtcacanccgctgcggcngaatgcnacctcngaanacttcatgaacgcggtctccttcaggatccacgcggttggcacgannggcggggcccggcgggctcctaccgaagcnaactnaangtggcgatcnacnggttcngccncntccggcgcaacttcctgnggtgctggcacnggcgcgggccacncctccccctcgaantcttcgccttcaaccacnccgggatgccttaaccnggnttctcagctcctccagttacactccccnctcngggctcntcgactcccantctttttcngttggcncataac

SEQ ID NO: 72537 - DNA, 365 bp, Oryza sativa
  Clone ID: PAT_MRT4530_72907C.1
tcttaccaggggaatcgaacagatcaggaatcggcggcttcggccacggcggcggcggcggatacaccaagaaaatatgggatgccattgccagttggataacctgtgcatccatggcgccggtaagctggacacaatcgaccacggttcatgaatggtgggaatttcttgccacatgccacactgtaccaaaacttggaattatatccttaatcctcctaatctcctgggaaatttggaacgagtgaaaccgacaaatcttccgaaacaaagagttaagcactgcgacctcatcgcaaagataaaggatgaggcaaaagcttgggctacggcgggaagccaaacgctcagcagagatgttgcct

SEQ ID NO: 72538 - DNA, 135 bp, Oryza sativa
  Clone ID: PAT_MRT4530_72908C.1
gcccaggaggaagcccacaggctgaggggtacgcgagggttcggccaaaccctaggatcagccaaaccgccatcatgcctcctcgccatctgcttccacgtggacgtccaggattacctcccaatgatggttacg

SEQ ID NO: 72539 - DNA, 327 bp, Oryza sativa
  Clone ID: PAT_MRT4530_72909C.1
cagaaagccagacattcttgggggctgaatctctgcaaatatatatacatctttcaatggacagatgacagagtagaatccagctgaattatcacactcgggatagaaaacatctgaaataattcacacatatatttccaaactttcactgaatcagaagagaagaggagagagtagattaatattcatgagcagcttgcacacatggtcgatcgtcagggcgacgccggcggcgagctctggccgcgctcggcgacgtcggcgtataggagagcgttgtgccgttccgacgggccggacagcgggaggaagtcctacttccgcctg

SEQ ID NO: 72540 - DNA, 1652 bp, Oryza sativa
  Clone ID: PAT_MRT4530_7290C.1
tagctgttgggaactagctgttgtaatatggagtctgttggagtgtgttggaatatggagagcgaactagccgttgggatatggagagtggaatatggagagtctgttggagtgtgttagaatatggagagcgaactagccgttgggatatggagagactgttggagtgcactggaatatggagagggaattctgtggagagatggagagccaaatttgccaatttggtacctttctagaagtcaacaatcagcattcagcaactccaaaaggaaaaaccattccagttaaatgcacagactgcctcccaggagtggcttcccgctcgctcaccgtaatcccacttgaagttccacacgacgttcttctttctgcaagggaagccaaaactcaatacaatagcacatttgaacacaatctcagtgagaccaacttcgtaactggtacttacaatggagctcaccatgccaatgtgaaggatgtaccacctgacatttatgagacagaatttaggcatcaatttccaaggattgaaacttctttttcaatcattggagcacatttcctgtcaagtatggtgaggaggggtagaaggaaaggcgtgaggtacatcgaagaggatagagatcgcagcctcaccctcagcaagaggcgtgatgggctgttcaagcttgcaaatgacctctcccttctcactgatgcaagcgtcgcaatttgcctacatgacagcaataaggcacaattctttggggcaccatcggtgaaacctgttgtcgatgcttttgtatctgaggcagagccatttgccgatgaacaactgaaggccaagcttacgtcaatgcaaagtgagctggtccagctagagaatgaagaagaagagaaggacaagaagactgaagaatcaatccagcgcttcaaggaggcccaagaagagagcttaggtatgggtatggccaagcatctattctccaggctagaggatctcagccacgatgatatgcgtgaacttttagatgtactcttgccgctccagcaagatttcaagaagcggctgcctcccctacgtcgtgggcagcaagctgcaaattggtggatcaagtgcgtgggcacatcagcagccctcgtgttctcgcttcttggcctcacaccgtccattcactccattacttcctggagggacatcaggagttccgatgatacctccgcctccagtgccgggctcaccatggtctcagatatttccgctacggccaccactgtttccttctccagagttagtgccatcccaacaattaccaccagtatcaccgccgcagaacacagtggcacctcctccaatgcatgctccattggtgcaacagccacttactaatcaatcatcggcggttcccctgctgacgcaatggcaaatgcgttttggggatcagccacccgctgaagtgcaagcatgcactcccgtagagcaacctcagaatgacaatgcagtccataccccaaccttcagcgacagtttccttttggagttgttggctgatgtcagcgatgatggcattgctactgctgaaccattgtgttctcctcctattgatgaccagtttttggctgacatcgactggcttgctgaattggacactatcgatggaaatttatag

SEQ ID NO: 72541 - DNA, 310 bp, Oryza sativa
  Clone ID: PAT_MRT4530_72910C.1
atgcagctcaacccgaaagcaagaactcgtcgaaataaaactaaagcaaaaagggtggcgatgcgccgagattgtattgaacgtgactctatccatgcgcggcaatcatcttgaagcatatcaacccaacccgatgttgtacaccaagtcgtattgtcggaatcggctgcaccacttaaccaagtctgactcgaacttagccaatccggactatagctgattcttactctgtttccgcgataatcctcatctttgattccgcttcgatctaatcttcctttccgatgctgatattaccaagtttggttgt

SEQ ID NO: 72542 - DNA, 249 bp, Oryza sativa
  Clone ID: PAT_MRT4530_72911C.1
atgttcgcctctatcggctgcgtcgctggcattgagttcgtgcgcaccaatggcttccactacccctccgaaaaggcccttgccaagctcttctccactggctgtcaacgagccgagctcgagcgagctcgtctgcctaggctcgagctcgatacaaagccgagctcgagccgagcctataaaatattcgagctttctgacaggctcggctcgagctcgaccaagctcgagctcgactaccgagcttga

SEQ ID NO: 72543 - DNA, 3060 bp, Oryza sativa
  Clone ID: PAT_MRT4530_72912C.1
atggcgtcgtcgtcgccgctgaaggcgtcgtcgggtgtgcttgttgttgtgctcctagatgatgtcggcgtggatggtgccgttgcccttgcgcagcccgtcggggaaggagaagagccagggccgcgccgctgcacgtacccggcgctgccacgcggcaaaagcggcggcggtctccgggtggaagtaggtcgtgtaagggacggcgaggttgttccgattccatgggctcgcctcgacgaggatcgccgttatgttctcaacggcggggttgccaagatggtgaggtttacggcggaggagctccgcgcgagcatggataagaaggacaacatccggaacatgtctgtgatcgcgcacgttgatcatgggaagtcgacgctcactgactcgctggtggcggcggccggcatcatcgcgcaggacgtggccggcgacgtgcggatgacggacacgcgcgcggacgaggccgagcgcggcatcaccatcaagtcgacggggatatccctctactacgagatgacggacgcggcgctcaggagcttcgagggcaagcgcgacggcaactcgtacctcatcaacctcatcgactcgcccgggcacatcgacttctcgtccgaggtgacggccgcgctccgcatcaccgacggcgccctcgtcgtcgtcgactgcatcgagggcgtctgcgtccagaccgagaccgtgctccgccagtcgctcgccgagcggatcaagcccgtcctcaccgtcaacaagatggaccgctgcttccttgagctgcagcaatccggtgaggaggcgtaccaggcgttctcccgcgtgatcgagagcgtgaacgtcaccatggcgccctacgaggacaagaatctcggcgactgcatggtggctccggagaagggcacggtggcgttttcggccggcctgcacggctgggccttcaccctgtccaacttcgccaagatgtacaaggccaagttcaaggtggacgaggccaagatgatggagcggctttggggcgagaactacttcgaccataccaccaagaagtggacgacgaccgcaccatcgacgtcgtccaagacgtgccagcgcgggttcgtgcagttctgctacgagccgatccgccggatcatctcggcgtgcatgaacgacgacaaggagaatctgtgggacatgctgacgaagctcaagatcacgctcaaggctgaggagaaggagctgaccggcaaaaagctgatgaagcgcgtcatgcaggcgtggctcccggccagcgacgcgctcctcgagatgatcgtcttccacctgccttccccagccaaggcgcagcagtaccgcgtcgacaccctctacgacgggcccctcgacgacccctacgccaccgccattcgcaactgcgaccccaagggacccctcatggtgtacgtgtccaagatgatcccggcgagcgacaaggggaggttcttcgccttcggccgcgtcttctccggcacagtggccaccggcaacaaggtgcggatcatgggccccaacttcgtgcccggcgagaagaaggacctgtacgtcaagacggtgcagcgcacggtgatctggatgggcaagaagcaggagtccgtggacgacgtgccttgcggcaacaccgtcgccatggtcggcctcgaccagttcatcaccaagaacgccacgctcaccgacgagaaggcggtggacgcgcaccccatcaaggccatgaagttctccgtgtcgccggtcgtgcgcaagtcggtggcctgcaagaacgcctccgagctgcccaagctggtggaagggttgaagcgcctcgccaagtcggaccccctggtggtgtgcaccattgaggagtccggcgagcacgtcatcgccggcgtggggcagctccacctggagatttgcatcaaggatctccaagaggacttcatgggcggcgccgagatcatcgttggcccgccgatcatcacctaccgtgagaccgtcaccaaaaactcgtgtcgcaccgtcatgagcaaatcgccgaacaagcacaacaggctgtacatggaggcccggccgctggacaaggaggacctgcagcaggatgaaccgtcgctgtgcaaggcgattgacgacgagcgcatcggccccaaggacgacatcaaggagcgcggcaagatcctctcggaggagttcgggtgggacaaggatctggccaagaagatctgggccttcggcccggagaccaagggccccaacctgctcgtcgacatgtgcaagggcgtccagtacctgagcgagatcaaggactcggtggtcgccggcttccagtgggcgtccaaggaaggcgcgctcgcggaggagaacatgcgcggcgtctgcttcgagctctgcgacgtcacgctgcactcggactccatccaccgcggcggcggccagctcatccctaccgcgcgccgcgccatgtacgccgcgcagctcacggcttcgccgcgcctgatggagcccatgtaccaggtggacatccaggttcccaagacggcggtgggcaacgtctacggcgtgctcaacagcaggaacggcgagctggtggaagagagcgagaggactggcacgcccttgtccaacctcaggttctacctccccgtcgccaagtcgttcgacttcaccgagaagctgcgcgccgagacgtccggccaggccttcccgcagtgcatcttccaccactggcagaccatgcggtctgatccgttccaggagggctccgaagctgccaaggtgatcaccgacatcaggaagaggaagggtctcaaggacatcatcaccccgctctcagactacgaggacaagctttgagctgcctctctacatacgtatcctagttttgagtttttgagttttgagtttggtctaattttgagtttttgagtatggtcctggtctttcaaattaagtgtgtctcctgtctcttcctctgctaactgtttcgagtctgatattggttagccagcctttgtgccagtcagtttaggatgaaatggtgagttaagtagttgcaagttatgtttacctttc

SEQ ID NO: 72544 - DNA, 1734 bp, Oryza sativa
  Clone ID: PAT_MRT4530_72913C.1
atggcgcggcgtcacgggtggcagctccccgcccacaccctgcaggtggtagctataacggtgttcttcttgttgtgtatagaattctatgctttcttttcaccatttcttgggaaggacttgtatcaatttatcgcaataggtgtttatagttttctggccttatcagtactgattctatatgtaagatgtactgctattgatcctgctgaccctggaatcatgattactgtcaacggtgctctaacctataagtcagaagaggattgtcgcaaagatgacgaagcttaccaacaagaagattatgatgaagaggcactcttttgcaccctttgcaatgcagaggtgcggaaaaatagtaaacattgtcggagttgtgacaaatgtgttgatggttttgatcatcattgccggtggctgaacaattgtgttggaagaaaaaactatgtcacatttctgtgccttatggctgtgagccttgcttggcttgctgttgagtccggagttggtattgctgtttttgtccgttgcttcactgacaaagcagctattgaagatcagataggggaaaagctggggtatggtctttcacgagcactctttgcagctattggggccctgggtacagctctttcaatgcttgcttcagtgccacttggggagctattcttcttccatatgatattaatccggaagggcatcacaacttatgaatatgttgtggcaatgagggctcagagtgaacctcctggtccttctgtcaatgatgaacaacaaagcctgccatcatctcccatgagttctgcaccgactgctttcagtgggagctcatttgcacggcactacaaaggtgcgtggtgcactccaccacgcatatttattgaccaggatgaaatcatcccacacctgcaacctggacgagtgccttcaactgttgatcctgatagcatgaacccgactgaaagagccaaacattatcctaaacgtcccgtgcgcattagcgcatggaagcttgcaaaactggattcaaacgaggccatgaaagcagcagcaagagccagagcctcttcatctgtgcttaaaccggtcaatacccgtgcccaatacgaggcagaccggtgttccagtgataataccagctgcagaagcagtgtcatgagtgttgatattggaaaccacatcaacagtcggtctgtccggaattctcaatacaagtcctcttatccacccagcagagcaagtgcagatgacattgagctgtatccccagacaccaagtagctttcaaagcaactctcagactccaacaccgatttcagagcaccatcctgcaaagcatttcaatccaatttatcagacatcagcaaacaggtctccattctcagcagtagcaagtggtgtcaatgaagcgtctgtctcagatatcagcacaaggaggtttggtgcatcgaacgcagacagatcttctcgttcatctgtttactgggatcaggaagctggccgcttcgtctcttcccaggcaaaccatggatccagctctcgtttgccccgtagtgaccttctttacactggacagtctatattctttggtggacctctgatgacagatcctgcaacaagaagtttcagagatcctggcggttcgagccaacgcgctggtgcttctcggccgcatcagctccccgtgttcgttcctagtgatccccagaaagatcgtttctctaggctaccttga

SEQ ID NO: 72545 - DNA, 815 bp, Oryza sativa
  unsure (1)..(815): unsure at all n locations
  Clone ID: PAT_MRT4530_72914C.1
atgaccgacaaaaggagcagccagcaggccctaacagaaggggcggtttgccacaagaggtctgcagaggagtgcggggtcggtggacagcggtgggagccactgcaacaacgggtggatccgctatcgcctggcaccttgatgggcagatccggccccaacgaccttgtgtcggctagacctagtggcggcagcaaaagggtagggaggggtggggccaaaggcattacatctggcgagataccattatatgtcgccacaaagatgtcacctgtccagggtaactcgccgtttataccatcacccgaggagtacgccaaggctgctgtccgctgcatcggttatgagccaagatgtgtcccctactggcgccactcgatccagtggttctttgcatctctactgccagattctgttctgaatctatggcgtctccaggttggaatccggaagagaaatcagatgaaggttctgcttggtgagagcgatcatggattcagttaatcgcccataaaatgttgggttttgttgaaagtgctgttgttaatctattccgaacaaanatagtatatacatcaatctgggatttgggtagtagtatatacttcgatgagttatgtgctgaatataatggaatggcatttagtgtttgttttgaactttgggtagtggttttgtttgcacctctagcactattttttattggtttgtgcgagttggaattattagtacttttccattcagtgtaatcgagaaataaacaatgtaaaatatgatgatgaatcttagtattccctccaaaaaaaaaaaaaaaa

SEQ ID NO: 72546 - DNA, 1593 bp, Oryza sativa
  Clone ID: PAT_MRT4530_72915C.1
ccggccgggggtctcatacaaaccccgcccgcatccgcacccggcgctccggccgccgcggccgttccctccccccctcctcccgatccacccctcccgccgccgccaccgccaccgccgccgccgccggccggcgagagagacaggatgtacgggtgggagatgctctcgttcaacatccacgacggcttcctggaggccatcgtgcgggggaaccggtcgggcctcctcaccgccgccgactacaacaacctctgccagtgcgagaacctcgacgacgtcaagatgcacctcaccgccaccgagtacggcccctacctccagaacgaaccttcacccctgcacacaactacaattgtggagaagtgcactcttaaactggttgatgagtacaaacacatgatgtgccaggcgactgaaccactatccacattcttacagtatataacgtatggccacatgatcgacaatgttgtacttattgttaccggaacattgcatgagagagatgttaatgaactattggagaaatgccatccattgggaatgtttgacagcattgcatctgttgcagttgctcaaaatatgcgcgagctttacagattggttttggttgacacaccgttagccccatacttctcagaatgcattacatctgaggatttggatgacatgaatatcgagattatgaggaacactctttacaaagcataccttgaggacttttacaaattctgtgaaaaacttggtggtgcaactgctgagattatgtgcgatcttctgtcatttgaagcagacagaagagctgtgaacattacaataaacaggtatccatatggtcatgaagaactggctgtttgtgaagatgttgatcaggtccgtggtgtaatggagaagtaccctccataccaggctatttttgccaaaatttcgtatggggaaagccaaatgttggataaggccttctatgaggaggaagtgcggaggctgtgcttgtcatttgaacagcagttccactatgctgttttctttgcttacataaggctacgggagcaggagattaggaacttgatgtggatatcagagtgtgttgcgcagaatcagaagaacagggtccacgacagcgttgtgttcatcttttgacctgctcctgccactccacggatggttgtacaaaatgccaggtttgatgatggcacaatcggctgcgataattataagcacatgacttattatgccccattcatttctctttctgctctgctcgaaagcaagaccatgagtgaatgtactattgttttactttttgtagtaaaataaaggcttgattatcttgtggtaaattgaataaatcctgtctattttgggaggctgtaactatcaatatctagtgaacatggaacagtttgttggcttattgccaacatccaaattgcgcccaactctgttttggtgcatcaggttctgttctaattttctacttatgtaacctgacggagtataaagagagaatgtttctcttttttgacattttggtaaaatataaagttgcctccgggaagatggtcatgttttggttttaactcaacaaaa

SEQ ID NO: 72547 - DNA, 511 bp, Oryza sativa
  Clone ID: PAT_MRT4530_72916C.1
gcacgagggcccgggacttccccctccgaggcgaggtggttcctccatccaccggaggctgggggggtggcgtctgggcctgcccctccggcgccgaggtggttccccgcccacctttgcctcccacctttttttgctatttgttcccgaaagtgcgttatgcaggtattgtagatgctcgataaaatgcttactcgatggaacgacgcgagggggggaggtcacaactaggagttcagcggttgtggaggggcaatgatgttggatttggcagtgcataaggccccagattagtgtctgctcccatatggtttgtaaattgtaattcggattccaggcaatccattgagttgtgcagcggcatttcactcttccagttgcaattgacattgttatctagatttttgagattttcataaaactcatccaggtcgcttgagttgtgctgcaggcaagcttcctgaatcctgagagaattttgcacatgtattgcactttcaggttttataaa

SEQ ID NO: 72548 - DNA, 1087 bp, Oryza sativa
  Clone ID: PAT_MRT4530_72917C.1
ctctcgttcaacatccacgacggcttcctggaggccatcgtgcgggggaaccggtcgggcctcctcaccgccgccgactacaacaacctctgccagtgcgagaacctcgacgacgtcaagatgcacctcaccgccaccgagtacggcccctacctccagaacgaaccttcacccctgcacacagcggcggttgtggagaagtgcactcttaaactggttgatgagtacaaacacatgatgtgccaggcgactgaaccactatccacattcttacagtatataacgtatggccacatgatcgacaatgttgtacttattgttaccggaacattgcatgagagagatgttaatgaactattggagaaatgccatccattgggaatgtttgacagcattgcatctcttgcagttgctcaaaatatgcgcgagctttacagattggttttggttgacacaccgttagccccatacttctcagaatgcattacatctgaggatttggatgacatgaatatcgagattatgaggaacactctttacaaagcataccttgaggacccggccgggttctgtgaaaaacttggtggtgcaactgctgagattatgtgcgatcttctgtcatttgaagcagatagaagagctgtgaacattacaataaacagtattggtacagagttgactagagatgaccgtcggaagctgtactccaactttggtttattgtatccatatggtcatgaagaactggctgtttgtgaagatgttgatcaggtccgtggtgtaatggagaagtaccctccataccaggctatttttgccaaaatttcgtatggggaaagccaaatgttggataaggccttctatgaggaggaagtgcggaggctgtgcttgtcatttgaacagcagttccactatgctgttttctttgcttacataaggctacgggagcaggagattaggaacttgatgtggatatcagagtgtgttgcgcataatcagaagaacagggtccacgacagcgttgtgttcatcttttgactgctcctgccactccacggatggttgtacaaaatggcaggtttgatga

SEQ ID NO: 72549 - DNA, 726 bp, Oryza sativa
  Clone ID: PAT_MRT4530_72918C.1
gcaaaatagaaagatctagtgtcccgctagcaaatgaagatctatttgcgtctttgctgctgcctgggctgattggctggctatggcagcagcctgctggccgccagtttgatgttttaaggtcaaagttatagcgcaatatgcaagctcgcagtcgcctgtgccctgcttaacaagcaaacaaggtgcttaagcccccaattattaattgaagtttccgttataaggccaacgccagttaattggcaattaaccggccaaagccccctttcctttgccaaattccaaccttgccaattttccaaaccttggaaggaaaaccaaaccccaagttccttggccaaaccattcttccggccgccttggtttggccgccaaaccaaattcctccaaccttaattccaaggaaaccaataaaacctttgtttccaaggccccattaaggccgccaaccaacttaaccaacttcaccaaccaattttggtttgattcttcctccaccttgaattccggaattcttggccttcacaagcttccaacttctttgggcctttaaacccgtcccttcttaagaataattggtaatcttaaccttaaggttaattatgggccaccttaagacccataccaccctggccgttcctggtaaggaagtttaccgtataatggttccgaaatttaaaaataactccaggataatcaatcatagggcaaaaaaaaaaaaaa

SEQ ID NO: 72550 - DNA, 434 bp, Oryza sativa
  Clone ID: PAT_MRT4530_72919C.1
cggacgcgtggggcccatgttaaaaaaggttggctgatggcttacttctacaataccaaggttctgggggggtacgggaccaaagatcctgaccatgtggagggggctaaagtttttaagggccattacatgcctggttaacgggattttgttaataatcattacccttttggtctttcctggggtccagtagggggagcacatgattcccaaccaagggctactgttccagttcataaggtaccgggggctaaggttccccttccacctgctttaccttggtgacccttttttaccacagagaaatttcttaaattcgtccagcctaaagaaggaaggtcagttgtctttaaggaaataagttaaggcaaagctttgaccacaggtttgcaaaaggttactgttgacatgaaaactaaaaaccggtttgataa

SEQ ID NO: 72551 - DNA, 282 bp, Oryza sativa
  Clone ID: PAT_MRT4530_7291C.1
actttttgtgtatgacatcctgaatatccgcttgggagggtttcttccaggatgccttggaacacccaccaaaggcattcaagggaaccttgaacgacaagcagcctggctcctacagaagtgtgcaccaactcaaaggggagcagaagaacatgtcggtaacccaaggcgggacacacgggacgcaaggccctgatgaccttgacgggataagcccactctcaagggtatatcaaaaaaagctctaaaagtcccgtccgagaccgatgcatcgacaaacat

SEQ ID NO: 72552 - DNA, 2115 bp, Oryza sativa
  Clone ID: PAT_MRT4530_72920C.1
atgggtctctgtcatggcaagccgagccaaatcccggagcccgaggcggaggaggcggcggcggcggccggtgtagccgtcgccggcgccgcctcgccgggtccggctgcggcggcggcggcggcggcggcggcgaagccgggcacgccgaagcagccgaagttcccgttctacctgccgagcccgctgccggcgtcgagctacaagagctcgccggcgaactcgagcgtggcgtcgacgccggcgcgcggcgggttgaagcggccgttccccccgccgtcgccggcgaagcacatccgcgcgctcctggcgcggcggcacgggtcggtgaagcccaacgaggcgcccatcccggagggcggcgagaccgaggtcggcctcgacaagggcttcggcttctccaagcacttcttcgccaagtacgagctcggcgacgaggtcggccgcggccacttcggctacacctgctccgccaaggccaagaagggcgaccacaagggccacgacgtcgccgtcaaggtcatccccaaagccaagtatttggtagaacgttggttgattcaagcacgaggatattggaaaaaaggagccacctttagccggcacttcgttttcgttttagctcccggggtgctcgtgattattgttgggagcattgattggcttcatgccatgctcatggtttcaacgcttgtcgagttcttggtgccaccaccatcttttgtcctcacgcttccatcatcggggtcggggagggtaaatggagcagatgaccctctttggatagatctgcagatgacgactgctattgccattgaagatgtcagaagagaagtcagaatattgagttcgctgacaggacacagtaacctagtgcagttctatgatgctttcgaggatgaagataatgtgtatatagttatggagctatgtaaaggaggtgaactactggataggattttggcaagaggtggaaaatactctgaggaagatgcaaaggttgttatggtgcaaattttgagtgttgtgtcattttgccatctccaaggtgttgtccatcgtgatctgaaaccagagaattttcttttcacctcaaaggatgaaaactctgccttgaaggtcatagactttggcttgtctgactttgtgaagccagatgaaagacttaatgacattgtcggaagtgcatattatgttgctcctgaggtgcttcatcgatcttatggcactgaggcagatatgtggagcattggagtgattgcctacattttgctttgtgggagccgtcctttctgggcacgcaccgaatcaggaatatttcgagctgtgctgaaggcagaaccaagttttgatgaggctccatggcctactctcactgccgaagcaaaagactttgtaaaacgactgcttaataaggattaccgcaagaggatgactgctgcacaagctctcagtcatccgtggatccgaaattctcaacaagtgaaaatacctttagatatgataatctacaagcttatgcgagcttatatcagttcgtcttccttgcggaagtccgctttgagggccctagctaagacattgacggcaaatcaactgttctatctaagagagcaatttgaattgttgggtccaaacaagaatggttatatctccttgcaaaatttgaaaacggccttggtaaagaattctacagatgcaatgaaggattctagggttattgactttgttaacacggtgtgcactcttcagtacagaaaattggattttgaagagttcgctgcttctgccgtcagcgtttatcagatggaagctttggaaacatgggagcagcacgcacggcgtgcatacgagctattcgataaggagggcaaccgacctattgtaattgaggagcttgcatcgccttctggtaccaatgcaacaatctctgctcctcactgtccattgatgatgggagaatctgcatttttactgcaaggctgcatctacccaagcatatgcatatattcatggcgatatgcatatatcaccaatgaccttggccgatccgcagaagccggggatctaaaccatttccattctctaaaattcagagtatcaccagaattctga

SEQ ID NO: 72553 - DNA, 2685 bp, Oryza sativa
  Clone ID: PAT_MRT4530_72921C.1
atggctgaccgcgatgaggaacagatattgtacgatacaatcgcggagggaagcagccagtactggaatgaagaagaggggaacgaggatccaaaccagtacttgaacgaggaagggaacgtggagagggatgcggaggggaaccagcaggggcacttggaaagggatgtggaggggaaccaggaggaggaggctagtggtaatcaaccctccgttggacagaagagggcacgcgggcaacgaggtgcagcgaagaagcttgagggtcggcacatcataacggaagtggaagaagatggacgtcctatgccccggccgaagccgccaagaactattacggtgtactggcgaagaacaagggcacgcggagatcatgagagctttgtcccagattcggagaaagagatgctgtggaccacaatgctcgagacattcacccttcctgcgggtacagaggacaaagtgaaaaggtggactctgaagaaaatggcagaacagtttcagagcttcaagggagatctgtaccagaagtatatactgaaggggcagacaccgaacttcgacacattcccaaagctaagggatcactgggacgagttcgttgcatataagacaggtgaacaagggaaggcgatgatggaaagaaacaaagaaaatgccgccaagaagaagtaccatcaccacttggggtcaggaggctatagcgtcgcgatgccgaagtgggagcagatggaggctagcttgattgagaggggtatcgaaccggcaacagccaattggccggaacgatcgaagttctggtactatgctcacggtggaacgctcaacccagctgatggctcactggtcttcggctatcagatacaagaggctgcgcgacgactaacagatgcagtggaagcctcctctcagggcacgttccgaccagacagagatagggacgagctgacactcgccctgcagactccagagcatccaggacgaactcgagggaaaggggtgattccttggaagattggtttcaaggaggacatccacacgtacaggagtcggatgaggagcaagagagataccgaggcgaagattgcagacctagagttccgggtatcgagctacgaactcaacatgcaagagaaggtggcaaggaaggttgatgaacgcatggccgcacatcggtcccatgatccccagccgaccattcctcctgcaatggtgacgtcgggcatggccatcccaacagacccttcaggtacttaccactgcaggccgattccagcaggatactcgaaggtcgaagttgagttggtcgaaggcgcgtacgaggacctcgagctggattaccctggaggagacgcaccgtctccacctcaggctccagcatcgactcctcctcaagatcctgcaccgactcctcctcgtgctcctacacctactcccccgcaagctcctcttccggcaccttcaaagtcaagggcccccccagctccaccgcctgcccacacaagggcaacgaagaaggcgaaagttgacgccgccaagaacaaggacccggggtacgattgcacgcaagaggagcttgacgcttacgttgcatcagaagtcaagagacaattcaagcctcgaagtccaaaaaagaagattcctatagaccccactgtcaggaacttcttcaggggtatgtctgcatctgtcaaggaggccatcaagctatcggactatgagcgaacgctgaagaaagcatcttctggaaagtccaaaccagtccctcagcttggagagcaaccaaaccaggagatcgagccgttggtgaccggtaaagaaatgacgatagaacaatttattactgacaccggtctaactacggatcaattgctaggagtcgcaccaatcgaaaaggcggaagtaaaatacatgtacgaactcggtaaaccgcttgtcaagcctgagctgctgcagtccctacccacacaaatgtacaagttccatcagctgtacatggagatgagcgccaccggtagagagatgatcggagcgaggatcagggacacggacttcttgcaaggagatgacattctctggatcaatttcaggggaatctacgaactataccagctggacgccctcgacgtctctattatgagttgctggattttaatggagattcaaagggcccgacggcggagggttttcgatactggattcatcgaccctcggaaagtaaacgtcgcaatgctcgaccaatatccacaagaaacagaggacaatctcgtccatctcctgaaggcgcaacattacaagacgttcatactgttgccatacaacacagaggcttggtatcggttccgtcatttggtccgcggcaaatggagagaaagacttaggcggaagttcaaatttccttgcgcaaagcaaaagcagggaactaacttgtgcggctattacgtgtgcgagtattgccactgccttgcagaccaaatcatcaccacaagagagctcgattttattcgcatgagggataacctgaccacacacaaggaatttatcgcggcggttcaagaacaactcatgggattcatcaacaaagaaatccttgatcccaagggtgaattctactacgacggaaacacaattcaccggtccttagcttctgagctagcagcgagtactactacgtcgaaatcgtag

SEQ ID NO: 72554 - DNA, 3215 bp, Oryza sativa
  Clone ID: PAT_MRT4530_72922C.1
atgccgccgccgccatgccacgccgccgccgccgccgccgccacgccgccgggccaaccggcgccccgatgccgccacaccgccgttaacgaacgagaacgagaacgatcgaacgaacgagagcgagaacgaacacgtcaacaaaagacgtgttgtcggagtcgtccgtcaagcctgagtggaagagctagccctagaaggaattggagcaggcaaatggctgaccgcgatgaggaacagatattgtacgatacaatcgcggagggaagcagccagtactggaataaagaagaggggaatgaggatccaaaccagtacttgaacgaggaagggaacgtggagagggatgcggaggggaaccagcaggggcacgtggaaaaggatgtggaggggaaccaggaggaggaggctagtggtagtcaaccctccgttggacagaagagggcacgcgggcaacgaggtgcagcgaagaagcttgagggtcggcacatcataacggaagtggaagaagatggacgtcctagtgccccggccgaagccgccaagaactatgtacgtcacagcggttgggttgtgcgggataacgtgcctgtcagtacggtgtactggcgaagaacaagggcacgcggagatcatgagagctttgtcccagattcggagaaagagatgctgtggaccacaatgctcgagacattcacccttcctgcgggtacagaggacaaagtgaaaaggtggactctgaagaaaatggcagaacagtttcagagcttcaagggagatctgtaccagaagtatatactgaaggggcagacaccgaacttcgacacattcccaaagctaagggatcactgggacgagttcgttgcatataagacaggtgaacaagggcaggcgatgatggaaagaaacaaagaaaatgccgccaagaagaagtaccatcaccacttggggtcaggaggctatagcgtcgcgatgccgaagtgggaggagatggaggctagcttgattgagaggggtatcgaaccggcaacagccaattggccggaacgatcgaagttctggtactatgctcacggtggaacgctcaacccagctgatggctcactggtcttcggcgatcagatacgagaggctgcgcgacgactaacagatgcagtggaagcctcctctcagggcacgttccgaccagacagagatagggacgagttgacactcgccctgcagactccagagcatccaggacgaacacgagggaaaggggtgattccttggaagattggtttcaaggaggacatccacacgtacaggagtcggatgaggagcaagagagataccgaggcgaagattgcagacctagagttccgggtatcgagctacgaactcaacatgcaagaggaggtggcaaggaaggttgatgaacgcatggccgcacatcggtcccatgatccccagccgaccattcctcctgcaatggtgagcccgtcaggaaaccgtagcagctgcgcctcaacggggcaggtggcgtcgggcatggccatcccaacggacccttcaggtacttaccactgcaggccgattccagcaggatactcgaaggtcgaagttgagttggtccccaaggcgcgtacgaggacctcgagctggattaccctggaggagacggcggtacatcatcctccctgggcgacaagcggcgtctcgtgcaccatctcctccggctccgccatctcctcctcagaatcctgcaccgtctcctcctcatgctccgccagcaccgtctccacctcaggctccagcaccgactcctcctcaggatcctgcaccgactcctcctcgggctcctacacctactcctccgcaagctcctcttctggcaccttcaaagtcaagggccccccccagctccatcgcctgcccacacaagggcaacgaagaaggcgaaagttgacgccgccaagaacaaggacccggggtacgattgcatgcaagaggagcttgacgcttacgttgcatcagaagtcaagagacaattcaagcctcgaagtccagaaaagaagatttctatagaccccagtgtcaggaacttcttcaggggtatgtctgcatctgtcaaggaggccatcaagctatcggactatgagcgaacgctgaagaaagcatcttctggaaagtccaaaccagtccctcagcttggagagcaaccaaaccaggagatcgagctattggtgaccggtaaagaaatgacgatagaacaatttattactgacaccggtctaactacggatcaattgctaggagtcgcaccaatcgaaaaggcggaagtgaaatacatgtacgaactcggtaaaccgcttgtcaaacctgagctgctgcagtccctacccacacaaatgtacaagttccatcagctgtacatggagatgagcgccaccggtagagagatgatcggagcgaggatcagggacacggacttcttgcaaggagatgacattctctggatcaatttcaggggaatttacgaactataccagctggacgccctcgacgtctctattatgagttgctggattttaatggagattcaaagggcccgacggcggaaggttttcgatactggattcatcgaccctcggagagtaaacgtcgcaatgctcgaccaatatccacaagaaacagaggacaatctcgtccatctcctgaaggcgcagcattacaagacgttcatactgttgccgtacaacacagaattccactgggtgcttttactcttcgacctgtcggcctgcaccgtcaacgtatatgactcaatggataaaaaagagtctacgtttgacaaggttttcgaacttatagacagggcttggtatcggttccgtcatttggtccgcggcaaatggagagaaagacttaggcggaagttcaaatttccttgcgcaaagcaaaagcagggaactaacttgtgcggctactacgtgtgtgagtattgccactgccttgcagaccaaatcatcaccacaagagagctcgattttattcgcatgagggataacctgaccacacacaaggaatttatcgcagcggttcaagaacaactcatgggattcatcaacgaagaaatccttgatcccaagggtgaattctactacgacggaaacacaattcaccggtccttagcttctgagctatcagcgactactactacatcgaaatcgtag

SEQ ID NO: 72555 - DNA, 874 bp, Oryza sativa
  Clone ID: PAT_MRT4530_72923C.1
ccggccgggatcgatgaaatcccttccttccatctgcaccgtccatccccacgcacacacccccacgccaccgccgccgccggtcgccggagggagccggccatctccgatgaccaccaccaccacctccggggcgcccacgcccccacgcttcaagcgatccccccacaggaagaagcggcagccccgtacccgccgcgtcgccgccggagagaccatcgccgcggggaaaccaccgcacccggcgtgtacggcggtgtcgttgcagtcgccgtttgggcccgcattgccgcgcgatttcttcgaggtggacgcgcttgacctcgccccacgcctcctcggcaagctgctgcgccgcgacgaagtcgtcctccgcatcaccgaggtggaggcttacaggccaaatgactccgcgtgccacggccggttcggcatcacggcgaggactgctcctgtgtttggatcaggagggcatgcgtatgtttacctgtgctatggactgcacatgatgctcaatgtcgtcgctgacaaggagggagttggagctgctgttctgattcggtcatgtgctcccgttagtgggctggcaactattcagcagcgtcgaggccagcagactgataagccacttctactcactggaccaggaaaggttggtcaagctctggggctttccactgactggtccaaccatcctctgtacacacctggtgggttggaggtactagacgggccagaaccggagaacattttggttggcccccgtgtaggcatcgaatacgcatcgccggagcatgttgctgcaccatggaggttcgccgtcgcagggacgccatggattagtgcccccaagaacactctcagaccaaggtga

SEQ ID NO: 72556 - DNA, 2844 bp, Oryza sativa
  Clone ID: PAT_MRT4530_72924C.1
atgaacgagaacgagaacgatcgaacgaacgagagcgagaacgaacacgtcaacgtacgttgccgcgagaacgtgaacgagaacgagaacgatcgaacgaacgagagcgagaacgaacacgtcaacgtacgttgccgcgagaacgtgaacgagaacgagaacgatcgaacgaacgagagcgagaacgagaacgatcgaacgaagacaagcgagaacgagggaacgaacgtgaatgagaacaagcgaacgaacatattgtacgatacaatcgcggagggaagcagccagtactggaatgaagaagaggggaacgaggatccaaaccagtacttgaacgaggaagggaacgtggagagggatgcggaggggaaccagcaggggcacgtggaaagggatgtggaggggaaccaggaggaggaggctagtggtagtcaaccctccgttggacagaagagggcacgcgggcaacgaggtgcagcgaagaagcttgagggtcagcacatcataacggaagtggaagaagatggacgtcctagtgccccggccgaagtcgccaagaactatgtacgtcacagtggttgggttgtgcgggataacgtgcctgtcagtacggtgtactggcgaagaacaagggcacgcggagatcatgagagctttgtcccagattcggagaaagagatgctgtggaccacaatgctcgagacattcacccttcctgcgggtacagaggacaaagtgaaaaggtggactctgaagaaaatggcagaacagtttcagagcttcaagggagatctgtaccagaagtatatactgaaggggcagacaccgaacttcgacacattcccaaagctaagggatcattgggacgagttcgttgcatataagacaggtgaacaagggcaggcgatgatggaaagaaacaaagaaaatgccgccaagaagaagtaccatcaccacttggggtcaggaggctatagcgtcgcaatgccgaagtgggagcagatggaggctagcttgattgagaggggtatcgaaccggcaacagccaattggccggaacgatcgaagttctggtactatgctcacggtggaacgctcaacccagctgatggctcactggtcttcggcgatcagatacgagaggctgtgcgacgactaacagatgcagtggaagcctcctctcagggcacgagtcggatgaggagcaagagagataccgaggcgaagattgcagacctagagttccgggtatcgagctacgaactcaacatgcaagaggaggtggcaaggaaggttgatgaacgcatggccgcacatcggtcccatgatccccagccgaccatttctcctacaatggtgagcccgtcaggaaaccgtagcagctgcgcctcaacggggcaggtggcatcgggcatggccatcccaacggacccttcaggtacttaccactgcaggccgattccagcaggatactcgaaggtcgaagttgagttggtcgaaggcgcgtacgaggacctcgagctggattaccctggaggagacggatcctgcaccgtctcctcctcatgctccgccagcaccgtctccacctcaggctccagcatcgactcctcctcaggatcctgcaccgactcctcctcgtgctcctacacctactcccccgcaagctcctcttccggcaccttcaaagtcaagggccccccagctccaccgcctgcccacacaagggcaacgaagaaggcgaaagttgacgccgccaagaacaaggacccggggtacgattgcacgcaagaggagcttgacgcttacgttgcatcagaagtcaagagacaattcaagcctcgaagtccagaaaagaagattcctatagaccctagtgtcaggaacttcttcaggggtatgtctgcatctgtcaaggaggccatcaagctatcggactatgagcgaacgctgaagaaagcatcttctggaaagtccaaaccagtccctcagcttggagagcaaccaaaccaggagatcgagccgttggtgaccggtaaagaaatgacgatagaacaatttattactgacaccggtctaactacggatcaattgctaggagtcgcaccaattgaaaaggcggaagtgaaatacatgtacgaactcggtaaaccgcttgtcaagcctgagctgctgcagtccctacccacacaaatgtacaagttccatcagctgtacatggatatgagcgccaccggtcgagagatgatcggagcgaggatcagggacacggacttcttgcaaggagatgacattctctggatcaatttcaggggaatctacgaactataccagctggacgccctcgacgtctctattatgagttgctggattttattccactgggtgcttttactcttcgacctagaggcctgcaccgtcaacgtatatgactcaatggataaaaaagagtctacgtttgacaaggttttcgagcttatagacagggcttggtatcggttccgtcatttggtccgcggcaaatggagagaaagacttaggcggaagttcaaatttccttgcgcaaagcaaaagcagggaactaacttgtgcggctattacgtgtgcgagtattgccactgccttgcagaccaaatcatcaccacaagagagctcgattttattcgcatgagggataacctgaccacacacaaggaatttatcgcggcggttcaagaacaactcatgggattcatcaacgaagaaatccttgatcccaagggtgaattctactacgacggaaacacaattcaccggtccttagcttctgagctagcagcgagtactactacgtcgaaatcgtag

SEQ ID NO: 72557 - DNA, 611 bp, Oryza sativa
  Clone ID: PAT_MRT4530_72925C.1
ggcacacttgtccccgggctgcaggccggcgccggcctcgcgcaccggcccccgctcctgccgccccccccccccgggggccggcggccgccggccgccgcggcctcgggcaagggggggggacttctcgctggacggccggccgcctccgccgcgcgccgccacccagccctccgctcgccttcgctcccccacccccggcggcgctcgccgccccccctcccaccgcccgggagttgcaacctgcagctgctgcttactttggtgagttggagaaggcccttatccatggcaccagtgctggtgctggtgtcgatcatggcatgatccaaagtgacgcgtacacagagtcagcaggatatcttgcagctaggccccccacactggaaatcttcccttcatggccaatgagtcatctacaggagccatacagtaactcgcagtcagtagggagcaccactgactctagctcagctcagaacacaatgtcacaggccgagttggtgtccccagcgagcatgaggtccgactctgggcaggaacagcaacaacaggaggtattgatggtgaccattgatgattacaactacaaacaaggacttggagcagca

SEQ ID NO: 72558 - DNA, 637 bp, Oryza sativa
  Clone ID: PAT_MRT4530_72926C.1
gctaaaattgcattgacaggtgccattttccatgcccaactgaaaaataagacactttttcatcttgcaagaaatgagaaagactgcgcttgatattggatatgacaagcgattatgataaaagtataactaaggcaatgatgatttttgaaccttaacaagtattgtctcacaatggacaccagattagttgattttcccaaatttgtcaatatagtagctaccaactgaccgcgtaaactcacacagatttagctcatctgtcgacaaaaccagaataaggtttttctatcctgatttatttgttgcattagacaaatatgtggaaactagtaggcatgacttgtactggccgattacagttctgtgcattcataatatacattccttgattaatacagagatcttttatcacatttacagaggtagtacatgatttcttggaagaatggagaattacgtttcagtgagattaacacagaattcttcaactatgacctgtaaggccgcattccatttgacccaaaaagaaaaatgatccgttttatttttcaaatccgtaatcactcagaaagcatatgctgacctcctccttctggggagaaatcccgcacggccaccgtaaccagacaagctg

SEQ ID NO: 72559 - DNA, 2925 bp, Oryza sativa
  Clone ID: PAT_MRT4530_72927C.1
atgtcggtgtcagtggatggaggcgataggtgctatcctattgtatggagcgctggccgtggaggtggtagagtaggcgacggagtcagcgtgagtaggagatgtttcttgtatcaacagatggctgaccgcgatgaggaacagatattgtacgatacaatcgcggagggaagcagccagtactggaatgaagaagaggggaatgaggatccaaaccagtacttgaacgaggaaggaaacgtggagagggatgcggaggggaaccagcaggggcacgtggaaagggatgtggaggggaaccaggaggaggaggctagtggtagtcaaccctccgttggacagaagagggcacgcaggcaacgaggtgcagcgaagaagcttgagggtcggcacatcataacagaagtgcaagaagatggacgtcctagtgccccggccgaagccgccaagaactatgtacgtcacagcggttgggttgtgcgggataacgtgcctgtcagtacggtgtactggcgaagaacaagggcacgcggagatcatgagagctttgtcccagattcggagaaagagatgctgtggaccacaatgctcgagacattcacccttcctgcgggtacagaggacaaagtgaaaaggtggactctgaagaaaatggcagaacagtttcagagcttcaagggagatctgtaccagaagtatatactgaaggggcagacaccgaacttcgacacattcccaaagctaagggatcactgggacgagttcgttgcatataagacaggtgaacaagggcaggcgatgatggaaagaaacaaagaaaatgccgccaagaagaagtaccatcaccacttggggtcaggaggctatagcgtcgcgatgccgaagtgggaggagatggaggctagcttgattgagaggggtatcgaaccggcaatagccaattggccggaacgatcgaagttctggtactatgctcacggtggaacgctcaacccagctgatggctcactgggcacgttccgaccagacagagatagggacgagctgacactcgccctgcagactccagagcatccaggacgaacacgagggaaaggggtgattccttggaagattggtttcaaggaggacatccacacgtacaggagtcggatgaggagcaagagaaataccgaggcgaagattgcagacctagagttccgggtatcgagctacgaactcaacatgcaagaggaggtggcaaggaaggttgatgaacgcatggccgcacatcggtcccatgatccccagccgaccattcctcctgcaatggtgagcccgtcaggaaaccgtagcagctgcgcctcaacggggcaggtggcgtcgggcatggccatcccaacggacccttcaggtacttaccactgcaggccgattccagcaggatactcgaaggtcgaagttgagttggtcgaaggcgcgtacgaggacctcgagctggattaccctggaggagacgcatcgactcctcctcaggatcctgcaccgactcctcctcgtgctcctacacctactcccccgcaagctcctctttcggcaccttcaaagtcaagggcccccccagcttcaccggctggccacacaagggcaacgaagaaagcgaaagttgacgccgcccagaacaaagacccggggtacgattgcacgcaagaggagcttgacgcttacgttgcatcagaagtcaagagacaattcaagcctcgaagtccagaaaagaagattcctatagaccccagtgtcaggaacttcttcaggggtatgtctgcatctgtcaaggaggccatcaagctatcggactatgagcgaacgctgaagaaagcatcttctggaaagtccaaaccagtccctcagcttggagagcaaccaaaccaggagatcgagccgttggtgaccggtaaagaaatgacgatagaacaatttattactgacaccggtctaactacggatcaattgctaggagtcgcaccaatcgaaaaggcggaagtgaaatacatgtacgaactcggtaaaccgcttgtcaagcctgagctgctgcagtccctacccacacaaatgtacaagttccatcagctgtacatggagatgagcgccaccggtagagagatgatcggagcgaggatcagggacacggacttcttgcaaggagatgacattctttggatcaatttcaggggaatctacgaactataccagctggacgccctcgacgtctctattatgagttgctggatttgctggattttaatggagattcaaagggcccgacggcagagggttttcgatactggattcatcgaccctcggaaagtaaacgtcgcaatgctcgaccaatatccacaagaaacagaggacaatctcgtccatctcctgaaggcgcagcattacaagacgttcatactgttgccatacaacacagaattccactgggtgcttttactcttcgacctggaggcctgcaccgtcaacgtatatgactcaatggataaaaaagagtctacgtttgacaaggttttcgaacttatagacagggcttggtatcggttccgtcatttggtccgcggcaaatggagagaaagacttaggcggaagttcaaatttccttgcgcaaagcaaaagcagggaactaacttgtgcggctattacgtgtgcgagtattgccactgccttgcaaaccaaatcatcaccacaagagagctcgattttattcgcatgagggataacctgaccacacacaaggaatttatcacggcggttcaagaacaactcatgggattcatcaacgaagaaatccttgatcccaagggtgaattctactacgacggaaacacaattcaccggtccttaacttctgagctagcagcgagtactgctacgtcgaaatcgtag

SEQ ID NO: 72560 - DNA, 1290 bp, Oryza sativa
  Clone ID: PAT_MRT4530_72928C.1
atggcacctcaaccaacctgtcagacttgtgtccgcaactaccttggttctaaggaagacccagctttgtcagaaaatccaaatcaactagctgaacaagtcaccaaccaagttgccaagactgataatactgttcctggaccaaacaaggaacccaaggtgaatccagacaagagtaagaatgaggccgcagaaatacaaggaacacaatcagtagaaggcactgatacccataaagagaagaacaaagaattcttaaatgtgatgattacagggatgaaaaccccacttcgagctaataattgccccaaccttcagaactcaatcaataaatccgtatcgcgagaaaatagcatgattaaagaaggaagttgtcacaaaagaaagaccttgccatcagaagttgacatgcaagatgtcccacaatgtcagacaatgcaatcttgccaaaacttacccaagtcccccaccctcaaatcaaagaagatcagacacgttcccggattcatatgcttcatttgccacaaaattggccattacatgagacactgcccccaaaaaccctatatggatgcaccactacaagctaatatgagcacctcaaggatgcccttctatccccaaggaagcccaaattcgccaaatgttaatgcagtacgttcaaccttccctgatgacaaaagagcaaaagcatcctgcgacatgtgccaagacatccaagaaaagaaagagatgcaagaatacaagagacgcaaagtaatgtccctagagattcaagcaaaagaagatttgtgtcgaaaaacaaactcgccagcacaatactatcagaaagcatctcagcattcaactagttccggttctacgtctcgttcgactatgtcagaacctggtcagcaagccacaatgatcaacagtaatagccatgaaggaagcaactccgtaccatgccctacaccttcaaaaagacgtggttataaggcaggagtcgaatgtttcatctgccatgagatgggacactattcatgggattgccctcagaaagccaagatgaagtgccctcagaaagtcaagtcaaaacgagtccaaccaacaacaagccttcccaacgtatctggaccaaaaagttcaaagtcaccaaacagtggttctgcctcgttgacctcaccgcccgtcggacaaggtcgtctgaaccatgtgcaagtagaaacaaacggaaaagttgtgaatctcgagcaagttgaaggagcaggagaagaacaggttccacaggcaagagcagagccacaataa

SEQ ID NO: 72561 - DNA, 2754 bp, Oryza sativa
  Clone ID: PAT_MRT4530_72929C.1
atggctgaccgcgatgaggaacagatattgtacgatacaatcgcggagggaagcagccagtactggaatgaagaagaggggaacgaggatccaaaccagtacttgaatgaggaagggaacgtggagagggatgcggaggggaaccagcaggggcacgtggaaagggatgtggaggggaaccaggaggaggaggctagtggtagtcaaccctccgttggacagaagagggcacgcgggcaacgaggtgcagcgaagaagcttgagggtcggcacatcataacggaagtggaagaagatggacgtcctagtgccccggccgaagccgccaagaactatgtacgtcacagcggttgggttgtgcgggataacgtgcctgtcagtacggtgtactggcgaagaacaagggcacgcggagatcatgagagctttgtcctagattcggagaaagagatgctgtggaccacaatgctcgagacattcacccttcctgcgggtacagaggacaaagtgaaaaggtggactctgaagaaaatggcagaacagtttcagagcttcaagggagatctgtaccagaagtatatactgaaggggcagacaccgaacttcgacacattcccaaagctaagggatcactgggacgagttcgttgcatataagacaggtgaacaagggaaggcgatgatggaaagaaacaaagaaaatgccgccaagaagaagtaccatcaccacttggggtcaggaggctatagcgtcgcgatgccgaagtgggagcagatggaggctagcttgattgagaggggtatcgaaccggcaacagccaattggccggaacgatcgaagttctggtactatgctcacggtggaacgctcaacccagctgatggctcactggtcttcggctatcagatacaagaggctgcgcgacgactaacagatgcagtggaagcctcctctcagggcacgttccgaccagacagagatagggacgagctgacactcgccctgagtcggatgaggagcaagagagataccgaggcgaagattgcagacctagagttccgggtatcgagctacgaactcaacatgcaagaggaggtggcaaggaaggttgatgaacgcatggccgcacatcggtcccatgatccccagccgaccattcctcctgcaatggtgagcccgtcaggaaaccgtagcagctgcgcctcaacggggcaggtggcgtcgggcatggccatcccaacggacccttcaggtacttaccactgcaggccgattccagcaggatactccaaggtcgaagttgagttggtcgaaggcgcgtacgaggacctcgagctggattaccctggaggagacggtgagacgcatctacgagacacatgccatgccattattctatggcgcaggcggtacatcatcctccctgggcgacaagcggcgtctcgtgcaccatctcctccggctccgccatctcctcctcaggatcctgcaccgtctcctcctcatgctccgccagcaccgtctccacctcaggctccagcatcgactcctcaggatcctgcaccgactcctcctcgtgctcctacacctactcccccgcaagctcctcttccggcaccttcaaagtcaagggcccccccagctccaccgcttgcccacacaagggcaacaaagaaggcgaaagttgacgccgccaagaacaaggacccggggtacgattgcacgcaagaggagcttgacgcttacgttgcatcagaagtcaagagacaattcaagcctcgaagtccagaaaagaagattcctatagaccccagtgtcaggaacttcttcaggggagtcgcaccaatcgaaaaggcggaagtgaaatacatgtacgaactcggtaaaccgcttgtcaagcctgagctgctgcagtccctacccacacaaatgtacaagttctatcagctgtacatggagatgagcgccaccggtagagagatgatcggagcgaggatcagggacacggacttcttgcaaggagatgacattctctggatcaatttcaggggaatctacgaactataccagctggacgccctcgacgtctctattatgagttgctggattttaatggagattcaaagggcccgacggcggagggttttcgatactggattcatcgaccctcggaaagtaaacgtcgcaatgctcgaccaatatccacaagaaacagaggacaatctcgtccatctcctgaaggcgcagcattacaagacgttcatactgttgccatacaacacagaattccactgggtgcttttactcatcgacctggaggcctgcaccgtcaacgtatatgactcaatggataaaaaagagtctacgtttgacaaggttttcgaacttatagacagggcttggtatcggttccgtcatttggtccgcggcaaatggagagaaagacttaggcggaagttcaaatttccttgcgcaaagcaaaagcagggaactaacttgtgcggctattacgtgtgcgagtattgccactgccttgcagaccaaatcatcaccacaagagagcccgattttattcgcatgagggataacctgaccacacacaaggaatttatcgcggcggttcaagaacaactcatgggattcatcaacgaagaaatccttgatcccaagggtgaattctactacgacggaaacacaattcaccggtccttagcttctgagctagcagcgagtactactacgtcgaaatcgtag

SEQ ID NO: 72562 - DNA, 376 bp, Oryza sativa
  Clone ID: PAT_MRT4530_7292C.1
atatagttgcagcgattggctaagggatgcaaaggtgcaaacatgtgggttccttccgttcaccgttcgtgtgggccacttttccggcccgcgcagaggacgatccagccggcaatgctggattggcccgtcaccttccccccttttcgcgcagcgcgcgtggcccatgttttggataggtagacttcgcggcccaagctggtgggtcaaattcagaagatatagtcggccctgctcctcggcgaccacgtccgagaggagcccgaggcaagcaaaagcaacaggatctggcggcttcacgtcatcacgtgaccagagtaaaactttcacgcttggaaagcggtgagcacgttcagaccccgtcgtctcgtcggtc

SEQ ID NO: 72563 - DNA, 1520 bp, Oryza sativa
  Clone ID: PAT_MRT4530_72930C.1
ttactgtggctctgctcttgcctgtggaacctgttcttctcctgctccttcaacttgctcgagattcccaacttttccgtttgtttctacttgcacatggttcagacgaccttgtccaacgggcggtgaggtcaacgaggcagaaccactgtttggtgactttgaactttttggtccagatacgttgggaaggcttgttgttggttggactcgttttgacttgactttctgagggcagcaccatgaatagtgtcccatctcatggcagatgaaacattcgactcctgccttataaccacgtctttttgaaggtgtagggcatggtacggagttgcttccttcatggctattactgttgatcattgtggcttgctgaccaggttctgacatagtcgaacgagacgtagaaccggaactagttgaatgctgagatgctttctgatagtattgtgctggcgagtttgttttttcgacacaaatcttcttttgcttgaatctctagggacattactttgcgtctcttgtattcttgcatctctttcttttcttggatgtcttggcacatgtcgcaggatgcttttgctcttttgtcatcagggaaggttggacgtactgcattaacatttggcgaattcgggcttccttggggatagaagggcatccttgagatgctcatattagcttgtagtagtgcatccatatagggtttttgggggcagtgtctcatgtaatggccaatttcgtggcaaatgaagcatatgaatccgggaacgtgtctgatcttctttgatttgagggtgggggtcttggataagttttggcaagattgcagtgtctgacattgtgggacatcttgcatgtcaacttctgatggcaaggtctttcttttgtgacaacttccttctttaaccatgctattttcttgcgatacggattcattgattgagttctgaaggttggggcaattattagctcgaagtggggttttcatccctgtaatcatcacatttaagaattctttgttcttctctttatgggtatcagtgccttctactgattgtgttccttgtatttctgcggcctcattcttactcttgtctggattcaccttgggctgtggtagtagcagttgttgttgtatagaagccaaattttgagctatttcttgtagcatctgagtctgattggctagaatctgataaatatccattgaggagtgttggtttctggttgcaacttccttctttggtccaggaacagcattaccagtcttggcgacttggttggtgacttgttcagctagttgatttggattttctgacaaagctgggtcttcctcagaaccaaggtagttgcggacacaagtctgacaggttggttgaggtgccatttgcttcagaggaactgagaacccaatctgataccgccgtataacggcacctgataggagcgtgtcgtaggggaaaacggcgcgaaccgcttcctacgaaaccgcggtctcggtaccagtcccaggacat

SEQ ID NO: 72564 - DNA, 2942 bp, Oryza sativa
  Clone ID: PAT_MRT4530_72931C.1
tcctgcagcccgatcgaacgaacgagagcgagaacgaacacgtcaacgtaggttgccgcgagaacgtgaacgagaacgagaacgagaacgatcgaacgaacgagagcgataacgagaacgatcgaacgaagacaagtgagaacgagggaacgaacgtgaatgagaacaagcgaacgaacaaaagacgtgttgtcggagtcatggctgaccgcgatgaggaacagatattgtacgatacaatcgcggagggaagcagccagtactggaatgaagaagaggggaacgaggatccaaaccagtacttgaacgaggaagggaacgtggagagggatgcggaggggaaccagcaggggcacgtggaaagggatgtggaggggaaccaggaggaggaggctagtggtagtcaaccctccgttggacagaagagggcacgcgggcaacgaggtgcagcgaagaagcttgagggtcggcacatcataacggaagtggaagaagatggacgtcctagtgccccggccgaagccgccaagaactatgtacgtcacagcggttgggttgtgcgggataacgtgcctgtcagtacggtgtactggcgaagaacaagggcacgcggagatcatgagagctttgtcccagattcggagaaagagatgctgtggaccacaatgctcgagacattcatccttcctgcgggtacagaggacaaagtgaaaaggtggactctgaagaaaatggcagaacagtttcagagcttcaagggagatctgtaccagaagtatatactgaaggggcagacaccgaacttcgacacattcccaaagctaagggatcactgggacgagttcgttgcatataagacaggtgaacaagggaaggcgatgatggaaagaaacaaagaaaatgccgccaagaagaagtaccatcaccacttggggtcaggaggctatagcgtcgcgatgccgaagtgggagcagatggaggctagcttgattgagaggggtatcgaaccggcaacagccaattggccggaacgatcgaagttctggtactatgctcacggtggaacgctcaacccagctgatggctcactggtcttcggctatcagatacaagaggctgcgcgacgactaacagatgcagtggaggcctcctctcagggcacgttccgaccagacagagatagggacgagctgacactcgccctgcagactccagagcatccaggacgaactcgagggaaaggggtgattccttggaagattggtttcaaggaggacatccacacgtacaggagtcggatgaggagcaagagagataccgaggcgaagattgcagacctagagttccgggtatcgagctacgaactcaacatgaagaggaggttgcaaggaaggttgatgaacgcatggccgcacatcggtcccatgatccccagccgaccattcctcctgcaatggccgattccagcaggatactccaaggtcgaagttgagttggtcgaaggcgcgtacgaggacctcgagctggattaccctagaggagacggatcctgcaccgtctcctcctcatgctccgccagcaccgtctccacctcaggctccagcatcgactcctcaggatcctgcaccgactcctcctcggcccccccagctccaccgcttgcccacacaagggcaacaaagaaggcgaaagttgacgccgccaagaacaaggacccggggtacgattgcacgcaagaggagcttgacgcttacgttgcatcagaagtcaagagacaattcaagcctcgaagtccagaaaagaagattcctatagaccccagtgtcaggaacttcttcaggggtatgtctgcatctgtcaaggaggccatcaagctatcggactatgagcgaacgctgaagaaagcatcttctggaaagtccaaaccagtccctcagcttggagagcaaccaaaccaggagatcgagccgttggtgaccggtaaagaaatgacgatagaacaatttattactgacaccggtctaactacggatcaattgctaggagtcgcaccaatcgaaaaggcggaagtgaaatacatgtacgaactcggtaaaccgcttgtcaagcctgagctgctgcagtccctacccacacaaatgtacaagttccatcagctgtacatggagatgagcgccaccggtagagagatgatcggagcgaggatcagggacacggacttcttgcaaggagatgacattctctggatcaatttcaggggaatctacgaactataccagctggacgccctcgacgtctctattatgagttgctggattttaatggagattcaaagggcccgacggcggagggttttcgatactggattcatcgaccctcggaaagtaaacgtcgcaatgctcgaccaatatccacaagaaacagaggacaatctcgtccatctcctgaaggcgcagcattacaagacgttcatactgttgccatacaacacagaattccactgggtgcttttactcatcgacctggaggcctgcaccgtcaacgtatatgactcaatggataaaaagagtctacgtttgacaagggcttggtatcggttccgtcatttggtccgcggcaaatggagagaaagacttaggcggaagttcaaatttccttgcgcaaagcaaaagcagggaactaacttgtgcggctattacgtgtgcgagtattgccactgccttgcagaccaaatcatcaccacaagagagctcgattttattcgcatgagggataacctgaccacacacaaggaatttatcgcggcggttcaagaacaactcatgggattcatcaacgaagaaatccttgatcccaagggtgaattctactacgacgaaaacacaattcaccggtccttagcttctgagctagcagcgagtactactacgtcgaaatcgtag

SEQ ID NO: 72565 - DNA, 433 bp, Oryza sativa
  Clone ID: PAT_MRT4530_72932C.1
ggggggaaggcaaaatgtttttttattttttttgggggggaagggggaatgcttggccaatttattttataaatagaaggttataaaagaaaaaaaaaatgtttcaaataaatcttgggagaaaaaaaaaaaaatatcttaaaaaccccttcaaaaaaaaaaaaaaaaattattttgaaaacatgaatggggggaaaaatttttggggggaaaaaaataaaagcacccctgaattcaaaaattgtgggaaaaaaacctaccactggggtttctttttaaaagaaaggcttaaatttacggtttttaaaccacaaagaagttcataaaattaccgggggggaaaaaccgcattttttaaaaaaggggcggtattattcccttgaactccaatttatggggggcccttggattggtgacattaaaaaacattttg

SEQ ID NO: 72566 - DNA, 3009 bp, Oryza sativa
  Clone ID: PAT_MRT4530_72933C.1
atggctgaccgcgatgaggaacagatattgtacgatacaatcgcggagggaagcagccagtactggaatgaagaagaggggaacgaggatccaaaccagtacttgaacgaggaagggaacgtggagagggatgtggaggggaaccaggaggaggaggctagtggtagtcaaccctccgttggacagaagagggcacgcgggcaacgaggtgcagcgaagaagcttgagggtcggcacatcataacggaagtggaagaagatggacgtcctagtgccccggccgaagccgccaagaactatgtacgtcacagcggttgggttgtgcgggataacgtgcctgtcagtacggtgtactggcgaagaacaagggcacgcggagatcatgagagctttgtcccagattcggagaaagagatgctgtggaccacaatgctcgagacattcacccttcctgcgggtacagaggacaaagtgaaaaggtggactctgaagaaaatggcagaacagtttcagagcttcaagggagatctgtaccagaagtatatactgaaggggcagacaccgaacttcgacacattcccaaagctaagggatcactgggacgagttcgttgcatataagacaggtgaacaagggcaggcgatgatggaaagaaacaaagaaaatgccgccaagaagaagtaccatcaccacttggggtcaggaggctatagcgtcgcgatgccgaagtgggagcagatggaggctagcttgattgagaggggtatcgaaccggcaacagccaattggccggaacgattgaagttctggtactatgctcacggtggaacgctcaacccagctgatggctcactggtcttcggcgatcagatacgagaggctgcgcgacgactaacagatgcagtggaagcctcctctcagggcacgttccgaccagacagagatagggacgagctgacactcgccctgcagactccagagcatccaggacgaacacgagggaaaggggtgattccttggaagattggtttcaaggaggacatccacacgtacaggagtcggatgaggagcaagagagataccgaggcaaagattgcagacctagagttccgggtatcgagctacgaactcaacatgcaagaggaggtggcaaggaaggttgatgaacgcatggccgcacatcggtcccatgatccccagccgaccattcctcctgcaatggtgagcccgtcaggaaaccgtagcagctgcgcctcaacggggcaggtggcgtcgggcatggccatcccaacggacccttcaggtacttaccactgcaggccgattccagcaggatactcgaaggtcgaagttgagttggtggaaggcgcgtacgaggacctcgagctggattaccctggaggagacggtgagacgcatctacgagacacatgccatgccattattctatggcgcaggcggtacatcatcctccctgggcgacaagcggcgtctcgtgcaccatctcctccggctccgccatctcctcctcaggatcctgcaccgtctcctcctcatgctccgccagcaccgtctccacctcaggctccagcatcgactcctcctcaggatcctgcaccgactcctcctcgtgctcctacacctactcccccgcaagctcctcttccggcaccttcaaagtcaagggcccccccagctccaccgcctgcccacacaagggcaacgaagaaggcgaaagttgacgccgccaagaacaaggacccggggtacgattgcacgcaagaggagcttgacgcttacgttgcatcagaagtcaagagacaattcaagcctcgaagtccagaaaagaagattcctatagaccccagtgtcaggaacttcttcaggggtatgtctgcatctgtcaaggaggccatcaagctatcggactatgagcgaacgctgaagaaagcatcttctggaaagtccaaaccagtccctcagcttggagagcaaccaaaccaggagatcgagccgttggtgaccggtaaagaaatgacgatagaacaatttattactgacaccggtctaactacggatcaattgctaggagtcgcaccaatcgaaaaggcgaaagtgaaatacatgtacgaactcggtaaaccgcttgtcaagcctgagctgctgcagtccctacccacacaaatgtacaagttccatcagctgtacatggagatgagcgccaccggtagagagatgatcggagcgaggatcagggacacggacttcttgcaaggagatgacattctctggatcaatttcaggggaatctacgaactataccagctggacgccctcgacgtctctattatgagttgctggattttaatggagattcaaagggcccgacggcggagggttttcgatactggattcatcgaccctcggaaagtaaacgtcgcaatgctcgaccaatatccacaagaaacagaggacaatctcgtccatctcctgaaggcgcagcattacaagacgttcatactgttgccatacaacacagaattccactgggtgcttttactcatcgacctggaggcctgcaccgtcaacgtatatgactcaatggataaaaaagagtctacgtttgacaaggttttcgaacttatagacagggcttggtatcggttccgtcatttggtccgcggcaaatggagagaaagacttaggcggaagttcaaatttccttgcgcaaagcaaaagcagggaactaacttgtgcggctattacgtgtgcgagtattgccactgccttgcagaccaaatcatgaccacaagagagctcgattttattcgcatgagggataacctgaccacacacaaggaatttatcgcggcggttcaagaacaactcatgggattcatcaacgaagaaatccttgatcccaagggtgaattctactacgacggaaacacaattcaccggtccttaacttctgagctagcagcgagtactactacgtcgaaatcgtag

SEQ ID NO: 72567 - DNA, 2706 bp, Oryza sativa
  Clone ID: PAT_MRT4530_72934C.1
atggctgaccgcgatgaggaacagatattgtacgatacaatcgcggagggatgcagccagtactggaatgaagaagaggggaacgaggatccaaaccagtacttgaacgaggaagggaacgtggagagggatgcggaggggaaccagcaggggcacgtggaaagggatgtggaggggaaccaggaggaggaggctagtggtagtcaaccctccgttggacagaagagggcacgcgggcaacgaggtgcagcgaagaagcttgagggtcggcacatcataacggaagtggaagaagatggacgtcctagtgccccggccgaagccgccaagaactatgtacgtcacagcggttgggttgtgcgggataacgtgcctgtcagtacggtgtactggcgaagaacaagggcacgcggagatcatgagagctttgtcccagattcggagaaagagatgctgtggaccacaatgctcgagacattcacccttcctgcgggtacagaggacaaagtgaaaaggtggactctaaagaaaatggcagaacaatttcagagcttcaagggagatctgtaccagaagtatatactgaaggggcagacaccgaacttcgacacattcccaaagctaagggatcactgggacgagttcgttgcatataagacaggtgaacaagggaaggcgatgatggaaagaaacaaagaaaatgccgccaagaagaagtaccatcaccacttggggtcaggaggctatagtgtcgcgatgccgaagtgggagcagatggaggctagcttgattgagatgggtatcgaaccggcaacagccaattggccggaacgatcgaagttctggtactatgctcacggtggaacgctcaacccagctgatggctcactggtcttcggctatcagatacaagaggctgcgcgacgactaacagatgcagtggaagcctcctctcagggcacgttccgaccagacagagatagggacgagctgacactcgccctgcagactccagagcatccaggacgaactcgagggaaaggggtgattccttggaagattggtttcaaggaggacatccacacgtacaggagtcggatgaggagcaagagagataccgaggcgaagattgcagacctagagttccgggtatcgagctacgaactcaacatgcaagaggagatggcaaggaaggtcgatgaacgcatggccgcacatcggtcccatgatccccaccgaccattcctcctgcaatggtggcgtcgggcatggccatcccaacggacccttcaggtacttaccactgcaggccgattccagcaggatactccaaggtcgaagttgagttggtcgaaggcgcgtacgaggacctcgagctggattaccctggaggagacggatcctgcaccgactcctcctcgtgctcctacacctactcccccgcaagctcctcttccggcaccttcaaagtcaagggcccccccagctccaccgcttgcccacacaagggcaacaaagaaggcgaaagttgacgccgccaagatcaaggacccggggtacgattgcacgcaagaggagcttgacgcttacgttgcatcagaagtcaagagacaattcaagcctcgaagtccagaaaagaagattcctatagaccccagtgtcaggaacttcttcaggggtatgtctgcatctgtcaaggaggccatcaagctatcggactatgagcgaacgctgaagaaagcatcttctggaaagtccaaaccagtccctcagcttggagagcaaccaaaccaggagatcgagccgttggtgaccggtaaagaaatgacgatagaacaatttattactgacaccggtctaactacggatcaattgctaggagtcgcaccaatcgaaaaggcggaagtgaaatacatgtacgaactcggtaaaccgcttgtcaagcctgagctgctgcagtccctacccacacaaatgtacaagttccatcagctgtacatggagatgagcgccaccggtagagagatgatcggagcgaggatcagagacacggacttcttgcaaggagatgacattctctggatcaatttcaggggaatctacgaactataccagctggacgccctcgacgtctctattatgagttgctggattttaatggagattcaaagggcccgacggcggagggttttcgatactggattcatcgaccctcggaaagtaaacgtcgcaatgctcgaccaatatccacaagaaacagaggacaatctcgtccatctcctgaaggcgcagcattacaagacgttcatactgttgccatacaacacagaattccactgggtgcttttactcatcgacctggaggcctgcaccgtcaacgtatatgactcaatggataaaaaagagtctacgtttgacaagtgcgcaaagcaaaagcagggaactaacttgtgcggctattacgtgtgcgagtattgccactgccttgcagaccaaatcatcaccacaagagagctcgattttattcgcatgagggataacctgaccacacacaaggaatttatcgcggcggttcaagaacaactcatgggattcatcaacgaagaaatccttgatcccaagggtgaattctactacgacggaaacacaattcaccggtccttagcttctgagctagcagcgagtactactacgtcgaaatcgtag

SEQ ID NO: 72568 - DNA, 592 bp, Oryza sativa
  Clone ID: PAT_MRT4530_72935C.1
aattcggcacgagcactgaaagaggctgctagtacaagcatcgtgtcgagaaacytggavgaaacttttggacacggtatcctaatctattgcttttgatggcagcaaggacgggcctkctgatatggatagtgtgaaaatagaaagaatgaagttcattgatacagtaaattctattattcagcaacacagtggaatagggctcaataaattcagtatcaggtgcaaccttctgaaggrcgactcagacattcttgataggtggattcgctttgccactgcatcaaaggctaagattatagatatgaacctgtgcacaaatagaaataataaaggmccaaccaaacatttgtatgacttccctcttgaggctttcggtgatcaagatatcccttttatccagtgcttgtttctcaacaatgtttctataaagccacactcggatattggctttacgaaactcaggagccttcatttgcactgtgttcaaataattggagatctttcaggcttgctatttaattgctccagtcttgaggacttggaggtctttgcgtgcttgggtgtgactgctctgaatattccacaccaa

SEQ ID NO: 72569 - DNA, 3350 bp, Oryza sativa
  Clone ID: PAT_MRT4530_72936C.1
acgccgccgccgccacgccacgccacgccgttcgccttcacgccacgccgccgccaccacggccccgcaacgccacgccgccgccgccgtcgccacgccgccgccgccgccgccacgccgccgccccgatgccgccacaccgcccgttaacgaacgagaacgagaacgatcgaacgaacgagagcgagaacgaacacgtcaacgtacgttgccgcgagaacgtgaacgagaacgagaacgatcgaacgaacgagagcgagaacgagaacgatcgatcgaagacaagcgagaacgagggaacgaacgtgaatgagaacaagcgaacgaacgtgaatgagaacgagcgaaggaacgtgaacgagctagggaacatggctgaccgcgatgaggaacagatattgtacgatagaatcgcggagggaagcagccagtactggaatgaagaagaggggaacgaggatccaaaccagtacttgaacgaggaaggaaacgtggagagggatgcggaggggaaccagcaggggcacgtggaaagggatgtggaggggaaccaggaggaggaggctagtggtagtcaaccctccgttggacagaagagggcacgcgggcaacgaggtgcagcgaagaagcttgagggtcggcacatcataacggaagtgcaagaagatggacgtcctagtgccccggccgaagccgccaagaactatgtacgtcacagcggttgggttgtgcgggataacgtgcctgtcagtacggtgtactggcgaagaacaagggcacgcggagatcatgagagctttgtcccagattcggagaaagagatgctgtggaccacaatgctcgagacattcacccttcctgcgggtacagaggacaaagtgaaaaggtggactctgaagaaaatggcagaacagtttcagagcttcaagggagatctgtaccagaagtatatactgaaggggcagacaccgaacttcgacacattcccaaagctaagggatcactgggacgagttcgttgcatataagacaggtgaacaagggcaggcgatgatggaaagaaacaaagaaaatgccgtcaagaagaagtaccatcaccacttggggtcaggaggctatagcgtcgcgatgccgaagtgggagcagatggaggctagcttgattgagaggggtatcgaaccggcaacagccaattggccgaaacgatcgaagttctggtactatgctcacggtggaacgctcaacccagctgatggctcactgggcacgttccgagcagacaaagatagggacgagctgacactcgccctgcagactccagagcatccaggacgaacacgagggaaaggggtgattccttggaagattgatttcaaggaggacatccacacgtataggagtcggatgaggagcaagagagataccgaggcgaagattgcagacctagagtttcgggtatcgagctacgaactcaacatgcaagaggaggtggcaaggaaggttgatgaacgcatggccgcacatcggtcccatgatccccagccgaccattcctcctacaatggtgagcccgtcaggaaaccgtagcagctgcgcctcaacggggcaggtggcgtcgggcatggccatcccaacggacccttcaggtatttaccactgcaggccgattccagcaggatactcgaaggtcgaagttgagttggtcgaaggcgcgtacgaggacctcgagctggattaccctggaggagacggtgagacgcatctacgagacacaagccatgccattattctatggcgcaggcggtacatcatcctccctgggcgacaagcggcgtctcgtgcaccatctcctccggctccgccatctcctcctcaggatcctgcaccgtctcctcctcatgctccgccagcaccgtctccacctcaggctccagcatcgactcctcctgaggatcctgcaccgactcctcctcgtgctcttacacctactcccccgcaagctcctcttccggcaccttcaaagtcaagggcccccccagctccaccgcctgcccacacaagggcaacgaagaaggcgaaagttgacgccgccaagaacaaggacccggggtacgattgcacgcaagaggagcttgacgcttacgttgcatcagaagtcaagagacaattcaagcctcgaagtccagaaaagaagattcctatagaccccagtgtcaggaacttcttcaggggtatgtctgcacatgccaaggaggccattaagctatcggactatgagcgaacgctgaagaaagcatcttctggaaagtccaaaccagtccctcagcttggagagcaaccaaaccaggagatcgagccgttggtggccggtaaagaaatgacgatagaacaatttattactgacaccggtctaactacggatcaattgctaggagtcgcaccaatcgaaaaggcggaagtgaaatacatgtacgaactcggtaaaccgcttgtcaagcctgagctgctgcagtccctacccacacaaatgtacaagttccatcagctgtacatggagatgagcgccaccggtagagagatgatcggagcgaggatcagggacacggacttcttgcaaggagatgacattctctggatcaatttcaggggaatctacaaactataccagctggacgccctcgacgtctctattatgagttgctggattttaatggagattcaaagggcccgacggcggagggttttcgatactggattcatcgaccctcggaaagtaaacgtcgcaatgctcgaccaatatccacacgaaacagaggacaatctcgtccatctcctgaaggtgcagcattacaagacgttcatactgttgccatacaacacagaattccactgggtgcttttactcttcgacctggaggcttgcaccatcaacgtatatgactcaatggataaaaaagagtctacgtttgacaaggttttcgaacttatagacagggcttggtatcggttccgtcatttggtccgcggcaaatggagagaaagacttaggcggaagttcaaatttccttgcgcaaagcaaaagcagggaactaacttgtgcggctattacgtgtgcgagtattgccactgccttgcaaaccaaatcatcaccacaagagagctcgattttattcgcatgagggataacctgaccacacacaaggaatttatcacggcggttcaagaacaactcatgggattcatcaacgaagaaatccttgatcccaagggtgaattctactacgacagaaacacaattcaccggtccttagcttctgagctagcagcgagtactactacgtcgaaatcgtag

SEQ ID NO: 72570 - DNA, 3108 bp, Oryza sativa
  Clone ID: PAT_MRT4530_72937C.1
atgccacgccgccgccgccgcgccacgccgccgccgccacggccccgcaacgccacgccgccgccgccgtcgccacgccgccgcgccaaccgccgccccgatgccgccacaccgccgttaacgaacgagaacgagaacgatcgaacgaacgagagcgagaacgaacacgtcaacgtacgttgccgcgacaacgtgaacgagaacgagaacgatcgaatgaacgagagcgagaacgaacacgtcaacatggctgaccgcgatgagaaacagatattgtacgatacaatcgcggagggaagcagccagtactggaatgaagaagaggggaacgaggatccaaaccagtacttgaacgaggaagggaacgtggagagggatgcggaggggaaccagcaggggcacgtggaaagggatgtggaggggaaccaggaggaggaggaggctagtggtagtcaaccctccgttggacagaagagggcacgcgggcaacgaggtgcagtgaagaagcttgagggtcggcacatcataacggaagtggaagaagatggacgtcctagtgccccggccgaagccgccaagaactatacattcacccttcctgcgggtacagaggacaaagtgaaaaggtggactctgaagaaaatggcaaaacagtttcagagcttcaagggagatctgtaccagaagtatatactgaaggggcagacaccgaacttcgacacattcccaaagctaagggatcactgggacgagttcgttgcatataagacaggtgaacaagggcaggcgatgatggaaagaaacaaagaaaatgccgccaagaagaagtaccatcaccacttggggtcaggaggctatagcgtcgcgatgccgaagtgggagcagatggaggctagcttgattgagaggggtatcgaaccggcaacagccaattggccggaacgatcgaagttctggtactatgctcacggtggaacgctcaacccagctgatggctcactggtcttcggctatcagatacaagaggctgcgcgacgactaacagatgcagtggaagcctcctctcagggcacgttccgaccagacagagatagggacgagctgacactcgccctgcagactccagagcatccaggacgaactcgagggaaaggggtgattccttggaagattggtttcaaggaggacatccacacgtacaggagtcggatgaggagcaagagagataccgaggcgaagattgcagacctagagttccgggtatcgagctacgaactcaacatgcaagaggaggtggcaaggaaggttgatgaacgcatggccgcacatcggtcccatgatccccagccgaccattcctcctgcaatggtgagcccgtcaggaaaccgtagcagctgcgcctcaacggggcaggtaggatcacagagcatggacgccatgcaaacacaggacgaatcgacctgtcccgttgatgacatcactcagcggacaccatgtgagctgcatattcctttcaagaacttattaataaaggtggcgtcgggcatggccatcccaacggacccttcaggtacttaccactgcaggccgattccagcaggatactcgaaggtcgaagttgagttggtcgaaggcgcgtacgaggacctcgagctggattaccctggaggagacggatcctgcaccgtctcctcctcatgctccgccagcaccgtatccacctcaggctccagcatcgactcctcctcaggatcctgcaccgactcctcctcgtgctcctacacctactcccccacagctccaccgcctgcccacacaagggcaacgaagaaggcgaaagttgacgccgccaagaacaaggacccggggtacgattgcacgcaagaggagcttgacgcttacgttgcatcagaagtcaagagacaattcaagcctcgaagtccagaaaagaagattcctatagaccccagtgtcaggaacttcttcaggggtatgtctgcatctgtcaaggaggccatcaagctatcggactatgagcgaacgctgaagaaagcatcttctggaaagtccaaaccagtccctcagcttggagagcaaccaaaccaggagatcgagccgttggtgaccggcaaagaaatgacgatagaacaatttattactgacaccggtctaactacggatcaattgctaggagtcgcaccaatcgaaaaggcggaagtgaaatacatgtacgaactcggtaaaccgcttgtcaagcctgagctgctgcagtccctacccacacaaatgtacaagttccatcagctgtacatggagatgagcgccaccggtagagagatgatcggagcgaggatcagggacacggacttcttgcaaggagatgacattctctggatcaatttcaggggaatctacgaactataccagctggacgccctcgacgtctctattatgagttgctggattttaatggagattcaaagggcccgacggcggagggttttcgatactggattcatcgaccctcggaaagtaaacgtcgcaatgctcgaccaatatccacaagaaacagaggacaatctcgtccatctcctgaaggcgcagcattacaagacgttcatactgttgccatacaacacagaattccactgggtgcttttactcatcgacctggaggcctgcaccgtcaacgtatatgactcaatggataaaaaagagtctacgtttgacaaggttttcgaacttatagacagggcttggtatcggttccgtcatttggtccgcggcaaatggagagaaagacttaggcggaagttcaaatttccttgcgcaaagcaaaagcagggaactaacttgtgcggctattacgtgtgcgagtattgccactgccttgcagaccaaatcatcaccacaagagagctcgattttattcgcatgagggataacctgaccacacacaaggaatttatcacggcggttcaagaacaactcatgggattcatcaacgaagaaatccttaatcccaagggtgaattctactacgacggaaacacaattcaccggtccttagcttctgagctagcagcgagtactactacgtcgaaatga

SEQ ID NO: 72571 - DNA, 331 bp, Oryza sativa
  Clone ID: PAT_MRT4530_72938C.1
ggaggaaaaccccctccaattttttttcaaacccaaaaaacgtccccattttttttttttaaaaaacaagcccaatgcccggttttaaacttttttaaataaacaaactttttaacctttacccgggcggggactttttgcccttgttttacccccggtttttttttcccccccccctttaaaaaacgggtttttttttttaaaaaaaacttgaaaaaaaaaaaaatcctccaaaaagaagccaccccaaaagttgaacccctcccctgggtcattaaaaattccctttcgggaaaaaagaggggggccaaaagggaccaaattttcaaac

SEQ ID NO: 72572 - DNA, 118 bp, Oryza sativa
  Clone ID: PAT_MRT4530_72939C.1
acggcagaggaaaaggaactagacgagggagtaatagataccctgtactagaataaataagcggaacatcaaccagtagaacgtattctacctatacatagaggatgctagaatagct

SEQ ID NO: 72573 - DNA, 332 bp, Oryza sativa
  Clone ID: PAT_MRT4530_7293C.1
ggttcaagcgactgagacattaaataacaaaagcacattttgttccagtacttaagaacaaagggctccaagaacaaaacacagattagtttcatagactatcatagagcatcatcatctactgccacttttgagttccatcagattggaagacaacactagatggaatctggagttggtttgttccttccaacctttcttggcctgggaatgtttggagttggcatagcactagaagatgtagtgcaactgtcctttttagcccttcctgccttttttggtggcatttggacagtgatggaagggtcattgcttccctgccctgaatccat

SEQ ID NO: 72574 - DNA, 586 bp, Oryza sativa
  unsure (1)..(586): unsure at all n locations
  Clone ID: PAT_MRT4530_72940C.1
tgttaatatgcaactattgggacattaaatcatttgacatctcaggcaaattaccatgtgagttctatgcaatctgggttctgagaaattttgctagttctggagcagtggtaagtggagcttgctttgtttcccagctcatatccagtgttccccaccacatgtcagattacatccaaaatttgtacgatgtattggaaatttagttgagcctgggatttctggacttcttttctgccgttgagcctgaaattcatatttgattttgcctggtgaattctgcatgagtgacaggaatagatgcaaggattaggcggctttgttgctgtcaggatatgcatgtcttttgagtcccttttttttttccccttttatgctgttgttaagctatgaatattttggaaggggatttttttagaacaatttgattaaggatcggtggatttttatgccaaattgtagactctgcttttcgctgcagtcactgtctttcagaagatttcagggcccaagatggttnctaatatttactgattttctgtttcaaaaaaaaaaaaaaaaaaaaaaaaaaaaaaaaaaaaaaaaa

SEQ ID NO: 72575 - DNA, 142 bp, Oryza sativa
  Clone ID: PAT_MRT4530_72941C.1
atggccgaggcgcccatgcgcattgcgaagcctgttgcgctggggcgctcccgcgcgtgcagcacctcgtgcgccgtcgcgcgaggccacgccagcagccacccgtcatgtggatgcgaggatctgccgagcaggatcactg

SEQ ID NO: 72576 - DNA, 426 bp, Oryza sativa
  Clone ID: PAT_MRT4530_72942C.1
atggagttagaggaccaaggctcagaccccactgacgcaccattgctccactaccatcaatcctctatcagcgcgtaccggccagccttcgcaccgtaccggcctctgctgttggctacacctccttgcaatgtccaccgccttcggcctcctcgtcgtgcccgccgttcaaccgatggcgttcccagccggcaccccgcttcttccatccctgtcgtcgtctcctccttccgccaaagttaccgcatgggtgtggccgccgtcgccgtcgtgtcgtcacacccctcctgccaatctctcgcctcagatgtctgcaccgtcacctccacagccacgtcccgctgtctcaccggcctccaccatcgccctgccgtctcgccgccgccgtcgactaggggggccgccctcccgcgcaggttaggctag

SEQ ID NO: 72577 - DNA, 419 bp, Oryza sativa
  Clone ID: PAT_MRT4530_72943C.1
cccacaaaaaaaagttttgacggttggggtttgggtttgattcccatcacaaaaccccgggggggcaaccccccaacgggggccgttccaaagaagtaaatcaaccccgttttttttgggggtcctagggtttggggcccccccattcccagggccccgggggggaccgggcgccccaaaaaaaacgtacccccttttttgttttccattaagcccagggggccacgacccactttgggggcgggggggggaaaacgacacgtcccataatttgggccgggggtcctacacccgggactttttgggcgggggtttttttaacccccgggccgggaacccttaaagggggacggggggcctgggttttccgcatttgggggaaaacctcccgccttggggcacgttgttttccggaaacc

SEQ ID NO: 72578 - DNA, 238 bp, Oryza sativa
  Clone ID: PAT_MRT4530_72944C.1
acgttgacgctgatccggccagctccacctttaggtccgcccgcaccagaaccgggggtggccgccgcggcgagccccgccgccgccgtcctcgtgagccatcggctttgtcggccacttgctcaggcagcggcgaggcagataggagggtggagaggggcggcggcggctagttaaggaaggtccgcccacttggcatcaacctattgtaatttggcacaagaaccactgcttcaag

SEQ ID NO: 72579 - DNA, 200 bp, Oryza sativa
  unsure (1)..(200): unsure at all n locations
  Clone ID: PAT_MRT4530_72945C.1
cgttttttcccgtcattccacctcgtcgtcactctcgngagctcncccnccgcctggcgtcccattcatccngngagcgagcaggtgccccgcgtcgtccanctgctgttnngccgatcatcctgctcttttaaggagaagngtaaatctgncnaacacgtggggctngagccgaatgaangagggttcccaggatgttg

SEQ ID NO: 72580 - DNA, 210 bp, Oryza sativa
  Clone ID: PAT_MRT4530_72946C.1
atggagaagtggccattggcatgtactactactactgataatatagcagcagtgggcaaaggagaaggaagaagagagacaaaaacagtggcacgaggtggtgatcaatcatgttgctgtttgccaatttttacctggagctggaaaaaggctgaagatgataccagtattatgtttattggtgcaaaatctttcaagtactgcagatga

SEQ ID NO: 72581 - DNA, 1747 bp, Oryza sativa
  Clone ID: PAT_MRT4530_72947C.1
atggcgacccgtgtgaagccgccgccgccgtcgcgccccgtcgtcgccaagagccccccgcgccgccagccgcacccgccgccgccgccgccgccgccgctgccgcgccacgcgctccatcggcagcacgagcgggagggggaggcgacgatgtccgtgtggagcgtggggttcatcaacgccaggctgtcgcagcgcacccccgtgctcggcctccgcctctgggtcctcgtcgctgccggcgccgcggcggccgtcgtcctcgcgctcctcatcgtcgtctgcctctgccggcgctgccgccgccggagatgctcccgcctggccccggctccgccgcaccacgggaggagcaaccggtctctcaagcagcagcagtcgatggtgtcggacaaggacatcgaggaggccgcccgctggcccccgccgccgtcgttccagccgccgatagaggtcatcaaggcggagcagacggcgcccctgatcatggtggaggccgcgaggacgagcggcgagacggcgacgagcagcggcgggagcacgcgcgggtggagcaccgagagcggcggcagcgacgcggcggagcccgaggcgtcgcggcgagggtggggacggcggtacacgcgccgggagctggaggaggccacgaacaggttcgccgccgagaacgtgctcggcgagggcggctacggcgtggtctacaagggcatcctccgcgacaacaccgccgtcgccattaagaatctccacaacaacaggggacaggcagagaaggatttcaaggtggaggtcgcgacgatcgggcgtgttcggcacaagaatctggtcagcttactggggtattgcgagggagcttgcaggttgcttgtttatgagtatatggagaacagcaatcttgataagtggctgcaccatggtgacgatgaaatcagtccactcacctgggatatgagaatgcatatacttcttggaacagccagagggttggcttaccttcacgaaggcctggagcccaagattgttcaccgagacgtcaaatccagcaacattcttctcgaccggcactggaacgccagagtatcagatttcgggctggccaagctcctgtgctcggagaggtcctacgttacaactcgtgtcatgggaacatttgggtacgttgcgcctgagtacgcaagaactgggatgctaaacgagaggagcgacgtctatagcttcggggtgctcatcatggagatcatatcaggcagaactcctgtggattacactaggccagcaccagaggtgaacttggttgagtggctgaagcgcatggtcgccgagaggagggtggaggaggtggtggaccccaggctgccggagacgccgccgcccaaggtgctgaagcgcgccgtcctcgccgcgctccggtgcgtcgaccccgacggcggccagagaccaaccatggggcacgtcgtccatatgctcgaagatgacctcaaattcagagatgaactgcagcttgcgcgggatctgtcgcctcacgcatccgacagttacgagtacgagctgtgagcttggcggaggaatgtgtcgttgcgaggcagagtttgtatggggcttagaattctctggtcgttggagattactagattttcgcattcaggctcacaaccagatgttcttgtacaagtcgatctcttatcttttacgtttgtattaaaacggcgacggaaatggttaatcgccaaaaaaaaaaaaaaaaaaa

SEQ ID NO: 72582 - DNA, 543 bp, Oryza sativa
  Clone ID: PAT_MRT4530_72948C.1
atggaaggtggtggtgctggggtagagggcgtcaaggagacggcttggtcagccaggggttgggaggtggacggtggccggatccacgaccatcggggtcggacccacccaaatttgcttagtgggagctcgatagtgatgacgactaccgcaaggaggaggatggcgacattgcttgctactgtgcggatgggaggaaacaacttcgacaatgaccggggaagtgcggaggcggccctcttgcatagcaacctcttgcttgtgtttgtcgagcattggtggggtggtggtgaaagccacgccctggttcctaggacgggcgacggggcgccattggcattgcaacctctagagaagcttcgtttggagaatgaaggaaggaataaggtgatccccaacctcctggcctcgtcgatggagaaagaggatgggtgtagccgtgtaggaggagcggtggccagcgattgcgtcgaggatgggtgtaggtacaggggagcggctagtgctacatgcgttgaatgcggaggctacggagtggagtga

SEQ ID NO: 72583 - DNA, 800 bp, Oryza sativa
  Clone ID: PAT_MRT4530_72949C.1
atggagcggcagcaagacacgaggcggccactgccgcgccggggccaggtcaaggccggcatcttcgccagcctgttccggtgcatcttccccggggagaaggaggccagccagaagctcaaagaaggcaacagcggcggcggcggcgccgccggatcccctccaccgaagcccatcacgcgcggccgccacgtccctggtcctggactcgcgcggggcggaaatgctactggctgggatccattggcagctgcaaaatcccggataccagaggtccagagcatcatcaccatcaacagctctctcatcagttctcgtcgaccagtcaccggtagccccgggacaaatcaagggatgacaaagaaagtggtagagccagtaaataaccggagcgagcgagtgggcgacatggacgggggccaggaccacgacgagaggaagaagagccacggcaatccataccccaggaggggcgacatcaagaggaagatcgtgcaggatgtgttcggcaagtcgtcggatcccccggcgacgagtaaacccgccggcgccggcaacggagatggcggggacgatgccgccgccgccgggagctactacggccattactgatagcgagtgcgtgggaccgtgtgcgtaatacagttgtagagagggagcacgcgtgagataggtgtagtagagctcgacctgttcggtgtgtataattcccaataattattgatcagatcaaacacccgtgtgatgctataatctactaatctcgtgtggtcacgtgtgtggcctgatctaatgaatga

SEQ ID NO: 72584 - DNA, 504 bp, Oryza sativa
  Clone ID: PAT_MRT4530_7294C.1
atgtgggaagaggcgaggctgtgcgaggagaaggggaagaggcagcgctgtgcgaggagatgttctggacaccgtcgccggcaagagaatgacgaggcggccgtcctcgtgaagcgcgagcacccgggccgcgctgtagcggccgacgcggcgaggcgcgagcacttggaccgcacggcggcgtctgactcagtggccgcggcctgccatttgtggtcggcgtttgacttgatgacgcggcggaaggatcctcttgatggactgaagctatactccggcgacgagcactactggttcacggccacgatgacgtcagcggcgacgtcacctccggcggcggctcgggagcgcaagctcgccggcgaacgacggcgcgaggacgcgaacggagggcaccaggacgtagagagcgacgcggcgaactcaccgatgaccaaaacgacggcggaagatgaacggacggcggcggcgtcgaggaaaaggaggcggagtccttcggcttga

SEQ ID NO: 72585 - DNA, 1250 bp, Oryza sativa
  unsure (1)..(1250): unsure at all n locations
  Clone ID: PAT_MRT4530_72950C.1
cggacgtttgctgcaaagtcctcaaggcgaacggcctccatcttctccttccagctcctcccatggcgtccctcgtcgccatcgccatcgccatggctctcatggtggttcaacctggccggcagatgactgcctttgctgctcggacgtcgccggcggcggcggcggaggcgttctggcgtgccgccatgcccggcgctcccatgccggacgccatcgtcgagctcctccaccatgagcacggcgttgctagcgccggcggcaaggccaacggcggcggcgacggtccaccgccgccgatgaacttcaactacgacgactacagggccctgcctcggagcgacgccccttccccggatgcattgaaccgcgtcgccgccgtacagaacgccgacgagaacggcgtgtcctcgccgccgccgccgccgccgacggtgttcttcctcgaggacgccgtgcgcgtcggcgagagcctgcccctaccgcgaccggcggccgacgcaaccgccgccgggcgcagcggcggccacggcgttgccgccgctgcggctgtacaccgtccggtcggtgagggcaatcgaggggtccagcttcgtcgtgtgccgcggcgagaccacggcgggcgccggcgtgtacgggtgccgcgatgccgccaccggcccggcgagggcgtacgcggtggacgcggccggcggcggcggcggggacgcggtgatcgccgccgtcgtgtgccacgccgacacgtcccgctgggacccggaccacgccgcgttccggctgctcggcgtcaggcccggcggcgccgccgtctgccgcgccgtcgccgacgcgcacatcctcccgacgaacaaggattgagtacttctcgccatgatcgaggactcctcgatcgatcttaatcttattgccatgcataattagtgtgttaattacgtgcttaattgtatgtgtgaagtgtgcattagtcacagtttgtaatgtaataatgtttcgcttgttcgactgtatgatctcgagttgggtgatatatacgttgataaaataaaggaaaaagtttgtgttggttcatatgcaaaaaaaaaaaaaaaaaaaaatctttactannnnnnnnnnnnnnnnnnnnnnnnnnnnnnnnnnnnnnnnnnnnnnnnnnnnnnnnnnnnnnnnnnnnnnnnnnnnnnnnnnnnnnnnnnnnnnnnnnnnnnnnnnnnnnnnnnnnnnnnnnnnnnnnnnnnnnnnnnnnnnnnnnn

SEQ ID NO: 72586 - DNA, 435 bp, Oryza sativa
  unsure (1)..(435): unsure at all n locations
  Clone ID: PAT_MRT4530_72951C.1
cgntcatctaattatgttttctgttttatcttgctgcttgccgatctcctgcaaaagggcgtgatcgatagtcactcggttcatcctttttgcgcccaggagcttgaaacgacgaaccatatcctcctacactgtgtgttcatacgtcaagtctggcgcctcgtcctgtcttctggttggcgttggctcgccccttcccatggctgctctctttaggtctggtggccgtcttctagggcctgtctaccaaagtgtcttcgcaagggctttgacactctggtcctcctggtatcctggcagctgtggaaggagcggaaagccagtgtttttgattcgtccctttcgccggtctcggtggttctggagtccatcctttagaagaatcgtctttggtctcttgctagtgccgcttcatttggggacctgttgggaaca

SEQ ID NO: 72587 - DNA, 852 bp, Oryza sativa
  Clone ID: PAT_MRT4530_72952C.1
atggcgtccctcgtcgccatcgccatcgccatggctctcatggtggttcaacctggccggcagatgactgcctttgctgctcggacgtcgccggcggcggcggcggaggcgttctggcgtgccgccatgcccggcgctcccatgccggacgccatcgtcgagctcctccaccatgagcacggcgttgctagcgccggcggcaaggccaacggcggcggcgacggtccaccgccgccgatgaacttcaactacgacgactacagggccctgcctcggagcgacgccccttccccggatgcattgaaccgcgtcgccgccgtacagaacgccgacgagaacggcgtgtcctcgccgccgccgccgccgccgacggtgttcttcctcgaggacgccgtgcgcgtcggcgagagcctgcccctaccgcgaccggcggccgacgcaaccgccgccggcgcagcggcggccacggcgttgccgccgctgcggctgtacaccgtccggtcggtgagggcaatcgaggggtccagcttcgtcgtgtgccgcggcgagaccacggcgggcgccggtgtgtacgggtgccgcgatgccgtcacctgcccggcgagggcgtacgctgtggacgcggccggctgggtcggctgggactcccttatcgccgccgttcttcgccattccgattttgcgggttgggacccgtacgatgcctggcgccttttgtctctgctcgcggcccgacaagtcccggtggacccggaccacgccgcgttcgggctgctcggagtcaggcccggcggcgccgccgtatgccgcgccgtcgccgacgcgcacatcctcccgacgaacaaggattga

SEQ ID NO: 72588 - DNA, 299 bp, Oryza sativa
  Clone ID: PAT_MRT4530_72953C.1
atatagacccatgagggtcgatcgtggccggggagaccgcgatttcaccggcgggtggggaggggtggggaggagagagaggtgggattcaaaaattgaatcccggccgtctcgagcgcgggcgcggacgggagagagagagggggagtgggcgcgagggcgacgttgcccaggagacgcgggagcggggtgcggcggcggttgcggggcgcggcggcgccgactggaggtgggagacgggcccgacaggtgggccccagggctcgggcggctggctgggccgtggccttcggccggcc

SEQ ID NO: 72589 - DNA, 2766 bp, Oryza sativa
  Clone ID: PAT_MRT4530_72954C.1
atggctgaccgcgatgaggaacagatattgtacgatacaatcgcggagggatgcagccagtactggaatgaagaagaggggaacgaggatccaaaccagtacttgaacgaggaagggaacgtggagagggatgcggaggggaaccagcaggggcacgtggaaagggatgtggaggggaaccaggaggaggaggctagtggtagtcaaccctccgttggacagaagagggcacgcgggcaacgaggtgcagcgaagaagcttgagggtcggcacatcataacggaagtggaagaagatggacgtcctagtgccccggccgaagccgccaagaactatgtacgtcacagcggttgggttgtgcgggataacgtgcctgtcagtacggtgtactggcgaagaacaagggcacgcggagatcatgagagctttgtcccagattcggagaaagagatgctgtggaccacaatgctcgagacattcacccttcctgcgggtacagaggacaaagtgaaaaggtggactctaaagaaaatggcagaacaatttcagagcttcaagggagatctgtaccagaagtatatactgaaggggcagacaccgaacttcgacacattcccaaagctaagggatcactgggacgagttcgttgcatataagacaggtgaacaagggaaggcgatgatggaaagaaacaaagaaaatgccgccaagaagaagtaccatcaccacttggggtcaggaggctatagtgtcgcgatgccgaagtgggagcagatggaggctagcttgattgagatgggtatcgaaccggcaacagccaattggccggaacgatcgaagttctggtactatgctcacggtggaacgctcaacccagctgatggctcactggtcttcggctatcagatacaagaggctgcgcgacgactaacagatgcagtggaagcctcctctcagggcacgttccgaccagacagagatagggacgagctgacactcgccctgcagactccagagcatccaggacgaactcgagggaaaggggtgattccttggaagattggtttcaaggaggacatccacacgtacaggagtcggatgaggagcaagagagataccgaggcgaagattgcagacctagagttccgggtatcgagctacgaactcaacatgcaagaggagatggcaagggaggtcgatgaacgcatggccgcacatcggtcccatgatccccagccgaccattcctcctgcaatggtgagcccatcaggaaaccgtagcagctgcgcctcaacggggcaggtggcgtcgggcatggccatcccaacggacccttcaggtacttaccactgcaggccgattccagcaggatactccaaggtcgaagttgagttggtcgaaggcgcgtacgaggacctcgagctggattaccctggaggagacgcatcgactcctcaggatcctgcaccgactcctcctcgtgctcctacacctactcccccgcaagctcctcttccggcaccttcaaagtcaagggcccccccagctccaccgcttgcccacacaagggcaacaaagaaggcgaaagttgacgccgccaagatcaaggacccggggtacgattgcacgcaagaggagcttgacgcttacgttgcatcagaagtcaagagacaattcaagcctcgaagtccagaaaagaagattcctatagaccccagtgtcaggaacttcttcaggggtatgtctgcatctgtcaaggaggccatcaagctatcggactatgagcgaacgctgaagaaagcatcttctggaaagtccaaaccagtccctcagcttggagagcaaccaaaccaggagatcgagccgttggtgaccggtaaagaaatgacgatagaacaatttattactgacaccggtctaactacggatcaattgctaggagtcgcaccaatcgaaaaggcggaagtgaaatacatgtacgaactcggtaaaccgcttgtcaagcctgagctgctgcagtccctacccacacaaatgtacaagttccatcagctgtacatggagatgagcgccaccggtagagagatgatcggagcgaggatcagagacacggacttcttgcaaggagatgacattctctggatcaatttcaggggaatctacgaactataccagctggacgccctcgacgtctctattatgagttgctggattttaatggagattcaaagggcccgacggcggagggttttcgatactggattcatcgaccctcggaaagtaaacgtcgcaatgctcgaccaatatccacaagaaacagaggacaatctcgtccatctcctgaaggcgcagcattacaagacgttcatactgttgccatacaacacagaattccactgggtgcttttactcatcgacctggaggcctgcaccgtcaacgtatatgactcaatggataaaaaagagtctacgtttgacaagtgcgcaaagcaaaagcagggaactaacttgtgcggctattacgtgtgcgagtattgccactgccttgcagaccaaatcatcaccacaagagagctcgattttattcgcatgagggataacctgaccacacacaaggaatttatcgcggcggttcaagaacaactcatgggattcatcaacgaagaaatccttgatcccaagggtgaattctactacgacggaaacacaattcaccggtccttagcttctgagctagcagcgagtactactacgtcgaaatcgtag

SEQ ID NO: 72590 - DNA, 2841 bp, Oryza sativa
  Clone ID: PAT_MRT4530_72955C.1
atggctgaccgcgatgaggaacagatattgtacgatacaatcgcggagggaagcagccagtattggaatgaagaagaggggaacgaggatccaaaccagtacttgaacgaggaagggaacgtggagagggatgcggaggggaaccagcaggggcacgtggaaagggatgtggaggggaaccaggaggaggaggatagtggtagtcaaccctccgttggacagaagagggcacgcgggcaacgaggtgcagcgaagaagcttgagggtcggcacatcataacggaagtggaagaagatggacgtcctagtgccccggccgaagccgccaagaactatgtacgtcatagcggttgggttgtgcgggataacgtgcctgtcagtacggtgtactggcgaagaacaagggcacacggagatcatgagagctttgtcccagattcggagaaagagatgctgtggaccacaatgctcgagacattcacccttcctgcgggtacagaggacaaagtgaaaaggtggactctgaagaaaatggcagaacagtttcagagcttcaagggagatctgtaccagaagtatatactgaaggggcagacactgaacttcgacacattcccaaagctaagggatcactgggacgagttcgttgcatataagacaggaggctatagcgtcgcgatgccgaagtgggagcagatggaggctagcttgattgagaggggtatcgaaccggcaacagccaattggccggaacgatcgaagttctggtactatgctcacggtggaacgctcaacccagctgatggctcactggtcttcggcgatcagatacgagaggctgcgcgacgactaacagatgcagtggaagcctcctctcaaggcatgttccaaccagacagagatagggacgagctgacactcgccctgcagactccagagcatccaggacgaacacgagggaaaggggtgattccttggaagattggtttcaaggaggacatccacacgtacaggagtcggatgaggagcaagagagataccgaggcgaagattgcagacctagagttccgggtatcgaggtacgaactcaacatgcaagaggaggtggcaaggaaggttgatgaacgcatggccgcacatcggtcccatgatccccagccgaccattcctcctgcaatggtgagcccgtcaggaaaccgtagcagctgcgcctcaacggggcaggtggcgtcgggcatggccatcccaacggacccttcaggtacttaccactacaggctgattccagcaggatactcgaaggtcgaaattgagttggtcgaaggcgcgtacgaggacctcgagctggattaccctggaggagatgcatcctgcaccgtctcctcctcatgctccgccagcaccgtctccacctcaggctccagcatcgactcctcctcaggatcctgcaccgactcctcctcgtgctcctacacctactcccccgcaagctcctcttccggcaccttcaaagtcaagggccccccagctccaccgcctgcccacacaagggcaacgaagaaggcgaaagttgacgtcgccaagaacaaggacccggggtacgattgcacgcaagaggagcttgacgcttacgttgcatcagaagtcaagagacaattcaagcctcgaagtccagaaaagaagattcctatagaccccagtgtcaggaacttcttcaggggtatgtctgcatctgtcaaggaggccatcaagctatcggactatgagcgaacgctgaagaaagcatcttctggaaagtccaaaccagtccctcagcttggagagcaaccaaaccaggagatcgagccgttggtgaccggtaaagaaatgacgatagaacaatttattactgacaccggtctaactacggatcaattgctaggagtcgcaccaatcgaaaaggcggaagtgaaatacatgtacgaacttggtaaaccgcttgtcaagcctgagctgctgcagtccctacccacacaaatgtacaagttccatcagctgtacatggagatgagcgccaccggtagagagatgatcggagcgaggatcagggacacggacttcttgcaaggagatgacattctctggatcaatttcaggggaatctacgaactataccagctggacgccctcgacgtctctattatgagttgctggattttaatggagattcaaagggcccgacggcggagggttttcgatactggattcatcgaccctcggaaagtaaacgtcgcaatgctcgaccaatatccacaagaaacagaggacaatctcgtccatctcctgaaggcgcagcattacaagacgttcatactgttgccatacaacacagaattccactgggtgcttttactcttcgacctggaggcctgcaccgtcaacgtatatgactcaatggataaaaaagagtctacgtttgacaaggttttcgaacttatagacagggcttggtatcggttccgtcatttggtccgcggcaaatggagagaaagacttaggcggaagttcaaatttccttgcgcaaagcaaaagcagggaactaacttgtgcggctattacgtgtgcgagtattgccactgccttgcagaccaaatcatcaccacaagagagctcgattttattcgcatgagggataacctgaccacacacaaggaatttatcgcggcagttcaagaacaactcatgggattcatcaacgaagaaatccttgatcccaagggtgaattctactacgacggaaacacaattcaccggtccttagcttctaagctagcagcaagtactactacgtcgaaatcgtag

SEQ ID NO: 72591 - DNA, 342 bp, Oryza sativa
  Clone ID: PAT_MRT4530_72956C.1
atggccaacgacggtgaggacttcttcgtcgacgacgacgtcgtcgtccacgccgcggtggcgccaccgccggccatcggtgacgacgacgactacggaatgctcaactaccgaccggccggctgcgacgacgacggcggcggcggcttcgccatgtacgagccgatgatcatcgtgttcacggtggtggtgtatttggcggtgtggctctacgggttgagcaagcttttaccgtatgttcgtgcgcgtttgcacttgctgcggctgcctgattattattgcatatacgcgcacttgttttggacagggttaattggtctgatcatcagtcctcgtgactga

SEQ ID NO: 72592 - DNA, 2487 bp, Oryza sativa
  Clone ID: PAT_MRT4530_72957C.1
atggctgaccgcgatgaggaacagatattgtacgatacaatcgcggagggaagcagccagtactggaatgaagaagaggggaacgcggatccaaaccagtacttgaacgaggaagggaacgtggagagggatgcggaggggaaccagcaggggcacgtgaaaagggatgtggaggggaaccaggaggaggaggctagtgcgaagaagcttgagagtcggcacatcataacggaagtggaagaagatggacgtcctattgccccggccgaagccaccaagaactatttacgtcacagcggttgggttgtgcgggataacgtgcctgttagtacggtgtactggcaaagaacaagggcacgtggagatcatgagagctttgtctcagattcggagaaagagatgctgtggaccacaatgctcgagacattcacccttcccgcgggtacagaggacaaagtgaaaaggtggactctgaagaaaatggcagaacagtttcagagcttcaagggagagctgtacaagaaatatatcctgaagaggcagacaccgaacttcgacacatttccaaagctaagggatcactgggacgagttcgttgcatataagacaggtgaacaagggcaggcgatgatggaaagaaacaaagaaaatgccgccaagaagaagtaccatcaccacttggggtcaggaggctatagcgtcgcgatgccgaagtgggaggagatggaggctagcttgattgagaggggtatcgaaccggcaaccgccaattggccagaacgatcgaagttctggtactatgctcacggtggaacgctcaacctagctgatggctcactggtcttcggcgatcagatacgagaggctgcgcgacgactaacagatacagtggaagcctcgtctcagggcacgttccgaccaaacagagatagggacgagctgacactcgccctgaagactccagagcttccaggacgaacacgagggaaaggggtgattccttggaagattggtttcaaggtggacatccacacgtacaggagtcggatgaggagtaagagagataccgaggcgaagattgcagatctagagttccgggtatcgagctacgaactcagcatgcaagaggaggtggcaaggaaggttgatgaacgcatggccgcacatcggtcccatgatccccagccgaccattcctcctgcaatggtgagcccgtcaggaaaccgtagcagctgcgcctcaacagggcaggtggcgtcgggcatggccatcccaacggacccttcaggtacttaccactgcaggccgattccagcaggatactcgaaggtcaaagttgagttggtcgaaggcgcgtacgaggacctccagctggattaccctggaggagacgcaccgactcctcctcagtatcctgcaccgactcctcctcgggctcctacacctactcctccgcaagctcctcttttggcaccttcaaagtcaagggccctcccagctccaccgcctgcccccacaagggcaacgaagaaggcgaaagttgacgccgccaagaacaaggacccggggtatgattgcacgcaagaggagcttgacgctcatgtggcatcagaagtcaggagacaattgaagcctcgaagtccagaaaaaaagattcctatagacccgagtgtcaggaacttcttcaggggtatgtctgcacctgccaaggaggccataaagctattgaactatgagcgaaccctcaagaaagcatcttctggaaagtccaaaccagtccctcagcttggagagcaaccaaaccaggagatcgagccgttggtgaccggtaaagaaatgacgatagaacaatttattactgacaccggtctaactacggatcaattgctaggagtcgcaccaatcgaaaaggcggaagtgaaatacatgtacgaactcggtaaaccgcttgtcaagcctgagctgctgcagtccttacccacacaaatgtacaagttccatcagctttacatggagatgagcgccaccggtagagagatgatcgaagcgaggatcagggacacggacttcttgcaaggagatgacattctctggatcaatttcaggggaatctacgaactataccagctggacgccctcgacatctctattatgagttgctggattttaatggagattcaaagggcccgacggcggagggttttcgatactggattcatcgacactcggagagtaaacgtcgcaatgctcgaccaatatccacaagaaacagtggacaatctcgtccatctcctgaaggtgcagcattccaagacgttcatactgttgccgtacaacacagagtccggctttgcaattgctccactcatcaagcgtgtcattgtgccacgaaccagccacggtgaagaaggtgcaggtgccactgctcatcgacaccaaagatatgacgatgaagacgaagagaaatatgttgctgatgatgagtag

SEQ ID NO: 72593 - DNA, 2925 bp, Oryza sativa
  Clone ID: PAT_MRT4530_72958C.1
atggctgaccgcgatgtggaacagatattgtacgatacaatcgcggagggaatcagccagtactggaatgaaaaagaggggaacgaggatctaaaccagtacttgaacgaggaagggaacatggagagggatgcggaggggaaccagcaggggcacgtggaaagggatgtggaggggaaccaggaggaggaggctagtggtagtcaaccctccgttggacagaagagggcacgcgggcaacaaggtgcagcgaagaagcttaagggtcggcacatcataacggaagtggaagaagatggacatcctagtgccccggccgaagccgccaagaactatgtatgtcacagcggttgggttgtgcgggataacgtgcctgtcagtacggtgtactggcgaagaacaagggcacgcggagatcatgagagctttgtcccagattcagagaaagagatgctgtggaccacaatgctcgagacattcacccttcctacgggtacagaggacaaagtgaaaaggtggactctgaagaaaatggcagaacagtttcagagcttcaagggagatctgtaccagaagtatatcctaaaggggcagacaccgaactttgacacattcccaaagctaagggatcactgggacgagttcattgcatataagacaggtgaacaagggcaagcgatgatggaaataaacaaagaaaatgccgccaagaagaagtaccatcaccacttggggtcaggaggctatagcgtcgcgatgccaaagtgggaggagatggaggctagcttgattgagaggggtatcgaaccggcaaccaccaattggtcggaacgatcgaagttctggtactatgctcacggtggaacgctcaacccagctgatggctcactggtcttcggcgatcagatacgagaggctgcgcgacgactaacagatgcagtggaagcctcctctcagggcacgttccgaccggacaaagatagggacgagctgacactcgccctgcagactccagagcatccaggacgaacacgagggaaaggggtgattccttggaagattggtttcaaggaggacatccacacgtacaggagtcggatgaggagcaagagagataccgagacgaagattgcagatctagagttccgggtatcgagccacgaactcagaatgcaagaggaggtggcaaggaaggttgatgaacacatggccgcacatcggtcccatgatccccagccgaccattcctcctgcaatggtggtgtcgggcatggccatcccaacggacccttcaggtacttaccactgcaggccgattccagcaggatactcgaaggtcgaagttgagttggtcgaaggcgcatacgaggacctcgagctggattaccctggaggagatagtgagacgcatctacgagacacaagccatgccattattctatggcgcaggcggtacatcatcctccctgggcgacaagcgacgtctcgtgcaccatctcctccggctccgccatctcctcctcaggatcctgcaccgtatcctcctcatgctccgccagcaccgtctccacctcaggctccagcaccgactcctcctcaggatcctgcaccgactcctcctcgggctcctacacctactcctccgcaagctcctcttccggcaccttcaaagtcaagggcccccccagctccaccgcctgcccacacaagggcaacgaagaaggcgaaagttgacgccgccaagaacaaggacccggggtacgattgcacgcaagaggagcttgacacttacgttgcatcagaagtcaagagacaattcaaacctcgaagtctagaaaagaagattcctatagaccccagtgtcaggaacttcttcagggatcaattgctaggagttgaaccaatagtaaaggcggaattgaaatacatgtacgaactcagtaaaccgcttgtcaagcccgagctggtgcagtccttacccacacaaatgtacaagttccatcagctgtacatagagatgagcgccaccggtagagagatgatcggagcgaggatcaggcacccggacttcttgcaaggagatgatattctctggatcaatttcaagggaatctacgaagtataccagctggacgccctcgacgtctctattatgagttgctggattttaatagagattcaaagggcccgaaggcggagggttttcgatactggattcatcgaccctcggagagtaaacgtcgcaatgctcgaccaatatccacaagaaacagaggacaatctcgtccatctcctgaaggcgcagcattacaagatgttcatactgttgccgtacaacacagaattccactgggtgcttttactctttgacctgtcggcctgcaccgtcaatgtatatgactcaatggataaaatagagtctacgtttgacaaggttttcgaacttatagacagggcttggtatcggttccgtcatttggtccgcggcaactggagagaaagacttaggcggaggttcaaatttccttacgcaaagcaaaagcagggaactaacttgtgcggctactacgtgtgcgagtattgccactgccttgcagaccaaatcatcaccacaagagagcttgattttattcgcatgagggataacctgaccacacacaaggaatttatcgcggcggttcaagaacaactcatgggattcatcaacgaagaaatccttgatcccaagggtgaattctactacgacggaaacacaattcaccgacctacgggagaggtggggccgttgtatgcgggatgggatgaggccgtcggtgccagagctaggaagctgctaggtggtgacggggtggcccgaggtggggagatggaggaagactcccttactccggcaaggccatggttgcagctgctgcggcacagatga

SEQ ID NO: 72594 - DNA, 1044 bp, Oryza sativa
  Clone ID: PAT_MRT4530_72959C.1
atggtaaggaactcggcagtcaagggtggcttctcaaagtaccaggagggcatcggaaagaggggggaagaaattcaacatataaacccaaggagaagtactaatcaagatcttacaaatcaagaggttaataaaatcatccagttgaaaccaaactcatttccggtggggattgatgtcgaaaatccatttatgtatcccatctcagaagcacaactacccactgctgaatgccccacaggaaccatcccaatactatgcaacaatagacaagaaaatatttcaactaagaatactgacgcaattgtcaccagtcaacaacaagaggtagcagggataaaatattttgacgacatatatggaacacaggccacaataaacatttatgaaccaatggtgaagcatcattgggatcttagtggatcatggatacaaattgaaaatggcccagatgtaattggtgctggctcttgggtctcaccaagcttcagtggtgatagctttgctaggtttcatatttcatggcgtgatgaagtacaaaacaagtcttgcaacaatcataagtgtcctggtttcgtccaagttagcagttctgttgttcttggaggcagaatacagccagtttctgtatataacggaccgcaatacgcaattaagtttcttatatttaaggacccaaagactgaaaattggtggttggtgtatggtgaggagaaaacagcaataggatattggccaagttctcaatttagttacatgaaggaaatggccagtaaagcattgtggggtggatatgttcagggtccaacagcctcagaagactctccacaaatgggcagtggacattttgcttctgaagggtatggcaaagcagcttttgttagagatattcaggtcgtgaacgacgacaacatgcgtgttattccaaacccagttaaagccgatccaggatctactaatcgaaggaaatatacctatgaatattatggacataatcccaatggtatgcatgtttactatggtggaccaggtagctacagctaa

SEQ ID NO: 72595 - DNA, 743 bp, Oryza sativa
  Clone ID: PAT_MRT4530_7295C.1
ctccgcgtctctctccagcttctctctcccccatggctctcgcgtgcgcatcgcgccgcctcctcgccggcgccggaactccggcgagatccttccactcccagccctaccaagccaaggtcggcgtggtggagttcctcaacggggtcgggaagggggtggaaacgcacgccgcgaaggtggaggaggcggtgggaggcgacctccagaggctcctcgagacccgcacgctgcggctcaagaagctcggcatcccctgcaagcataggaagttaattttgagttttgctcacaagtatcgtcttggtctttggaagccccaagcagaagcgaagaaagcgcaatgaagttgagttgtcttgaagtgggtcactatgaaaactatcagctgtcattatacttaactgggaaaatgcaatgaagttattttctgatttctcctgaagtgctctacttgcaaaatgatttgctatcgctggacttaagaacttgtcagacattgagcagttgcagtgcaatttctatgcaacagtctgaactatgcccatgctttctagcaactcttggaatctgaagacttgtaccttgtgctttgagtacttcgtttttcacttgtgtgaaacaacaaatcctaccaataataggccttctcattgttaggttgaacttcctgaggttgtaaaatacttcaaaaataggctaatttattggctaattcgaaaaaaaaaaaaaaaaaaactcga

SEQ ID NO: 72596 - DNA, 2994 bp, Oryza sativa
  Clone ID: PAT_MRT4530_72960C.1
atgccgcgcgcggcgccccgccgccgctccgctgccgccactccgtcgtcccgctgccgccacaccgagaacgtgaacgagcgaacgaatgtgaacgagaacaagaaaagacgttgtcggagtcgtccctcaagccggagtggtagagctagccctcgaaggaattcgcgcaggcaagagacatgtttcctgtatgaacaaatggctgatcgcgatgaggaacagatattgtacgatataatcgcggagggaagcagccagtactggaatgaagaagaggggaacgaggatccaaaccagtatttgaacgaggaagggaacgtggagagggatgcagaggggaaccaggaggggcacgtggaaagggatgtggaggggaaccaggagaaggaggttagtggaagtcaaccctccattggacagaagagggcacgcgggcaacgaggtgccccgaagaagcttgagggtcggcacatcataacggaagtggaagaagatggacgacctagtgccccggcagaagccgccaagaactatacattaacccttcccgcgggtacagaggacaaagtgcaaaggtggactctgaagaaaatggcagaacagtttcagagcttcaagggagatctgtaccagaaatatatcctgaatgggcagacaccgaacttcgacacattcccaaagctaagggatcactgggacgagttcgttgcatataagacaggtgaacaagggcaggcgatgatagaaagaaacaaagaaaatgccgccaagaagaagtaccatcaccacttggggtcaggcggctatagcgtcgcgatgccgaagtgggaggagatggaggctagcttgcttgagaggggtatcgaaccggccaccgctaattggccggaacgatcgaagttctggtactatgctcacggtggaatgctcaacccagctgatggcttactgggcacgttccgaccggacagagagagggacgagctgtcactcgccctgcagactccagagcatccaggacgaacacgagggaaaggggtgattccttggaagattgggttcaaggaggacatccacacatacaggagtcagatgaggagcaagagagataccgaggcgaagattgcagatctagagttcagggtatcgagctacgagtgcagcatgcaagaggaggtggcaaggaaggttgatgaacgtatggccgcacatcggtcccatgatccccagccgaccattcctcctacaatggtgagcccgtcaggaaaccgtagcagctgcgcctcaacggggcaagtaggatcacagagcatggacgccatgcaaacccaggacgaatccacctgccccgttgatgacatcactcagcggacaccatgtgagctgcatattcctttcaagaacttatcaataaaggtggcgtcgggcatggccatcccaacggacccttcaggtacttaccactgcaggccgattccagcaggatactccaaggtcgaagttgagttggtcgaaggcgcgtacgaggacctcgagttggattaccctggaggagacggtgagacgcatctacgagacacaagccatgccattattctatggcataggcggtacatcatcctccctgggcgacaagcagcgtctcgtgcaccatctcctttggctccgccatctcctcctcaggatcctgcaccgtctcctcctcatgctccagcaccgtctctacctcaggctcctgcaccgactcctcttcaggctcctgcaccaactcctcctcgggctcctcttccggcaccttcaaagtcaagggccccccaagctccaccgcttgcccacacatgggcaacgaagaaggcgaaagttgacgccgccaagaacaaggacccggggtacgattgcacgcaagaggagcttgacgcttacgtggcatcagaagtcaagagacaattcaagcctcgaagtccagaaaagaatattcctatagacccgagtgtcagaaacttcttcaggggtatgtctgcacctgccaaggaggccattaagttatcggactatgagcgaacgctgaagaaagcatcttctagaaagtccaaaccagtccctcagcttggagagcaaccaaaccaggagatcgagccattggtgaccggtgaagaaatgacgatagaagaatttattactgacaccggtctaactacggatcaattgctaggagtcgcaccaatcgaaaaggcggaacctgagctggtgcagtccctacccacacaaatgtacaagttccatcagctgtacatggagataagcgccaccggtagagagatgatcggagcgaggatcagggacatagacttcttgcaaggagatgacattctctggatcaatttcaagggaatctacgaactataccagctagacgccctcgacatctctattatgagttgctggattttaatggagattcaaagggcccgacggcggggggttttcgatactggattcatcgaccctcggaatgtaaacgtcgcaatgctcgaccaatatccgcaagccacagaggacaatctcgtccatctcctgaaggcgcagcattacaagacgttcatactgttgccgtacaacacagaattccactgggtgcttttactcttcgacctgtcggcctgcaccgtcaacgtatatgactcaatgaataaaaaagagtctacgtttgacaaggttttcgaacttatagacagggcttggtattggttccgtcatttggtccgcggcaactggagagaaagacttaggcggaagttcaaatttccttttattcgcatgagggataacctgaccacacacaagaaatttatcgcggcggttcaagaacaactcatgggattcatcaacgaacaaatccttgatcccaagggtgaattctactacgacggaaacacaattcataagtccttagcttctaagctagcgactactactacgtcaaaatcgtag

SEQ ID NO: 72597 - DNA, 252 bp, Oryza sativa
  Clone ID: PAT_MRT4530_72961C.1
gcgcagagatcaggtctaacagtgagagtgaggtgctcaaaaatcagcgctgaagctgaggatggcaacatccatgatcaccttgccgctggtggcgcccgcccgggccaagggcctatcgtccatctcccggcggggatcctccttagccatcggctgtagcggagggaagaagatcaagaccgacaagccctaccgtattggaggtggcgtgtcagtcaatattgatgcatatggcatgaagagcacggg

SEQ ID NO: 72598 - DNA, 2959 bp, Oryza sativa
  Clone ID: PAT_MRT4530_72962C.1
atgacctatagacttagcaactatttcttgtatgaacagatggctgatcgcgatgaggaacagatattgtacgatacaatcgcggagggaagcagccagtactggaacgaagaagaggggaatgaggatccaaaccagtacttgaacgaggaagggaacgtgaagaaggatgcggaggggaaccaggaggggaacgtggagagggatgtggaggggaaccaggaggaggaggctagtggaaccaagaactacgtacgacacagcggttgggttgtgcgggataacgtgcctatcagtacggtgtactggcgcagaacaagggcacgcggagatcatgagagctttgtcccaaatttggagaaagagatgctgtggaccacaatgctcgagacattcacccttcctgcgggtacagaggacaaagtgaaaaggtggactctgaagaaaatggcagaacagtttcagagcttcaagggagatctgtaccagaagtatatactgaaggggcagacaccgaacttcgacacattcccaaagctaagggatcactgggacgagttcgttgcatataagacaggtgaacaagggcaggcgatgatggaaagaaacaaagaaaatgccgccaagaagaagtaccatcaccacttggggtcaggaggctatagcgtcgcgatgccgaagtgggagcagatggaggctagcttgattgagaggggtatcgaaccggcaacagccaattggccggaacaatcaaagttctggtactatgctcacggtggaacgctcaacccagctgatggctcactggtcttcggctatcagatacgagaggctgcgcgacgactaacagatgcagtggaagcctcctctcagggcacgttccgaccagacagagatagggacgagctgacactcgccctgcagactccagagcatccaggacgaactcgagggaaaggggtgattccttggaagattggtttcaaggaggacatccacacgtacaggagtcggatgaggagcaagagagataccgaggcgaagattgcagacctagagttccgggtatcgagctacgaactcaacatgcaagaggaggtggcaaggaaggttgatgaacgcatggccgcacatcggtcccattatccccagccgaccattcctcctgcaatggtgagcccgtcaggaaaccgtagcagctgcgcctcaacggggcaggtggcgtcgggcatggccatcccaacggacccttcaggtacttaccactgcaggccgattccagcaggatactcgaaggtcgaagttgagttggtcgaaggcgcgtacgaggacctcgagctggattaccctggaggagacggtgagacgtatcatctcctccgactccgccatctcctcctcaggatcctgcaccgtctcctcctcatgctccgccagcaccgtctccacctcaggctccagcatcgactcctcaggatcctgcaccgactcctcctcgtgctcccacacctactcccccgcaagctcctcttccggcaccttcaaagtcaaggcccccccagctccaccgcttgcccacataagggcaacaaagaaggcgaaagttgacgccgccaagaacaaggacccggggtacgattgcacgcaagaggagcttgacgcttacgttgcatcagaagtcaagagacaattcaagcctcgaagtccagaaaagaagattcctatagaccttagtgtcaggaacttcttcaggggtatgtctgcatctgtcaaggaggccatcaagctatcggactatgagcgaacgctgaagaaagcatcttctggaaagtccaaaccagtccctcagcttggagagcaaccaaaccaggagatcgagccgttggtgaccggtaaagaaatgacgatagaacaatttattactgacaccggtctaactacggatcaattgctaggagtcgcaccaatcgaaaaggcggaagtgaaatacatgtacgaactcggtaaaacgcttgtcaagcctgagctgctgcagtccctacccacacaaatgtacaagttccatcagctgtacatggagatgagcgccacaggtagagagatgatcggagcgaggatcagggacacggacttcttgcaaggagatgacattctctggatcaatttcaggggaatctacgaactataccagctggacgccctcgacgtctctattatgagttgctggattttattccactgggtgcttttactcatcgacctggaggcctgcaccgtcaacgtatatgactcaatggataaaaaagagtctacgtttgacaaggttttcgaacttatagacagggcttggtatcggttccgtcatttggtccgcggcaaatggagagaaagacttaggcggaagttcaaatttccttgcgcaaagcaaaagcagggaactaacttgtgcggctattacgtgtgcgagtattgccactgccttgcagaccaaatcatcaccacaagagagctcgattttattcgcatgagggataacctgaccacacacaaggaatttatcgcggcggttcaagaacaactcatgggattcatcaacgaagaaatccttgatcccaagggtacaaatattgaagaatcagatattggccaattgccttaccttcaagctgtggtgaaagaaacgtttcggctgcatcctccagtaccattattgttgccacgccaagctgaaacgacaacaaacatagcaggtcgccggatatgccctagaatgccattggcaaataggatggtgcatttagttctgggatcattgttaaaccagttcaaatggaatctacctgttgacattgaaaggaatgggatagatatgtcagagaagttcggcttgacacttgtaaaggccatccctctctgcgctcttgttacaccaatttcagtcgagtcaggtgatcattaa

SEQ ID NO: 72599 - DNA, 4317 bp, Oryza sativa
  Clone ID: PAT_MRT4530_72963C.1
atggagaagcaaaacgtggatttcagcaaggtgcttgtcgagatccaggagtcgatgttggcgctgaatcgagcacaaggcaagacgcaggccaccgtcatcaagatagatcaaggtgtgaataattggaggccacaagtggaggaagtgatgcaggaactgcgcgaggaggttggcgagctccgccagaaagtggacttcctcggcaagacgaagatggcttctccattggcatcttcccctcgagttccgttgacggacgaggaaaggaaggcgccgctgctttcccacacctccgtcgccgacgaagttgatgaccgcggcggaagaagcagagaagattggcgtatgcgttgtgagcactactttgatgtgaacaacacatatccaggtctatgggttcgagtcgccaccatttacttcataggacgagcagcatcatggttgagatcttctagagctcatgtgaggtatcctgtttgggaagagtttagtgccactatgtccagtaaatttgataaggaccaacatgatttactcattagacaaatggatcaaattaggcagacaggaacagtttgggagttttatgagcattttgatgagttgatgaatcagctgttggcttatgatcctgaggttaatatgcgatacttgattcatcgttttactgagggattacatagagaaatcagaaatgctgttttgcttcatcgtcctcgcgatctcgagactgctctggctattgcgtctttacaggaagaggtgctggaggtggtcccggagtctaatcacagtaaaccctttcggcgctcggatggtggagtgcaaccgaaaaacagttctgctttcaagggagcatttccacttcctttacctccaggatcaggaggtgtgcgtgctgatgataagaaacatcaggatggccaacgtgctacaggactattgacaagatgtcatctattaaggctcatcgtcgggctcaagggttatgttacatttgtgccgaaaaatggtcacctgctcacaaatgtgccaccactgtgcaattgcacgcagtacaggagttgttttccttgttgcaagatggtcaaggtggctaatggtgaattgttgtcttgtgaccaagagattcctggttgtgaatggagctctcaagggtacttattttgtaccaatctgaaggtgatacctctgagcaactatgatatgatcctcggcatggactggttaatgcatcacaatcccatgacggtcgattggaccagaaagtctttgactctcgcgtggaagggacagactatttcattacaagggattacatctcagttagccacttgttccagtgtctctgttcaacaattgaatgggcttatttctcgttgtgcaatttcaaatctggtgcaattatgttctctgtcagtatcatcaacttcagaaatcattcctgaggcagtgcaagtagtgttgcaggaatttgattctgtctttgctgaacctgaaggtttaccacctgatcgaccgtatgaccactccattccattgattcctagggctcaaccagtaaatgtgaggccatatcgttatactcccacacagaaggatgaaattgaattacaagtgaaagagatgctttctaaaggtatcattcagcccagctatagtccattcttttcccctgttcttttggtaaaaaagaaggatggatcctggcacttttgtgttgattatcgccatctaaatgctataacagtcaaaaataactatcccttgcccgttattgatgaattgttggatgaactcaatggagcgcagtggttcactaagcttgatttacgctctggttaccaccaaattcgtatgcaagtgcaagatgaacataagacagctttcaagacacataatgaacactatgaattttgtgtgattccttttggtttaaccagtgcaccagccacttttcagggcgtcatgaacagcattctgcacccttggcttcgccgctttgtgttagtctttgtggatgacattttgatttatagttctactcttgaggagcatattcaacacttgagaactgtgttccaggttttgcttaagcatcagctcaaggtgaaacgtagcaagtgttcttttggccagcaacgccttgcttacttgggccatattatttctcctaatggtgtgtccactgatgaggataaaattcaggctgtcagggattggccagttcctacctcagtcaaagaattgcacttcttaggattagctggctactatcgcaaatttgtaagacattatggaatcatcatcattaaagcagctcttatctcagctcctgtcttggccatgcctaatttcaatctaccttttgtggtggaaacggatgcatctgacaaaggaattggtgcagtcctaatgcaacagaatcacccggtggcttttctcagtcgagctttgggatctcgtcatcaaggcttgtccacctatgaaaaggagagtttggctataattcttgccattgagcactggagctcttacttacaacatgctgaatttttcattaagacagatcatcggagtctatccttcttagatgatcagagacttactacaccgtggcaacataaggctcttaccaagcttttgggtttacgttacaagatcatttacaggaagggtgttgataatcgggcggccgatgctctgtctaggtgccaatcttctgacaccattgttttatctgctctgtccgtggccattccagcatggatgcaggaggtaagggatggttatgttcaggatcccgattctcgcagtaaagttcagactcttagtatcagcgctcatgatgtgcctgattacactctgaaggatggcatactgtatttcaagcagcgtatgtggattggtcataatatttcccttcagcagaagatcttagccaatcttcatactgctgcagtgggtggtcactctggtattcacgttaattatcagcatattaagcaactgtttgcttggccagggttgcgctcgagtgtggtccaatttgtgcaagcctgttcgatctgtcaaaaggcgaaatctgaacatgtcaaatatcctggtatgttgcaacctttactagtgcctgaacatgcttggcaagtggtctcgttggactttattgaaggtttaccacgctcatcttcgtttaactgcattttggtggtcgttgacaaattttccaaatacagccactttgtgcctttgtctcatcctttcacggccttggacgtcactgaagcctatatgcaattcattcatcgtctgcacggattgcctcagtcccttatctccgatcgtgatcgcattttcactagcacattgtggacaactctgtttcgtttggctggtacacagttgcgcatgagttcatcttatcaccctcaaacggatggacagacggaacgtgtcaaccagtgtttggaaacctttcttcgctgctttgttcacgcctgtccctctcagtggagtagatggttggctctcgcagagtactggtacaatacttcattccattctgctttgggcacaactccgtttgaggtattatatggtcataagcctcgctattttgggttgtcagctactgcagcttgtcagtcttctgagcttcaggagtggctacatgaacgcgagaaaatgcaagtactgatttgtgagcatttgttgcgcgctcaatccaggatgaaatttcaggctgatcatcaccggtcggagcgctcttttgctgtgggcgactgggtttctctcaaactacaacccttcgtccagcaatcggtagtgacccgcacaaatcgcaaactttcgtttcgcttttatggtccttttcaggttctagctcgtgtgggagaggtggcttatcgcttggatttaccagcgtcaagtctgattcatcctgtcattcacgtttctcaactgaagaaagcgctggcacctactgaaacggttcaacttgttttgcctgtacttcatccgacaactgatgctgaagctgaacctgctcacattttggatcgtcgcattattcgcaatggctctaagatggttgaacaagtgttgattcagtggtctggggaagaaccaacagctgttacttgggaaaatctgcaagaactgcgccatcgttttcctcaccatgaagcttggggacaagcttcgtttcaaggaagggggaatgtcacgccggctcaaggacaagaccagctcaggaagtctaacagagagaggcagccctcgagaaggttccctgcaagcgagtggacctggtaa

SEQ ID NO: 72600 - DNA, 414 bp, Oryza sativa
  Clone ID: PAT_MRT4530_72964C.1
ggagtaggttgctatggagatcccctacgtgatggtgcagatagtattattcatgttcattgcttacccgatgatagggtatgcatggacaccagtcaagttcttttggttcgtgtacaccatgatctgtacactgctctacttcctctacataggaatgatgatagtgtcgcttacccccaacatccaagtggcatccatattagcatccatgttctacaccgggcaaaacctcatgtctggttttatcgggcctgcaccacaaataccgagatggtggatattgttgtattacgcatcccccttgtcatggacactcaatgttttcttcaccacacagttcggggatgagcatgagaaggagattatcgtattcggagagacaaaatttattgctaccttcattaatgacta

SEQ ID NO: 72601 - DNA, 2559 bp, Oryza sativa
  Clone ID: PAT_MRT4530_72965C.1
atggctgaccgcgatgaggaacagatattgtacgatacaatcgcggagggaagcagccagtactggaatgaagaagaggggaacgaggatccaaaccagtacttgaacgaggaagggaacgtggagagggatgcggaggggaaccagcaggggcacgtggaaagggatgtggaggggaaccaggaggaggaggctagtggtagtcaaccctccgttggacggaagagggcacgcgggcaacgaggtgcagcgaagaagcttgagggtcggcacatcataacggaagtggaagaagatggacgtcctagtgccccggccgaagccgccaagaactatgtacgtcacagcagttgggttgtgcgggataacgtgcctgtcagtacggtgtactggcgaagaacaagggcacgcggagatcatgagagctttgtcccagattcggagaaagagatgctgtggaccacaatgctcgagacattcacccttcctgcgggtacagaggacaaagtgaaaaggtggactctgaagaaaatggcagaacagtttcagagcttcaagggagatctgtaccagaagtatatactgaaggggcagacaccgaacttcgacacattcccaaagctaagggatcactgggacgagttcgttgcatataagacaggtgaacaagggcaggcgatgatggaaagaaacaaagaaaatgccgccaagaagaagtaccatcaccacttggggtcagaaggctatagcgtcgcgatgccgaagtgggagcagatggaggctagcttgattgagaggggtatcgaaccggcaacagccaattggccggaacgatcgaagttctggtactatgctcacggtggaacgctcaacccagctgatggctcactggtcttcggtgatcagatacgagaggctgcgcgacgactaacagatgcagtggaagcctcctctcagggcacgagtcggatgagaagcaagagagatatcgaggcgaagattgcagacctagagttccgggtatcgagctacgaactcaacatgcaagaggaggtggcaaggaaggttgatgaacgcatggccacacatcggtcccatgatccccagccgaccattcctcctgcaatggtgagcccgtcaggaaaccgtagcagctgcgcctcaacggggcaggtggcgtcgggcatggccatcccaacggacccttcaggtacttaccactgcaggccgattccagcaggatactcgaaggtcgaagttgagttggtcgaaggcgcgtacgaggacctcgagctggattaccctggaggagacggtggtacatcatcctccctgggcgacaagcggcgtctcgtgcaccatctcctccggctccgccatctcctcctcaggatcctgcaccgtctcctcctcatgctccgccagcaccgtctccacctcaggctccagcatcgactcctcctcaggatcctgcaccgactcctcgtcgtgctcctacacctactcccccgcaagctcctcttccggcaccttcaaagtcaaggccccccccagctccactgcctgcccacacaagggcaacgaagaagaggagcatcttctggaaagtccaaaccagtccctcagcttggagagcaaccaaaccaggagatcgagccattggtgaccggtaaagaaatgacgatagaacaatttattactgacaccggtctaactacggatcaattgctaggagtcgcaccaatcgaaaaggcggaagtgaaatacatgtacgaactcggtaaaccgcttgtcaagcctgagctgctgcagtccctacccacacaaatgtacaagttccatcagctgtacatggagatgagcgccaccggtagagagatgatcggagcgaggatcagggacacgaacttcttgcaaggagatgacattctctggatcaatttcaggggaatctacgaactataccagctggacgccctcgacgtctctattatgagttgctggattttaatggagattcaaagggcccgacggcggagggttttcgatactggattcatcgaccctcggaaagtaaacgtcgcaatgctcgaccaatatccacaagaaacagaggacaatctcgtccatctcctgaaggcgcagcattacaagacgttcatactgttgccatacaacacagaattccactgggtgcttttactcttcgacctggaggcctgcaccgtcaacgtatatgactcaatggataaaaaagagtctacgtttgacaagtgcgcaaagcaaaagcagggaactaacttgtgcggctattacgtgtgcgagtattgccactgccttgcagaccaaatcatcaccacaagagagctcgattttattcgcatgagggataacctgaccacacacaaggaatttatcgcggcggttcaagaacaactcatgggattcatcaacgaagaaatccttgatcccaagggtgaattctactacgacggaaacacaattcaccggtccttagcttctgagctagcagcgagtactactacgtcgaaatcgtag

SEQ ID NO: 72602 - DNA, 4185 bp, Oryza sativa
  Clone ID: PAT_MRT4530_72966C.1
atgccgtccacccctccgccgttgcaatccgccaccggagcgcgccgttccattcgcgccggtgatgccggagcccgctccgccgtcgccgtcgccgtcacctttcaccgctcgccatcatcgatcgtcgtcgcactgcgccgccgcgtcgccgctgttgccgcgcagcgccgcgccgccgcgtaccatggccaccgggccggctcaagccgcccgcgcgcgccccggccgtccgatctacccgagggtagatcggggccgtccaccgccgcccgcgtggccaccacctcggcgccacgtcagcgccacgtggtgccccctctccccggcttcgtccgtgccgtcgaggatgcctgtgaagtggtgttccccactgcaatccaaaattctattcgggaatttctgggcgtgacaccctactccggcgagcgctccttgagcggcgtggcggaagacggcggcggagtcgagtggccggcagcggagcactgccggccttccaccgcagcggagcggccgggcggagaggcggccggcgcaccgatgctcggatccggcctccgcgctgtggcccgagcggcgacggcgtcaggcggctacgcggcgacagtgggtggggtggtcgagcggtggcggtggccggcggggcggcccgagcggcaccaggcggcgaggcagatcccgcggcgacttcgccggtggcacgaggggccacgacgctgggcgaagagcccggcagagaggcggccgggcggatctctcggctccgacgcgcggacgacttggagcggcgcctcccccttcctcctccggcctccgcggcgtggcccgagcggcaacggcgtcggacggcggcggcgggcgtcggcgtcgggcgcgtctctctctctctcctgtgatttttttcccaacgggccctacacgggtagatccctgcccccaggggcggacccagagggtagtccaggtaggcctaggactaccctaaaatttggcccagagaagaccaggcgacagcgaaggcgctccctcgagccgcacagccggtgcgactccggcgctcccgccgtcctgcgagacccctacgcgcgcccagccgtggcgcccggcggcgccgctgacatcgcgcgccgcgccggcgcccgcgcggcctcgtcctcttcgcgactccgcgtctctggctctccgcccctggccgcgccctctccgtcccacgtccggccgtcgcccactcgcccggcggcctcccgggctcctggcgtctcgcctgacgccgccagcacccaaccgcctaggccggcatgccccatccgccgtccgcccgtccggccaatgccagtgcgccactccctctttggatctaaacacatgcatccctctaattctagatgccatcagctcaaccggattgacatgaaagttgcatcttgtgatctaccaattccacatatggatgaagggtcgtctgttgttcctgttgtagatgatgctccaattgatgaagacaccgttgttgatgaaaggtcatgtgaagaacaagaaccacctccacctccatatgttgttgctcatttagaagccgccaagaactatgtacgtcacagcggttgggttgtgcgggattacgtgcctgtcagtacggtgtactggcgaagaacaagggcacgcggagatcatgagagctttgtcccagattcggagaaagagatgttgtggaccacaatgctcgagacattcacccttcccgcgggtacaaaggacaaagtgaaaaggaggactctgaagaaaatggcagaacagtttcagagcttcaagggagatctgtaccagaaatatatcctgaagggccagacaccgaacttcgacacattcccaaagctaagggatcactgggacgagttcgtttcatataagacaggtgaacaagggcaggcgatgatggaaagaaacaaagaaaataccgccaagaagaagtaccatcaccacttggggtcaggcggctatagcgtcgcgatgccgaagtgggaggagatggaggctagcttgcttgagaggggtatcgaaccggccaccgctaattggccggaacgatcgaagttctggtactatgctcacggtggaacgctcaacccagctgatggctcactagtcttcggcgatcagatacgagaggctgcgcgtcgactaacagacgcagtggaagcctcttctcagggcacgttccgaccggacagagagagggacgagctgtcactcgccctacagactccagagcatccaggacgaacacgagggaaatgggtgattccttggaagattgggttcaaggaggacatccacacgtacaggagtcggatgaggcgcaagagagataccgaggcgaaaattgtagatctagagttcagggtatcgagctacgagtgcagcatgcaagaggaggtggcaaggaaggttgatgaatgcatggccgcacatcggtcccatgatccccagccgaccattcctcctgcaatggtgagcctgtcaggaaaccgtagcagctgcgcctcaacggggttggtaggatcacagagcatggacgccatgcaaacccaggacgaatccacctgccccgttgatgacatcactcagcggacaccatgtgagctgcatattcctttcaagaacttatcaataaaggtggcgtcgggcatggccatcccaacggacccttcaggtacttaccactgcaggccgattccagcaggatactcgaaggtcgaagttgagttggtcgaaggcgcgtacgaggacctcgagctggattaccctggaggagacggtgagacgcatctacgagacacaagccatgccattattctatggcgcaggcggtacatcatcctccctgggcgacaagcggcgtctcgtgcaccatctcctccggctccgccatctcctcctcaggatcctgcaccgtctcctcctcatgctccgccagcaccgtctccacctcaggctccagcaccgactcctcctcaggatcctgcaccgactcctcctcgggctcctacacctactcctccgcaagctcctcttccggcaccttcaaagtcaagggcccccccagctccatcgcctgcccacacaagggcaacgaagaaggcgaaagttgacgccgccaagaacaaggacccggggtacgattgcacgcaagaggagcttgacgcttacgttgcatcagaagtcaagagacaattcaagcctcgaaatccagaaaagaagattcctatagaccccagtgtcaggaacttcttcaggggtatgtctgcatctgtcaaggaggccatcaagctatcggactatgagcgaacgctgaagaaagcatcttctggaaagtccaaaccagtccctcagcttggagagcaaccaaaccaggagatcgagccattggtgaccggagtcgcaccaatcgaaaaggcggaagtgaaatacatgtacgaactcggtaaaccgcttgtcaagcctgagctgctgcagtccctacccacacaaatgtacaagttccatcagctgtacatggagatgagcgccaccggtagagagatgatcggagcgaggatcagggacacggacttcttgcaaggagatgacattctctggatcaatttcaggggaatctacgaactataccagctggacgccctcgacgtctctattatgagttgctggattttattccactgggtgcttttactcttcgacctggaggcctgcaccgtcaacgtctatgactcaatggataaaaaagagtctacgtttgacaaggttttcgaacttatagacagggcttggtatcggttccgtcatttggtccgcggcaaatggagagaaagacttaggcggaagttcaaatttccttgcgcaaagcaaaagcagggaactaacttgtgcggctattacatgtgtgagtattgccactgccttgcagaccaaatcatcaccacaagagagctcgattttattcgcatgagggataacctgaccacacacaaggaatttatcgcggcggttcaagaacaactcatgggattcatcaacgaagaaatccttgatcccaagggtgaattctactacgacggaaacacaattcaccggtccttagcttctgagctagcagcgagtactactacgtcgaaatcgtag

SEQ ID NO: 72603 - DNA, 540 bp, Oryza sativa
  Clone ID: PAT_MRT4530_72967C.1
atggccgtggcaactccgacgagcacgatatcgccggcggcgagagggaagtcggcggccattgacgccgacgagtgcatccaatggctcgacagcaaggatcccagctccgtcatctacgttagcttcggtagcatcgcgcgcacggatccgaagcagctcatcgagctcgggctcggcctcgaggcgtcggcccacccgttcatctggatggtgaagaacgcggagctctacggagacacggcgcgcgagttcttcccacggtttgaaatttcgggggtggacaccgtaaatgctgatcctgtcgcacgccacggtcgatggcttcgtgacgcactgcgagtgaactcgatcatggaagttgttgccaccaggttgcccatggtgacatggccgcattctgtcgaccagttgttgaaccagaagatggccgtggaggtgctcgggattggcgtcggcgtcggccttgatgagtcggtgactgaaggacactgtggtggggagggtggtggtggagaaggcaatcgggagcatacttga

SEQ ID NO: 72604 - DNA, 210 bp, Oryza sativa
  Clone ID: PAT_MRT4530_72968C.1
atggagctcttaagggagagcgacgtcaacatctccggtgaccgcgtggaggatggcaacgagcgcggtgtagtcattgcggaattcatcggtccttgcctcaaacacctgccacaaaagtcctacggaggcaaacgcaacagatcgtcccgtgcgacgtgctctcgtgcaaacagattgcacagatcgagctcaacttcacgcttttga

SEQ ID NO: 72605 - DNA, 361 bp, Oryza sativa
  Clone ID: PAT_MRT4530_72969C.1
ccaggaaagcttaccgagggataccctctacccttcgatatatgtcacgtatcgatatggtatgctcacgagtatacggacgtgctcggcatacgttaaggaaattcatcatggagttcacagatggaaggagtcctatttggtcagaactgggttgtcattgtgtcgtgttcggtccggcttctccgagtcctacttggagacagttgacctgcgatataaaagggaccccccggaaggacctaaggcatcgaatctcagagccaacacatccaccacagcctacgaagccggagcttatcggagccaagtcgtcggagatctaatcggatcaactcgattacgatctcgtcggtaccgt

SEQ ID NO: 72606 - DNA, 1033 bp, Oryza sativa
  Clone ID: PAT_MRT4530_7296C.1
ccctccttcccgctctcctttgcaccccaatcagctgatgaagcagccgcacacaaggaaatctatgaccaactccgacaaaccgtggagaccttcccgacggcacccaacagcagcaacagcttcacgtacagtcgccaccccgacggatggtacacgttcccggagggggttgtgagtgccatggtcatcaagagtcaccttacggcgcgcaccaccgacatcttcatggtcaccttccctaagtccggcaccacctggctcaagacgctcttgcactcggctctccaccgcggggccaacgatctagcggcgcacagtccccaccagcggctgacgagctcctggcgcatagcccccaccagctcatctctttcctcgagtctcaggtgttcgtcaaagatcggatacctgacttgagctccctgccggagccatggctgttgatgacgcatatcccgtctcaatcgttgccagactccgtcgcagcctcaggctgcaaggtggtgtacctgtgccgggatcccaaagattgcttcgtctcgctctggcacttttggaacaggttcatgccatggaacattgatgacgcacatcgacaattctgtaatggtgtctcgttgtttgggctttactgggagcacgtcctcagctactggaattggcacgtcgagaggccaagcgaggtactcttcttgacctacgaggagctcgccgctgacactctcggccatctgagacgcctcgccgagttcgtcgggcgcccattcacaacggaggagcaggatgccagagtggacagaaagatcgtggagatttgtgccatggaaagtttatcggggttagaggtgaatcgatcggggatgaccaacttcaccaagaaagacgtgccaaacaacatatccttccggcgtggcgtggttggagattggaggaatcacctgacgccggagatggcgaggaggattgatgagattacagaggtcaagtttaaaggatctggcttgctgttgcatccaccgtttttacaagt

SEQ ID NO: 72607 - DNA, 406 bp, Oryza sativa
  unsure (1)..(406): unsure at all n locations
  Clone ID: PAT_MRT4530_72970C.1
ttcaccccgcgccgcaggtctactggaacaataaggcagacctggaatattttcatccctgaaccacgttgatcagtgaaaggtgcaataaagggntgaaacctcgaccaatatctacaaccttgcttcttaccgggcatcaagacaataaaaattacaaaaaggagacagtttnnngaaccgccaactgtcaggttgggtgatattcatttccttgaagaactctanatgnctcattggccgaatttgaatgagccacaaagcttgggaatacctaccctcaagaagctcaagctggttaattcttggaattttctggaaacattgagtgttggttttttccttcttgggtttttccctttggcatgtaacctccattcccttgcatgtttggagcagtaacttt

SEQ ID NO: 72608 - DNA, 3597 bp, Oryza sativa
  Clone ID: PAT_MRT4530_72971C.1
cccttcatcgatctccaatctcgatctctctctccgtcgcgccgcccgccacgagacgccgcgccacgacgacgccgcgccacgccgacgccgcgccacgctgccgccggcacgccacgccgccgccttcgccgccgctcgcgcaacgccgccgccgccacgccatgccgccgccttcgccgccgcgcaacgccgccgacgcatgcaacgccacgccgccgccgccgtcggcacgccgtcgccacgccgccgcgccaagcgccggcccaatgccgccacaccgccgttaacgaacacgtgaacgagaacgaacacgtcaacgtacgtcgagaacgtgaacgagaacgagaacgatcgaacgaacgagagcgagaacgagaacgatcgaacgaagaaaagacatgttgtcggagtcgtccctcaagccggagtggaagagctagccgtagaaggaattcgtgcaggcaaatggctgactgcgatgaggaacagatattgtacgatacaatcgcggagggaagcagccagtactggaatgaagaagaggggaacgaggatccaaaccagtacttgaacgaggaagggaacgtggagagggatgcggaggggaaccagcaggggcacgtggaaagggatgtggaggggaaccaggaggaggaggctagtggtagtcaaccctccgttgtacaaaagagggcacgcgggcaacgaggtgtagcgaagaagcttgagggtcggcacatcataacgtaagtgaaagaagatggacgtcctagtgccccggccgaagccgccaagaactatgtacgtcacagcggttgggttgtgcgggataacgtgactgtcaatacggtgtactggcgaagaacaagggcacgcggagatcatgagagctttgtcccagattcggagaaagagatgctgtggaccacaatgctcgagacattcacccttcccacgggtacagaggacaaagtgaaaaggtggactctgaagaaaatggcagaatagtttcagagctttaagggagagctgtacaagaaatatatcctgaaggggcagacaccgaacttcaacacattcccaaagctaagggatcactgggacgagttcgttgcatataagacaggtgaacaagggcaggcgatgatggaaagaaacaaagaaaatgccaccaagaagaagtaccatcaccacttggggtcaggaggctatagcgtcgcgatgccgaagtgggaggagatggaggctaacttgattgagaggggtatcgaaccggcaaccgccaattggccggaacgatcgaagttctggtactatgctcacggtggaacgctcaacccagctgatggctcactggtcttcggcgatcagatacgagaggctgcgcgatgactaacagatgcagtggaagcctcctctcagggcacgttccgaccggacagagatagggatgagctgacactcgccctgcagactccagagcatccaggacgaacacgagggaaaggggtgattccttggaagattggtttcaaggtggacatccacacgtacaggagtcggatgaggagtaagagagataccgaggcgaagattgcagatctagagttccgggtatcgagctacgaactcagcatgcaagaggaggtggcaaggaaggttgatgaacgcatggccgcacatcggtcccatgatccccagccgaccattcctcctgcaatggtgagcccgtcaggaaaccgtagcagctgcgcctcaacggggcaggtaggatcacagagcatggacgccatgcaaacacaggacgaatcgacctgtcccgttgatgacatcactcagcggacaccatgtgagccacatattccttacaagaacttatcaataaaggtggcgtcgggcatggccatcccaactaacccttcaggtacttaccactgcaggccgattccagcaggatactcgaaggtcgaagttgagttggtcgaaggcgcgtacgaggacctcgagctggattaccctggaggagacggtgagacgcatctacgagacacaagccatgccattattctatggcgcaggcggtacatcatcctccctgggcgacaagcggcgtctcgtgcaccatctcctccggctccgccatctcctcctcaggatcctgcaccgtctcctcctcatgatcctccagcaccgtctccacctcaggctccagcaccgactcctcctcaggatcctgcaccgactcctcctcgggctcctacacctactcctccgcaagcttctcttccggcaccttcaaaggcaacgaagaaggcgaaagttgacgccgccaagaacaaggacccggggtacgattgcacgcaagaggagcttgacgcttacgttgcatcagaagtcaagagacaattcaagcctcgaagtccagaaaagaagattcctatagaccccagtgtcaggaacttcttcaggggtatgtctgcatctgtcaaggaggccatcaagctatcgtactatgagcgaacgctgaagaaagcatattctggaaagtccaaaacagtccctcagcttggagagcaaccaaaccaggagatcgagccgttggtgaccggtaaagaaatgacgatagaagaatttattactgacaccggtctaactacggatcaattgctaggagtcgcacaaatcgaaaaggcggaagtgaaatacatgtacgaactcggtaaaccgcttgtcaagcctgagctgctgcagtccctacccacacaaatgtacaagttccatcagctgtacatggagatgagcgccaccggtagagagatgatcggagcgaggatcagggacacagacttcttgcaaggagatgacattctctggatcaatttcaagggaatctacgaactatactagctggacgcactcgacgtctctattatgagttgctggattttaatggagatttaaagggcccgacggcggagggttttcgatactggattcatcgaccctcggagagtaaatgtcgcaatgctcgaccaatatccacaagaaacagaggacaatctcgtccatctcctgaaggcgcagcattacaagacgttcatactattgccgtacaacacagaattccactgggtgcttttactcttcgacctgtcggcctgcaccgtcaacgtatatgactcaatggataaaaaagagtctacgtttaacaaggttttcgaacttatacacagggcttggtatcggttccgtcatttggtccgcggcaaatggagagaaagacttaggcggaagttcaaatttccttgcgtaaagcaaaagcagggaactaacttgtgcggctattacgtgtgcgagtattgccactgccttgcagaccaaatcatcaccacaagagagctcgatgtttatcgcatgagggataacctgaccacacacaaggaatttatcgcggcggttcaagaacaactcatgggattcatcaacgaagaaatccttgatcccaagggtgaattctactatgacggaaacacaattcaccggtccttagtttctgagctagcagcgagtactactactacgtcgaaatcgtag

SEQ ID NO: 72609 - DNA, 1134 bp, Oryza sativa
  Clone ID: PAT_MRT4530_72972C.1
atgacgacgacgggaacgacggcggcgcacggctggagcgacggcggcgacggcggctcgaggtctcacggcgctagggcgtttccggcgacgagaggcgaaggcgaggaagtcaagagacaattcaagcctcgaagtccagaaaagaagattcctatagaccccagtgtcatgaacttcttcaggggtatgtctgcacctgtcaaggaggccatcaagctatcggactatgagcgaacgctgaagaaagcatcttctggaaagtctaaaccagtccctcagcttggagagcaaccaaaccaggagatcgagccgttggtgaccgggaaagacatgacgatagaagaatttattattgacaccggtctaactacggatcaattgctaggagttgaaccaatagaaaaggcggaattgaaatacatgtacgaactcggtaaatcgcttgtcaagcccaagctggtgcagtccctacccacacaaatgtacaggttccatcagctgtacgtggagatgagcgccaccggtagagagatgatcggagcgaggatcagggacttggacttcttgcaaggagatgatattctctggatcaatttcaagggaatctacgaagtataccagctggacgccctcgacgtctctattatgagttgctggactttattccactgggtgcttttattcttcgacctgtcggcctgcaccgtcaatgtatatgactcaatggataaaaaagagtctacgtttgacaaggttttcgaacttatagacagggcttggtatcggttacgtcatttggtccgcggcaactggagagaaagacttaggcggaggttcaaatttccttgcgcaaagcaaaagcagggaactaacttgtgcggctactacgtgtgtgagtattgccactgccttgcagaccaaatcatcaccacaagagagctcgattttattcgcatgagggataacctgaccacacacaaggaatttatcgcagtggttcaagaacaactcatgggattcatcaacgaagaaatccttgatcccaagggtgaattctactacgacggaaacacaattcaccggtccttagcttctgagctagcagcgactactactacgtcgaaatcgtag

SEQ ID NO: 72610 - DNA, 1059 bp, Oryza sativa
  Clone ID: PAT_MRT4530_72973C.1
atgatcgtcgcccaagctccagctacccaccaagctttcggccaagctgtccctcctcatgtggcgcaggcattgagcatgattaggcaggccaaccaagctccgaccggcgatgcaagtacagccagcgaaactagtccaaatgccgcataccacgatggaaacaacttcggccctacaagcgcaacttcaagcttttcttcaacaactcaaccaaccccacaccattccaagaccagcccctttggcgcacgccatcgggagctcaagtctggcaaccatcaagcgccgcacttcgaacagaatgccgcggtccaagcaccttcgactgaccttcaagggatgatcgccggcgaaacagatccaagcgagttcttgttgatctacaagtctgcaatcgaagcagctcatggcgacgaaaacaccaaggcgaagtggcctggcggaggtggtggcggcccggtggtggcggcggcggccgttgacgtgccctcccctcctccagatccagtgggagggaaggcggcgacagctcagcgactcggcggctgcgcccttcctcggctagatctagagggaggcaacggccgtgaggcggcaacacatcctcgggcgacggcggcggtggtggttaaggcagcggggaaggggcagcgctggcgaagagaccgcgacgagcgtgaaggcatcgcatgcattgcccggtggagtcttgatctggccgggcgacagcggcagcggcggtggccgcgcccttccctccaccagatccggcaggaggggaggcggcgcacctcagtggagtggcggtggccatgccctcccctccgccagatctggcgggaggggaggcggcgcacctcggtgacggtagcggcggcggccgtcgacggcaggggtggagaaggacgccggtggtgcgggcgaggtggtgacccgcggcttgagttcttgagtcatggcttggcggcgtccgcggtggctctggcgatcttcggcgcactccggcggagtggtgtcacgagggccttctccggtgggcagcagatggtgatttag

SEQ ID NO: 72611 - DNA, 882 bp, Oryza sativa
  Clone ID: PAT_MRT4530_72974C.1
atggatcagtacggcgatgaggataagttgctgaagctattgctcagtcttgtggtctacggcgacgcgataaacatatcgacaactcttcgcgttgggaacgccgacgccccgtgggagctcaagggcacgcccagcgcgcggccttggcatcgagctcgtgttcctgccgccatggaccatctcgagtcgacctgcctcgccaacacatttaactcccctccagggcctgagcgcccgctccagaaggagtgcctcgaaatatcggagttcctacgagaattttatggaggagtgcggagtgtcagcattctttcaatggagttccagagaaagccaggattgtcggcctttttctctcacttgtacttcggcggatgcttcctttattcaagcaagtctgatacacctggcaatattggcaacggtgaaaatggtggcaacaacgacaatgacaaatgtagcggcgacgatgtctctgcaccacatgccaacattgggaacgccacaaacggtggcagcaacgatgacaacaacaacaatgcttattcatgggacaacgtgctgctatcatcgtggctgaagttgtcgctctgtcccatggtctatggtgatgcagcgaacgtcgacttcgactcctccttcactccagtgatcacgtcattgccaagtttcaagagcgacgagttggacatcgactccgactcctcccgcgctccagtgaagatgtcgctgaatgagcagataccaacagtgtcgatgctacaacacgccctgggacccatgcttcaacctctttggaacttcaatgtcaccagcaaatccgtggcacctccaatatcatcatcaatagtgcaacaatgcatctacaacaagctctag

SEQ ID NO: 72612 - DNA, 246 bp, Oryza sativa
  Clone ID: PAT_MRT4530_72975C.1
aacacacacattcacacttccctctctttattcacccattcatcaaccaaaattataactttaacacttaatacaccatacaaatgctcatatacacaaccacaaacttaattctctaaatttctttcactgacttaaacaccactaaatttttaacattttttcctctctcattatttaattatcactcactctacctcggatatactgcatagacgcagtattcctcttcatcttaagcctatt

SEQ ID NO: 72613 - DNA, 279 bp, Oryza sativa
  Clone ID: PAT_MRT4530_72976C.1
atgtcggcgggagactggcgcgcgcgggtggcggaggccggcgcatgcgaggcgacacacgtcgtcctcttcgttgccagaggtggtttcccgcaaagcccggtgattcttggtggagatgtggcctccgccgcaaagctcttcttacatctcatcagaaacatagaagactccgatgtctctgttgccctgtcttcaactttcagctcctcttccggcaggccagacctcctcgccttccttgatgctccacccttctgttggccggtctacttctag

SEQ ID NO: 72614 - DNA, 324 bp, Oryza sativa
  Clone ID: PAT_MRT4530_72977C.1
gaagaggcatggcttcttggaaaggagaagaatgaggaagaagaaagggttgcagagactgacacgtgggtcccctgtcatacactcataatagagaggataaatggagaggctgttggagtaaacaatgtgtttgacttgccaaattagacggagagttagccaaatatgtatttgtagagttagatttggagagacttttgtagatgagcgaagagatagagactagattacctaagctagtaccttcacttcacgtgcacaaccacttcgatctcgatctatgacctgcttttaattggttaatttactcttggtggtatc

SEQ ID NO: 72615 - DNA, 618 bp, Oryza sativa
  Clone ID: PAT_MRT4530_72978C.1
atgtggaggaagcagaggcaaaaacgactgtgctgtgctgtgcactgcttcttcaacttcaaggttccctaccaaaccaagcccagacgtcttggtcacatcccacgcagcaccgactcagcaaggccccgacctcacctaacgcgcgcatgtaaccgtccgccccccgcgcgcgtgtccgctcggctgtggtgccaactgcccaaggcaagcaacgcggtcgcatgggcgcccacgcgccgtccttgtcgcccgcatttaagccggcaacaggagggccgttgcgacgccgacccggcgcttcctcactgcttctggatctgcagacgcgagcgacgtccgcgcgcgcgacgggcgtgcaacgcagacaacgcaatgcgctgcgtgcgctgcacggctgcaccgctgcgctgcgttgtcacaacgacaaggaaagcccgtgtggctacctgctcggaaacagattttggcggtggggctcgggctcgtccctgcgcctggattacttcagcgtatcttcctgcggagtacgtgcccacgcagggccggagaagtcgctggagaaacgggggacacttccgacgagatcgttttcaggacgatcctgctgttttctaa

SEQ ID NO: 72616 - DNA, 2441 bp, Oryza sativa
  Clone ID: PAT_MRT4530_72979C.1
atggcgaccaagcgcccgcgtcgcccgccacctccctcctcttctccgcatcgccgctgcttgagcaggccaccgacaagccagctgaccgcaaggatcacaacggcggagctcccttccttcccccgaggacactacagcgggcaggtgcaccgaggcagcggagaaggtgccgtccagatccggggtgacagaccagcggcaaggtcggcgggcagcggggaagagggtggaaggataaaagctttgctactttatggtttgtatgttaatattactttgataatacaggatgctaagggcaacaacaatgatttgatactgcaacatgtttatactgtccacaaggcttggcgttcagcccgtagcaatgtttgtgcaccaacatggctaagccacatcccacgtgcgtgggaggctgggcagctcagcacgactgcacgagaaaaatggtggtatgacacacaatggagccgggtggactgtggaatattatttgctagtcggctgtgcatcggagcaattctagccgttagcggtgcagcggaagcttccggtgcaacccatttccacacggatgccaagttgccttttgattcaccactggctgagctcactctgacccgcaaacgccagtgcccgcagcctacatatagccgcatctgcccatcaaggttgagcacagtcatcgagcctacaatggagccggtggccgtcgtggcggtgccgttcccggcgcagggccacctcaaccagctcctgcacctgtcgctgcagctcgcctcgcgcggcggggtggacgtgcactacgcggcgcccgcggctcacgtccgccaggcccgcgagcgggtgcagggcggggacgacgcggcgctccgctccgtccggttccacgacctcggcatctccacgtacgcctcaccgcctcccgaccccgccgccgcctcgcccttcccctcccacctcatgcccctctgggaagcctacaccgccggcgcgcccgccccgctcgcggctctcctcgacaagctctccgcctcctaccgccgcgtcgtcgtcgtgtacgaccgcatcaacgacttcgccgcacaggaggcggcgcggctgcgcaacggcgaggcgttcgtcatgtactgcttggccgtgtcgatgctcgctaggaggattgctccccaggagcaccaacggatcctgcgcgagaacggcctcaccaacatcaccgtggaagactgtgcaacggaggagttcgtggattacatcagacggacgagggcgaccaaggagatgtcgcctcccagaggtatcctgaccaacacgtgtcgcgcgctcgagggcgagttcatcgacgtcgtcgcggggaacctggccgccgacggcaagaaggttttcgccgtcggaccgttgaacccactgctgcacgggaacgcgtcgaagcagggcgaccagcggcagcgccacgagtgcctggactggctcgacaagcagccccctgcgtcggtgctgtacgtctccttcggcacgacatcgtcgctgcgagcggagcaaatcgaagagctcgcatcggcgctgcgcggcagcaatcagcggttcatctgggtgttgcgggacgccgaccgcggagacatattcgcggaggactccggcgagatcatcagccgccacgcgaagctgctgcgcgagttcacgcagcacaacgaagggagtacggggctggtgatcaccgggtgggcgccgcagctggagatcctggcgcacgacgccacggcggcgttcatgagccactgcggctggaactccaccatggagagcctgagccacgggtagctgattcttgcctggcccatgcactgcgaccagccatgggacgccgagctcctctgcaagtacctcaaggccggcgtcctcgtgcggccatgggagaagcacaacgaggtcacgccggcgaaggacatccaggaagccatcgaggaggccatgctttctgacggaggagtacccatgcgacaacgtgcacgggagctcggagatgccatccgcgcctccgtggccgccgccggctcgtcggtcgtcggctcgtcgcgcaaagacctggatgacttcgttgcttacatcacgaggtaatcacgtaccgagattgccaccgtgggaattgatgattctgttcgtggtaactccaataggctttcgccattgggccaggccaccatcttatatctcaaggcccatctgcccacgtcgccattccgccataggagcagcagcagggatccatgtcagccctgctcgatcaatctagtgcccctgtttagttggggcagatcatgaagtaaacttactgagccttgtttagttggggaaaatttttaggtttggttgtcacatcggatatacggtatatatttaaagtattaaacgtaatctagtaaaaaaaaaaaaaaaaa

SEQ ID NO: 72617 - DNA, 1878 bp, Oryza sativa
  Clone ID: PAT_MRT4530_7297C.1
atggcgccctccttcccgctctcctttgcaccccaatcagccgatgaagcaaccgcacacaaggaaatctatgaccaactccggcaagccgtggagaccttcccgacggcgcccaacagcagcaccagcttcacgtacagtcgccaccccgacggatggtacacgttcccggagggggttgtgagtgccatggtcatcaagagtcaccttacggcgcgcaccaccgacatctttatggtcaccttccctaagtccggcaccacctggcttaaggcgctcttgcactcggctctccaccgcagggccgacgatctcgcggcacacagcccccaccagctcgttcctttccttgagacccaggtgttcatcaaagatcggatccctgacctgagctccctcccggcgccgcggctgttgatgacgcacatcccgtcccagtcgttgccggactctgttgctgactccagctgcaaggtggtgtatctatgccgggatcccaaggactgcttcatctcgctctggcatttcttgaacaggttcaggccgtgggacatcaacgaggcacaccgaaacttctgcgatggtgtctcactgtttggcccgtactgggagcatgtcctcggctattggaggtggcacgtcaagagaccaagccaggtactcttcttgacctatgaggagctcactaccgatacactcggccaactgagacgcctagccgagttcgtcggacgcccgttcatggtgaaggagcaggagatcgaagtggacagaaagatcgtggaggcctgcgccatggagagcttgtcgaggttggaagtgaaccagtcggggacaactgacatggtcgataaaacctatgcgaacaacatattcttccggcgtggcgtgtgtggactcttcatggcttcctccttcccgctctcctctgcaaccgaagcggcggacgaagcgaaagcccacaagaaaatctacaaccaactccggcaagtcgcggagacctttccgacggcgcccagcggcatcgacgtcccatacagccaccaccccgacggctggtacatgaccacggcgggggtcgtgagtgccatggtcatcaagagccacctgacggcacgcgccaccgacatcttcctcgtcaccttccccaagtccggcaccacttggatcaaagcgcttctgtactcggctctccaccgcagggccgacgagcttgtggcgcatagcccccatcaactcgtccctttcctcgagtctcaggtgttcgtcaaagatcggatacctgacttgagctccctgccagagccacggctgttgatgacgcatatcccgtctcaatcgttgccagactccgtcgcagcctccggctgcaaggtggtctactggaattggcatgtcgagaggccaagcgaggtactcttcttgacctacgaggagctcgccgctgacactctcggccatctgagatgcctcgccgagttcgtcggacgcccattcacaatggaggagcaggatgccggagtggatagaaagatcgtggagatttgtgccatggaaagtttatcggggttagagatgaatcagtcggggatgactaatttcaccgagaaagacgtgccaaacaacacgccaaagtggccgacggatcaacgactcacgaggcaagtcagcgacatcggccaccatactgatactgccgccgtcctgatggctgggcgcttctgcactcggcacacatggctcattggttcaaggagtcaaggtgcttctgcactcggctcttctccgtggaactcaagagctagctggtggcgcaaaagccccaccagctcgtcccagctgttcgtcaacgaccgcatcctcagcctgaataactag

SEQ ID NO: 72618 - DNA, 362 bp, Oryza sativa
  Clone ID: PAT_MRT4530_72980C.1
agttaaagtttttttattttttatttttttgttggcgtatttaaaaagggggattttatttggaattttgggataaaggttaaaatgggaagcatgggggggggtgacttttttggtaacattggaacccttatgcttttaaaaatgaggtccaggcaccaccaacgggggggatggttttcggggcaatgttgtatttgggaaaaataccaaatttggggggggagtttaaggggaggaaagctggactgtggaattgggtttgttcaaaggtgagaacaactccctgtttaagggggaattggtgaaaaattggttgaacgcaaattaagggctggtgatggaattggtggggacgcggg

SEQ ID NO: 72619 - DNA, 336 bp, Oryza sativa
  unsure (1)..(336): unsure at all n locations
  Clone ID: PAT_MRT4530_72981C.1
ggggggggaactacggggcgacatgaatgggcacaaaaactatgataaggctgcgggaaggaccaaggaacacgtgcggtcacgacgaccgacggggacgccgccgaatggagacaggggacaatcggcgctcaaggtaggccgacccaaggggagaagggcgtaccgaagaccaaggtatcgcgaacccaaggagaaggcggtgcggaggcaaaggaacgcggcctctttttctctcaccggccgcgccatgngacaaggggccgcggcngccgcggggcgcctacgagggactatggcgttacgaatgccaatgtacatgggcgtgctgacacg

SEQ ID NO: 72620 - DNA, 1088 bp, Oryza sativa
  Clone ID: PAT_MRT4530_72982C.1
tcgtcgtcgtcgtcgtcctctcgtcgctcccagtcgtcgtggcgttcgtccctccgccgagccgttctcgtccgtcctcggtgtttcgtcaaggtcgctgtagccgtcgtcgtcttcgtcctcggctccgcgtcgtcaagcctcgtgccggccgcgtctcgccttcgtccaaggatcgccgccgaagctctcagcttgtcaaagatttcggaagcatcgaatgtactcggaccattgttattaaagaacatggcttggacgagtggggtagcagcgttagcgacttcatccctggccccttcaagcctcttgatcttattgaccaagacatcaaattgcgcctgagacttgatcttgcgatattctctccttcatgaccttaaaatcaagagagtctggatcttcatggtttggatcatgcttgccgtaaaattcgaaggccgtacgagatctctctttaattggagctagccggctcttgataaaatgccgagtgatctgttctccttgcagaccttgctcctttagatcgctaattatgtctacaaaggcttagagggatagagctaaagaatgttttgaggtcgagtcaggggaccactcgggcttgttctcgggaacgacaagtacggggtcaagtttgtctttctgaagatagagccaccttgacctccacgagctctgagatgaggagcattggaaggggatatattccgccttcataccatctcggagacggaacccgcagcatttggagatcctgttggactccatcatatccatcggagcttgtaaaaatagcggaagagatcaaggaacggcactacaccgacgtaggcctcacaaagatgagcaaatatgctcaaaaaagcaatagagttagggttcaagtgaaggtggaggccgtagaaatttacaatcaagaggagaaatttagaaggaggagcttcatcccggaggtgtcgatggatgaggctccaagatccattgatacgacggagatggccagagaagaattggggaagttagggttttctgggagccggaggaaccaaggttttgtgcgcaagggaggcgaaaggtgttga

SEQ ID NO: 72621 - DNA, 186 bp, Oryza sativa
  Clone ID: PAT_MRT4530_72983C.1
cgagggaaaacagttgatattgtatcccaccacaaccctgaaacagagacatggccaaccaccttgtattgaacctctcccgttgcctcatgttactctcttacgttgctgccatactagcaagccctgctctctcaggacattacgtacgaagcgagccgcagctgtttggacttcccgaatgag

SEQ ID NO: 72622 - DNA, 786 bp, Oryza sativa
  Clone ID: PAT_MRT4530_72984C.1
ttccacaggtacgccgacaccgcctgcacccgcgacgcgcgctgctcctgggacaaagtttatagaccgaaagacaaaagaggtttaggtgttataaatctatacattcagaatgtggctctgctcctaaaacatcttcacaaattgtacactactgttgatttgcgctgggtaagacttatttgggattcatattacatgacaaaagttccctatttaatgtcttttctatcatacaactgtcagatgggagttggtgtgtttttataataatgtgcatcttgaagattgtttcaaccttccacttgaaccacatgtttatatacaatatttgtagctagaatcagagttagatggtttaggacctagcacatagagaggtgactcttggtttttttttttttttggaattccctaaccttttacgctcataagttctataggcctaatttcatgagaatctctgttccaagacctttctagtggatctggaaaaccaaatgtgtgaaaatgatcaagattttcatgtggcttgatctgttgtgggatagattaaacacaagggacatgcttgataagagacattgtgcaccggatgatgttgttttaaattgtggtatctgtggaggccccagggaaacattgattcatctctttttctcttgcccttacagtaaaagttgctgggaacatttgggcatcagatggaacactactacacttagcactagagcactaaactaaactttagagagagagatcgggtaaaaaaggggactttgagca

SEQ ID NO: 72623 - DNA, 1667 bp, Oryza sativa
  Clone ID: PAT_MRT4530_72985C.1
cctgctccaccccccgacggactccacgagctctcttcccccacgcttccgattctgcccatggcgacgccgccgcacgacgcctcgccggccccaccaaaccctaaccccgtctccgacgaccccccgccgccgccgccggtgacggagacgaagccggagccggagccgcctctccccaccacctcgatcgaccccaccccgtctggcgacgaggagagcggcgatgactcctcgtcttctgtctcatccgcctcgtctacttcgcccacggccgccgcggctgctgctgctgcgggaggtggaggtggaggtggaggcgagagggcggctccccacccggcggcgaaggatctcctccatatctccttcaaccaggactacggctgcttcgcggcggggaccaagtcgggcttccgcatctacaactgcgatccattccgcgagatcttccgccgggacctcggggccgcgggggacatcggcgtcggcggtggaggaggaggaatcggcgtcgtggagatgctgttccggtgtaacatactggccctcgtcggcggcggagacgcccctcactacccgcctaacaaggtgatgatctgggacgaccaccagagccggtgtatcggggagctctccttccgctcccccgtgcgcggtgtccgcctccgccgcgatcgcatcatcgtggtgctagagaacaaaatcttcgtctacaatttcgcggacctgaagcttgttcaccagatcgagacggcgcctaacccgaagggcctctgcgcggtttcgcagcagcccggatcgattgtgctggtttgccctggtgcacagaaagggcaggttagagtggagcactatggtgccaggaagaccaaattcatcaatgcgcatacttcccgtgtcgcgtgctttgcattatcacaggatgggaggctcattgctactgccagcaccaaggggacacttgttagaatctacaatgctgccgagggcaatctcctgcaggaagtacggagaggtgctgatagagcagaaatatatagcttggcgttctccaacaatttgcaatatttggctgtatcaagtgataaaggaacaatacatgtgttcaatctaaagataaatgttggattaaccacgaatgataagcccctgcctgctccagatcctgatgttccacatatcagtccatctctttctttcattaagggtgtactaccaaaatatttccactcggagtggtctgtagctcagttcagactccacgagggggagcaatatattgttgcatttggccatgagaagaataccgtggcagttgttggcatggatggaagcttctaccgatgccagttcgaccctgtaaacggaggagagatgcctgcaggctggagtgctacaatttcctaaaaccatcatcggatcaaccacagtagcagcccaagcagcggatctgtttttcctcccttgtatcggggttgtacagtatctgtgtgccctctcgttctcctaagggttaagaaaagccaaatattattgttattatttgtaaatatatcttagtggtgattctacaagtatgctctgttgagggttaaaagaacccttgtgcagatggacataataatattactcccacgttagcaaatgctttcacgattcatgtt

SEQ ID NO: 72624 - DNA, 312 bp, Oryza sativa
  Clone ID: PAT_MRT4530_72986C.1
atgtcagcggctcaactcttctacctctccctcttcccccctctctctccatctctcgcatcgaacgacggcgagtccgggccagggatggcgcgctaccgtgtggatggcgacggcggcacggcgaccactcgacaagtcgacatcgactgcatacacggcaccaccaccagcaagagggccgcggggaaggacaaggccgccatgcaggagtgtcatgcgtcgccacctccagcaaattacttcaagaataaggccgactacaatgctgctgcagcatccgcatccgcgggcgccatcaactacaagtga

SEQ ID NO: 72625 - DNA, 526 bp, Oryza sativa
  Clone ID: PAT_MRT4530_72987C.1
aaggagggaaaaatttcaccccccccggaaattaaccccaaaaaaaaagggggggaaaaacaggagggagcaaagcggaaaggcgccagggtcgggacaactggggcccccccacggggaaccaccactatggacaaaaaaggaaggggaggcccccccccaggtttttccctttccaaaaaaaaggcccacccgaaaaaaaaggctggggaaggtaaacagggaaccccccacatttaccccaggggttcccacgggaaaccaaaaaaaaaaacattttaacggggggggaggggaggcccaactaaaagccaacaggttcaaggcaaaaaaaggggaaggacccccgaccccccggaaacggggaaaggaggttcccccccaacttggcccgggaaaaatagggggggaactttaaaaaattagcacaaggcatcacacccggaagggcaaaaaaaaccccggggggggtaaggtttgggacaaccggcaacttggggtttagggcagctaacccacccggggg

SEQ ID NO: 72626 - DNA, 941 bp, Oryza sativa
  unsure (1)..(941): unsure at all n locations
  Clone ID: PAT_MRT4530_72988C.1
ttttttttttttttttttttgaaaagtactcattttattatatagcaaagacagatattagggaaagaatccacagtacaaattgatcatacaccaaaccatcctttctaaagatgagacagactgaactaagggaaacaaattcctgatgtagccgtacagtgataatggatgagatcgacagggagtagcggcgttgccgcgacgactacatccatgggccttcattgacgtgcacaccgcttgacaaaccgataatcccctttggttgcctccacgggaacggcacaaattgaaggtttgttgttgagtcgtagattttggtgtgagcttcaccggactttaacagttgatttccacggagtttatcattgaatctgaggagcactgactgcaatcctgcgaaacaagattgcacggacggtctgccctcaacccgaacgacgaacccagcatgggtaccactgcttagaaaccccaacaaaagagggtgggtcatggtgtccggggacaaggcagccaacgccgcaactgtcgttgcgtgccggccagatgcagggagggggcagcgccaccaaacttgtgctggatctgacaggttgaagaagttcctttgaccgatctgccttcccctcattgcaactcctcctctgtttttccaaactaaaccctcggcgactaaaagcgactccttccgtcgccgggacgacggtgccgaactccggcgatccatcgacttgaacaaacgggaagaacccgacgacaggaagacccgactacgagagaagaccaacacctaagctaatagattactaaagggacgaaaatcccaccccctcccctcacgccggcgatcggagggtcgccggagatggaagggaaggggccgggagaaaaggggattttttttttctcctgaaacgcctgtttcgggagagctn

SEQ ID NO: 72627 - DNA, 525 bp, Oryza sativa
  Clone ID: PAT_MRT4530_72989C.1
ctacatccatgggccttcattgacgtgcacaccgcttgacaaaccgataatcccctttggttgcctccacgggaacggcacaaattgaaggtttgttgttgagtcgtagattttggtgtgagcttcaccggactttaacagttgatttccacggagtttatcattgaatctgaggagcactgactgcaatcctgctgtccttgaatccgagagctgtcgccaccccaacaaacaccgtcgccgccccaacatctggagggggagaggccggagacggagagggtgggtcatggtgtccggggacaaggcagccaacgccgcaactgtcgttgcgtgccggccagatgcagggagggggcagcgccaccaaacttgtgctggatctgacaggttgaagaagttcctttgaccgatctgccttcccctcattgcaactcctcctctgtttttccaaactaaaccctcggcgactaaaagcgactccttccgtcgccgggacgacggtgccgaactccggcgatccat

SEQ ID NO: 72628 - DNA, 781 bp, Oryza sativa
  Clone ID: PAT_MRT4530_7298C.1
tcccagaagatgtggcaaaaaataaaaaaaaaatacacccttaaaaaatccgattccgagaagaagtggcaaaaaataaaaaaaaaacgtagaagtccaattcccaggggtagcgaaaaaacaaaaaaaaaacgtaattccccttaaaaaggggaaaacaaaaaaaaatcggagaaaaatagcgaaaaatctttaaaaaaaaaaaaaaattttaaaaaatacacccttaaaaaatccaattctgagaagaagtggcaaaaaaaattaaaaaaaaatagaagtccgattcgcaggagaagtagcaaaaaaacaaaaaaaaaaacgtagatccgattccccaaaaaaatggggaaaacaaaaaaaatcggagaaaaatctaaaaaaaatccgattcccccgataaaaggtgaaaaaaaccaaaaaatcaaaaaaaaaaaggcgaaaaaaatcatagatccgattccccttaaaaacaaatgggaagaacaaaaaaaaatatgattcctatgaaaggcaaaaaaacaaaaaaaaatccaaaaaattaggtaaaacattaaaagataaaaagtgtaagaaaaaaaaaagcaaaaaacgcgtgagaaaataagttagaaaaaagcgcaaagaaaggaaaaaagcaaaaaaaaaacactcgagaaaaaacaagcaagaaaaatgcgcgagaaaaaaatgtcagaaaaaacaggcaaaagaacacacgagaaaagaaggcaaaaaaaacacgagaaaaatacggttttcatcgtctgtaaaaaacaga

SEQ ID NO: 72629 - DNA, 3092 bp, Oryza sativa
  Clone ID: PAT_MRT4530_72990C.1
ccgccacgccgtcgcgccacgcgccggcccgatgctgccacaccgccgtgaacgaacacgtgaaagagaacgaacacgtcaacgtgaccgagaacgtgaacgagcgaacgaacgtgaccgagaacgtgaacgagggaacgaacgtgaccgagaacgagaacgatcgaacgaacatgaacgagaacgagaacgagcgaatgaacgtgaacgagaacgagcgaacgaacgtgaatgagaacgaacgtgaacgagaacgtgaacgagtgaacgaacgtgaacgcgaacgagcgaacgagaacgagggaacgaacgtgaacgtgaaccagaacgagggaacgaacgtgaatgagaacggtcgaacgaagacaaacgagaacgagggaacgaacatggctgatcgcgatgaggaacagatattgtacgatacaatcgtggagggaagcagccagtactggaatgaagaagaggggaacgaggatccaaaccagtacttgaacgaggaagggaacgtggagagggatgcggaggggaaccagcaggcgcacgtggaaagggaagtggaggggaatcaggaggaggaggctagtggaagtcaaccctccgttggacagaagagggcacgcgggcaacgaggtgcagcaaagaagcttgagggtcggcacatcataacggaggtggaagaagatggacgacctagtgccccggccgaagccgccaagaactatgtacgtcacagcggttgggttgtgcgggataacgtgcctgtcagtacggtgtactggcgaagaacaaggacacgcggagatcatgagagctttgtcccagattcggagaaagagatgctgtggaccacaatgctcgagacattcacccttcctgcggagcagtttcagagcttcaagggagatctgtaccagaagtatatcctgaaggggcagacaccgaacttcgacacatacccaaagctaagggatcactgggacgagttcgctgcatataagacaggtgaacaagggcaggcgatgatggaaagaaacaaagaaaaagccgccaagaagacgtaccatcaccacttggggtcaggaggctatagcgtcgcgatgccgaagttgacactcgccctgcagactccagagcatccaggacgaacacgagggaaaggggtgattccttggaagattggtttcaaggaggacatccacacgtacaggagttggatgaggagcaagacagataccaaggcgaagattgcagatctagagttccgggtatcgagctacgagctcagcatgcaagaggaggtggcaaggaaggttgatgaacgcatggccgcacatcggtcccattatccccagccgaccattcctcctgcaatggtgagcccgtcaggaaaccgtagcagctgcgcctcaatggggcaggtaggatcacagagcatggacgccatgcaaacccaggacgaatcgacctgtcccgttgatgacatcactcagcggacaccatgtgagctgcatattcctttcaagaacttatcaataaaggcggcgtcgggcatggtcatcccaacggacccttcaggtacttaccactgcaggccgattccagcaggatactccaaggtcgaagttgagttggtcgaaggcgcgtacgaggacctcgagctggattaccctggaggagacggtgagacgcatctacgagacacaagccatgccattattctatggcgcaggcggtacatcatccttcctgggcgacaagcggcgtctcgtgcaccatctcctccggctccgccatctcctcctcaggatcctgcaccgtctcctcctcatgcaccgccagcaccgtctccacctcaggctccagcaccgactcctcctcaggctcctgcaccgactcctccgcaagctcctcttccggcaccttcaaagtcaagggccaccccagctccaccgcctgcccacacaagggcaacgaagaaggcgaaagttgacgccgccaagaacaaggacccgggaagtcaagagacaattcaagcctcgaagtccggaaaagaagattcctatagacccgagtgtcaagaacttcttcaggggtatgtctgcacctgtcaagaggccatcaagctatcggactatgagcgaacgcagaagaaagcatcttctgggaagtccaaaccagtccctcagcttggagagcaaccaaaccaggagattgagccgttggtgaccggtgaagacatgatgatagaagaatttattactgacaccggtctaactacggatcaattgctaggagtcgcaccaatagaaaaggcggaagtgaaatacatgtacgaactcggtaaaccgcttgtcaagcctgagctggtgcagtccctacccacacaaatgtacaagttccatcagctgtacatggagatgagcgccaccggtagagagatgatcggagcgaggatcagggacccggacttcttgcaaggagatgacattctctggatcaatttcaagggaatctacgaagtataccagctggacgccctcgacgtctctattatgagttgctggattttaatggagattcaaagggcccgacggcggggggttttcgatattggattcatcgaccctcggaaagtaaacgtcgcaatgctcgaccaatatccgcaagccacagaggacaatctcgtccatctcctgaaggcgcagcattacaagacgttcatactgttgccgtacaacacagaggcttggtatcggttccgtcatttggtccgcggagagagacttaggcggaggttcaaatttccttgcgcaaagccaaagcaaggaactaacttgtgtggctactacgtgtgcgagtattgccactgctttgcagaccaaatcatcaccacaagagagctcgattttattagcatgagggataacctgaccacacacaaggaatttatcgcggcggttcaagaacaactcatgggattcatcaacgaacaaatccttgatcccaagggtaaattctactacgacggaaacacaattcataggtccttagcttctgagctagcgactactactacgtcgaaatcgtag

SEQ ID NO: 72630 - DNA, 7293 bp, Oryza sativa
  Clone ID: PAT_MRT4530_72991C.1
atgggtgaactggtgaccagcatggtgatcgggccactggtccacatggtgaaggagaaggcttccagctacctcctggagcagtacaaggtgatggaaggcatggaagtgcagcacaagatcctcaagcgcaagctgccggccatcttggacgtcatctctgacgctgagaagcaggcatctgaacacagggaaggagctaaggcctggcttgaggagctcaaggcagtggcctatgaggcgaatgaagtcttcgacgagttcaagtacgaggcgctacggcgtgaagccaagaagaacgggcactacaccaagctcggcatcgatgcggtaaaactctttcctactcacaaccgtgtcgtgttccgatacaagatgggcaggaagctctgccggatcgtgcagaatattgaacatgaaggtgaagaaacaacacctctaactgaacgctttttgattgagtgggtggatggcaaggacaatcagaatcgtgagtaccctttgccagttatgaagctagttggcttcaacgtgttcttccgttcaggtgcacaagcactatgggcatgctttgcacagcttaaagatttgcgatgcagcaaactgaagggattctcgccacaagctcttgagcagtcaacatcaggaagggagatactcctgccacgtctggagtcactatcaatacatgaatgtgaaagtttggtagagatcttcaacgccccaccatctctcaaggaaatggacatagacgacaaccctaagcttgagtcgatattcggccagcagagacacgggccagcagggccttgcagcgacaacattgtgtctgctgttgcgttggaaccatcatcaccagctggggaccgcttctctcctcctgaatcactggagtctcactcgggcgagctcccttcgttgcttatcattaatgaatgccctgctctaaaagtgctccctacatgcctgcggcaacagctgcccagcctcaagcggaaatatctagacgcccatcatgaagggttcatgccaagctataattgttggacatcccacggagagcatggtgttgaaatggaagaagatgaagtggaagacgacaatattccggactttgctcagtatgttggatttgaaggaaatcaaacgggcgaggaggaaatagctgctggtggtaacgacgttgcggatgatcttggtcagatgttgcaggacgccagggaggactgcgaaagtgaaaaggaggcccataaattggacaagatgttggaggaccacagaacttcgttgtacccaggttgcgagcaggggcacaaaaagttggataccactctggagttgttgcaatggaaggcaaaaaatagggttagtgacaagaggaagtacataatgatgccgattattattcaaggccccaagcaacctggtaacgacatcgacgtgtacctaagaccactggtcgaagatcttaaacagttgtggaagatggaaggtgtccccgtgtgggacgaggacaaacaggaggagtttaacctacgagcgctgctgttcgtaaccatcaacgattggcctgcacttagcaacctatccggacagtccaacaaggggtacaaggcttgcactcactcaaaccacccggtacggaagaaaggcaagcacttcgaacataaggccgaccaccgtacgaagcctaaacatcgcagcgggaaaacagtgtttgctatggttaaagatcttaaagtagtgttcggaaaggggcctggaagccagcttataaagagcgaagatggtcacgcggcgatgtggaaaaagaactctatattttgggagttaccatattgggaattcttagacgtacgccacgcaatcgatgtgatgcacctcactaagaacctttgcgtaaaccttcttggcttcctaggtgtatacggaaagtcgaaagatacactggaagcacgtaatgatctgaagcatatggaacaacgcggcgaccttcacccggaaccaaaggagaaaggaagccattacttgagtccagccagctacactcttagcaaggcagagaaggaaagtatgtttgaatgcttggagagcataaaggtaccgtctggatactccacgaatatcaagcgaataataagcacgaaggagaagaagttcacaaacctaaagtctcatgactgtcacgtgttgatgacacaactgctaccagttgtaataaggggtatccttccagacaatgtccgggcaacaataacaaagctatgtgcattcatgaacgcaatttcgcagaaggtcatctatccggatagattagaagcccttcagaatgaagtggtgcaatgtctcgtcagttttgagttgatatttccaccttcatttttcaatataatgacgcatctgctttgtcaccttgtgaaagagatccgtattctcgggcctatgtacctacacaacatgtttcctttcgagaggtacatgggcgttctgaagaagtatgttcgtaaccgtgctcgtccagagggaagcatcgccaagggttatggaacagaggaggtcatcgaattttgcgtagaatttatcgaagaccttcgcccaatcggggtacctgaatcacgccatgaagggagactacggggaaagggaactctcggaaggaaagcaataacgacggtagacaacaatttattccgtaaagcccatttcactgttctgcaacactcttcattggtagctccttacatcgaggagcacttggctctagttcgcgccaggaacatcggtaagtccgatgcatggattacacggcatcacattgatactttccccgcgtggctacgacaacatctcatgggtaacgagtcgatcaaccaacaacttgccttcctggcgaggggaccgtctgggtcgatcgcgacattccagggatatgagatcaatgggtacacattctacacgagagcccaagacatgaagagcacgaaccaaaacaacgctgttcgtgtcgatgccatgggacacgatggaacaactgccacgtattacggtgccatcgaggacatatgggaacttgactatggtcctctcaaggttcctctgttccggtgccaatgggttaggttgactggtggaggcgtaatgattgatgacagtgggatgacaactgttgaccttaacaaggttggatactcggacgaaccttttgtccttgccaatgatgtaacgcaagtctttttcgtgaaggacatgtctagcaaaggaaagaagggcagagggcctgatgagcctaagcgtcaagtggttctcccaggcaaaagaaaaatcgtcggagttgaggacaagactgacgaggattacgatcagttggatgggcaaccccctttcacggtgacgattgaccctagcatcctcctatcaaatgaagacaccccttactcacgcagcgatcacaaggagggaacaatagtgaggagaaaccgccgcatctctggggtgagagccgccgccgccagatctcccttcatctcgatctctccgatctcgatctctctccgtcgcgccgcccgccacgagacgccgcgccacgacgacgacgcgccacgccgacgccgcgccaagccgccgccggcacgccacgccgccgtcttcgccgccgcgcgcgcaatgccgccgccggcacgccacgccgccgccttcgccgccgcgcgcgcaatgccgccgccggcacgccacgccgccgccttcgccgccgcgcaacgccgccgccgcatgccaacgccacgccgccgccgccgtcgccacgccgccgccgccttcgctgccgcgcgcgcaatgccgccgctgccacgccccgccgccgccgccacgccacgccgccaccgccacggccccgcaacgccacgccgccgccgccgtcgccacgccgccgccgtcgccacgccgccgccgccgccgccacgccgccgcgccaaccgctgccccgatgccgccacaccgccgttaacgaacgagaacgagaacgatcgaacgaacgagagcgagaacgagaacgatcgaacgaagacaagcgagaacgagggaacgaacgtgaatgagaacaagcgaacgaacgtgaacgagctagggaacatggctgaccgcgatgaggaacagatattgtacgatacaatcgcggagggaagcagccagtactggaatgaagaagaggggaacgaggatccaaaccagtacttgaacgaggaagggaacgtggagagggatgcggaggggaaccagcaggggcacgtggaaagggatgtggaggggaaccaggaggaggaggctggtggtagtcaaccctccgttggacagaagagggcacgcgggcaacgaggtgcagcgaagaagcttgagggtcggcacatcataacggaagtggaagaagatggacgtcctagtgccccggccgaagccgccaagaactatgtacatcacagcggttgggttgtgcgggataacgtgcctgtcagtacggtgtactggcgaagaacaagggcacgcggagatcatgagagctttgtcccagattcggagaaagagatgctgtggaccacaatgctcgagacattcacccttcctgcgggtacagaggacaaagtgaaaaggtggactctgaagaaaatggcagaacagtttcagagcttcaagggagatctgtaccagaagtatatactgaaggggcagacaccgaacttcgacacattcccaaagctaagggatcactgggacgagttcgttgcatataagacaggtgaacaagggcaggcgatgatggaaagaaacaaagaaaatgccgccaagaagaagtaccatcaccacttggggtcaggaggctatagcgtcgcgatgccgaagtgggagcagatggaggctagcttgattgagaggggtatcgaaccggcaacagccaattggccggaacgatcgaagttctggtactatgctcacggtggaacgctcaacccagctgatggctcactggtcttcggcgatcagatacgagaggctgcgcgacgactaacagatgcagtggaagcctcctctcagggcacgttccgaccagacagagatagggacgagctgacactcgccctgcagactccagagcatccaggacgaacacgagggaaaggggtgattccttggaagattggtttcaaggaggacatccacacgtacaggagtcggatgaggagcaagagagataccgaggcgaagattgcagacctagagttccgggtatcgagctacgaactcaacatgcaagaggaggtggcaaggaaggttgatgaacgcatggccgcacatcggtcccatgatccccagccgaccattcctcctgcaatggtgagcccgtcaggaaaccgtagcagctgcgcctcaacggggcaggtaggatcacagagcatggacgccatgcaaacacaggacgaatcgacctgtcccgttgatgacatcacttagcggataccatgtgagctgcatattcctttcaagaacttatcaataaaggtggtgtcgggcatggccatcccaacggacccttcaggtacttaccactgcaggccgattccagcaggatactcgaaggtcgaagttgagttggtcgaaggcgcatacgaggacctcgagctggattaccctggaggagacggtgagacgcatctacgagacacaagccatgccattattctatggcgcaggcggtacatcatcctccctgggcgacaagcggcgtctcgtgcaccatctcctccggctccgccatctcctcctcaggatcctgcaccgtttcctcctcatgctccgccagcaccgtctccacctcaggctccagcatcaactcctcctcaggatcctgcaccgactcctcctcgtgctcctacacctactcccccgcaagctcctcttccggcaccttcaaagtcaagggcccccccagctccaccgcctgcccacacaagggcaacgaagaaggcgaaagttgacgccgccaagaacaaggacccggggtacgattgcacgcaagaggagcttgacgcttacgttgcatcagaagtcaagagacaattcaagcctcgaagtccagaaaagaagattcctatagaccctagtgtcacgaacttcttcaggggtatgtctgcatctgtcaaggaggccatcaagctatcggactatgagcgaacgctgaagaaagcatcttctggaaagtccaaaccagtccctcagcttggagagcaaccaaaccaggagatcgagccgttggtgaccggtaaagaaatgacgatagaacaatttattactgacaccagtctaactacggatcaattgctaggagtcgcaccaatcgaaaaggcggaagtgaaatacatgtacgaactcggtaaaccgcttgtcaagcctgagctgctgcagtccctacccacacaaatgtacaagttccatcagctgtacatggagatgagcgccaccggtagagagatgatcggagcgaggatcagggacacggatttcttgcaaggagatgacattctctggatcaatttcaggggaatctacgaactataccagctggacgccctcgacgtctctattatgagttgctggattttaatggagattcaaagggcccgacggcggagggttttcgatactggattcatcgaccctcggaaagtaaacgtcgcaatgctcgaccaatatccacaagaaacagaggacaatctcgtccatctcctgaaggcgcagcattacaagacgttcatattgttgccatacaacacagaattccactgggtgcttttactcttcgacctggaggcctgcaccgtcaacgtatatgactcaatggataaaaaagagtctacgtttgacaaggttttcgaacttatagacagggcttggtatcggttccgtcatttggtccgcggcaaatggagagaaagacttaggcggaagttcaaatttccttgcgcaaagcaaaagcagggaactaacttgtgcggctattacgtgtgcgagtattgccactgccttgcagaccaaatcatcaccacaagagagctcgattttattcgcatgagggataacctgaccacacacaaggaatttatcggggcggttcaagaacaactcatgggattcatcaacgaagaaatccttgatcccaagggtgaattctactacgacggaaacacaattcaccggtccttagcttctgagctagcagcgagtactactacgtcgaaatcgtag

SEQ ID NO: 72631 - DNA, 1263 bp, Oryza sativa
  Clone ID: PAT_MRT4530_72992C.1
atggacccctccgccgccgccgccgccgccgacgacgacgacgactaccacgccaccacgggtgggatggagccgcgtggagaggaggacaacggcgccagtacaaggggcgtcaccggtcggctactcgcttggcgcggggaagaggaagacgacgatgacgcggaggattcgggaggagggagcggagcaggcgccaacgccgacgaagacgacgcggcctccgctgtttcccttgacaccatcagcaacgactcgatcctgcttccgccggagccgacgagcgccaacctggcgagcctcctccgcgcgaggaagctgatcctcgtcgtggacttggaccacacgctcatcaactccaccagattcgcccacctctccgacgacgagaaagccaacgggttcacggagcgcaccggagatgatcggagcaggggcctgttccgaatggggctcttccggatgatcaccaagctcaggccgttcgtccatgaattcctgcgagaagcgagcgccatgttcgagatgcacgtgtacaccctcgggaacaggaactacgccacggcggtcgccaagctgctcgaccccgacggcgcctacttcggcgaacggatcatatcgagcggcgagtcgtcgcagccggacaggaagagcctcggcgacgtcttcgggtgggcgccggagatggagcgagccgcggtggtcatcctcgacgacacggcggaggtctggaaggggtacagggacaacctgatcgagatggagaggtacctctacttcgcgtcgagccgcggcaagttcgggatcgcggtgaggtccctggcggagcggaaccgggacgagagcgagcgcgagggcgcgctcgccgtggcgctgcgcgtcctgcggcgagtccatggggaattcttctccggctcggtgtgcagcggcagcttcgcggacgtcagggaggtgatcaggcaggcgcggcgcgaggtgctgcgcgggtgcacggtggcgttcaccggggtcatcccaagcggcgacggcggccgcgccagcgaccaccccgtgtggaggagagccgagcagctcggcgccacctgcgccgacgacgtcggcgagggggtcacccacttcgtcgccgggaaaccggtcacccgcaaggcgctgtgggcgcagacccacggcaagtttctcgttgacacggagtggatcaacgccgcgcatttccggtggagcaagccggaggagagaatgtaccccgtgaaaggcgagcattga

SEQ ID NO: 72632 - DNA, 615 bp, Oryza sativa
  Clone ID: PAT_MRT4530_72993C.1
atggcggcggcggcaaaggcgacggcgtcgactgcttcaccgcctacttcgtggaggcacggaagcggtggcggcaacggcgacggtgtcgactgcttcaccgtctacttcgtggaggcacagaagcttcagctgctccgccgcaacgagtccttcgagctcaccctcgagccgttcacctacgagctcttgttggagcggcggatcagcttcgtgcccatcggcctcgccaacatgctgaacgtcggcggcgccgtgcagggctttcagacagtgaagaaggacgacggcggcggcggtgatgtggtggcggaggtggcggtgaagggtgccaaggaggcatactcgtcggcgaggctgtgggcgggtgcgcgtggggaggcggccgaggagcggcatggatggagccgggcggaggatggtgagcttgatgtccccgctacggaatccggcctcggcaaagacgcggctgacgaccttgacggcggcgggagtctgggcggtggtggcctagtggtagaagtggaaggtggcctgggagcgcttgatggcggccatgaggaaggagtagaggggacattcccgtcaattcgaaatttctctcccctcttttag

SEQ ID NO: 72633 - DNA, 3636 bp, Oryza sativa
  Clone ID: PAT_MRT4530_72994C.1
tgccgccggccgcctcgacgccgacgtcatcacgacatgacgccgcggcacgacgccgcggcggcccgatacgacgagacgccacgacgccgccgtggcacggcatcggcgccgcgccgccaagccgccacgccgccgccgcgcaacgccggcgccgtgccgtgcgcttcgccaccgccgcacaacgtcgccaccgggccgcgcgccacgtcgccaccgtgccgcgcgccgcacggcgccgccgccgcgccacgccgatgccgcgcgtgccgccacgcggccgctgcaccgtcccgccgccgtccgctgctgccacaccgccgtcccgctgccgccacaccgccgcgaacgaacgtgaacaagaacgagcgaacgaacgtgaacgagaacatgaacgagcgaacgaatgtgaacgagaattgaacgtgaaagaatgaacgaacagaaaagacgttgttggagtcgtccctcaagccggagtggtagctagccctcgaaggaattcgcgcagacaaatggctgatcgcgatgaggaacagatattgtatgatacaatcgcggagggaagcagccagtactggaacgaagaagaggggaacgaggatccaaaccagtatttgaacgaggaagtgcagagggatgcagaggggaaccaagaggggcacgttgaaagggatgtggaggggaaccaggaggaggaggatagtgcaagtcaaccctccgctggacagaagagggcacgcgggcaacgaggtgccgcgaagaagcttgagggtcggcacaacataacggaagtggacgaagacggccgacctagtgccccggcagaagccgccaagaactatgtacgtcatagcggttgggttgtgcgggataacgtgcctgtcagtacggtatactggcgcagaacaagggcacgcggagatcatgagagctttgtcccagattcgaagaaagagatgctgtggaccacaatgctcgagacattcacccttcccgcgggtacagaggacaaagtgaaaaggtggattctgaagaaaatggcagaacagtttcagagcttcaagggagatctgtaccagaaatatatcctgaaggggcagacaccgaacttcgacacattcccaaagctaagggatcactgggacgagttcgttgcatataagacatgtgaacaagggcaggcgatgatggaaagaaacaaagaaaatgccaccaagaagaagtaccatcaccacttggggtcaggcggctatagcgtcgcgatgccgaagtgggaggagatggaggctagcttgcttgagtggggtatcgaaccggccaccgctaattggccggaccgatcgaagttctggtactatgctcatggtggaacgctcaacctagctgatggctccctggtcttcggcgatcagatacgcgaggctgcgcatcgactaacagaagcagtggaagcctcttctcagggcacgttccgaccggacagagagaaggacgagctgtcactcgccctgcaaactctagagcatccaggacgaacacgagggaaatgggtgattccttggaagattgggttcaaggaggacatccacacgtacaggagtcggatgaggagcaagagagataccgaggcgaagattgcagatctagagttcagggtatcgagctacgagctcagcatgcaacaggaggtggcaaggaaggttgatgaacgcatggccgcacatcggtcccatgatccctagccgaccattcctcctgcaatggtgagcccgtcaggaaaccgtagcagctgcgcctcaacgaggcaggtaggatcacagagcatggacgccatgcaaacccagcacgaaaccacctgccccgttgatgacatcactcagcggacaccatgtgagctgcatattcccttcaagaacttatcaataaaggtggcgtcgggcatggccatcccaacggacccttcaggtacttaccactgcaggccgattccagcaggatactccaaggtcgaagttgagttggtcgaaggcgcgtacgaggacctcgaggtggattaccctggaggagatggtgagacgcatctacgcgacacaagccacgccattatactatggcgcaagcgctacatcatcctccctgggcaacaagcggcgtctcatgcaccatcccctccggctcctgcaccgtctcctcctcaggctcctgcaccgtctcctcctcatcagtctcctgtaccgtctcctcctcaggctcctacaccgtctcctccttatcagtctcctgtaccgactcctcctcaggatcctgcacagactcctcctcaagcaccaccgcctgcccgcacaagggcaacgaagaaggcgaaagttgacgccgccgagaacaaggagccaccgtacgattgcacgcaacaggagcttgacgcttacgtggaagcagaagtgaagagacaattgaagcctcggggtccagaaaagaagattcctatagacccgagtgccaagaagttcttcaggagtatgtcggcaccagccaaggaggccataaagctaacggattatgagcgaacacttaagaaagcatcttctggaaagtccaaaccagtccctcagcttggagagcaaccaaaccaggagatcgagccgttggtgaccggcgaatattttggaatacaagaatttattaatgacaccgggctaactacggatcaattgctaggagacgcaccaatcaaaaaggcggaagtgaaatacatgtacgaactcggtaaatcgcttgtcaagcctgagctgctgcagtccctacccacacaaatgtacaagttccatcagctgtacatggagatgagcgcaaccggtagagagatgatcggagtgaggattagggacacggacttcttgcaaggagatgacattctctggatcaatttcaggggaatctacgaactataccagctggacgcccttgatgtctctattatgagttgctggattttaatggagattcaaaggggcccgacggcggggggttttcgatactggattcatcgaccctcggaaagtaaacgtcgcaatgctcgaccaatacccgcaagccacagaggacaatctcgtccatctcttgaaggcgcagcattacaagacgttcatactgttgttgtacaacacagaattccactgggtgcttttactcttcgacctggaggcctacaccgtcaacatatatgactcaatggataaaaaagagtctacgttcgacaaggttttcgaacttatagacagggcttggtatcggttccgtcatttggtccgcggcaaatggatagaaagacttaggcggaagttcaattttccttgcgcaaagcaaaagaagggaactaacttgtgcggctactacgtgtgcgagtattgccactgccttgcaaaccaaatcatcaccacaagagagctcgactttattcgcatgagggataacctgatcacacacaaggaattcatcgcggcggttcaagaacaactcatgggattcatcaacgaacaaatccttgatcccaagggtgaattctactacgacggaaacacaattcataggtccttagcttctgagctagcgactactactacgtcgaaatcg

SEQ ID NO: 72634 - DNA, 4933 bp, Oryza sativa
  Clone ID: PAT_MRT4530_72995C.1
tcaaggatgatgtgacttgccttgctcactttcccaaacgtcggcttcaacctcctcgaagagcggatcttccgaagctgcagcgtggtccacggtggatcgggtgcacccgggctcacaccggccggcgccgtggaccccacgcgtcagccgcacccaagggcgcgggcggctgacggccgggccccacgcggcggccacttggcgctccctagggcggccacgccgcgcggtcggcgggaggcggcgcgcccgcgccccgatggtcaccgccggcgaccaccggcgtggcggagcggcggccttgagaggggagggaagggggaaaggaggcgacggtccacggctcaccccgggccgacggcggcaacggaggaggcggccggagcggagggaggcggtggcgcggctcgggtcgatggggacggtggcgctccggcggtcggcgaccaaaacggaggggtggacgaggtcggcgaggatgcggcgaagccgaaggaggcggcgccgaggtgggaggtgatccggggcgacgacggcggcggaccggagctcggcggcgatggcggagagagagagcgacgtcgcgagctcgaatgtgttgatgacacaactgctaccagttataataaggggtatccttccagacaatgtccgggcaacaataacaaagctatgtgcattcatgaacgcaatttcgcagaaggtcatcgatccggatagattagaagcccttcagaatgaagtggtgcaatgtctcgtcagttttgagttgatatttccaccttcatttttcaatataatgacgcatctgctttgtcaccttgtgaaagagatccgtattctcgggcctgtgtacctacacaacatgtttcctttcgagaggtacatgggcattctgaagaagtatgttcgtaaccgtgctcgtccagaggcaagcatcgccaagggttatggaacagaggaggtcatcgaattttgcgtagaatttatcaaagaccttcgtccaatcggggtacctgaattacgccatgaagggagactacggggaaagggaactctcggaaggaaagaaataatgacggtagacaacaatttattccgtaaagcccatttcactgttctgcaacactcttcattggtagctccttacatcgaggagcacttggctctagtttgtgccaggaacatcggtaagtccgatgcatggattacacggcatcacattgatactttccccacgtggctacgacaacatctcatgggtaacgagtcgatcaaccaacaacttgccttcctggcgaggggaccgtctgggtcaatcgcgacattccagggatatgagatcaatgggtacacattttacacgagagcccaagacatgaagagcacgaaccaaaacagcgttgttcgtgtcgatgccatgggacacgatggaacaactgccacgtattatggtgccatcgaggatatatgggaacttgactatggtcctctcaaggttcctctgttccggtgccaatgggttaggttgactggtggaggcgtaatgattgatggcagtggtatgacaactgttgaccttaacaaggttggatactcggacgaaccttttgtccttgccaatgatgtaacgcaagtctttttcgtgaaggacatgtctagcaaaggaaagaagggcagagggcctgacgagcctaagcgtcaagtggttctcccaggcaaaagaaaaatcatcggagttgaggacaagactgacgaggattacgatcagttggatgggcaaccccctttcaaggtgacgattgaccctagcatcctcctatcaaacgaagacaccccttactcacgcagcgatcacaatgagggaacaatagtgaggagaaaaaacacatatatggctgaccacgatgaggaacagatattgtacgatacaatcgcggagggaagcagccagtactggaatgaagaagaggggaacgaggttccaaaccagtacttgaacgaggaagggaacgtggagagggatgcggaggggaaccagcaggggcacgtggaaagggatgtggaggggaaccaggaggaggaggctagtggtagtcaaccctccgttggacagaagagggcacgcgggcaacgaggtgcagcgaagaagcttgagggtcggcacatcataacggaagtggaagaagatggacgtcctagtgccccggccgaagccgccaagaactatgtacgtcacagcggttgggttgtgcgggataacgtgcctgtcagtacggtgtactggcgaagaacaagggcacgcggagatcatgagagctttgtcccagattcggagaaagagatgctgtggaccacaatgctcgagacattcacccttcccgcgggtacagaggacaaaagcttcaagggagagttgtacaagaaatatatcctgaaggggcagacaccgaacttcgacacattcccaaagctaagggatcactgggacgagttcgttgcatataagacaggtgaacaagggcaggcgatgatggaaagaaacaaagaaaatgccgccaagaagaagtaccatcaccacttggggtcaggaggctatagcgtcgcgatgccgaagtgggaggagatggaggctagcttgattgagaggggtatcgaaccggcaaccgccaattggccggaacgatcgaagttctggtactatgctcacggtggaacgctcaacccagctgatggctcactggtcttcggcgatcaaatacgagaggctgcacgacgactaacagatgcagtggaagcctcctctcagggcacgttccgaccggacagagatagggacgagctgacactcgccctgcagactccagagcatccaggacgaacacgaaggaaaggggtgattccttggaagattggtttcaaggaggacatccacacgtacaggagtcggatgaggagtaagagagataccgaggcgaagattgcagatctagagttccgggtatcgagctacgaactcagcatgcaagaggaggtggcaaggaaggttgatgaacgcatggccgcacatcggtcccatgatccccagccgaccattcctcctgcaatggtgagctcgtcaggaaaccgtagcagctgcgcctcaacggggcaagtaggatcacagagcatggacgccatgcaaacacaggacgaatcgacctgtcccgttgatgacatcactcagcggacaccatgtgagctgcatattccttacaagaacttatcaataaaggtggcgtcgggcatggccatcccaacggacccttcaggtacttaccactgcaggccgattccagcaggatactcgaaggtcgaagttgagttggtcgaaggcacgtacgaggacctcgagctggattaccgtagaggagacggtgagacgcatctacgagacacaagccatgccattattctatggcgcaggtggtacatcatcctccctgggcgacaagcagcgtctcgtgcaccatctcctccggctccgccatctcctcctcaggatcctgcaccgtctcctcctcatgatccgctagcaccgtctctacctcaggctccagcagcgactcctcctcaggatcctgcactgactcctcctcgggctcctacacctactcctccgcaagctcctcttccggcaccttcaaagtcaagggcccccccaactccaccgcctgcccacacaagggcaacgaagaaggcgaaagttgacgccgccaagaacaaggacccggggtacgattgcacgcaagaggagcttgacgcttacgttgcatcagaagtcaagagacaattcaagcctcgaagtccagaaaagaagattcctatagaccccagtgtcaggaacttcttcagggtccctcagcttggagagcaaccaaaccaggagatcgagccgttggtgaccggtaaaaaaatgacgatagaacaatttattactgacaccggtctaactacggatcaattgctaggagtcgcaccaatcgaaaaggcggaagtaaaatacatgtacgaactcggtaaaccgcttgtcaagcctgagctgctgcagttcctacccacacaaatgtacaagttccatcagctgtacatggagatgagcgccaccggtagagagatgatcggagcgaggatcagggacacggacttcttgcaaggagatgacattctctggatcaatttcaaaggaatctatgaactataccagctggacgccctcgacgtctctattatgagttgctggattttaatggagattcaaagggcccgacggcggagggttttcgatattggattcatcgaccctcggagagtaaacgtcgcaatgctcgaccaatatccacaagaaacaaaggacaatctcgtctatctcctgaaggcgcagcattacaagacgttcatactgttgccgtacaacacagaattccactgggtgcttttactcttcgacctgtcggcctgcaccgtcaacgtatatgactcaatggataaaaaagagtctacgtttgacaaggttttcgaacttatagacagggcttggtatcggttccgtcatttggtccgcggcaaatggagagaaagacttaggcggaagttcaaatttccttgcgcaaagcaaaagcagggaactaacttgtgcggctattacgtgtgcgagtattgccactgccttgcagaccaaatcatcaccacaagagagctcgattttattcgcatgagggataacctgaccacacacaaggaatttatcgcagcggttcaagaacaactcatgggattcatcaatgaagaaatccttgatcccaagggtgaattctactacgacggaaacacaattcaccggtccttatcttctgagctagcagcgactactgctacgtcgaaatcgtag

SEQ ID NO: 72635 - DNA, 616 bp, Oryza sativa
  Clone ID: PAT_MRT4530_72996C.1
atgtggagggcaaccaggagcagcaggttagtgcaagtcaaccctccgctgctcacaagagggcatgcgggcacccgaggtgccgtgaagaagcttgagggtgggcacatcataacgcaagtgctcgaactcagccgacctagtgccccggcggaagcagccaagaactacgtacgtcacagcggttgggttgtgcgggataacgtgcttgtcagtatggtatattggcacagaacaagggcacgcggagatcatgagagctttgtcccagattccgagaaagagatgttgtggaccacaatgcttgagacattcacccttcccgcgggtacagaggacaaagtgaaaaggtggactctaaagaaaatggcagaacagtttcagagcttcaagagagatctataccagaaatatatcctggaggggcaaacaccgaacttcgacacattcccaaagctaagggatcactgggatgagttcgttgcatataagacaggtcaacaagggcaggcaatgatggaaagaaacaaagaaaatgccgccaagaagaagtaccatcaccacttggggtcaggcggctatagtatcgcgatgtcgaagtgggaggagatggagg

SEQ ID NO: 72636 - DNA, 276 bp, Oryza sativa
  Clone ID: PAT_MRT4530_72997C.1
atggagatgtccaaattccacactggagaatttcagctctttgagaccattcaggtggagatgcgcaaattgcactctggagagaaacagctctttgaggttctgaaactgatcaaggtgaaagttagttctcccaaccactccggtaatacagaaaagttccagcagttcgttatctcaagtttcctgaggcagtggcagtttttgataggttctggcaaggtcgtggtggggtcggagtttttggagaactgccttgtcctcagccatgcttga

SEQ ID NO: 72637 - DNA, 3333 bp, Oryza sativa
  Clone ID: PAT_MRT4530_72998C.1
atggttggcctgggttggcttaggacgagctgggacccagggtcgggttgccagttcggtctgaatcatcataggccttgggttaaggcagaagaggggaacgaggatccaaaccagtacttgaacgaggaaggaaacgtggagagggatgcggaggggaaccagcaggggcacgtggaaagggatgtggaggggaaccaggaggaggaggctagtggtagtcaaccctccgttggacagaagagggcacgcgggcaacgaggtgcagcgaagaagcttgagggtcggcacatcataacggaagtggaagaagatggacgtcctagtgccccggccgaagccgccaagaactatgtacgtcacagcggttgggttgtgcgggataacgtgcctgtcagtacggtgtactggcgaagaacaagggcacgcggagatcatgagagctttgtcccagattcggagaaagagatgctgtggaccacaatgctcgagacattcacccttcctgcgggtacagaggacaaagtgaaaaggtggactctgaagaaaatggcagaacagtttcagagcttcaagggagatctgtaccagaagtatatactgaaggggcagacaccgaacttcgacacattcccaaagctaagggatcactgggacgagttcgttgcatataagacaggtgaacaagggcaggcgatgatggaaagaaacaaagaaaatgccgccaagaagaagtaccatcaccacttggggtcaggaggctatagcgtcgcgatgccgaagtgggaggagatggaggctagcttgattgagaggggtatcgaaccggcaacagccaattggccggaacgatcgaagttctggtactatgctcacggtggaacgctcaacccagctgatggctcactggtcttcggcgttcagatacgagaggctgcgcaacgactaacagatgcagtggaagcctcctctcagggcacgttccgacccgacagagatagggacgagctgacactcgccctgcagactccagagcatccaggacgaacacgagggaaaggggtgattccttggaagattggtttcaaggaggacatccacacgtacaggagtcggatgaggagcaagagagataccgaggcgaagattgcagacctagagttccgggtatcgagctacgaactcaacatgcaagaggaggtggcaaggaaggttgatgaacgcatggccgcacatcggtcccatgatccccagccgaccattcctcctgcaatggtgagcccgtcaggaaaccgtagcagctgcgcctcaacggggcaggtaggatcgcagagcatggacgccatgcaaacacaggacgaatcgacctgtcccgttgatgacatcactcagcggacaccatgtgagctgcatattcctttcaagaacttatcaataaaggtggcgtcgggcatggccatcccaacggacccttcaggtacttaccactgcaggccgattccagcaggatactcgaaggtcgaagttgagttggtcgaaggcgcgtacgaggacctcgagctggattaccctggaggagacggtgagacgcatctacgagacacaagccatgccattattctatggcgcaggcggtacatcatcctccctgggcgacaagcggcgtctcgtgcaccatctcctccggctccgccatctcctcctcaggatcctgcaccgtctcctcctcatgctccgccagcaccgtctccacctcaggctccagcaccgactcctcctcaggatcctgcaccgtctcctcctcatgctccgccagcaccgtctccacctcaggatcctgcaccgactcctcctcaggatcctgcaccgtctcctcctcatgctccgccagcaccgtctccacctcaggctccagcaccgactcgtcctcaggatcctgcaccgtctcctcctcgtgctcctacacctactcccccgcaagctcctcttccggcaccttcaaggtcaagggcccccccagctgcaccgcctgcccacacaagggcaacgaagaaggcgaaagttgacgccgcaaagaacaaggacccggggtacgattgcacgcaagaggagcttgacgcttacgttgcatcagaagtcaagagacaattcaagcctcgaagtccagaaaagaagattcctatagaccccagtgtcaggaacttcttcaggggtatgtctgcatctgtcaaggaggctatcaagctatcggactatgagcgaacgctgaagaaagcatcttctggaaagtccaaaccagtccctcagcttggagagcaaccaaaccaggagatcgagccgttggtgaccggtaaagaaatgacgatagaacaatttattactgacaccggtctaactacggatcaattgctaggagccgcaccaatcgaaaaggcggaagtgaaatacatgtacgaactcggtaaaccgcttgtcaagcctgagctgctgcagtccctacccacacaaatgtacaagttccatcagctgtacatggagatgagcgccaccggtagagagatgatcggagcgaggatcagggacacggacttcttgcaaggagatgacattctctggatcaatttcacacatatctacgaactataccagctggacgccgtcgacgtctctattatgagttgctggattttaatggagattcaaagggcccgacggcggagggttttcgatactggattcatcgaccctcggaaagtaaacgtcacaatgctcgaccaatatccacaagaaacagaggacaatctcgtccatctcctgaaggcccagcattacaagacgttcatactgttgccatacaacacagaattccactgggtgcttttactcttcgacctggaggcctgcaccgtcaacgtatatgactcaatggataaaaaagagtctacgtttgacaaggttttcgaacttatagacagggcttggtatcggtttcgtcatttggtccgcggcaaatggagagaaagacttaggcggaagttcaaatttccttgcgcaaagcaaaagcagggaaataacttgtgcggctattacgtgtgcgagtattgccactgccttgcaaaccaaatcatcaccacaagagagctcgattttattcgcatgagggataacctgaccacacacaaggaatttatcgcggcggttcaagaacaactcatgggattcatcaacgaagaaatccttgatcccaagggtgaattctactacgacggaaacacaattcaccggtccttagcttctgagctagcagcgagtactactacgtcgaaatcgtag

SEQ ID NO: 72638 - DNA, 1536 bp, Oryza sativa
  unsure (1)..(1536): unsure at all n locations
  Clone ID: PAT_MRT4530_72999C.1
acttagaagttttttccccgatcgatctctctctcggcttctccttcgccgccactgcctggggcatccccgcgccgacgccgccccacaccaccgcgcgccacgccgatgccacgccgccgcctcgccaagctgcagccgcgccgccgctccgctgccgccacctcctcaggctcctacaccgactcctccgcaagctcctcgtccggcaccttccaagtcaaggcccccccaagcttcaccgcctgcccccacaagggcaacgaagaaggcgaaagttgacgccgccaagaacaaggacctggggtatgattgcatgcaagaggagcttgacgcttatgtggcatcagaagtcaggagacaattgaagcctcgaagtccagaaaagaagattcctatagacccaagtgttaggaacttcttcaggggtatgtctgcacctgccaaggaggccataaagctatcggactatgagcgaacactcaagaaagcatcttctggaaagtccaaaccagtccctcagcttggagagcaaccaaaccaggagatcgagccgttggtgaccggtgaagattttggatagaagaatttattattgcatcgggctaactacggatcaattggtacgaggcacacctttgaaagggggaagtgaaatcatgagaactcggtaaaccgcttgtcaagcctgagcagctgcagtccctacccatacaaatgtacaagttccatcaactgtacatggagatgagcgccaccggtagagagatgatcggagcgaggattagggacacagacttcnnnnnnnnnnnnnnnnnnnnnnnnnnnaatttcaagggtatctacgaactataccagctggacgccctcgacgtctctattatgagttgctggattttaatggagattcaaagggcccgacggcggggtgttttcgatactggattcatcgaccctcggaaagttaacgtcgcaatgctcgaccagtatccgcaagccacagaggacaatctcgtccatctcctgaaggcgcaacattacaagacgtttatactattgccgaacaacacagaattccactaggtccttttactcttcgacctggaggcctgcatcgtcaacgtatatgactcaatggataaaaaagagtctacgtttgacaaggttttcgaacttatagatagggcttggtatcggttccgtcatttggtccgcggcaaatggagagaaagacttaggcggaagttcaattttccttgcgcaaagcaaaagcagggaactaacttgtgcagctactacgtgtgcgagtattgccactgccttgcagaccaaatcatcaccacaagagagctcgtttttattcgcatgagggataacctgatcacacacaaggaatttatcgcggcggttcaagaacaactcatgggattcatcaacgaacaaatccttgatcccaagggtgaattctactacgatgaaaatacaattcataggtccttagcttctgagataacgactattactacgtcgaaatcg

SEQ ID NO: 72639 - DNA, 153 bp, Oryza sativa
  Clone ID: PAT_MRT4530_7299C.1
atgatgcgctcggtggactggcggagttcaacattgccgacggagaggattggtgtcgcggagggtcgcccttggattgccggaaatcttgaaggtgtcgccggagagctcgaggcggaggattggggaaagttttggctaagagcggtttaa

SEQ ID NO: 72640 - DNA, 158 bp, Oryza sativa
  Clone ID: PAT_MRT4530_729C.1
ctgctgcaggaagtcgtcgtagatatatgtctcggtctttgatggtcggtatgggagcggtgggaggagcagcgtcagcgacagcgtcgtcgcaggttgctgggctcctccccatcagggtcgggcaggtgttgatataagctgtcctagtctccttt

SEQ ID NO: 72641 - DNA, 335 bp, Oryza sativa
  Clone ID: PAT_MRT4530_72C.1
ggccgcccttttttttttttttttttttttttttttttttttttttttttttgggttgggtttttttttaaaaaattgccacattccatatgcaattaggctcaaagcaaaaatcgataaaaaaaagacccctccctcacttttttttttctgctttttaaaaaaatcacacacacattccttggctttttttttttttctgcgaatctctttgatgattttatttacatgcatgttatttactaacctagttcaccttaaaacttaatcaaaacttgttcaaagtgcttttgggtgtcaacaagttgtaaacacattaacaaatttttctcttg

SEQ ID NO: 72642 - DNA, 262 bp, Oryza sativa
  unsure (1)..(262): unsure at all n locations
  Clone ID: PAT_MRT4530_73000C.1
gggcgaccgcggctgcgannatcggctgcggaaagcggcaccggcggcgaatgcgcggccggagcaggcagaggggcggtgtcagcgcgcancagagcaggcggacaacggctccaggcgtgggtggagtagaggggcggggggatgcggcgggcaagcggcggcgaggcgcccctcttttccccctcccgccggncttatctcccccanttcaactggcctcctnttcccctnttcgaagggggccaggaaatgggtggtc

SEQ ID NO: 72643 - DNA, 1218 bp, Oryza sativa
  Clone ID: PAT_MRT4530_73001C.1
ctcctcgtccggcaccttccaagtcaagggccccccaagctccaccacctgcccccacaagggcaacgaaaaaggcgaaagttgacgcacgcaagaggtgacgcttatgtggcatcagaagtcaggacacaattgaagcctcgaagttcagaaaagaagattcctatagacccgagtgtcaggaacttcttcaggggtatgtctgcacctgccaaggaggccataaagctatcggactatgagcgaacacttaagaaagcatcctctggaaagtctaaaccagtccctcagcttggagagcaaccataccaggagatcgagccgttggtgaccggtgaagattttggaatacaagagtttattaatgacactgggctaactacggatcaattgctacgaggcgcaccaatcgaaaaggcggaagtgaaatacatgtacaaactcggtaagccgcttgtcaagcctgagcagctgcagtccctacccacacaaatgtacaaattccatcaactgtacatggagatgagcgccaccggtagagagatgatcggagcgaggatcaagggcacagacttcttgcaaggagatgatattctctggatcaatttcaagggtatctacaaactataccagctggacgctctcgacgtctctattatgagttgctggattttaatggagattcaaagggcccgacggcggggggttttcgatactagattcatcgaccctcggaaagtaaacgtcacaatgctcgaccagtatccgcaagccacagaggacaatctcgtccatctcctgaaggcgcagcattacaagacgttcatactattgccgtacaacacagaattccactgggtccttttactcttcgacttggaggcctgcaccgtcaacgtatatgactcaatggataaaaaagagtctacgtttgacaagtgcgcaaagcaagcccagggaactaacttgtgcggctactacgtgtgcgagtattgccactgccttgtagaccaaatcatcaccacaagagagctcaattttattcgtatgagggataacctcacacacaaggaatttatcgcggcggttcaagaacaactcatgggattcatcgacgaacaaatccttgatctcaagggtgaattctactacgacagaaatacaattcataggtccttagcttctgagataacgactactactacatcgaaatcgtag

SEQ ID NO: 72644 - DNA, 131 bp, Oryza sativa
  Clone ID: PAT_MRT4530_73002C.1
cccacgcgtgcgcccacgcgttcgtccacgcgtccagacacgcgtccacacacgcgttcgaccactgcgtgcggaatacaacagggatggctccttatccctcggagtgccggaccaatgggcggacctta

SEQ ID NO: 72645 - DNA, 3612 bp, Oryza sativa
  Clone ID: PAT_MRT4530_73003C.1
gcccacctgtcaatttgccacccctctctctctatctcccggccgcctcctcatcccccgccgccgccgcctccgcgtcacccgccaccgccgccgcccctgctcccgctgtcgccgcctcagcgtcacccgccgccgctgccgctccatgtcccccgcctgccgccgacccatgccggcagtgccgacgacgccgggccgcgccacgccgccgcggcggcacgccaccgccgcgccgccacgccgccacgccgccgccgcgcacggcgccttcgcgccacgccgacgctgcgccgccacgccaccgccgcgccaagccgcagccgcgccgccacgctgccgccacaccgccgctccgctgccgccacgtgaacgaacgatcgctcgtgaacgaacgaaacgtgacttaggtgagaacttaacgacaacgtgaacgttaacgaaggtgaacgaacgaacagaaaaggcgttgtcgtcgtcgtccctcaagccggagtggtagctagccctcgaaggaattcgcgcaggcaaatggctgatcacgatgaggaacagatactgtacgatacaatcgcggagagaagcagccagtactagaatgaagaagaggggaacgaggatccaaaccagtacttgaacgaggaagggaacatggagagagatacggaggggaaccaggaggggaacgtggagagggatgcggaggggaatgaggaggaggaggctagtggaagtcaaccctccgctggacagaagagtgcatgcaggcaacgaggtgccgcgaagaagctagagggtcggcacttcataacggaagtggacgaagacggccgacccagtgccccggcagaagcagccaagaactacgtacgatacagtggttgggttgtgcgggataacgtgcctgtcagtacagtgtactggcgcagaacaagggcacgcgaagatgatgagagctttgtcccagattcggagaaagagatgctgtggaccacaatgctcgagacattcacccttcccgtgggtatagaggacaaagtgaaaaggtggactctaaagaaaatggcagaacagtttcagagcttcaagggagatctgtaccagaaatacatcctgaagggtcagacaccgaacttcaacacattcccaaagctaagggatcactgggacgagttctttgcatataagacaggtcaacaagggctggcgataatggaaagaaacaaagaaaatgccgccaagaagaagtaccatcaccacttggggtcaggcggctatagcgtcgcgatgccgaagtgggaggagatggaggcaagcttgcttgagaggggtatcgaaccggccaccgctaaatggccggatcgatcaaagttctggtagtatgctcacggtggaacgctcaacccagttgatggctccctggtcttcagcgatcagatacgcgaggctgcgcgtcgactaacgaacgcagtggaagcctcttctcagggcacgttccgacccgacagagagaaggacgagctgtcactcgccctgcagactcccgagcatccaggacgaacacgagggaaaggggtgattccttggaagattggattcaaggaggacatccacacgtacatgagtcggatgaggagcaagagagataccgaggcgaagattgcagatcttaagtacagggtatcgagctacgagctcagcatgcaagaggaggtggcaaggaaggttgatgaacgcatggccgcacatcggtcccatgatccccagccgtacattcctcctgcaatggtgagcccttcaggcaatcgtagcagctgcgcctcaacggggtaggtaggatcacagagcatggacgccatgcaaacccaggacgaaactacctaccccgttgatgacatcactcagcggacaccatgtgagctgcatattcccttcaagaacttatcaataaaggtggcgtcaggcatggccatcccaacggacccgtcagggacttaccactgcaggccgattccagcaggatactccaaggtcgaagttgagttggtggaaggcgcgtacgaggacatcgagttggactaccctggaggagacgatgagatgcatctacgagacacaagccacgccattatactgtggtgcaagcggtacatcatccttcctgggcgacaaacggcgtctcgtgcaccatctcctccggctccgccatctcctcctcaggctcctgcaccgtctcctcctcaggctcctgcaccgactcctcctcaggctcctcatccggcaccttccgagttaagggccccccaagctccaccgcctgcccccacaagggcaacgaagaaggcgaatgttgacgccgcaaaaaacaaggacccggggtacgattgcacgcaagaggagcttgacgcttatgtggcatcagaagtcaggagacaattgaagcctcgaagtccagaaaagaagattcctatatacccgagtgtcaggaacttctttaggggtatgtctgcacctgccaaggaggccataaagctatcggactatgagcgaacacttaagaaagcatcttctggaaagtccaaaccagtccctcagcttggagagcaaccataccaggagatcgagccgttggtaaccggtgaagattttggaatacaagaatttattaatgacaccgggctaactacggatcaattgctacgaggcgcaccaatcgaaaaggcagaagtgaaatacatgtacgaactcggtaaaccgcttgtcaagcctgagcagctgcaatccctacccacacaaatgtacaaattccatcaactgtacatggagatgagcgccaccggtagagagatgatcagagcgaggatcagggacacggacttcttgcaaggagatgatattctctggatcaatttcaagggtatctacgaactataccagctggacgccctcgacgtctctattatgagttgctggattttaatggagattcaaagggcccgacggcggggggttttcgatactggattcatcgaccctcggaaagtaaacgtcgcaatgctcgaccagtatccgcaagccacagaggacaatctcgtccatctcctgaaggcgcagcattacaagacgttcatactattgccatacaacagacaattccactgggtccttttactcttcgacttggaggcctgcaccgtcaacgtatatgactcaatggataaaaaagagtctacgtttgacaaggttttcgaacttatagacagggcttggtatcggttccgtcatttggtccgcggcaagtggagagaaagacttaggcggaagtttaattttccttgcgcaaagcaagcccagtgaactaacttgtgcggctactacgtgtgcgagtattgccactgtcttgcagaccaaatcatcaccacaagagagctcgattttattcgtatgagggataacctcacacacaaggaatttatcgcggcggttcaagaacaactcatgggattcatcaacgaacaaatccttgatcccaagggtgaattctactatgacggaaatacaattcataggtccttagcttctgagataacgactactactacgtcgaaatcg

SEQ ID NO: 72646 - DNA, 360 bp, Oryza sativa
  Clone ID: PAT_MRT4530_73004C.1
gaacgagagcgagaacgaacacgtcaacgggcgttgccgcgagaacgtgaacgagaacgagaacgatcgaacgaacgagagcgagaacgaacacgtcaatgtacgttgccgcgagaacgtgaacgagaacgagaacgatcgaacgaacgagagcgagaacgaacacggcaacgtacgttgccgcgagaacgtgaacgagaacgagaacgatcgaacgaacgagagcgataacgagaacgatcgaaccaagacaagtgagaacgagggaacgaacgtgaatgagaacaagcgaacgagaacgagcgaacgagaacgaggacgaacaaaaaacgtgttgtgggagtcgtccgtcaagcctga

SEQ ID NO: 72647 - DNA, 201 bp, Oryza sativa
  Clone ID: PAT_MRT4530_73005C.1
atgcgggagcgaaacccgagccagtcacgcggaaccgggatgcgcgaccgagccggtcccgcacgactggactgcgggaccgagtcggacatcggatccaatttgggaaccgagatgaggggcggcatgtgggagcgccggtcccgcacatccggcatgcgggagcattgccgcactcacccagcccgcgcgaccggcgcg

SEQ ID NO: 72648 - DNA, 728 bp, Oryza sativa
  Clone ID: PAT_MRT4530_73006C.1
atggattatgaaatagcagccgccttcgtcgtgcttgggcataaaatcggcctggagcagccagaagctgccgtcgccggcggtgagcagcacgtacgagtagacttcagggaccatccaggaagcgtatctgtctctcgctgctccgtgaagaaggaccgttggccggtcatggggttgtacacgcatatgtcggcgcggcgttgcgacctgcgccgccagttggggtccctgcgctggagggccacgaggccgccgtggcatgccacggccttgtattcctccaggacgtccggtgcgacgcgcgacatgaagggcgccaggcggtgctccaccaacgacgccgcggcgggcgtcgccgggtgggcgagggagaagcagcagtgggcttcgttgtcgtcatgttttcttcttctatggaggaaaccgactacgctgcttcggggcacaattgcgtcgggtccgtcatggcacacgcggcggaggaaaggtgggctgaggatttcgcggcggaggagattggatgccgcggcgcaccggacgagtgtgccggcgtccgaccgagcgacgatctccagcaggagttccggcggcagaaacaactccggcgtgggctccgccggcggcggcatcacggtcacgcacgcacgtcggcgtcgtttgcgtggaggcatcgtctcgtccttgttgccggttccggtcgtttgcctagctccgtattaagatga

SEQ ID NO: 72649 - DNA, 380 bp, Oryza sativa
  Clone ID: PAT_MRT4530_73007C.1
atgtcacattctaccaaagtgattagctttcttaggagcacttgaccacacaggcgctgatacaacacacgttcacagcacacatcacaaggacacaaaagttagcacctgcattaaggaataaacctcatgcctgctaggttactactgataggcacttaaattgaattaagcatgaccggaccattcggttggatcgccctgcacttgttaagagaccacataaagaggtttgcattggactcaatatctttttatgccttggaccagaattagaagcaactaattttttttcaatatttgaaccatattctttaatatcaggcaacccaccagcgaatggaaccttaggcttcttggacataatacatgggggcaac

SEQ ID NO: 72650 - DNA, 234 bp, Oryza sativa
  Clone ID: PAT_MRT4530_73008C.1
tcgttcacgcgcgcgcccaagggtccaaagaggggggcgggtgaacacggcggaccagcgcaccacccgcgcggagaggaggcaaaagaccgggcaccggattccaacgacaggacagcgaaaacacaggcgagacgagacagaaaagacgtgcggaccaggagaccaacgacagctgacgcaacgacgaggaagcaagcccacacaggacaccaaaagcggggcgaaagaaaa

SEQ ID NO: 72651 - DNA, 234 bp, Oryza sativa
  Clone ID: PAT_MRT4530_73009C.1
atgggcctccggaataacacaacggcgagcttttcagtcccactcaccaagtgccgcgagcgcgtgacatatgaccgcccctcccgtcggctgccagctgcgctgtactacgactgcgcaccgtcttgggcgcagcaacttaacgcgtgcgtgattagctttgcggtgaaccgagcagtcgaccacgcgcacatgccgtgccgcgccgcctgcgagctgatcaccggcaattag

SEQ ID NO: 72652 - DNA, 2314 bp, Oryza sativa
  Clone ID: PAT_MRT4530_7300C.1
gaggccagataaaagaattcatttgcagcacgaaatgaccaaagaaagctaactccagattttcaaaactggaagtatagtattgaatcagcatgatacaattcagggcttgaacaatactatctatcgaacatttcagcggccgagtattccactctgcaagtaatacaatgtctgaaaattttcagagaagtttaggactatctataaaacatttcagcgattgagcatcccactttgcaagtcatacaatgtctgcaactcctcttctcggaagcacatccatctgaagagtcctgccatttcttgaggcaactacgccaacagaaggcagcgagggatccgtaactggctcaatctcaataaatctcaaatccatcgagcctgtacgcttcaagctcaagacaaacacaagcacaatccaaccaaacatggtgatagcccaatagttattcattccatgaaccaaaccccaggcaattgagtagccaacaatgatccctgataagtggccaatgaaactcgcctgaggaaccatgatagatgtgaatatcagcgattcaaacggcgcgaagctgataggcagcgaaagaaccccgaagatattcagcttcgacgacggttgctttgtagccagaattgtcatccacccaaacacgacgcacgagtacccgacagcggtcaccctcctgaaatactccaccttgaacttctgaatcatcacatggtagaacccaagaacaagcaatccagacagcaccacgagcacaagcgtgtaatggaggtagtactcaacaccgagcccaatctgccccaactgctcgacaacaccaaggctccacaatgcactcatgttgaacaccaaatgcaccacgctgatgtgcgagaaggcggaggtgatgatcctccagtactgcccgccttccatggcggcctcgtagctcagcccaacatctccatacccaatgttcctcttctggatgaagaaccagatcagggagcagatgcccacgtagcgcgcggcgtacgtatcgccgctccttcggctccgccagagcttgacctcgaggaagacggcgacgagcgccagcacgacgaggaagatcccgtagccggcgcgggcggcgttgccctcgtgcgcgatgttgaggccgatgaagatgttggcggcggcgcaggcgacggcggcgcggccgacgttgtggtggtaccagttccagtacctcctcaccttggacgacttgtccggccgcgccaggaacgcgagcacctggaggcagccgaggacgagcacggtgatcccgatcgcctggtgggtgtcgccgccgggcacgtcgtcgtttagcttgaacccggcgaccacgccggcgacgccgagcacgaaccccacgccctgcacggagatgtgcgcgtagaaccagaacgggtcgtgcttcttgaagtagcgcgccagcgcgatccccaccggcatcagcaccccccacccgagccccgccatggcgccgtgccacttcttcgtgtccgccgcgccgccgccggcggacgacgtcgtgccggcggcgtagttgacggcggcggaggtgtagacctggtgctgggcgaggtagtcgccgttgcccgaggggttggtgttcgacgggccgacggcgtagatgaggtacggcgtcggctgcggcgccgtgaactggaacgcgacgtagatccgcgacgactgcgccacgacgagggtgttcttggccaccagcgacagcgagccctggtccggcgggcagctgcgcgagctcgtcccgcccagcttgtactgcttcgccacgccgccgacgccattgccgctgctccacccggcaaccgcgctgctccccaccatggcgccgtcctgcgagaaccccaccgccacgtaccctcccttgtccggcgccgacagcacgaagctccacgtgctcccgctgaccgccatgaatcgaatcgcgaggcggacgatgaagttctcggagctccatgcgtcgaagcaggtgaggttggaggtgtcgaaggggatgagcttgctgacgccggcggcgaggctcgccggagtggagcacgagtcgctcgactgagacctcgccacggggctcaagccgaagcacaccaccaccaccaggagcagtggcgccccattgatcacggaagaacagcgagatctcggcttcatcggtttaatttcttgcttttctgctcggtttcttgtttggtgagttcgagctgtggcctgtgggcggctgctggggaagaagaaaactgggtgcagctgcttgtggcgcatattcctgcagcc

SEQ ID NO: 72653 - DNA, 766 bp, Oryza sativa
  Clone ID: PAT_MRT4530_73010C.1
accgtgtggaaggagcttgagaaggagaacagcgagttcttcgccacgtacaagaagggccaaggggaggatcgatcgatcgctagctactcgccgtcgtcgaccggtcgatccgccattaagcgagctgccggggtctctcgctaataaatcttccgagtaggcaagcctcaatcgatccgagagtttggtcgttgatcgagctgatcgatcgaccggtgagtggtgcgtggtgtgcggccatggacgacggcggcggcggcggcggcggcgactcgtcgccggcttcgtacatcagattgttgagccagcatctgatcgagaagtgcatctgctacaacatgaacaaggaggaatgcatggagacgctggagaagcacgccaacatcaagcccgtcatcacctccaccgtgtggaaggagcttgagaaggagaacagcgagttcttcgccacgtacaagaagggccaaggagaggaaccagcggagagcaagagcagtagttcttcacaggaagctgctggttccaagagatcaggcggagacgacgactaggagcagtgttgattcgtcgttgctactcatgtgcatgcatggcacccacgagagagggggctacttgtacagtaggatatccatcaagtcgtagtacctcgtactgtcttacatctagcttaccatggttcatagcgtatggtagttgttcattcgtcgagatgtacgttttgttctttcttgattatgctgtcggtgagcagcgtggaagg

SEQ ID NO: 72654 - DNA, 534 bp, Oryza sativa
  Clone ID: PAT_MRT4530_73011C.1
cataggccagagtaagtaagaagaacgctctcatcatcagtcaccatgtgtcgtgctccggtgccaaactgcggatcggctccagctgccagtgcggcaacggctgcgccggaatgccaagtactctgaggtggaacccacgaccacgaccacacttccttgccgatgcaaaccaacaaggggtctggtgctgcttccggaggatcagagatggggcaggagaacaggcagctgcaggcttgcaacacactgcaagtgcaggcaccagctgcaggctgctcactgctgcaactggcaaactagaagaaacttaatgctgccaatgccaaatgtgcatgcacctggatcaacggaggctgaccaagtgaccaactgacatgatggccaatggtgactagctacctagcttggcatggcaagtgccttaatgttggctggctagctagctagctagctaccttagcgtctcatgtatgtcatttccacctgccccctaaataaaattccttacaataaaaaaaaaaaaaaaaaaaa

SEQ ID NO: 72655 - DNA, 486 bp, Oryza sativa
  Clone ID: PAT_MRT4530_73012C.1
gaattcccgggtcgacccacgcgtcccggacgcgtgggtggagacatagcctctttggtgaccacatgtggcgaaccgttggtttgtgggtggaggcaggttgagtcagagtcattatggtgtaccggtagtggtgaagatactaggagaccatgaaattcggaaatattaggtatgtgagatctctgcgaaaaagacgaagggaatgaaactatcaataggggtaaataaatattatttagaataattactacagttaataggatatctttttagagtgttctcatttgacgtaataatacttgaagtcaaataaatgttgtattaggctcaactaatcgtaaatgcttaatcatatcccagaaaccatctaccatttttcatactattcatgtcatatagttttcatactgttcatgtcatacagatattatgtatagaaactatatacctaatgattttctcaaaataaaaaaaaaaaaaaaa

SEQ ID NO: 72656 - DNA, 915 bp, Oryza sativa
  Clone ID: PAT_MRT4530_73013C.1
acagcctacccctcgcgtcgtcgccgtcacgtccacctccgctgctgtcggcgaggccgctgtgatgctgggatttctttggttgctttctgccctggcaataacatatagaagacagagcaaaaactctaatacatgtgaacggccggaaaaagtttttggagtgcaccggttcacagatcagaggccatggttttcaattttatttttcactcatcgcattgctcctacatcgaaaaacaagccagcacaaagtttacaaggtctgcacatcaaactaacaaatggcccgcaatcgaagaattatctcctaagaaaaagcatgtcgttctaacatcagatggcacggaagaagatgtgcattctctagaggtgaacaacagatgcaatatcactcgtacatcaagtccaaaaaatcagtttttgaacgtcatttctaaagaaataaacattaacctcctcaacctgacatctcaaacaactagcttcagtttcagtggtgagtgtatcctttagaactactttagaactgttcctaataactggtcttcagtattggaaatctaggactggagtgatatttttacagttgacgtgatccatctggatttgttcaatttgtgaaaaagcatcttgcagcagattgtttgctctctgtttccaaaacctggttctccagatgatttagctatattttgtgctcatcaaagaaagcagggcctgaccctcctgaccaagttgtcagataaggcttgcacgagtagagtgaatctcctcgtagcaaattttcatcggattatctcatattattatgtaaaactatgattttgttttacatatatatcggtacattcatcgtgtaaaactctgatttcatttatatgcatcagtggtatggtatgtggaattcctact

SEQ ID NO: 72657 - DNA, 113 bp, Oryza sativa
  Clone ID: PAT_MRT4530_73014C.1
cagtctgcgagataagtctgcaggccttccttgaactatgcataaagtacaggacacctacactccaatcaacgcagtgattccaacatcagatcgagctaaacctgaagaca

SEQ ID NO: 72658 - DNA, 513 bp, Oryza sativa
  Clone ID: PAT_MRT4530_73015C.1
atgaggtggagactgctgacatgtgggtcccgcttgatgactcagcaagtcaactaccacatggcatccagcggccgacgggagagggcgactgacgcgagttcgtcgggccggtcgacgggagaggagcggcagcgcgcgtcagccggcgggaaggagggagaggcgctccacctctggtgccacatccacgcccatccggagctcgcgttccgagagcaccgcaacggtgccctcgcccgccatgagctggagcagctcggcctcaccgccgcgtagtcgccggcatcggcatcgtcaccgacgtcggctctggccttccccctattgtcgcgctccgcgctgacatggacgccctccccatccaggtcccacctcttcccctttctctcgcgcaaccaaagacgagggggcggcagctggtggcggtggtgggcgaggaggaagtcgagggaggtggccaggcagcgccagtcgtggcacacggcgtcatcgctcctccgctgcgctcgc

SEQ ID NO: 72659 - DNA, 466 bp, Oryza sativa
  Clone ID: PAT_MRT4530_73016C.1
gttctttttttgttttttttttttttttttttttttttttttattttcttttttttttttttttttttttaactttgtacaggacgggtcactacctgcacagaactgaccttctctccaatacgaacacacgcatccacgcggcccacacgaatacgtacatttgtacgggacacggacgtacatttactgcaccgggtacacacaggcacactcttctggagagacgcgcatcgacgggaagggagctagcttagccacagggaatgccgaagacatgacggccagtcatcaaaaggagaaacctgccggggacgaagttggtggcgtcaacccaggccatggtggtgacggggtcggcgagaaggcccacgaggaaatcgagggggccctcgagggccggggggcaggggaggaacaaccactccttgtcaatgatagcagggtgacatctttgccaaggaaa

SEQ ID NO: 72660 - DNA, 333 bp, Oryza sativa
  Clone ID: PAT_MRT4530_73017C.1
cgcgggcaaaattttgacgcgaacatgggcgttgtcaccgcgaacgacgcggcggcggccgcgccgggcagggtccggcggccgagcagggcggcggcggcggcgctgtgcccctgcaagggccgcggggcgccgaagccgccgccggtggccgtgatcgcgcacgagtgccccagcgcgatgcgcgccctcgtcgtggaggtcccgcggggcgagacgtggggtcgtgcgtcgccgcagtggcgcgccgcgcgcggcgcggggcgctggtgctgggcgcgttcgggcgcgttgcggacgttgtgctccgggagcccgcggcggtggtgctcc

SEQ ID NO: 72661 - DNA, 1965 bp, Oryza sativa
  Clone ID: PAT_MRT4530_73018C.1
atggatggccgacggcggcgcagcgggaggccggatgtttcctacggcaattcggatggaatcgcccacaaccgatccgtgattttgggcaccatccacggctactacaaggaggcgctcgccgtgctgccgctcgacgacttgccggagcttgccccgcgcctcgttggcgccggcgtctgcttcggcttcggcgaccctaccaccaacatcatcgccaacaccctctcctccttcctccccgacaagcctgatcccgatcaccgggccaagaagcacaagcgcaaggcaagcatcaagacgccatcggcagcagcgaggtcggatgccgccggcgacgccccctcccctccgccggagacacgaaccatcgccgagcgatcgctggagggcctcatcaccttcctcacatcttacttccgctacctccccacctgggatgcgctccgctacctgtgcctcgccaacgccgacctcctcgtcgccgtccgcctcatcgagcttgatcgctgctacaacaccaaggatgaacggttccacatctcctcctacgctgccagggctgcccttacatgcgcagcatcatcggcgaggcagcctgacgtcgacggcttcattgctggttcgttttcgctggcgtctcatcttgaattcgtcacccagaccgtgctagcagatcgcagctatgtattgtctgttgagaagatcttgttgctgtctggaatgctgaagaagaagccgcgcatgcttgacaagtctgacaatccaatgatttttgctgatgaacggcggcttcgtaactgccataccgatgctaatgctagtggtgatgctaattgtgagaaggtgccaggtggtttgacaatatcacttcgggctgttctacttgacaagattcatgccaattgtgtgaccaacatcatcgtcaacactctctggtatgactctactttccctgctatggagaaacttgaggtggacatgatctgcacctccacctttgttcgtgtggagtcccggtcccttcgtggccttatcaagctattgcttacatgcattcctgagatttctgagcatgatgccatgatatatctgctaaagaataatctgaaagttcgcaaagcaattgaaatggcaggagcggaagggtggaaatccagctgggatgtcagtgcctacaaggctgcagcggatgcatcgtttcatcctgagcccgaagcttatgtacagttttccactcaatctctacctaaggtgcaggctgccgttaaatcactattgcgtgcttctaccccactttcctcgaatgatgttcttcagctagctacgttgttgccatcttcaaactgcatctctgctaaatctttggagacaattgttgatctgtctacagatgcattggatatgtttatagcgttcaaggaaaaatttgtcactcaacagggtttttttcatagaaagattgaagctgcactaaggaaaaggggatatctatatgatcttcaagtaatctgtgttgcaaatgagcgtgtgggcagccagatgaacttcttggacttcaaatgtccatattcacatgtaaactttttggcaagaccaaaagttggaagtggacttaagttattctttgctgaattcagtaatgatgatgatgatgtatccttttgctgtaccgtctcaagaaaatcaaaacacgggaccaggattatgcatcctgcgcatccgattgaaaattattgtggtggcgacatggacttcatagaaatggcgcatggcactcataagctgaccaatgcaagaatcattagttgtgggaagtgcgcaggcaatagagtaggcatgtgtggggacgattatatctatttcgatcctacccgagatgctaagttcgcccaatgcatgaaccggactgcttcaagggcgaatataagctggagtgacattttaaaggtgaatacaagctag

SEQ ID NO: 72662 - DNA, 405 bp, Oryza sativa
  Clone ID: PAT_MRT4530_73019C.1
atggggactgtagctccgaccatgtcaactatgatgctctcgctgctgccagtcctttcaccagtgaatgctgtcatgcgctacttcccgaacctccgtgtacgttatcggatttttcggatcgggaaatgggtcgaaccgcgcgaaatggtcgcctcggaatacagggcgcaacggaaccaagggggaatgttgaggcaaacttacgatgctgacaagctggttaggtgccgagttggattagacatcgcaggttttagtttaagaattgggaagagctacaccactgcgaaatctaccaacgtcggggattctagcccaagatcaggaaagagcttcgttccctcctgcctgccggctagagttataccttccacccttgcttctgactgtgaagtagcgtaa

SEQ ID NO: 72663 - DNA, 1182 bp, Oryza sativa
  Clone ID: PAT_MRT4530_7301C.1
atgaagcggccgctgcggcgcccgttcgcggtgctcctcttcgtcgtgctgtgcgccgcggcctcgttcccctccgtgttgcgcaggtcggtgggcccggctcccgtgctcgcgccgctgccgccgcttgatcccgcgcgcctcaacgccacgctcctccgccttgccgcggccgatccatcggaggcgccgctgcgccgcgacgtggacgacctcctcgagggccgcctcccggcgtcgtccgcgcgcgcccgcgcgtggcgcctccggggcgacaggctccaccttcacctccgccaccaccagttccccgtctaccggcgcggccaccacccggatcacgaccacgaccccctcctccacccgctcccgcgccaggagctccacctcgacccatccctccgccgcgcgctccgctcctggcaccgcctccgccggcacgaccccggcgtcctccgcaatctcccttccctcctctccctccccggccgcatcccctcctgcgccgtcgtgggcaacagcggcatcctcctcggcgccagccacggcgccctcatcgactcccacgccgccgtcttccgcctcaacaacgcccgcatctccggcttcgccgccaacgtcggcgccaagaccaacctctccttcatcaacagcaacgtcctccatctctgcgcccgccgtcccaactgcttctgccacccctacggcgacggcgtccccatcctgctctacatctgccaggccgcgcacttcctcgacgtcgcctcctgcaacgcctcctcccgctccctccacgccgcatccatctccgtcaccgatccacgcctcgacgtcctctgcgcgcgcatcgtcaagtactactcgctccgccgcttcgtcgccgagacggggcgcgcggccgaggagtggagcagcacgcgcgacgcggccatgttccactactcgtcggggatgcaggccatcatggtcgccgtgggagtgtgcgacagggtgagcgtgttcgggttcgggaaggcggccgacgcgaagcaccattaccacagcaaccagaaggcggagctggacctccacgactacaaggcggagtacgccttctaccgcgacctcgccgaccggccggaggtagtccccttcctcaacgacgccggtatcgccgtcccgcccgtcgtgttctaccattag

SEQ ID NO: 72664 - DNA, 309 bp, Oryza sativa
  unsure (1)..(309): unsure at all n locations
  Clone ID: PAT_MRT4530_73020C.1
cggacgtgtcagngaacgcgggngctcgtngtatcgttctcgtnnccnatcactctcctcctcatnttcgtnacggtctcctcgcttcgctagctcgcttgcttgctggctgagctgtggtacgctcgcnatggcgtcctcnacgggggngttggaccacgggttcacgttcangccgccgccgttnatnacgtcgttcaccgagctgctgtcggggggcggtgggnacctgctcggcgccggcggtgaggagcgctcgccgagggggttctncagaggcggancgagggttggcggcggggtgcccaa

SEQ ID NO: 72665 - DNA, 642 bp, Oryza sativa
  Clone ID: PAT_MRT4530_73021C.1
atggatggcgggagcatgtgcgcgggcgacgacgtgggcacgagcatggccaccgccacggcagcggatcggagcgagcgggcgatgaccttggagttgcgcagccgcgcgagcgcgccggaacgggggagaaggcaagtgaggcgggcggcaaccttgctcccgtttgcgtgcggcgtcggcgtcgtcttcgttctccgcagcgatttccccgacgagctagcggaagagccggaggaggagcaaatcggcggggggcgagcttcgccggcctactccggccatcgccgccgcgctggctggctccgctctcccctgctccatttgcctgctacacccgttgaccgcttgacgcggcctccaccagatctgggagtgtcggaggacgaggttgcctacgccaccatccccgccggccatgccgccgtggccgacttccccggcatgatggcgctcttctcctgtctccgtgcctcttctccgctgctcgcggccgcggaccctttcgtcctcagtattgtcttcaagtcctgcgccgcgacgaccgatgcgaggttcctcatgcatgccttcgcggtccgctcctcgtccgtctcctccgtcttctcggtcgcggcggcggagcctctcgaggtggcgtag

SEQ ID NO: 72666 - DNA, 949 bp, Oryza sativa
  Clone ID: PAT_MRT4530_73022C.1
atgaggagatgattgtcaaccaccctgtcaccattgactctttcggatgctatgatacatcttgggtccgctctgtagaaaaacttgggatgttcttacacattatggcagaaaatcatcaaaacagagacacgaacaatcagtgtgtccagtcaaactcaactatgtcaattcacatcaaccaactattgatcactatgaacgtgttgacggtgaatattttgaaacttgtgggtcccaacttcacgaacccgaaccctcagcttatgaacgaagattggttcaaaccattttatcaataagtggatgctgtggacggcacacatgtgtacatatcacatctgcatgcatgtctattgaacacgggaactgacacataacaaccaaaaatgttctactcatttgtcatcactacgggagaactatgttgtgtgatgctggatggccaggctcggtacacgaccgaaggattctaaacgaggcagtgcgatattatcccgaaaatttcccaagggtaccattgggaatgtatttacttgttcactctagatttcctagtaggatgagatctctggcatcatacccacatgtacgttaccacatggatcaacttggtgttataaggtataccgccaccggtcggacgagaagagacatctaaccaccaacactcagcatcgtcaaaaaacaatggaaaatactaaaagaaatatcctacaatcaggattacaatgttcccacacacaaaatacatgcaacttttgctctgcacaacttcagaatggataatgatgatgtgtactaccgtcaaaacaatcttatgtacaatggatatcccgcagtgccacaacagacatccttcaatcatatgtattacgcaacaagtagcgagcaagctataagcacctactgtaattgcattaccaatgcggtgttcaatcagtattag

SEQ ID NO: 72667 - DNA, 2928 bp, Oryza sativa
  Clone ID: PAT_MRT4530_73023C.1
atgacctatagacttaccaactatgtcttgtatgaacagatggctgatcgtgatgaggaacagatattgtacgatacaatcgcggagggaagcagccagtactggaacgaagaagaggggaacgaggatccaaaccagtacttgaacgaggaagggaacgtggagagggatgcagaggggaaccaggaggggaacgtggagagggatgtggaggggaaccaggaggaggaggctagtggaagtcaaccctttgctggacagaagagggcacgcgggcaacgaggtgccgcaaagaagctagagggtcagcacatcataacggaagtggacgaagacggccgacctagtgccccggcggaagcagccaagaactaccgcagaacaagggcacgcagagatcatgagagctttgtcctagattcagagaaagagatgttgtggaccacaatgctcgagacattcacccttcccgcgggtatagaggacacagtgaaaaggtggactctaaagaaaatggtagaacagtttcagagcttcaagggagatctataccagaaatatatcctaaaggggcagacaccgaacttcgacacattcccaaagctaagggatcactgggacgagttcgttgcatataagacaggtcaacaagggcaggcgatgatggaaagaaacaaaaaaaatgccaccaagaagaagtatcatcaccacttggggtcaggcggctatagcgtcgcgatgccaaagtgggaggagatggaaacaagcttgcttgagaggggtatcgaaccggccaccgctaaatggccggatcgatcgaagttctggtactatgctcacggtggaacgctcaacccagttgatggctccctggtcttcagcgatcagatacgcgaggctgcgcgtcgactaatggacacagtggaagcctcttctcagggcacgttccgacccgacagagagaaggacgagctgtcactcgccctgcagactctagagcatccaggacgaacacgagggaaaggggtgattccttggaagattggattcaaggaggacatccacacgtataggagtcgaatgaggagcaagagagataccgaggcgaagattgcagatcttgagtacagggtatcgagctacgagctcagcatgcaagaggaggtggcaagaaaggttgatgaacgcatggccgcacatcggtcccatgatccccagccgaccattccacctgcaatggtgagcccttcaggcaatcgtagcagctgcgcctcaacggggcaggtaggatcacagagcatggacgctatgcaaacccaggacgaaaccacctgccccgttgatgacatcactcagcggacaccatgtgagctgcatattcccttcaagaacttatcaataaaggtggcgtcgggcatggccataccaacggacccttcaggtacttaccactgcaggccgattctagcaggatactccaaggtcgaaattgagttggtggaaggcacatacgaggacctcgagttggattaccttggaggagacggtgagacgcatctacgagacacaagccacgccattatactatggcgcaagcggtacatcatcctccctgggcgacaagcggcgtctcatgcaccatctcctccggctccgccatctcctcctcaggctcctgcaccgtctcctcctcatgctccagcaccgtctccacctcaggctccttcaccgactcctcctcaggctccttcaccgactcctcctcaggctcctacacagactcctccgcaagctcctcgtccggcaccttccaagtcaagggccccccaagctccaccgcctgcccccacaagggcaacgaagaaggcaaaagttgacgccgcaaaaaacaaggacctggggtacgattgcacgcaagaggagcttgacgcttatgtggcatcagaagtcaggagacaattgaagcctcgaagtccagaaaagaagattcctatagacccgagtgccaggaaattcttcaggggtatgtctgcacctgccaaggaggccataaagctatcggactatgagcgaacacttaagaaagcatcttctggaaagtccaaaccagtccctcagcttggagagcaaccaaaccaagagatcgagccgttagtgaccggtgaagattttggaatacaagaatttattaatgacaccgggctaactacgggtcaattgctacgaggcgcaccaatcgaaaaggcggaagtgaaatacataatggagattcaaagggcccgacggcggggggtttttgatactggattcatcgaccctcggaaagtaaacgtcgcaatgctcgaccagtatccgcaagccacagaggacaatctcgtccatctgctgaaggcacagcattacaagacgttcatactattgccgtacaacacagagtttttagtgtcttcctataacaaatttcattcccgtacgaacatgctaagtgtttcatatgcctgcaccgtcaacgtatatgactcaatggataaaaaagagtctacgtttgacaaggttttcgaacttatagatagggcttggtatcggttccgtcatttggtccgcgacaaatggagagaaagacttaggcagaagttcaattttccttgcacaaagcaaaagcagggaactaacttgtgcggctactacgtgtgcgagtattgccactgccttgcagaccaaatcatcaccacaagagagctcgattttattcgtatgagggataacctgatcacacacaaggaatttatcgtggcggttcaagaacaactcatgggattcatcaacgaacaaatccttgatcccaagggtgaattctactacgacggaaatacaattcataggtccttagcttctgagataacgactactactacgtcgaaatcgtag

SEQ ID NO: 72668 - DNA, 933 bp, Oryza sativa
  Clone ID: PAT_MRT4530_73024C.1
atgtcgcatttgaaacaaatatatgaatcattacagggcatattacagaacggccttcagattgcagccaagaggctcgatcaaactacttggcaaggtctggaggagtttttgaatgaaattaggattatcatacggcttcaacacgccaatctggttaggcttcttggttgctgtgttaaccgcaaagaacaaatacttgtctatgaatacatgcctaacaggagcttggactatgtattgtcagatcgtgaaagaggagcatcgctgagctggttcatgcgacggcatataatcaacgggatagcacaaggacttgactaccttcacaaccatgctccagaaggacttataattattcatagagacatgaagctaagcaatattcttttggacagtgaaaataatcccaaaatttccgattttgggattgcaaggaaattttgtttaaatggaacagaaccatacgtgactcatccagtaggaacacctggttacatggcgcctgagtatatacatggggatttgaccccaaaatacgatgttttcagcttcggtgttttggttcttgagatcataagtggcaggagggttcgttctccaatatttaaccaacatggcagatcgattcatctacttacttatgcctggaatatttggtcaaataggagatacaatgagcttttggacccctatttgagggtggagtttcaagaggagctaaccaggcaaattcagattgctctgctatgcgttcagaaaaatccgggcgatagaccagatatgcacgaggttacgatgtggctgagcaacaacggtctgggactaagtgaaccgcaggaaccggcttacctcaatgttccgcttgggtataatgacgactttgtcactgcacgtcccgacctggaagctggcataatagagctgcagtag

SEQ ID NO: 72669 - DNA, 2777 bp, Oryza sativa
  Clone ID: PAT_MRT4530_73025C.1
caaaccagtacttgaacgaggaagggaacgtggagagggatgcggaggggaaccagcaggggcacgtggaaagggatgtggaggggaaccaggaggaggaggctagtggtagtcaaccctccgttggacagaagagggcacgcgggcaacgaggtgcagcgaagaagcttgagggtcggcacatcataacggaagtggaagaagatggacgtcctagtgccctggccgaagccgcaaagaactatgtacgtcacagcggttgggttgtgcgggataacgtgcctatcagtatggtgtactggcgaagaacaagggcacgtggagatcatgagagctttgtcccagattcggagaaagagatactgtggaccacaatgctcgagacattcacccttcccgcgggtacagaggacaaagtgaaaaggtggactctgaagaaaatggcagaacagtttcagagcttcaagggagagctgtacaagaaatatatcctgaaggggcagacaccgaacttcgacacattcccaaagctaagggatcactgggacgagttcgttgcatataagacaggtgaacaagggcaggcgatgatggaaagaaacaaagaaaatgccgccaagaagaagtaccatcaccacttggggtcaggaggctatagcgtcacgatgccgaagtgggaggagatggaggctagcttgattgagaggggtattgaaccggcaaccgccaattggctggaacgatcgaagttctggtactatgctcacggtggaacgctcaacccagctgatggctcactggtcttcggcgatcagatacgagaggctgcgcgacgactaacagatgcagtgcaagcctcctctcaaggcacgttccgaccggacagagatagggacgagctgacactcgccctgcagactacagagcatccaggacgaacacgagggaaaggggagtcggagaggagtaagagagataccgaggcgaagattgcagatctagagttccgggtatcgagctacgaactcagcatgcaagaggaggtggcaaggaaggttgatgaacgcatggccacacatcggtcccatgatccccagccgaccattcctcctgcaatggtgagcccgtcaggaaaccgtagcagctgcgcctcaacggggcaggtaggatcacagagcatggacgccatgcaaacacaggacgaatcgacctgtcccgttgatgacatcactcagcggacaccatgtgagctgcatattccttacaagaacttatcaataaaggtggcgtcgggcatggccatcccaacggacccttcaggtacttaccactgcaggccgattccagcaggatactcgaaggtcgaagttgagttggtcgaaggcgcgtacgaggacctcgagctggattaccctggaggagacggctctagcaccgactcctcctcaggatcctgcaccgactcctcctcgggctcctacacctactcctccgcaagctcctcttccggcaccttcaaagtcaagagccccccagctccaccgcctgcccacataagggcaatgaagaaggcgaaagttgacgccgccaagaacaaggacccggggtatgattgcacgcaagaggagcttgacgcttacgttgcatcagaagtcaagagacaattcaagcctcgaagtccagaaaagaagattcctatagaccctagtgtcaggaacttcttcaggggtatgtctgcatctgtcaaggaggccatcaagctatcggactatgagcaaacgttgaagaaagcatcttctggaaagtccaaaccagtccctcagcttggagagcaaccaaaccaggagatcgagccgttggtgatcggtaaagaaatgacgatagaacaatttattactgacaccggtctaactacagatcaattgctaggagtcgcaccaatcgaaaaggcggaagtgaaatacatgtacgaactcggtaaaccgcttgtcaagcctgagctgctgcagtccctacccacacaaatgtacaagttccatcagctgtacatggagatgagcgccaccggtagagagatgatcggagcgaggatcagggacacggacttcttgcaaggagatgacattctctggatcaatttcaggggaatctacgaactataccagctggacgccctcgacgtctctattatgagttgctggattttaatggagattcaaagggcccgacggcggagggttttcgatactggattcatcgaccctcggagagtaaacgtcgcaatgctcgaccaatatccacaagaaacagaggacaatctcgtccatctcctgaaggcgcagcattacaagacgttcatactgttgccgtacaacacagaattccactgggtgcttttactcttcgacctgtcggcctgcaccgtcaacgtatatgactcaatggataaaaaagagtctacgtttgacaaggttttcgaacttatagagtgcgcaaagcaaaagcagggaactaacttgtgcggctattacgtgtgtgagtattgccactgccttgcagaccaaatcatcaccacaagagagctcgattttattcgcatgagggataacctgaccacacacaaggaatttatcgcggcggttcaagaacaactcatgggattcatcaacgaagaaatccttgatcccaagggtaaattctactacgacggaaacacaattcaccggtccttagcttctgagctagcagcgagtactactactacgtcgaaatcgtag

SEQ ID NO: 72670 - DNA, 1671 bp, Oryza sativa
  Clone ID: PAT_MRT4530_73026C.1
atggctgaccgcgatgagtaccagataaaatacggtacaatcgcgaaggggcacgtggaaagggatgtggaggggaaccaggaggaggaggctagtggaagtcaaccctccgttgaccagaagagggcacgcgggcaacgaggtgcagcgaagaagcttgagggtcggcacatcataacgaaagtggaagaagatggacgtcctagtgccccggccgaagctgccaagaactatgtacgtcacagcggttgggttgtgcgggataacgtgcctatcagtacggtgtactggcgaagaacaagggcacgcggagatcatgagagctttgtcctagattcggagaaagagatgctgtggaccacaatgctcgagacattcacccttcctgcgggtacagaggacaaagtgaaaaggtggactctgaagaaaatggcagaacagtttcagagcttcaagggagatctgtaccagaagtatatcctgaaggggcagacaccgaacttcgacacattcccaaagctaagggatcactgggacgagttcgttgtatataagacaggtgaacaagggcaggcgatgatggaaagaaacaaagaaaatgccgccaagaagaagtaccatcaccacttggggtcaggaggctatagcgtcgcgatgccgaagtgggaggagatggaggctagcttgattgagaggggtatcgaaccggcaacagccaattggccggaacgatcgaagttctggtactatgctcacggtggaacgctcaacccagctgatggctcactggtcttcggcgttcagatacgagaggctgcgcaacgactaacagatgcagtggaagcctcctctcagggcacgttccgacccgacagagatagggacgagctgacactcgccctgcagactccagagcatccaggacgaacacgagggaaaggggtgattccttggaagattggtttcaaggaggacatccacacgtacaggagtcggatgaggagcaagagagataccgaggcgaagattgcagacctagagttccgggtatcgagctacgaactcaacatgcaagaggaggtggcaaggaaggttgatgaacgcatggccgcacatcggtcccatgatccccagccgaccattcctcctgcaatggtgagcccgtcaggaaaccgtagcagctgcgcctcaacggggcaggtggcgtcgggcatggccatcccaacggacccttcaggcggtacatcatcctccctgggcgacaagcggcgtctcgtgcaccatctcctccggctccgccatctcctcctcaggatcctgcaccgtctcctcctcatgctccgccagcaccgtctccacctaggctccagcaccgactcctcctcaggatcctgcaccgtctcctcctcatgctccgccagcaccgtctccacctcaggatcctgcaccgactcctcctcaggatcctgcaccgtctcctcctcatgctccgccagcaccgtctccacctcaggctccagcaccgactcgtcctcaggatcctgcaccgtctcctcctcgtgctcctacacctactcccccgcaagctcctcttccggcaccttcaaggtcaagggcccccccagctgcaccgcctgcccacacaagggcaacgaagaaggcgaaagttga

SEQ ID NO: 72671 - DNA, 5307 bp, Oryza sativa
  Clone ID: PAT_MRT4530_73027C.1
atggccgaacgggcagtggcgcacaacctctctctgagcgctagcggtgacgacagggagcagaacccgcgccgtcgagctcgtactccatcgtccccctctcgccgaagtcttgggcgggaggaggcgctcgagggggtcgaaagatctgcgatttcgccacccacgggtaatggaaaaggacggcgagacggagaatgtcgcctcctcgtctacggcgatggcagcacgccccagggcgcgctccaggctgcgggcgcgctcctgcgtcacccgcccgtcgtccccgatccagagactccagctcgacgttggctggatgacgtggccgacttggtcatgacggcgcagcagcgcctaggcgccggtgggcggtccttcgcccccaaggcctctggcgctgctaccaccggctccgtgtcgtcgaggcggagggtgcggcgagcggcggccgttacccgccgttcgtccgctattccctcgtcaacgcctccgacccaagaagatatctatacgacggggattgaggccgccgagggtgacgacagggtcatggcgaatttcttccccatggccctgaaaggtcaggcgcggggttggctgatgaacttgccacccgcgtcggtacactcttgggaggatttgtgccagcagttcaccatgaacttccagggcacatatccgcgcccaggtgaagaagcggacttgcacgcagtacagcgaggggacgatgagtctcttcactcgtacattcagcggttctgtcaagtccgcaacaccataccgtgcatccccgcccacgcggtgatctacgcgttcagggggggcgtgcggcacaatcgcatgctcgaaaagatcgcttccaaggagccccagaccaccgcggagctttttcagcttgcggaccgtgtggctcgcaaggaggaggcctggacctggaactcctctggttccggtgtggcagctccggccgcccccgggtccgccgctcggtcagggcggcgggacaggaggaggaagaagaggtcggcctatttcgacgacgaggggcacgtcctcgccgtcgagggcgcttcgcgggccacccgaaaggggaggcctgcgagcgacagaaagaaggaggccggcgctcccagcagggagcgcccgaccggcaagtggtgctccgtgcacaacacctccctccatgatctcgcggactgccgcgcggtcaaaagtttggctgagcggacgaggaagtgggaggaggagaggaggcaggagcgccgtgagggcaaggccccggcggcccccgccggcaaccggcgaggtgaggccaagcagaaggcccccgccgaggacgtcgacgatggcgacgataacctggggttccaggagcctcaggccactgtcgccaccgtcaatgggggagcgtgcgctcatgcttctcgccggagcctcaaggccatgaagcgagagcttctggccgcggcccctacccatgaggcgacgcggcgggcacgatggtcggaggtggccctcaccttcgaccagaccgaccacccgccgtgcgttgcccggggaggacagatcgcgatggtggtttcccccactatttgcaatgtgaaattgaggcgtgtcctcatagacgggggtgcagccctcaacatcctttcccccgcagcctttgacgcaatcaaggccccggggatggtgctccggccgtcccaaccgatcatcggtgtgacgccggggcacacttggccgctaggtcatatcgacctcccggtcacctttggtggttccgccaatttccgcacggagcgggtgaactttgatgtggcggacctcagtctgccctacaacgcggtcctggggagacccgcgttggtgaagttcatggcggcagtccactacgcctatctccagatgaagatgccgggcactggtggccccatcaccgtccatggcgacctccaagtcgcgcttgcttgtatggagcagcgcgcggaccagctcgccgcggcgtccaagcccgagggtggcgacgagaggctcagcgcctccgtcccggccgccccgaggcagcggatgatcacgtgcgacgaggtcccggaagacgcgctcgtctccttcctgcgggcaaacgccgacgtcttcgcctggagaccggcggacatgcccggggtccccagggaggtgattgagcaccgtctcgccgtgcggccgggcgcaaggccgatccggcagaaagtgcggcggcaggccccggaacgtcaagccttcatccgcgaggaggtggcgcgacttctggaggccggattcatccgtgaggtcatccatccggagtggctggtgaacccggtcgtcgtccccaaggcaaacggcaagcttcggatgtgcatcgactacaccgacctcaacaaggcatgtcctaaggacccttaccccttgccacgtatagatcagattgtcgactccaccgcggggtgcgaccttttgtgttttctagatgcatactctggttatcatcagattcgcatggctagggaggatgaggaaaaaactacattcatcacccccataggaacttattgttatacgacaatgcctttcgggttaaagaatgcaggacctacttttcaacgtaccactcgaatttctttgggtagccagttaggacgcaacgttgaggcttatgttgatgacttggttgtgaagacgcgcaaccaagagaccttactctcggatctagcggaaactttcgaaagtctccgctccgcccgcataaagctgaaccccgacaacaaacttagggatgtgcaatgcgtcaccggctgcatggccgccctaagtcggttcatatcgaggctgggagagaaggcgctacccctatttaagctcctcaaacgttccgggccgtttacttggacggaggaggctgaacgggccctcactcagttgaaggcgtacctcagttctcccccggtcctggtcgccccgaaaccagatgaaccgttgctactttacctggcggcaaccccgcaggtggtcagcgcggcgttggtcgtggagcgcgacgaggacaaccctcgctccgcgcacccccaccctgtgtcgactcgacccgggagagagcagggaggagaggcccccgagccgaacggcggcccgaggcccccgacggccggagctggccctctgcccgcttgtccgacggtgccaggcgcccccgacccccaggatggccccggggccactgcgggaaggccgcgcttgtcgccctctgaccccgaggtcgtcggcacagaagccgagtgcgccccgcgcggcctctcggacgaagagcaccctgtatcgactcgacccgggagagagcagggaggagaggcccccgagccgaacggcggcccgaggcccccgacgaccggagctggccctctgcccgcttgtccgacggtgccaggagcccccgacccccaggatggccccggggccactgcgggaaggccgcgcctgtcgccctccgaccccgaggtcgtcgacacagaagccgagtgcgccccgcgcggcctctcggacgaaaagcgccctggagatgcggctggcgaaggggatcggccccgccgaaaggtgcagcggcccgtctacttcgttagtgaggccctccgggacgccaagacccgataccctcaggcccagaagatgctttacgctattctgatggcttcgaggaagttgcgccattatttccaagcgcatcgggtcacagtgtttacgtcttaccccctcggccaaatcttgcataaccgagagggtactggacgggtggtgaaatgggcaaatcgaactctgcactttgaaccacgccacgcgatcaagagccaggccctcgccgactttgtggcagagtggaccccagctcccgagcccgtctccatccccgaggccagctcgggcccctcgcagctgcctcacaccgcctactgggtgatgcagttcgacgggtccctgtctcttcagggtgccggtgcgggggtcacattgacctcgccgagcggagacgtcctcagatacctggtccgcctcgactttcgggcgaccaacaatatggcagagtacgagggactccttgcgggactcagggtggcaactggactggggatccgccgcctcctggtgttaggcgactcccaactggtcgttaaccaggtgtacctcatagataagactctacccgaggaccgcgaagggagtgaacgcgtccagcgcatctccaagcgctacgtgcgggtagaagggaccctctatcgacgcgcggctaacggagtcctcctgaagtgcattcctcgggaacaaggcgtcgagcttcttgccgatatccacgaaggcgaatgcggagcccactccgcctcacgcaccttggttggcaaggcctttcgccagggtttctattggccgacggctctcaacgatgcggttgacctggtccggcggtgcagggcgtgccagttccacgccaggcaaccccatcagccagcccaggccctgcagaccatacctctttcatggccgtttgctgtctgggggctcgatatcctgggtccgttcaggcgggcccctggcgggttcgagtatctgtatgtcgctatcgacaaattcactaagtggcctgaggcttatccggtcatcaagatcgataagcactccgcgcttaaattcatcaggggcatcactgctcggtttggggtgcctaaccgtatcattacggataacggcacccagttcactagtgaactcttcggtgactactgcgaagacatgggcatcaagctctgcttcgcctcccccgcccaccccagaagcaatggccaagtggagcgcgccaacgcggaaatcctcaagggcctcaaaaccaagaccttcaacatcctcaagaagcacggcgactcgtggatcgaggagctgccagcggtgctctgggcaaaccgaaccacgccaagccgagcaaccggggaaacgcctttcttccttgtctacggcgcggaggcggttctcccatctaagctcaccctgaggtcccctcgggccaccatgtattgcgaggctgatcaagatcagcttcgcagagacgacctcgactacttggaagagcgaaggcggcgcgcggccctccgagccgcgcgctaccagcagagcctgcggcgctaccatcagcgccacgtccgggcccgatcactctacgtcgacgacctcgtcctacgccgcgtccaaacgcgtgctggactgagcaagctctcaccaatgtgggaggtccgtatcgagtga

SEQ ID NO: 72672 - DNA, 2808 bp, Oryza sativa
  Clone ID: PAT_MRT4530_73028C.1
atggctgatcgcgatgaggaacagatattgtacgatacaatcgcggagggaagcagccagtactggaatgaaaaagatgggaaagaggatccaaaccagtatttgaacaaggaagggaacataacaagggcacgcggagatcatgagagctttgtcccagattcggagaaagagatgctgtggaccacaatgctcgagacattcacccttcccgcaggtacagaggacaaagtgaaaaggtggactctgaagaaaatggcagaacagtttcagagcttcaagggagagttgtacaagaaatatattctgaaggggcagacaccgaacttcgacacattcccaaagctaagggatcactgggacgagttcattgcatataagacaagtgaacaagggcaggcgatgatggaaagaaacaaagaaaatgccgccaagaagaagtaccatcgccacttggggccaggcggctatagcgtcgcgatgccgaagtgggaggagatggaggctaggttgcttgagaggggtatcgaaccggccaccgctaattggccggaacgatcgaagttctggtactatgctcacggtggaacactcaacccagctgatggctcactgactccagagcatccaggacgaacacaagggaaaggggtgattccttggaagattgggttcaaggaggatatccacacgtacaggagtcggatgaggagcaagagagataccgaggcgaagattgttgatcttgagttcagggtatcgagctacgagctcagcatgcaagaggaggtggcaaggaaggttgatgaacgcatggccgcacatcggtccaatgatccccagccgaccattcctcctgcaatggtgagcccgtcaggaaaccgtagcagctgcgcctcaacggggcaggtaggatcacagagcatggacgccatgcaaacccaagacgaatccacctgccccgttgatgacatcactcagcggacaccatgtgagctgcatattcctttcaagaacttatcaataaaggtggcgtcgggcatgaccatcccaacggacccttcaggtacttaccactgcaggccgattccagcaggatactccaaggtcgaagttgagttggtcgaaggcgcgtacgaggacctcgaactggattaccctggaggagacggtgagacgcatctacgagacacaagccatgcaattattctatggcgcaggctgtacatcatcctccctgggcgacaagcggcgtctcgtgcaccatcttctctggctccgccatctcctccggctccgccatctcctcctcaggatcctgcaccgtctcctcctcaggatcctgcaccgtctcctcctcatgctccagcaccgtctccacctcaggctcctgcaccgactcctcttcaggctcctgcaccgactcctcctcggtctcctacaccgactcctccgcaagctcctcttccggcaccttcaaagtcaagggccccccaggctccaccgcctgcccacagaagggcaacgaagaaggcaaaaattgacgccgccaagaacaaggacccggggtacgattgcacacaagaggagcttgacgcttacatggcatcagaagtcaagagacaattcaagcctcaaagtccagaaaagaagattcctatagacccgagtgtcatgaacttcttcaggggtatgtctgcacctgccaaggaggccattaagctatcggactatgagcgaacgctgaagaaagcatcttctggaaagtccaaactagtccctcagcttggagagcaaccaaaccaggagatcgagccgttggtgaccggtaaagaaatgacgatagaagaatttattactgacaccggtctaactacggatcaattgctaggagtcacaccaatcgaaaaggcggaagtgaaatacatgtacgaactcggtaaaccgcttgtcaagcctgagctgctgcagtccctacccacacaaatgtacaagttccatccgctgtacatggagatgagcgccaccggtagagagatgatcggagcgaggatcagggacacggacttcttgcaaggagatgacattctctggatcaatttcaagggaatctatgaactataccagctggacgccttcaacgtctctattatgagttgctggattttaatggagattcaaagggcccgacggcggggggttttcgatactggattcatcgaccctcggaaagtaaacgtcgcaatgctcgaccaatatccacaagccacagaggacaatctcgtccatctcctgaaggcgcagcattacaagacgttcatactgttgccgtacaacatagaattccactgggtgcttttactcttcgacctgtcggcctgcaccgtcaacgtatatgactcaatggataaaaaagagtctacgtttgacaaggttttcgaacttatagacagggcttggtatcggttccgtcatttggtccgcggtaaatggagagaaagacttaggcggaagttcaaatttccttgcgcaaagcaaaagaagggaactaacttgtgcggctattacgtgtgcgagtattgccactgccttgcagaccaaatcatcaccataagaaagctcaattttattcgcatgagggataacctgaccacgcacaaggaatttatcgcggcggttcaagaacaactcatgggattcatcaacgaacaaatccttgatcccaagggtgaattctactacgacggaaacacaattcataggtccttagcttctgagctagcgactactactacgtcgaaatcgtag

SEQ ID NO: 72673 - DNA, 4788 bp, Oryza sativa
  Clone ID: PAT_MRT4530_73029C.1
atggccgaacgggcagtggcgcacaacctctctctgagcgctagcggtgacgacagggagcagaacccgcgccgtcgagctcgtactccatcgtccccctctcgccgaagtcttgggcgggaggaggcgctcgagggggtcgaaagatctgcgatttcgccacccacgggtaatggaaaaggacggcgagacggagaatgtcgcctcctcgtctacggcgatggcagcacgccccagggcgcgctccaggctgcgggcgcgctcctgcgtcacccgcccgtcgtccccgatccagagactccagctcgacgttggctggatgacgtggccgacttggtcatgacggcgcagcagcgcctaggcgccggtgggcggtccttcgcccccaaggcctctggcgctgctaccaccggctccgtgtcgtcgaggcggagggtgcggcgagcggcggccgttacccgccgttcgtccgctattccctcgtcaacgcctccgacccaagaagatatctatacgacggggattgaggccgccgagggtgacgacagggtcatggcgaatttcttccccatggccctgaaaggtcaggcgcggggttggctgatgaacttgccacccgcgtcggtacactcttgggaggatttgtgccagcagttcaccatgaacttccagggcacatatccgcgcccaggtgaagaagcggacttgcacgcagtacagcgaggggacgatgagtctcttcactcgtacattcagcggttctgtcaagtccgcaacaccataccgtgcatccccgcccacgcggtgatctacgcgttcagggggggcgtgcggcacaatcgcatgctcgaaaagatcgcttccaaggagccccagaccaccgcggagctttttcagcttgcggaccgtgtggctcgcaaggaggaggcctggacctggaactcctctggttccggtgtggcagctccggccgcccccgggtccgccgctcggtcagggcggcgggacaggaggaggaagaagaggtcggcctatttcgacgacgaggggcacgtcctcgccgtcgagggcgcttcgcgggccacccgaaaggggaggcctgcgagcgacagaaagaaggaggccggcgctcccagcagggagcgcccgaccggcaagtggtgctccgtgcacaacacctccctccatgatctcgcggactgccgcgcggtcaaaagtttggctgagcggacgaggaagtgggaggaggagaggaggcaggagcgccgtgagggcaaggccccggcggcccccgccggcaaccggcgaggtgaggccaagcagaaggcccccgccgaggacgtcgacgatggcgacgataacctggggttccaggagcctcaggccactgtcgccaccgtcaatgggggagcgtgcgctcatgcttctcgccggagcctcaaggccatgaagcgagagcttctggccgcggcccctacccatgaggcgacgcggcgggcacgatggtcggaggtggccctcaccttcgaccagaccgaccacccgccgtgcgttgcccggggaggacagatcgcgatggtggtttcccccactatttgcaatgtgaaattgaggcgtgtcctcatagacgggggtgcagccctcaacatcctttcccccgcagcctttgacgcaatcaaggccccggggatggtgctccggccgtcccaaccgatcatcggtgtgacgccggggcacacttggccgctaggtcatatcgacctcccggtcacctttggtggttccgccaatttccgcacggagcgggtgaactttgatgtggcggacctcagtctgccctacaacgcggtcctggggagacccgcgttggtgaagttcatggcggcagtccactacgcctatctccagatgaagatgccgggccctggtggccccatcaccgtccatggcgacctccaagtcgcgcttgcttgtatggagcagcgcgcggaccagctcgccgcggcgtccaagcccgagggtggcgacgagaggctcagcgcctccgtcccggccgccccgaggcagcggatgatcacgtgcgacgaggtcccggaagacgcgctcgtctccttcctgcgggcaaacgccgacgtcttcgcctggagaccggcggacatgcccggggtccccagggaggtgattgagcaccgtctcgccgtgcggccgggcgcaaggccgatccggcagaaagtgcggcggcaggccccggaacgtcaagccttcatccgcgaggaggtggcgcgacttctggaggccggattcatccgtgaggtcatccatccggagtggctggtgaacccggtcgtcgtccccaaggcaaacggcaagcttcggatgtgcatcgactacaccgacctcaacaaggcatgtcctaaggacccttaccccttgccacgtatagatcagattgtcgactccaccgcggggtgcgaccttttgtgttttctagatgcatactctggttatcatcagattcgcatggctagggaggatgaggaaaaaactacattcatcacccccataggaacttattgttatacgacaatgcctttcgggttaaagaatgcaggacctacttttcaacgtaccactcgaatttctttgggtagccagttaggacgcaacgttgaggcttatgttgatgacttggttgtgaagacgcgcaaccaagagaccttactctcggatctagcggaaactttcgaaagtctccgctccgcccgcataaagctgaaccccgacaagcaaaacccgcaggtggtcagcgcggcgttggtcgtggagcgcgacgaggacaaccctcgctccgcgcacccccaacctgtgtcgactcgacccgggagagagcagggaggagaggcccccgagccgaacggcggcccgaggcccccgacggccggagctggccctctgcccgcttgtccgacggtgccaggcgccccagacccccaggatggccccggggccactgcgggaaggccgcgcttgtcgccctctgaccccgaggtcgtcggcacagaagccgagtgcgccccgcgcggcctctcggacgaagagcaccctgtatcgactcgacccgggagagagcagggaggagaggcccccgagccgaacggcggccgaggcccccgacgaccggagctggccctctgcccgcttgtccgacggtgccaggagcccccgacccccaggatggccccggggccactgcgggaaggccgcgcctgtcgccctccgaccccgaggtcgtcgacacagaagccgagtgcgccccgcgcggcctctcggacgaaaagcgccctggagatgcggctggcgaaggggatcggccccgccgaaaggaagttgcgccattatttccaagcgcatcgggtcacagtgtttacgtcttaccccctcggccaaatcttgcataaccgagagggtactggacgggtggtgaaatgggcaaatcgaactctgcactttgaaccacgccacgcgatcaagagccaggccctcgccgactttgtggcagagtggaccccagctcccgagcccgtctccatccccgaggccagctcgggcccctcgcagctgcctcacaccgcctactgggtgatgcagttcgacgggtccctgtctcttcagggtgccggtgcgggggtcacattgacctcgccgagcggagacgtcctcagatacctggtccgcctcgactttcgggcgaccaacaatatggcagagtacgagggactccttgcgggactcagggtggcaactggactggggatccgccgcctcctggtgttaggcgactcccaactggtcgttaaccagggcgtgccagttccacgccaggcaaacccatcagcagcacaggccctgcagaccatacctctttcatggccgtttgctgtctgggggctcgatatcctgggtccgttcaggcgggcccctggcgggttcgagtatctgtatgtcgctatcgacaaattcactaagtggcctgaggcttatccggtcatcaagatcgataagcactccgcgcttaaattcatcaggggcatcactgctcggtttggggtgcctaaccgtatcattacggataacggcacccagttcactagtgaactcttcggtgactactgcgaagacatgggcatcaagctctgcttcgcctcccccgcccaccccagaagcaatggccaagtggagcgcgccaacgcggaaatcctcaagggcctcaaaaccaagaccttcaacatcctcaagaagcacggcgactcgtggatcgaggagctgccagcggtgctctgggcaaaccgaaccacgccaagccgagcaaccggggaaacgcctttcttccttgtctacggcgcggaggcggttctcccatctaagctcaccctgaggtcccctcgggccaccatgtattgcgaggctgatcaagatcagcttcgcagagacgacctcgactacttggaagagcgaaggcggcgcgcggccctccgagccgcgcgctaccagcagagcctgcggcgctaccatcagcgccacgtccgggcccgatcactctacgtcgacgacctcgtcctacgccgcgtccaaacgcgtgctggactgagcaagctctcaccaatgtgggagggtccgtatcgagtgatcggcgtcccccggctgggctccgttcggctggccacgggcgacggcacagagctgcctaacccgtggaacatcgaacaccttcgtcgcttctacccctag

SEQ ID NO: 72674 - DNA, 2805 bp, Oryza sativa
  Clone ID: PAT_MRT4530_7302C.1
atgttagaaggcatcagtggctgggaacttagaccatcattccgtggcccacgtcttcctcgttggatggaaagtggggtttcatcgttcaatgagtttattcatgaactctctgtcgattctgatggtgaatcagttactgactcgatccctggggatgatgaaaacgaagattttatatgtccttcatctccattgtcccaaagttcacgattatcacatacaagcagtttcagtaggcgtgatcgccgcttgagaagacctattagatatgcaatttcatggattctttggcctgccagatttcttgtctctttgctggtgattctgttcaacgctatcaaatttcggatcatgcagacatctaataaacccccagaaagtccccatatttctaggaacttccgttctaggagagggcttcacattaaggatcaagttctccaacgaacaactgacaggaggcgtggagttgttgaggacctccatcttgcaattgagattttcatcgaatcagtgtttgacattgttcataaaggcgcgcattatgttctttctccttctgaggtgtggaagaaattattttgctggattcatggcagcagtagccctgttgttgatgtaccaacagctaatgttggcagtgacaatccagccccaactgaaaggaagactatatatcgccatcctttgaacacggattctcggacatgtgaagatgttatcactgagcttgggtacccttttgaggctataaaagttgttacttcagatggatatgtcctactgctggagagaattccaagagagggagaagcgaagcgaggtgagcggaaacgcggccagctgctgtggcagcaaaagcgagaggcaaaggggagagagagaagggaagcgcggcgaggaggtggaggaggccggaggcgggcgatggcgaggcaaggtgtcgtcggcggtggcggctgcgagattatgcatgctggtagcggcagcggcatcattatcaagtcgacgaccacgccggcggtgagcccctaccaggtcttcctcaccggctgcgaccacctccacaactacctcttcctcacccttgatgcaccagttgggcacccgtcgggcatgcctgtgcccgacgggcatgggcacgtgcatgagattttacccgatagactttgcgggcttgggtatcgaatggtgttgttggctcacctgcatttgcagcatatgatcaagatgtatggagtgaatgctaaaaatcctttatgggtgaatgcaggttatgatgtttttcttggaaatctgcgtggtttagtctccagggagcatgttgataaaaatatttcttcctacaagtactggaaatattctgttaatgaacatggaaccaaagatatgccagcaattgttgaagaaattcacaagattaaaacttcagaacttggcaaaagtagacctcacataagtgaggaaacagaagatcaaaacgataagataaaaaatttggaagtgcaggcttcacaggacgatgaaagagacaatcaaccatacaagctttgtgctgtctgccacagcttgggtggtgcggtgatgttaatgtatgtggtgacatcaaggattgcgcagaagccccacaggttatcaagattggtcttgctatctcctgctggctttcatgaggattctaatgtggtgttcagcatggtagaaaagctcattttgtttgttggaccagtactagctccatttatacctggcctttacataccaacacgtttcttccggatgctactgaacaaattggccagggatttcaacaactatccagctttgggcggccttgtccaaactcttatgggctatgtagttggcggtgacagttcaaattgggtgggagtgctcgggttgccacactacaacatggatgacatgcctggtgtatcattccatgttgcacttcaccttgcacaaataaagagggcaaaaaggttccaaatgtatgactatggaagtccagtagcaaatatggaagcatatggaacaccagaacccttggacctgggagctcattatggtctgattgacatcccagtagatttagtcgctgggcaaagagacagagttatctcaccatccatggtaaagaagcactataagctgatgcgcaaggctggtgtagaggtttcctacaatgaattcgagtacgcccacttggatttcacattctcccatagggaggagcttttgtcctatgttatgtcccgcctgctcttagtgtctgacccaggtaaaggccgcatcaagcagactagtgtccgccttagaaagctgaagaaagctcagtcagaaattgagaatgactctgacagcaaggagcacaatggcatagataatgtggttacagatgagcaaaatgggcatgtgcatgctgcgtgatgtgatcatgtggaatatgctgaacatttgttgttagtttgtgaatagaacacgtgctgcctctggcatataccttctgcaacatgtagaagatgtgaggatggatagagcccagttctttctagcagtagttgtgttgatggggattgttttttatgtatccctgtaggagaacaagacaagtatatgtaatacatgaatagtggctatagtgttgttcatatatatcaagaactgacagggagaagctaccggtgttaaggatgtagatttttgcacttaacgcgtgctttcgtgtgttcgcgttttgtttttgctcttcctgtgaagaggtgatcgaaatgcagtttcttaaaaaaaaaaaaaaaaaaa

SEQ ID NO: 72675 - DNA, 3039 bp, Oryza sativa
  Clone ID: PAT_MRT4530_73030C.1
atggctgaccacaatgaggaacagatattgtacgatacaatcgcggagggaagcagccagtactggaatgaagaagaggggaacgaggatccaaaccagtacttgaacgaggaagggaacgtggagagggatgcggaggggaaccagcaggggcacgtggaaagggatgtggaggggaaccaggaggaggaggctagtggtagtcaaccctccgttagacagaagagggcacgcgggcaacgaggtgcagcgaagaagcttgagggtcggcacatcataacggaagtggaagaagatggacgtcctagtgccccggccgaagccgccaagaactatgtacgtcacagcggttgggttgtgcgggataacgtgcctgtcagtacggtgtactggcgaagaacaagggcacgcggagatcatgagagctttgtcccagattcggagaaagagatgttgtggaccacaatgctcgagacattcacccttcctgcgggtacagaggacaaagtgaaaaggtggactctgaagaaaatggcagaacagtttcagagcttcaagggagatttgtaccagaagtatatcctgaaggggcagacaccgaacttcgacacattcccaaagctaagggatcactgggacgagttcgttgcatataagacaggtgaacaagggcaggcgatgatggaaagaaacaaagaaaatgccgccaagaagaagtaccatcaccacttggggtcaggaggctatagcgtcgcgatgccgaagtgggaggagatggaggctagcttgattgagaggggtatcgaaccggcaacagtcaattggccggaacgatcgaagttctggtactatgctcacggtggaacgctcaacccagctgatggctcactggtcttcggctatcagatacaagaggctgcgcgacgactaacagatgcagtggaagcctcctctcagggcacgttccgaccagacagagatagggacgagctgacactcgccctgcagactccagagcatccaggacgaactcgagggaaaggggtgattccttggaagattggtttcaaggaggacatccacacgtacaggagtcggatgaggagcaagagagataccgaggcgaagattgcagacctagagttccgggtatcgagctacgaactcaacatgcaagaggaggtagcaaggaaggttgatgaacgcatggccgcacatcggtcccatgatccccagccgaccattcctcctgcaatgatgagcccgtcaggaaaccgtagcagctgcgcctcaacggggcaggtaggatcacagagcatgaacgccatgcaaacacaggacgaatcgacctgtcccgttgatgacatcactcagcggacaccatgtgagctgcatattcctttcaagaacttatcaataaaggtggcgtcgggcatggccatcccaacggacccttcaggtacttaccactgcaggccgattccagcaggatactcgaaggtcgaagttgagttggtcgaaggagcctacgaggacctcgagctggattaccctggaggagacggatcctataccgtctcctcctcatgctccgccagcaccgtctccacctcaggctccagcatcgactcctcctcaggatcctgcaccgactcctcctcgtgctcctacacctactcctccgcaagctcctcttccggcaccttcaaagtcaagggccccccagctccaccgcctgcccacacaagggcaacgaagaaggcgaaagttgacaccgctaagaacaaggacccggggtacgattgcacgcaagaggagcttgacgcttacgttgcatcagaagtcaagagacaattcaagcctcgaaggccagaaaagaagattcctatagaccccagtgtcaggaacttcttcaggggtatgtctgcacctgtcaaggaggccatcaagctatcggactatgagcgaacactgaagaaagcatcttttggaaagtccaaaccagtccctcagcttggagagcaaccaaaccaggagatcgagccgttggtgaccggggaagacatgacgatagaagaatttattattgacaccggtctaactacggatcaattgctaggagttgaaccaatagaaaaggcggaattgaaatacatgtacgaactcggtaaaccgcttgtcaagcccgagctggtgcagtccctacccacacaaatgtacaagttccatcagctgtacgtggagatgagcgccaccggtagagagatgatcggagcgaggatcagggacccggacttcttgcaaggagatgatattctctggatcaatttcaagggaatctacgaagtataccagctggacgccctcgacgtctctattatgagttgctggactttaatggagattcaaagggcccgatggcggagggttttcgatactggattcatcgaccctcggagagtaaacgttgcaatgctcgaccaatatccgcaggaaacagaggacaatctcgtccatctcctgaaggcgcagcattacaagacgttcatactgttgccgtacaacacagaattccactgggtgcttttactcttcgacctgtcggcctgcaccgtcaacgtatatgactcaatggataaaaaagagtctacgtttgacaaggttttcgaacttatagacagggcttggtttcggttccgtcatttggtccgcggcaactggagagaaagacttaggcggaggttcaaatttccttgcgcaaagcaaaagcagggaactaacttgtgcggctactacgtgtgtgagtattgccactgccttgcagaccaaatcatcaccacaagagagctcgattttattcgcatgagggataacctgaccacacacaaggaatttatcgcagcggttcaagaacaactcatgggattcatcaacgaagaaatccttgatcccaagggtgaattctactacgacggaaacacaattcaccggtccttagcttctgagctagcagcgactactactacgtcgaaatcgtag

SEQ ID NO: 72676 - DNA, 5682 bp, Oryza sativa
  Clone ID: PAT_MRT4530_73031C.1
atggccgaacgggcagtggcgcacaacctctctccgagcgctagcggtgacgacagggagcagaacccgcgccgtcgagctcgtactccatcgtccccctttcgccgaagtcttgggcgggaggaggcgctcgagggggtcgaaagatccgcgacttcaccacccacgggtaatgaagaaggacggcgagacggggagtgtcgcctcctcgtctacggcgatggcagcacgccccagggcgcgctccaggctgcgggcgtgctcctgcgtcacccgcccgtcgtccccgatccagagactccagctcgacgttggctggatgacgtggccgacttggtcatgacggcgcagcagcgcctaggcgccggcgggcggtccttcgcccccaaggcctctggcgctgctaccaccggctccgtgtcgtcgaggcggagggcgcggcgagcggcggccgttacccgccgttcgtccgctattccctcgtcaatgcctccgacccaagaagatgtgcgtggggggccggatgcccgcctcaatattgagcgccgacgcaatggtcgtcgtgctgcccacgcaacgaagggcgcttcctcgtccggagcgccacctcggtccgggcatgggggccagcctcccatgtccccggttggcggtgccggctgtcgagcctttgtggcgagcctttggaacgtccgttggcccccaaggttccggcccaccatcaccgaaaaatacgacggaagcgtcaaccccgccgagtttctccagatctatacgacggggattgaggccgccgggggtgacgacagggtcatggcgaatttcttccccatggccctgaaaggtaaggcgcggggttggctgatgaacttgccaccagtacactcttgggaggatttgtgccagcagttcaccatgaacttccagggcacatatccgcgcccaggtgaagaagcggacttgcacgcagtacagcgagaggacgataagtctcttcgctcgtacattcagcggttctgtcaagtccgcaacaccataccgtgcatccccgcacacgcggtgatctacgcgttcagggggggcgtgcggcacaatcgcatgctcgaaaagatcgcttccaaggagccccagaccaccgcggagctttttcagcttgcggaccgtgtggctcgcaaggaggaggcctggacctggaactcctctggttccggtgtggcagctccggccgcccccgggtccgccgctcggtcagggcggcgggacaggaggaggaagaagaggtcggcctatttcgacgacgaggggcacgtcctcgccgtcgagggcgcttcgcgggccacccgaaaggggaggcctgcgagcgacagaaagaaggaggctggcgctcccagcagggagcgcccgaccggcaagtggtgctccgtgcacaacacctccctccatgacctcgcggactgccgcgcggtcaaaagtttggctgagcggacgaggaagtgggaggaggagaggaggcaggagcgccgtgagggcaaggccccggcggcccccgccggcaaccggcgaggtgaggccaagcagaaggcccccgccgaggacgtcgacgatggcgacgataacctggggttccaggagcctcaggccactgtcgccaccgtcgatgggggagcgtgcgctcatgcttctcgccggagcctcaaggccatgaagcgagagcttctggccgcggcccctacccatgaggcgacgcggcgggcgcgatggtcggaggtggccctcaccttcgaccagaccgaccacccgccgtgcgttgcccggggaggacagatcgcgatggtggtttcccccaccatttgcaatgtgaaattgaggcgtgtcctcatagacgggggtgcagccctcaacatccattcccccgcagcctttgacgcaatcaaggccccggggatggtgctccggccgtcccagccgatcatcggtgtgacgccggggcacacttggccgctaggtcatatcgacctcccggtcacctttggtggttccgccaatttccgcacggagcgggtgaactttgatgtggcggacctcagtctgccctacaacgcggtcctggggagacccgcgttggtgaagttcatggcggcagtccactacgcctatctccagatgaagatgccgggccctggtggccccatcaccgtccatggcgacctccaagtcgcgcttgcttgtatggacagcgcgcggaccagctcgacgcggcgtccaagcccgagggaagacgcgctcgtctccttcctgcgggcaaacgccgacgtcttcgcctggagaccggcggacatgcccggggtccccagggaggtgattgagcaccgtctcgccgtgcggccgggcgcaaggccgatccggcagaaagtgcggcggcaggccccggaacgtcaagccttcatccgcgaggaggtggcgcgacttctggaggccggattcatccgtgaggtcatccatccggagtggctggcgaacccggtcgtcgtccccaaagcgaacggcaagcttcggatgtgcatcgactacaccgacctcaacaaggcatgtcctaaggacccttaccccttgccacgtatagatcagattgtcgactccaccgcggggtgcgaccttttgtgttttctagatgcatactctagttatcatcagattcgcatggctagggaggatgaggaaaaaactgcattcatcacccccataggaacttattgttatacgacaatgcctttcgagttaaagaatgcaggacctacttttcaacgtaccactcgaatttctttgggtagccagttaggacgcaacgttgaggcttatgttgatgacttggttgtgaagacgcgcaaccaagagaccttactctcggatctagcggaaactttcgaaagtctccgctccgcccgcataaagctgaaccccgacaagtgcgtgttcggtgtgcctgcgggcaagcttctcgggttcttggtcactgcccgaggcatcgaggccaaccccgagaagatacgagctatagagcggatgcgcccccccagcaaacttagggatgtgcaatgcgtcatcggctgcatggccgccctaagtcggttcatatcgaggttgggagagaaggcgctacccctatttaagctcctcaaacgttccgggccgtttacttggacggaggaggctgaacaggccctcactcagttgaaggcgtaccttagttctcccccggtcctggtcgccccgaaaccagatgaaccgttgctactttacctggcggcaaccccgcaggtggtcagcgcggcgttggtcgtggagcgcgacgaggacaaccctcgctccgcgcacccccaccctgtgtcgactcgacccgggagagagcagggaggagaggcccccgagccgaacggcggcccgaggcccccgacggccggagctggccctctgcccgcttgtccgacggtgccaggcgcccccgacccccaggatggccccggggccactgcgggaaggccgcgcttgtcgccctctgaccccgaggtcgtcggcacagaagccgagtgcgccccgcgcggcctctcggatgaagagcaccctgtatcgactcgacccgggagagagcagggaggagaggcccccgagccgaacggcggcccgaggcccccgacgaccggagctggccctctgcccgcttgtctgacggtgccaggagaccccgacccccaggatggccccggggccactgcgggaaggccgcgcgtgtcgccctccgaccccgaggtcgtcgacacagaagccgagtgcgccccgcgcggcctctcggacgaaaagcgccctggagatgcggctggcgaaggggatcggccccgccgaaaggtgcagcggcccgtctacttcgttagtgaggtcctccgggacgccaagacccgataccctcaggcccagaagatgctttacgctattctgatggcttcgaggaagttgtgccattatttccaggcgcatcgggtcacagtggttacgtcttacccccttggtcaaatcttgcataaccgagagggtactggacgggtggtgaaatgggcagtcaaactctctgagttcgatttgcactttgaaccacgccacgcgatcaagagccaggccctcgccgactttgtggcagagtggaccccagctcccgagcccgtctccatccccgaggccagctcgggcccctcgcagctgcctcacatcgcctactgggtgatgcagttcgacgggtccctgtctcttcagggtgccggtgcgggggtcacattgacctcgccgagcggagacgtcctcagatacctggtccgcctcgactttcgggcgaccaacaatatggcagagtacgagggactccttgcgggactcagggtggcaactggactggggatccgccgcctcctggtgttaggcgactcccaactggtcgttaaccaggtctgtaaggagtaccagtgctctgacccgcagatggacgcttacgtgcgccaggtgcggcgtatggagcgccatttcgacgggatagagcttcggcacgtgcccagacgggataacgcgctcgccgacgagctctcaaggctcgcttcctcgcgagcccagaccccaccgggcgcctttgaagaaaggcttgcccagccgtcggcgcgacccgaccccctaggggagacggacgcgcctgaacggcccccgaggcccgtcggagtccaggcctcgggactcgaggggagcgctcccagctcccttagatcgattgcttggatcactgagatccaggtgtacctcacagataagactctacccgaggaccgcgaagggagtgaacgcgtccagcgcatctccaagcgctacgtgctggtagaagggaccctctatcgacgcgcggctaacggagtcctcctgaagtgcattcctcgggaacaaggcgtcgagcttcttgccgatatccatgaaggtgaatgcggagcccactccgcctcacgcaccttggttggcaaggcctttcgccagggtttctattggccgacggctctcaacgatgcggttgacctggtccggcggtgcagggcgtgccagttccacgccaggcaaccccatcagccggcccaggccctgcagaccatacctctttcatggccgtttgctgtctgggggctcgatatcctgggtccgttcaggcgggccccgggcgggttcgagtatctgtatgtcgctatcgacaaattcactaagtggcctgaggcttatccggtcatcaagatcgataagcactccgcgcttaaattcatcaggggcatcactgctcggtttggggtgcctaaccgtatcattacggataacggcacccagttcactagtgaactcttcggtgactactgcgaagacatgggcatcaagctctgcttcgcctcccccgcccaccccagaagcaatggccaagtggagcgcgccaacgcggaaatcctcaagggcctcaaaaccaagaccttcaaaatcctcaaagcacggcgactcatggatcgaggagctgccagcggtgctctgggcaaaccgaaccacgccaagccgagcaaccggggaaacgcctttcttcctcgtctacggcgcggaggcggttctcccatctga

SEQ ID NO: 72677 - DNA, 2334 bp, Oryza sativa
  Clone ID: PAT_MRT4530_73032C.1
atggctgatcgcgatgaggaacagatattgtacgatacaatcgcggagggaagcagccagtactggaacgaagaagaggggaacgaggatccaaaccagtatttgaacgaggaagggaacgtggagagggatgcggaggggaaccaggaggagcacgtggagagggatgtggaggggaaccaggaggaggaggctagtggaagtcaaccctccgctggacagaagagggcacgcgggcaacgaggtgccgcaaagaagcttgagggtcggcacatcataacggaagtggacgaagacggccgacctagtgccccggcagaagccgccaagaactatgtacgtcacagcggttgggttgtgcgggataacgtgcctgtcagtacggtgtactggcgcagaacaagggcacgcagagatcatgagagctttgtcccagattcggagaaagagatgatgtggaccacaatgctcgaaacattcacccttcccgcgggtacagaggacaaagtgaaaaggtggactctgaagaaaatggcagaacagtttcagagcttcaagggagatctgtaccagaaatatatcctgaaggggcagacaccgaacttcaacacattcccaaagctaagggatcactgggacgagttcgttgcatataagacaggtgaaaaagggcaggcgatgatggaaagaaacaaagaaaatgctgccaagaagaagtaccatcaccacttggggtcaggcggctatagcatcgtgatgccgaagtgggaggagatggaggctagcttgcttgagaggggtatcgaaccggccaccgctaattggccggaacgatcgaagttctggtactatgctcacggtggaacgctcaacccagctgatggctccctgggcacgttccgaccggacagagagaaggacgagctgtcactcgccctgcagactccagagcatccaggacgaacacgagagaaatgggtgattccttggaagattgggttcaaggaggacatccacacgtataggagtcggatgaggagcaagagagataccgaggcgaagattgcagatcttgagttcagggtatcgagctacgagctcagcatgcaagaggaggtggcaaggaaggtggcgtcgggcatggccatcccaacggacccttcaggtacttaccactgtaggccgattccagcaggatactccaaggtcaaagttgagttggtcgaaggcgcgtacgaggacctcgagctggattaccctggaggagacggctcctgcaccgactcctcctcaggctcctacaccgactcctcctcaagctcctcttccggcaccttccaagtcaagggcccccaagctccaccgcctgcccccacaagggcaacgaagaaggcgaaagttgacaccgccaagaacaaggacccagggtacgattgcacgcaagaggagcttgacgcttacgtggcattagaagtcaggagacaattgaagcctcgaagtccagaaaagaagattcctatagacccgagtgtcaggaacttcttcaggggtatgtatgcacctgccaaggaggccataaagctatcggactatgagcgaacactcaagaaagcatcttctggaaagtccaaaccagtccctcagcttggagagcaactaaaccaggagatcgagccgttggtgaccggtgaagattttggaatacaagactttattaatgacaccggactaactacggatcaattgctacgagacgcaccaatcgaaaaggcggaagtgaaatacataatggagattcaaagggcccgacggcggggggttttcgatactggattcatcgaccctcggaaagtaaacgttgcaatgctcgaccaatatccgcaagccacagaggacaatctcgtccatctcctgaaggcgcagcattacaagatgttcatactgttgccgtacaacacagaattccactgggtgcttttactcttcgacctggaggcctgcaccgtcaacgtatatgactcaatggataaaaaagagtctacgtttgacaagtgcgcaaagcaaaagcagggaattaacttgtgcggctactacatgttcgagtattgccactgccttgcagaccaaatcatcaccacaagagagcttgattttattcgcatgagggataacctgatcacacacaaggaatttatcgcggcggttcaagaacaactcatgggattcatcaacgaacaaatccttgatcccaagggtgaattctactacgacggaaatacaattcataggtccttatcgtctgagatagcgactactactacgtcaaaatcgtag

SEQ ID NO: 72678 - DNA, 1014 bp, Oryza sativa
  Clone ID: PAT_MRT4530_73033C.1
atgacgacgtcttgctgttccgtcttgctgttctcgcgggcatgtgagcatgaagacgacggcaccacattgttgatggcccaagcttgcgagctcaacgacaaccccgttgtcgtgccatctcttgtctccctcgttgaatcgctcatgcagatgagcctaggagccgcagactcaaggacaaggaggcatggcgcaagttgcatgatccacacagacaacggtcacgagttcaagtggcttgagttcactgcctgctacactgatgaggggatccagcatcacttgtccacgccctacgtcgcgcagcaaaatgacgtggtcgagcagtggaatcagacggtggtgtccatggcgtgcgcaatactcgagcagaggggaatgtctattgagttttgggggaaggctgtcagcacgactgtcttcctcaatcacatgccaaccaagagccttatcggcaatatgccatgtgaagcaaagcacggtaagaagccgactgtcaacttccagcgcaccttcgagtgcctggtgtttgtgaaggagctaaacgatgcacgcaagctcgacgagcgcagcatacccgacttcttcatcggctacgaagaagggatgaaggcgtatcgtgtccttgatccaaggatacgcgtgtatgtctcacttgaaatgtcatctttgacgagagccacgggtgggatcaaacgacaagaagcggcacaagtgtgccaccaagcagtgatttcgccatcgagtaccatgttgagaacaccaccaagcatcctatgcctggtttgggggaggcacagggaccccatcaacgtccccagtgcaattgcaggagacttcacctgcaaaccatgccacgctggcaccaagtccaagcgctaccctgacaaagttcgtgtcacctcacacgacgagaggattgacgcagcgcactttgacacccttgtccgctaccgtaccgttgacaacttggtcgaggagaacgttccggcaccagggcttgcacaatag

SEQ ID NO: 72679 - DNA, 1253 bp, Oryza sativa
  Clone ID: PAT_MRT4530_73034C.1
atggctcgtgctgggctaacccacaagcaggaatccgaagagggaggccagctgattggagtcgtacgccggcgagggagggagcgccacgcgctgggtgacgccgtggggtcagggagcggagcagagaagagctgggcgtgggggcggggcggtggcagtcgtgtacggcggcggcggcagtcgtgtacggcggcggcggcggccttcttctgctgtacctggtgccgcatagccacgccagccgttgctccgccatcgcgccagccgccgctcctgcacgagtgcgccaccgcgtcgcgcgctgccctgcgatgcatcgccggccccccgccgtcgttcaagcgccagcgcccggagtacttcgacatgccttctggacagggaaacagcctcttccacgaagcaatgagcccccattatgtccatcgcttgaacaatcagatgtcctatgctgctggtgctaaccaaagtgctattccacttggtgggatggccacatattcagcaggcatggacagtggaaaccatggcgctacaataactgaatcaagaactctctatgtggaaggactaccttcgaactgcacaaagagagaggttgcacatatctttcgcccctcgcctttctggtttctttgaggtgagattggtcaacaaggagattaggcatgtggaaggtatataatctcttgtgttttgttgattttgcatctcctcctgaagctcgtgctgctctggagactctgcaaggctataagtttgatgaacatgaccatgagtcttccaacctgcgcatacaattctctctcactcctcgcaggaggccaattggttggtatggatgtgttgataactattggttggatggaaacaaagtagatggggctgaaaaattgtttaatcatgtgctgtgtgatctgaattacatctattcttctgtggatgattgcaatgagtacatacatggtgcatcggcacatattgtttgcaggttgatttcatggtgcaagactgctcctgtaccatttcttacaaaaaggatttcgatggcaatgttggctgaaaaatgttgtgttgtgcctggaagatgctatgtcactgaatccccagcaacaacaacagggcacacctatagacttgtagcattactagaaacaacaatatgcatgtgttttctggagatggataagctactgcacagattgagatgcatttttgttgcatctgcaggacatgttgtgattgagtga

SEQ ID NO: 72680 - DNA, 3096 bp, Oryza sativa
  Clone ID: PAT_MRT4530_73035C.1
atggaaattccgggcgtgacattcggcgtgcctgcgggcaagcttctcgggttcttggtcactgcccgaggcatcgaggccaaccccgagaagatacgagctatagagcggatgcgcccccccagcaaacttagggatgtgcaatgcgtcaccggctgcatggccgccctaagtcggttcatatcgaggctgggagagaaggcgctacccctatttaagctcctcaaacgttccgggccgtttacctggacggaggaggctgaacgggccctcactcagttgaaggcgtacctcagttctcccccggtcctggtcgccccgaaaccagatgaaccgttgctactttacctggcggcaaccccgcaggtggtcagcgcggcgttggtcgtggagcgcgacgaggacaaccctcgctccgcgcacccccactctgtgtcgactcgacccgggagagagcagggaggagaggcccccgagccgaacggcggcccgaggcccccgacggccggagctggccctctgcccgcttgtccgacggtgccaggcgcccccgacccccaggatggccccggggccactacgggaaggtcgcgcttgtcgccctctgaccccgatgtcgtcggcacagaagccgagtgcgccccgcgcggcctctcggacgaagagcaccctgtgtcgactcgacccgggagagagcagggaggagaggcccccgagccgaacggcggcccgaggcccccgacgaccggagctggccctctgcccgctagtccgaaggtgccaggcgtccccgacccccaggatggccccagggtcactgcgggaaggccacgcctgtcgccctccgaccccgaggtcgtcgacacagaagccgagtgcgccccgcgcggcctctcggacgaaaagcgccctggagatgcggctggcgaagaggatcggccccgccgaaaggtgcagcggcccgtctacttcgttagtgaggccctccgggacgccaagacccgataccctcaggcccagaagatgctttacgctattctgatggcttcaaggaagttgcgccattatttccaggcgcatcgggtcacagtggttacgtcttaccccctcggccaaatcttgcataaccgagagggtactggacgggtggtgaaatgggcaatcgaactctctgagttcgatttgcactttgaaccacgccacgcgatcaagagccaggccctcgccgactttgtggcagagtggaccccagctcccgagcccatctccgtccccgaggccagctcgggcccctcgcatctgcctcacaccgcctactgggtgatgcagttcgacgggtccctgtctcttcagggggccggtgcgggggtcacattgacctcgccgagcggagacgtcctcagatacctagtccgcctcgactttcgggcgaccaacaatatggcagagtacgagggactccttgcgggactcagggtggcagctggactggggatcctccgcctcctggtgttaggcgactcccaactggtcgttaaccaggtctgtaaggagtaccggtgctctgacccgcagatggacgcttacgtgcgccaggtgcggcgtatggagcgccatttcgacgggatagagcttcggcacgtgcccagacgggataacgcggtcgccgacgagctctcaaggctcgcttcctcgcgagcccagacccccccgggcgcctttgaagaaaggcttgcccagccgtcggcacgacccgaccccctaggggagacggacgcgcctgaacggcccccgaggcccgtcggagtccaggcctcgggacccgaggggagcgctcccagctcccttagattgatcgcttggatcgctgagatccaggcgtacctcacagataagactctacccgaggaccgcgaagggagtgaacgcgtccagcgcatctccaagcgctacgtgctggtggaagggaccctctatcggcgcgcggctaacggagtcctcctgaagtgcatttcttgggaacaaggcgtcaagcttctcgccgatatccatgaaggtgagtacggagcccactccgcctcacgcaccttggttggcaaggcctttcgccagggtttctattggccgacggctctcaacgatgcggtcgacttggtccggcggtgcagggcgtgccagttccacgccaggcaaacccaccagctggcccaggccctgcagatcatacctctttcgtggccgtttgctgtctgggggctcgatatcctgggtccgttcaggcgggccccgggcgggttcgagtatctatatgtcgctatcgacaagttcactaagtggcccgaggcttatccggtcgtcaagatcgataagtactccgcgcttaaattcatcaggggcatcactgctcggtttggggtgcctaaccgtatcattacggataacggcacccagttcactagtgagctcttcggtgactactgcgaagacatgggcatcaagctctgcttcgcctcccccgcccaccccagaagcaatggccaagtggagcgcgccaatgcggaaatcctcaagggccttaaaaccaagaccttcaacatcctcaagaagcacggcgactcgtggatcgaggagctgccagcggtgctctgggcaaaccgaaccacgccaagccgagcaactggggaaacgcctttcttcctcgtctacggcgcggaagcggttctcccatctgagctcaccctgaggtcccctcgggccaccatgtattgcgaggctgatcaaaatcagcttcgcagagacgacctcgactacttggaagagcgaaggcggcgcgcggccctccgagccgcgtgctaccagcagagcctgcggcgctaccatcagcgccacgtccggacccgatcactctgcgtcgacgacctcgtcctacgccgcgtccaaacgcgtgctggactgagcaagctctcaccaatgtgggagggtccatatcgagtgatcggcgtcccccggccgggctccgttcggctggccacgggcgacggcacagagctgcctaacccgtggaacatcgaacaccttcgtcgcttctacccctag

SEQ ID NO: 72681 - DNA, 2766 bp, Oryza sativa
  Clone ID: PAT_MRT4530_73036C.1
atggcgaccgaagcggagagaggcggcggcgcggctcgggtcgacgaggacggcggcgttccggcggtcggcgggcgaaacgaaggggtagacgagatcggcgaggacgcggcgatgccgaagcaggcgatgccgaagcgggaggagatggctgaccgcgatgaggaacagatattgtacgatacaatcgcggagggaagtagccagtactggaatgaagaagaggggaacgaggatccaaaccagtacttgaacgaggaagggaacgtggagagggatgcggaggggaaccagcaggggcacgtggaaagggatgtggaggggaaccaggaggaggaggctagtggtagtcaaccctccgttggacagaagagggcacgcgggcaacgaggtgcagcgaagaagcttgagggtcggcacatcataacggaagtggaagaagatggacgtcctagtgccccggccgaagccgccaagaactatgtacgtcacagcggttgggttgtgcgggataacgtgcctgtcagtacggtgtactggcgaagaacaagggcacgcggagatcatgagagctttgtcccagattcggagaaagagatgctgtggaccacaatgctcgagacattcacccttcctgcgggtatagaggacaaagtgaaaaggtggactctgaagaaaatggcagaacagtttcagagcttcaagggagagttgtacaagaaatatatcctgaaggggcagacaccgaacttcgacacattcccaaagctaagggatcactgggacgagtttgttgcatataagacaggtgaacaagggcaggcgatgatggaaagaaacaaagaaaatgccgccaagaagatgtaccatcaccacttggggtcaggaggctatagcgtcgcgatgctgaagtgggaggagatggaggctagcttgattgagaggggtatcgaaccggcaaccgccaattggccggaacgatcgaagttctggtactatttgggccgggaaacgatcgaagttctgggcacgttccgaccggacagagatagggacgagctgacactcgccctgcagactccagagcatccaggacgaacacgagggaaaggggtgattccttggaagattggtttcaaggaagacatccacacgcacaggagtcggatgaggagcaagagagataccgaggcgaagattgcagatctagagttccgggtatcgagctacgacctcagcatgcaagaggaggtggcaaggaaggttgatgaacgcatggccgcacatcggtcccatgatccccagccgaccattcctcctgcaatggtgagcccgtcaggaaaccgtagcagctgcgcctcaacggggcaggtggtgtcaggcatggccatcccaacggacccttcaggtacttaccacagcaggccgattccagcaggatactcgaaggtcgaagttgagttggtcgaaggcgcgtacgaggacctcgagctggattaccctggaggagacggatcctgcaccgtctcctcctcatgctccgccagcaccgtctccacctcaggctccagcaccgactcctcctcaggatcctgcaccgactcctcctcgggctcctacacctactcctccgcaagctcctcttccggcaccttcaaagtcaagggccccccagctccaccgcctgcccacacaagggcaacgaagaaggcaaaagttgacgccgccaagaacaaggacccggggtacgattgcacgcaagaggagcttgacgcttacgttgcatcagaagtcaagagacaattcaagcctcgaagtccagaaaagaagattcctgtagaccccagtgtcaggaacttcttcaggggtatgtctgcacctgtcaaggaggccatcaagctatcagactatgagcgaacgctgaagaaagcatcttctggaaagtccaaaccagtccctcagcttggagagcaaccaaaccaggagatcaagccgttggtgaccggggaagacatgacgatagaagaatttattattgacaccagtctaactacggatcaattgctaggagttgaaccattagaaaaggcggaattgaaagacatgtacaaactcggtaaaccgcttgtcaagcccgagctggtgcagtccctacccacacaaatgtacaagttccatcagttgtacatggagatgagcgccaccggtagagagatgatcggagcgaggatcagggacccggacttcttgcaaggagatgatattctctggatcaatttcaagggaatctatcaagtataccagctggacgccctcgacgtctctattatgagttgctggattttaatggagattcaaagggcccgacggcggagggttttcgatactgaattcatcgaccctcggagagtaaacgtcgcaatgctcgaccaatatccacaagaaacagaggacaatctcgtccatctcctgaaggcacagcattacaagacgttcatactgttgccgtacaacacagaattccactgggtgcttttactcttcgacctgtcggcttgcaccgtcaacgtatatgactcaatggataaaaaagagtctacgtttgacaaggttttcgaacttatagacagggcttggtatcggttccgtcatttggtccgcggcaactggagagaaagacttaggcggaggttcaaatttccttttattcgcatgagggataacctgaccacacacaaggaatttatcacggcggttcaagaataa

SEQ ID NO: 72682 - DNA, 2906 bp, Oryza sativa
  Clone ID: PAT_MRT4530_73037C.1
atggcgcctcccgccgccgccgccgccgtgacgctcggtggcaagggcgccgcgctcacccccgccgccgtctacgccctctcccacggcctcgccgaccccgccatcgacccatccgcgctccagaggctctccacgcgcggcccctcgccgcaggacacccccgcgtcgctccgcggcctcgccttgtcgccgccggagtcacgcgccgccgcggcggtgctgctcaacaagctcctggtcaccgcgggggactcctctgccctcgtgaccgccgcgacggccaccggcctcgctgggtcgctcgacctcgccgccgcgctgcccccggcctcccgcgacgaggccgcagtcgctgccgcctccgcgcccgtggccgtcgcgctcgccgccgcgatcgactgctgcgcgtccccgctcgtccgcgtcgccgacgccgtcgccgcgctctcctgcgaggccgcgcgcggggacgtcgcggcctttgatgtgccgacctctggtgatggtctctccgccaaggacgaggctgatgtcgccgccgatgtcaagatgctcctcttcgggtccaagctcgtcggcgcagccggtggcgccgatgccgcgtctttcactaaggtgcccaccgtgaatggaatcttccgcgaggcagtgcgcgcgctgcacgcgagggtgcgtatcgagctcaacgctccagtgaagttgggaaagagggacgctgtccaaaccggtgagggaaaggaggaggcattggttgctctggcaacgcaactcgcgaggccggtacaggcaatgctcaagcttagcgttgcgcgggcaaggctttgtgttgcgagaattgatgatgctgagctccggaagaagcttactgatggtgttgaaatcgatgatttgaaggggatgcttggcaaggtcacgattgattcggatgctgtatctgttttgcggggtgtgtacaactccctgctcaagttcagggatatccttgcatgggaagcagctgttgccatggcggtgatcgaaatggatagttcaattgagaagccacaagcttgtgaggagaatgaggcgggcagttcaactgaaaatccgcatgctagtggagagaaaccaaaaggtgacaagaagagcaagaagaagaaaactttggggaagggtacttctgctgtactgatgttgcttagggaccttgtgaccaacggaaaggaggttctttcggtgaattctgcactacttgcagagtggggaaccgagctctcactgttgtttgatccaaagtgtcccagattggtgtcccttgtggacaaggtgaaggagattgttgagaccaatgaagtgaggagattgcctaaaattcccaagggaacacgtgactttgggaaagagcaaatggccataagggagcatgccttctcaataataacaggtgtattcaagatgcacggtgccgtttcacttgatacacctgtatttgagctgagagaaacacttatgggcaaatatggtgaagactcaaagttgatttatgaccttgctgatcagggtggagagctttgctctttgcggtatgatctgactgttccatttgcccgatatgttgctatgaataacataagttcattgaagagataccagatagctaaagtatacaggagagataacccgtccaagggaagatatcgagaattctaccaatgcgactttgacatagctggagtatatgaaacaatggaaccagattttgaagttatcaaagttttaactgagttgttggatcagttggatataggcacgtatgagataaaactaaaccacagaaagttgcttgatggaatgttagagatctgtggtgtgcctcctgaaaagttcagaacggtttgctcaagcattgacaagctagacaagcaaacatttgaacaagtgaaaaaggaactggtggacgagaagggcatatctaatgaaactgcggataagattggtgatttagtgaaaactaggggaccaccgctggaagttttgctggaattgagaaaggaaggtagcaagtttatggggaacgctgggtctgttactgcactaaatgagctggagatactattcaaagctctagataaagcaaatgcaataggcaagattgtttttgatttaagccttgctagaggccttgattactacactggtgtgatatatgaagctgtgttcaagggcaccactcaggttggctccattgctgctggaggcaggtatgacaaccttgttggtatgtttagtgggaagcaagtccctgccgttggtgttagccttggaatagaaagagttttcgcaatcatggagcaacaggagatggaaaagaatcagatccgggccaccgagacggaggtattggtgtcgattatcggcaaggacctcatattggccgctgagcttgttagtgaactgtggaatgctgggataaaggcagagttcaaactcactactaggatacagaaccacttgaagtacgcgacgcaatctggcattccgtggatggtgctggttggtgagtctgaaataagcagtggaaaggtgaagctgaagaacttggcagccagccaggaagaggaggttgacaggacagagtttgctcaggtgttgaaacagaaattgagaaacccatagagaagatttttagaatataattttgtagttcatgtttcaacttgtgatgcatcatacttgcctgtgagttcctggaaaattccgttcggcgttttgatttatactggctgtttgaattggtttacatgttaaagcgcttggtgtaattgaatcaaattaccaaattcaaacattactctactgattggtgacccaaaaaaaaaaaaaaaaaaaaaaaaaactcgagactagttctctctctctctctc

SEQ ID NO: 72683 - DNA, 1104 bp, Oryza sativa
  Clone ID: PAT_MRT4530_73038C.1
atggccgccgagagctactggcagtaccagtacgccgccgtcgacccgcgccagcaggcgccggcgccggtgcctgtgcccacgcccgcgctcatgtggcagcagcagcagcagcaggcggggtatcagcccgccgtggcgccggtcgcgcccccgatggctgctccgccactgcccgccggccccccgccgtcgttcaagcgccagcgcccggagtacttcgacatgccttctggacagggaaacagcctcttccacgaagcaatgagcccccattatgtccatcgcttgaacaatcagatgtcctatgctgctggtgctaaccaaagtgctattccacttggtgggatggccagatattcagtgggcatggacagtggaatccatggcgctacaagaactgaatcaagaactctctatgtggaaggactaccttcgaactgcacaaagagagaggttgcacatatttttcgccccttttctggttttcgtgaggtgagattggtcaacaaggagtctaggcatgctggaagctgtaacctcttgtgttttgttgatttttcatctcctcctgaagctcgtgctgctctggagactctgcaaggctataagtttgatgaacatgaccatgagtcttccaacctgcgcacacaattctctctcactcctcgcaggaggccaattggttggtatggatgtgttgataactattggttggatggaaacaaagtagatggggctgaaaaattgtttaatcatgtgctgtgtgatctgaattacatctattcttctgtggatgattgcaatgagtacatacatggtgcatcggcacatattgtttgcaggttgatttcatggtgcaagactgctcctgtaccatttcttacaaaaaggatttcgatggcaatgttggctgaaaaatgttgtgttgtgcctggaagatgctatgtcactgaatccccagcaacaacaacagggcacacctatagacttgtagcattactagaaacaacaatatgcatgtgttttctggagatggataagctactgcacagattgagatgcatttttgttgcatctgcaggacatgttgtgattgagtga

SEQ ID NO: 72684 - DNA, 2592 bp, Oryza sativa
  Clone ID: PAT_MRT4530_73039C.1
atgaacgagaacgagcgaacgaacgaggacgaacacgtgttgtcggagtcgtccgtcaagcctgaatgtttgttgtatcaacagatggctgaccgcgatgaggaacagatattgtacgatataatcgcggagggaagcagccagtactggaatgaagaagaggggaacgaggatccaaaccagtacttgaacgaggaatggaacgttgagagggatgcggaggggaaccaacaggggcacgtggaaagggatgtggaggggaaccaggaggaggaggctagtggtagtcaaccctccgttggacagaagagggcacgcgggcaacgaggtgcagcgaagaagcttgagggtcggcacatcataacggaagtggaagaagatggacgtcctagtgccccggccgaagccgccaagaactatgtacgtcacagcggttgggttgtgcgggataacgtgcctgtcagtacggtgtactggcgaagaacaagggcacgtggagatcatgagagctttgtcccagattcggagaaagagatgctgtggaccacaatgctcgagacattcacccttcctgcgggtacagaggacaaagtgaaaaggtggactctgaagaaaatggcagaacagtttcagagcttcaagggagatctgtaccagaagtatatactgaaggggcatacaccgaacttcgacacattcccaaagctaagggatcactgggacgagttcgttgcatataagacaggtgaacaagggcaggcgatgatggaaagaaacaaagaaaataccgccaagaagaagtaccatcaccacttggggtcaggaggctatagcgtcgcgatgccaaagtgggaggagatggaggctagcttgattgagagggtggaagcctcctctcagggcacgttccgaccagacagagatagggacgagctgacactcgccctgcagactccagagcatccaggacgaacacgagggaaaggggtgattccttggaagattggtttcaaggaggacatccacacgtacaggagtcggatgaggagcaagagagataccgaggcgaagattgcatacctagagttccgggtatcgagctacgaactcaacatgcaagaagaggtggcaaggaaggttgatgaacgcatgtccgcacatcggtcccatgatccccagccgaccattcctcctgcaatggtgagcccgtcaggaaaccgtagcagctgcgcctcaacggggcaggtggcgtcgggcatggccatcccaacggacccttcaggtacttaccactgcaggccgattccagcaggatactcgaaggtcgaagttgagttggtcgaaggcgcgtacgaggacctcgagctggattaccctggaggagacggtggtacatcatcctccctggacgacaagcggcgtctcgtgcaccatctcctccggctccgccatctcctcctcaggatcctgcaccgtctcctcctcatgctccgccagcaccgtctccacctcaggctccagcaccgactcctcctcaggatcctgcaccgactcctcctcgggctcctacacctactcctccgcaagctcctcttccggcaccttcaaaaagtcaagagacaattcaagcctcgaagtccagaaaagaagattcctatagaccccagtgtcaggaacttcttcaggggtatgtctgcatctgtcaaggaggccatcaagctatcggactatgagcgaacgctgaagaaagcatcttctggaaagtccaaaccagtccctcagcttggagagcaaccaaaccaggagatcgagccattggtgaccggtaaagaaatgacgatagaacaatttattactgacaccggtctaactacggatcaattgctaggagtcgcaccaatcgaaaaggcggaagtgaaatacatgtacgaactcggtaaaccgcttgtcaagcctgagctgctgcagtccctacccacacaaatgtacaagttccatcagctgtacatggagatgagcgccaccggtagagagatgatcggagcgaggatcagggacacggacttcttgcaaggagatgacattctctggatcaatttcaggggaatctacgaactataccagctggacgccctcgacgtctctattatgagttgctggattttaatggagattcaaagggcccgacggcggagggttttcgatactggattcatcgaccctcggagagtaaacgtcgcaatgctcgaccaatatccacaagaaacagaggacaatctcgtccatctcctgaaggcgcagcattacaagacgttcatactgttgccgtacaacacagaattccactgggtgcttttactcttcgacctgtcggcctgcaccgtcaaccggcaacgcgcggggtatcatccagttaccataaaaattgcaaccgccgagagaaccggggatgaagagacccccggtcacccccacgacgtaatgaaggcaataatcaccgggatcccgatcccagcgatccatcttcttcatcatcatgttcatcaagtagacatccacggagatgttctcgagatgatgatcgtcgattag

SEQ ID NO: 72685 - DNA, 503 bp, Oryza sativa
  Clone ID: PAT_MRT4530_7303C.1
gcggcctctgcggtggcgggcgcggaggtcgggaggcggagcatggcgcaaaaaaggagcgtctcgcggacggtgagttctttcttgtcctacaaggacaagtatctccccacgggtataaatatgtacacccggggtcattgtaaactatctctagatcaatataactactctcagcgcatcgtcaccctctttaccgaggtttttacttatcatccggcggaacttggcacctgacacgaggctgcatcggttttcgatctccggcgaaggagtaagtcatatgttctgccggccctggtgaatctatcggctacgtcagtgttgttcaaggctgcatcgcttcgatctcttggatcgctctggtttggttgatatatttgcattcattgctatcatatgtcttagttaatctatttttagcttctcaatttagctctatcggtcgtggctcgctttagggtttatacttgtttcgattaaattgtcttgctagattagat

SEQ ID NO: 72686 - DNA, 413 bp, Oryza sativa
  Clone ID: PAT_MRT4530_73040C.1
atcaatgtatgctttataaatattagatctcaggcaaccctgtggaaatggaattagtgctggcttaattttcctttcttatcttgcggaataacatagctctctgatcaccaaaccgctgacgctccttgattaaaacatacatggatcgctactaaaatcgctggcccctgcgcatatccttgtttgggccccattgtggcatgggtggatggggttggtccccttttatcagccaacgacaggtctggttttggtccagtcaaacattgctcacttagcacatgccttgccatatattttcggtgcaatatcttgtctatataacaaatgctttaccctactttactacactacttacatcccaacacactgctgatatgtgagcaaacatatataaattatgtgcacaa

SEQ ID NO: 72687 - DNA, 3375 bp, Oryza sativa
  Clone ID: PAT_MRT4530_73041C.1
atgccgccgccgccacgccacgccacgccgccgccgccacggccccgcaacgccacgccgccgccgccgccacgccgccgcgccaaccaccgccccgatgccgccacaccaccgttaacgaacgagaacgagaacgatcgaacgaacgagagcgagaacgaacacgtcaacgtacgttgccgcgagaacgtgaacgagaacgagaacgatcgaacgaacgagagcgagaacgagaatgatcgatcgaagacaagcgagaacgagggaacgaacgtgaatgagaacaagcgaacgaacgtgaatgagaacgagcgaacgaacatggctgaccgcgatgaggaacagatattgtacgatacaatcgcggagggaagcagccagtactggtatgaagaagaggggaacgaggatccaaaccagtacttgaacgaggaaggaaacgtggagagggatgcagaggggaaccaggaggaggaggctagtgtgcaagaagatggacgtcctagtgccccggccgaagccgccaagaactatgtacgtcacagcggttgggttgtgcgggataacgtgcctgtcagtacggtgtactggcgaagaacaagggcacgcggagatcatgagagctttgtcccagattcggagaaagagatgctgtggaccacaatgctcgagacattcacccttcctgcgggtacagaggacaaagtgaaaaggtggactctgaagaaaatggcagaacagtttcagagcttcaagggagatctgtaccagaagtatatactgaaggggcagacaccgaacttcgacacattcccaaagctaagggatcactgggacgagttcgttgcatataagacaggaggctatagcgtcgcgatgccgaagtgggagcagatggaggctagcttgattgagaggggtatcgaaccggcaacagccaattggccggaacgatcgaagttctggtactatgctcacggtggaacgctcaacccagctgatggctcactggtcttcggcgatcagatacgagaggctgcgcgacgactaacagatgcagtggaagcctcctctcagggcacgttccgaccagacagagatagggacgagctgacactcgccctgcagactccagagcatccaggacgaacacgagggaaatgggtgattccttggaagattggtttcaaggaggacatccacacgtacaggagtcggatgaggagcaagagagataccgaggcgaagattgcagacctagagttccaggtatcgagctacgaactcaacatgcaagaggaggtggcaaggaaggttgatgaacgcatggccgcacatcggtcccatgatccccagccgaccattcctcctgcaatggtgagcccgtcaggaaaccgtagcagctgcgcctcaacggggcaggtggcgtcgggcatggccatcccaacagacccttcaggtacttaccactgcaggccgattccagcaggatactcgaaggtcgaagttgagttggtcgaaggcgcgtacgaggacctcgagctggattaccctggaggggacggtgagacgcatctacgagacacaagccatgccattattctatggcgcaggcggtacatcatcctccctgggcgacaagcggcgtctcgtgcaccatctcctccggctccgccatctcctcctcaggatcctgcaccgtctcctcctcatgctccgccagcaccgtctccacctcaggctccagcatcgactcctcctcaggatcctgcaccgactcctcctcgtgctcctacacctactcccccgcaagctcctcttccggcaccttcaaagtcaacggcccccccagctccaccgcctgcccacacaagggcaacgaagaaggcgaaagttgacgccgccaagaacaaggacccggggtacgattgcacgcaagaggagcttgacgcttacgttgcatcagaagtcaagagacaattcaagcctcgaagtccagaaaagaagattcctatagaccccagtgtcaggaacttcttcaggggtatgtctgcacctgtcaaggaggccatcaagctatcggactatgagcgaacgctgaagaaagcatcttctggaaagtccaaaccagtccctcagcttggagagcaaccaaaccaggagatcgagccgttggtgaccggtaaagaaatgacgatagaacaatttattactgacaccggtctaactacggatcaattgctaggagtcgcaccaatcgaaaaggcggaagtgaaatacatgtacgaactcggtaaaccgcttgtcaagcctgagctgctgcagtccctacccacacaaatgtacaagttccatcagctgtacatggagatgagcgccaccggtagagagatgatcggagcgaggatcagggacacggacttcttgcaaggagatgacattctctggatcaatttcaggggaatctacgaactataccagctggacgccctcgacgtctctattatgagttgctggattttaatggagattcaaagggcccgacggcggagggttttcgatactggattcatcgaccctcggaaagaaaacgtcgcaatgctcgaccaatatccacaagaaacagaggacaatctcgtccatctcctgaaggcgcagcattacaagacgttcatactgttgccatacaacacagaattccactgggtgcttttactcttcgacctggaggcctgcaccgtcaacgtatatgactcaatggataaaaaagagtctacgtttgacaaggttttcgaacttatagacagggcttggtatcggttccgtcatttggtccgcggcaaatggagagaaagacttaggcggaagttcaaatttccttgcgcaaagcaaaagcagggaactaacttgtgcggctattacatgtgcgagtattgccactgccttgcaaaccaaatcatcaccacaagagagctcgattttattcgcatgagggataacctgaccacacacaaggaatttatcacggcggttcaagaacaactcatgggattcatcaacgaagaaatccttgatcccaagggtgaattctactacgacggaaacacaattcaccggggggttacgaaccgggactacagagggtttctccaccagtgttctctagactggggcctcctcgattcggactacctacgaaagatggctggtgggcacacacaccggacggaggcggagctcaaagccttcctggacagttgcatggaggaaatcgagggccgcaccatcaccggcagctgctcgaaagctcaggactacgtcaatctgcaggcagcgatttacgagaaggccagcaaggttgtgaacaagaactag

SEQ ID NO: 72688 - DNA, 857 bp, Oryza sativa
  Clone ID: PAT_MRT4530_73042C.1
gccgttgcgcaacgccggcgccgtgccgcgcgcttcgccgccgccgcgcaacgtcgccaccgggccacgcgccacgccgccacgcgggcaccgggccgtcccggcgccgtccgctgccgccacaccgccgtccagctgccgccacaccgccgctccgctgccgccacgacatcgaacgaattaacgtgaactaacgtgaacgagcgaacgaacgtgaacgagaacgagcgaacgaacgtgaacgagaacgtgaatgagcgaacgaacgtgaacgaacgagcttgcagaaaagacgttgtcggagtcgtccctcaagccggagtggtagctatccctcgaaggaattcgcgcaggcaaatggctgatcgcgatgaggaacagatattgtacgatacaatcgcggagggaagcagccagtactggaatgaaaaagatgggaaagaggatccaaaccagtatttgaacaaggaagggaacatgtagagggatgcggaggggaaccaggaggggcacgttgaaagggatgtggaggggaaccagaaggaggaggatagtgcaagttaaccctccgctggacagaagagggcacgcgggcaacgaggtgccacgaagaagcttgagggtcggcacatcataacggaagtggacgaagatggccgacctagtgccccggcagaagccgccaagaactatgtacgtcatagcggttgggttgtgcgggataacgtgcctgtcagtacggtgtactggcgcagaacaagggcacgcggagatcatgagagctttgtcccagattcggagaaagagatgctgtgggccccaatgctcgagacattcacccttcccgcaggttcaga

SEQ ID NO: 72689 - DNA, 3672 bp, Oryza sativa
  Clone ID: PAT_MRT4530_73043C.1
atgaaaccgagccgccgccccttccacctcctccagccgcctgccatcgccactctagccgctgccgcaccgcgccgatgccgccttcgggttcgccgcgttgtgccacgccccggccgccactccacccgtccattccgtcgcccgaggactgcttccaccgtcgacccgagctccaccaccgccgttgtcgcctcaaaccactgctcctcgccgcctcagccatcgccacacaaatccgccgccaccctcggcttcgccgcgctgccccgcacaccggccgccactccaaatccccaaaccatcaccggagccccgtttccgccgccaacccgagccaccaccacctctaccgcctccagcggcctcttctcgccgctccggtcacctatttctctccctaaccgctccaatattttccctaggtcttgccggccctcggccgtggctccgccgtggtcgggcgtcgtcggaacgccgttcccgtcgcctcccgtgccggtcgccgccatattttccgccgccggccgcctccccgtggtcgtctcgccgtcgccgtcctcgggtgccgcgaacaaggctgggggcgaaaagaggctaccactgagtgggggaatcaatattcgtccaatcccaccacagttcaagttcccacccgtcctgcggtactcgggcgaaacggacccaaaggagttcctgtccatctacgagtccgcgattgaagccgctcatggcgacgaaaataccaaggcgaagcaactgcgcgatgtctttgtccttaactttcgaggcacctacgaggagccgaagacgcagcaatatctactcggcattcgccagaggccgggggagtcgataagggagtacatgcgtcgcttctcgggcgaagaggattccaagcggcggcaagcgatccaagccgagtatgataaggcctcagtcgccgctgctcaagcccaagtacaagcacaggtcgccgaaccagctcctctcgccgttcaccaatctcagccggcgatccaaggacaaccgccaaggccaagtcaagctcccatgacttggaggaaatttagaactgaccgtgcaggcaaggctgtgatggctgtcgaagaaattcaagcccttcgtaaggagttcgacgcccaacaaacaagcagctatcagcagcccgttcgcaagaaggttagaaaagacctttactgcgccttccacggacgctcttcgcacaccaccgagcaataccgaaacattcggcagcgtggcaatgtacaagatccaaggctgcaacaaggtgcagtcgtcgaagcacctcgcgaagctgctcaagaacaagcacctccggccgaacagcgccaagatgggcaacgcagagtaatccaagggcttcaaccttcaactacatcaaagggcgatttggccgtgatcaacagagcagtgcacaatgttgaggccgaaccgcatgatcgggcgaagcacgcgccgaagcccgcaggtcgacgacgccgatcccgcaaggcttgtatcgctgggggcgacataggtgaaagagaagttgagaacatcatggaggtgcttaagaaaaacattgatatcctcacctggggccccgacgaggtgggaggcctcaacaaagcgtacccgaacgacgatttccccttgccacggatcgaccaactcgtggattcgacagttggctgcaaactcatgagctttttggatgcgtactccggctaccaccagatccacatgaatccggccgacatccccaagacagccttcatcacactattcggcacctattgccacctcaggatgccctttggcctgaggaacgccggggcaaccttcgccaggctggtgtacaagatcctttacaagcagttggggcgaaatgtggaggcttatgtcgacgatatcgtcgtaaaaagccgcaaggctttcgaccatgcgtccgacttgcaggagaccttcgacaacttacgcactgcggcgtacgcgaagtacaaaaagctcgcaggccaaattgcggcactcagtcaattcctctcaaaagcggtcgaaagaggcttgcctttcttcaagaccctccggggagcggaaaagttcacctggacacccgaatgccaagcagtgttcgacgagctgaagcaatatctgcagagcacacctgctttgatcagcccagcaccaggaagcgaattgctactgtatctagcagcttcgccggtggcggtcagtgcagcactcgtccaagaaacagagtcaggccagaaaccagtgtatttcatctccgaagcattgcaaggggcgaagataagatacattgaaatggagaagcttgcttacgccctagtgatggcttcgcgcaagcttaaacactactttcaggcccacaaagtcacgcttagcaagtgggtggcggaattatctcccttcgacttgcattttgtcgcccgcactgccatcaagtcccaagtactagctgatttcgtagccgaatggacatcggcattcgcccttgaacctgagcctgtcgaacaaccttgggtgatgtactccgacggctcgtggtcgcacaagggggcgggcgctgcggcagtgctcacttcgccagggggcgtaccgattcgatacgccgcaaggctgcagttcaacacaaccaacaacgcggcagagtacgaagctatactgcggggcctaaaaaaggcgaaagcattgggggttcggcgcttactcatccggactgactccaaatttgtggcaagtcatgttgacaaatcctttgaggcaaaagaagaaggaatgaagaggtatctggaggctgtctggtctatggaaaagtgcttcaccggcataacggtcgaacacttacctagaggccagaacgaggaagcagatgccctggcgaaatctgctgcttgtggaggcccgcattcgccaggcatcttttttgagccctcagaagatgaagcagaagcgaagcgccttcagctcagagccgcaaagtacaagcttgtctcgggccagctatatcactccggggtgctccaacctttgcttcgctacatctcctttgccgaaggtgaggaaatggcgaaggaaatacaccaggggctctgcggcgcacaccaggccacaagaacaattgcctcaaaagtgtttcgacagggtgtatactggcccaccatgctgaaagtctatgtcgagcaagtcaagaggtgcgaaagctatcagtgccatggccaaagccaaaccgcgccccaatacgagctgcagcctatcgcaccaatctggcctttcgccagatgggggctagacatcatcggcccgttccctgtggcgcaaaacgggtacaagttcgcaattgtagccattgaatacttctccctatggatcgaggccgaaccactcggggcgatcactttggcagcagtacagaagttcgtatggaagaacattgtttgctgtttcggaataccaaaagaattcatcaccgacaatggcaagcaattcgactctaacaaattcagagaaatgtgcgaagggctaaatctggaaatcaagttcgcttcgatcgcgcacccgcagtcaaatggggcggcagatcgcacgaatggcaagattctcgaggcgctcaaaaaaaggcttgagggggcggcgaagggtaaatga

SEQ ID NO: 72690 - DNA, 678 bp, Oryza sativa
  Clone ID: PAT_MRT4530_73044C.1
atggaccaggtccacgcgtggcctcgggcgcgcgtccaccacgtggacggcccaggtcggcccaagccgatcgggcggctgagcagagcggcggccaggccacgggcgcggccgagactgacccggccggccatggcacggcggctacgcgcacgcgcccggacgaccgccggcgacggcagcgcgtcgcggcgatgggcacggggagcggcggatggggaaaaaggagagggggcggtggggattctcaccgaggacggcgacggcgagacgaccacggggaggcggccggcggcggaaaatatggcggcgaccggcacgggaggcgacgggaacggcgttccgacgacgcccgaccacggcggagccacggccgagggccggcaagacctagggaaaatattggagcggttagggagagaaataggtgaccggagcggcgagaagaggccgctggaggcggtagaggtggtggtggctcgggttggcggcggaaacggggctccggtgatggtttggggatttggagtggcggccggtgtgcggggcagcgcggcgaagccgagggtggcggcggattttcctcgggcgacggaatggacgggtggagtggcggccggggcgtggcacaacgcggcgaacccgaaggcggcatcggcgcggtgcggcagcggctag

SEQ ID NO: 72691 - DNA, 363 bp, Oryza sativa
  Clone ID: PAT_MRT4530_73045C.1
atgccgagccgagcagaccaatctgcggggagcacggctgagaggacatcgccttcccagaggtggagttgtcagtcgtcgggccatgtgatggtgagctcctgcggcgacagcaccgatccaatggaggggaaggtgaaaggaaggaagggaaagcacagcccggagatcgaggtagccagggaggtcgacggagcgcgcggggcggagggaggtcgatggagcgcgcggggcaaaccaccgtcctcgctgccgcctccggcccccggccgcgtgcgtgcgcgccgccgcgccgtgcgtgctgccgtcctcgccgctatgcgcgtgagagagaggaagagtgagagagaagacagagagtga

SEQ ID NO: 72692 - DNA, 600 bp, Oryza sativa
  unsure (1)..(600): unsure at all n locations
  Clone ID: PAT_MRT4530_73046C.1
ataaagatctttgtcatcctctctctcctcgccctcgcagcgagcagcgcctcagcacagtttgatgcttgcacctatgggcaaagccaacagcagccgttcatgcaaccgatcatgaactcgtgcaatgagttcgtgacacggagggccttcggctgaacctgccgaaaccaaaaagtttaagcaacaggctcacgccgaaggtgggcggcgaaggacaagagtgaagccatacgggcgaaagccgtgactggggtaacaccaccttcgccgagtggagttctcgccagaaggcggcacgggcgaagatgatgtggcgaaagcctcggcacacaggcacgggcttcgccatagcaccaaaccccgttgacgggaggcttggtgggccattacgccctcggnggatttcgccagatagatgggccgagctatttgccctccataatgtccctatcataagggtaaccatgtaaattcccctgtataacctaaaccctagtagtgggaacctgtaatggggctataaatagccccctagggccatgtaatagggggatctcaagaaaaaaatcccaattcaatacactataactgttttcc

SEQ ID NO: 72693 - DNA, 696 bp, Oryza sativa
  Clone ID: PAT_MRT4530_73047C.1
aagaaaccctcgccaccacgcgtctccgcctccggcggcggcggcgccgcccgccgctgtaccaagatcccgcagccactgcgccgccggccgccgcgctcgtggcccacgcactagtccctcccggagtcgtaggctgcgggttacgccccccgccccgccgcccggccgctctctccgggtggggtggtgggtggcaaggggctgcgccgccatcccatcaccaaccaagcaagccggccggggaacggggagcaaccatgtcgctcctacgacgggtggggaggaggttcctcgccggcgacatcctgtcgtcggaggcttcgccgcatgccgtcggccgcctcttcaccgagcctccgctaccgtcaccgctggagggtgtcaggagcccctcaccgctgccactgcctcgggctaccaagcaaccattcattggcatcttctcgccattcaagagttacccattgcaggtcataagggagtcactgccgctggcccatcatcagtcacttagccgcaacgccatcggacctagctacaggtggccatggacgcggcttacatctgcagtagcactgccgaaactccttggcactaggtgggcatcaacaaatacctcctcaactactgggtttggtccatgttttactagtgccgggagagttgattgatgcccttacctatgcaagagcc

SEQ ID NO: 72694 - DNA, 915 bp, Oryza sativa
  Clone ID: PAT_MRT4530_73048C.1
atgtcgctcctacgacgggtggggaggaggttcctcgccggcgacatcctgtcgtcggaggcttcgccgcatgccgtcggccgcctcttcaccggtatcgtatctcatcttgccgccccatctgaggcttctccactaccaccactgcaggcattaattggcatcttgtcggcctcatcagagcctccgctaccgtcaccgctggagggtgtcaggagcccctcaccgctgccactgcctcgggctaccaagcaaccattcattggcatcttctcgccattcaagagttacccattgcaggtcataagggagtcactgccgctggcccatcatcagtcacttagccgcaacgccatcggacctagctacaggtggccatggacgcggcttacatctgcagtagcactgccgaaactccttggcactagtgaggaagaagcttgttgtcgatacaatgaaactgcttccattctgaaagagctgattacagagtctgtggggtctgaagctattggtgtggattgtattgccgattttcgccgtctactccgccagatggagagcatgacatcggtttgtcaggagtacatcatcagcaaccacgcttcgcttatacctgatgctaacagggatagttctctcgcgctgcactccagattggtctccggaaaggctccaagtcatttgatgaagcacgtgctgctggagctgagcttggcggtggagcgcgatgctttgctccaggaggactccatcgtttttgcgctcatcaagcagcggcctacactcccgccgccgaagctgccagtggccgttctttcacatgaaaaaacttgtggttatcaaagctctggacatctacagaagaacaaggaatctggcattgggagaactggagaactaaatgatctctag

SEQ ID NO: 72695 - DNA, 813 bp, Oryza sativa
  Clone ID: PAT_MRT4530_73049C.1
tttttttttctgtcggcatgaagttagcaattccattaaagaactctcatgcaaaatagtagtgcaactgaacatctcagatgcaaaatatttttacagggatcatctcataagcattttctaatataggtcgaactgtctgttgcttctaattttctacttccaaaacccccagaactggtgtcattttcagccaggtcaaaatagatcctgaactctgactactgcaggcattcctctcaaatatagtagcaggggtttataatgaactgattagacgcttgagatcaagaaaacatctcaaattcgttgggctgggaaacacactcaatggcatggatcaatttcctccgtggacctacagcatcaagacccatatcttttagctggttcattgtaagggaaactatctgatacatccccagcttttcactgtccagtatgtcgacgaaccatccgaaaccacaagtgaaaagccaattcttcagcccaccaaatccagcaacccgtctctcgagaagttgtgctcgcattatcctattcgtaacttgggacgaaataactggcagctcttcctttataaatgtttccaaaagaatttcctgctttctcaatattctcatgaaactgtccttgaatggaagcatggtttgctttcacaacaggggcaacaggacggcgtgaagatgtagcattttcctgagctttcttgatgttggtagcaactttgatgccctctggaagtggctcgtgagctttgttggtagtcatctgctttggatgcttctttctcgcagcatcacagttttccat

SEQ ID NO: 72696 - DNA, 969 bp, Oryza sativa
  Clone ID: PAT_MRT4530_7304C.1
atggcgcccatggccggcaaggaggatggcgccacccgactcaacttcgtgcaatcgtgctcaagcgacttggagacagctgccagtggagacgacgccgttgggagcagcgtagtgaagggggctgacctaggccctattagagaggagagtgaagaaatgggggaagcccacaacgccaacgaacccaactacaacggcgatggtggtgtggacggcatatgggactggatgcgggacatgggtgatggcggtgagggaagtcgcaacgtcgagttagcgcacgttgagactggaacagaactcggtgaaaaccggagacggaaatcccttggtgaagatgtcggcatactgagaggaggtgggaacatggagaacccgaacggcgccgagggccaccttctcccggacgaagtggagatcgatctcaacatgcttggtccgctggtgctgaaccgaattggagtagaggttgtcaccgaggaaaacggcgtagccggagctggagcggtgagtgtgggggcagccggcccagtctgcgtcggagtagacgatgaggtcgctcttggaggagcgatggatgtgcaggcccagctccaaaaatgcaagatcagtggagggatggacaccgtggagggcgaagtagggagtgtggtgttggagggttttagtggggtgacggttcatgaggtaggtggcggtgtggagagcctcaacccagaaggatctggggagagggtggtggtggtggcggcaaaggagctggcaatggttgaagaagttcaccggaaaggagtagaggtcactgcgactattgcacctggcgatcacggtcctgccctggtgtccatgtaccagtcggtggaggcaggcgtcgttagcgtgccagtttggaacaggccggcgagggaggtcggcctgcagctgctgctatggggcgaagcccggctggccgccctggagaactag

SEQ ID NO: 72697 - DNA, 3168 bp, Oryza sativa
  Clone ID: PAT_MRT4530_73050C.1
atggggaagagggtgaaggcgaaggccaagaatccgaggaaagcacagcaacaacaggagccgacggcagcggcgccctctgatgctggatctggggatgcggcggcggcggcggcgcaggactcggggaattcgacggaggaagctgctgctgctgctgctgctgccgcgtcggccagcggcagggagcagtgcggacactacggcggcgacagcgcccgcttggacaaggtcctcttggagatcatgacgtccaagcatttcgcgtcgtgcgagcattgccgggatgatgcccctaggaagaaagggggtggcaaggagaaagggggtaagcagcagcagaagaagaaaggaggtggaacgaaaggttccgcggccaaggcgaaggtggagaagagtgacatgtgggtgtgcttggactgcggtcggcatttctgcgggggtgaggttgatgtgaccaagccgtacggccatgcccgaaggcatgccaagcaggaccggcattggtgggctgcacggtttgatgatccgactgttgcgttttgtttgtcgtgtgagaaggaggtgtcgatcgagatgcctagaatagagacagttgccgcagtgccaacagaggtggctggtgcagctgacagagatctaggtttggttaactctcatggtagtgtaatcagagggctgccaaatcttgggaacacatgcttcttcaatgcagtgatgcagagcctcctcgcgcttgataggttgcgcagtaagatgttgggaccagatgttccaacgggggctcttttgatgtcattgaagaaactcttcatggagacaagtgcttcaaatgatgtaggaggtgcgctgagtccaaagaatctcttctcaaatatttgctcaaagtacccgcagttcaggggcttccagatgcaggacagccatgaattactccgctgttttcttgatggtctgcacacggaggaaaatgaagcacggaagctagcggatgaagcttcaagtgcaaccattcctacaattgtcgattccatctttgggggtcagctgtctagtacagtgtccagcacagaatgcacacacagttctgttaaacatgaccaattccttgatctgtcactaccagttccatccaggaggcctccagccaagagtgtgtcatcaccaccagcaaagaggaacaaacaatccctaagagataggaataaaaatcggagatatgggaagatttcgacccgagtgactcctacaatagaggtgagcaacaaagaaaagattcaaacagttgctgaaggcaataattccctgattcctggttcagagtcaggacaggttgtcagtgagaaagagcctgagccttctgaatgcagtgagtcatgtgcttctgtgcctaatctagaacaaacaggtacttcaaatgtggaggatggcacttgctggttggattacattgatgatgcagatgaagcaaaatcagagattcttgattctgcagattctattgaagcgggacagatctgggaagacaagggtgttacttatggtccatttcttccacaggatgatgccttatcgaaagagcaggtcttgggttctgaacactctggtgaaaaccctattgatgatgcaacatcttcacagcctgttatcttgcttccttacaaagaatttggttccactgccaatgaaatggatggaaccacagaaaattcacagaaaccagaagatgcagttgctcctccagctgtttctcccttgccagaagataatgcacaacctgcatctgttggcgatggggatcaagatgactatgttggtcttggtgatatgttcaatgagcctgaagttacttctgaagtcaagaaagaaataggtacagttgaagatattgatgtgatggcctggagtagcaacagtgctgaagacgaggtggatgatagtaatgctcccgtatcagttgagggctgcttggctttgtttactgaaccggagttgctctctgaaccatggcactgtgagctctgctctgactctattgcatgcccaaacaccaatgatggcaaagatgatgagatggcgactagtgtcaatgaaagaaaggatggtgaggagatgatggcaggtggtgatgaaacacaagacggtgataagttgatcgctaactgcaccgaaaaggagggcattgatcagattatggcaactgacggttgctcagataatttaaatagtgatatgaacagtaaagaaggtggttgtgcaaattcttctttggttggtgctgacaactcagttgatgctaactttccagaaaatgggaaagttgctttactgaaaacaggttcgtcacttgttgacacaactgaacaggcagacagcaaagcatatcgtcgagagattagggatttgaacaactcagcagtggaatatacatcttcgagtaagcaacctcatgattctgcccagcataaggatgaacataatgtggatgtagcctctgaagaaacaactgcaccagagtgttcttgtgacaacgaatctgcctcttgcagcacaaccaataagaatgaagctgaatgtggtgttggtgctgaagaaattgttactagtagccttccatctgagacgcaaagaatcttaccaggtgaaaaagacaatgaagatgttgtcacgcggaatcatggcagaaggaagcgaatgaagatggttggcaaggcacatcaagggcaagataaccaaaatgaacagaaagagaatggaaaaaaggttttcagatctgcaatgagaaggatccttattagcaaggcgccacctgtattgacaattaatttgaacagattcagtcaggactcgcatggtcggttcaagaaattgaaagggcatgtgcactttaaggagacacttgatgtgcggccattcatggacccaaggtctaaggagaatgacaatacaacttatcgtctcgttggcgttgttgagcacttgggaaccatggcagctgggcattatgttgcatatgtgagaactggcaagattgggggtcggcagcagaggagcaccggctccaagtcatggttttatgcaagtgatgcacaagtcagagaagcctctctggaggaagttcttaactgcgaggcttacatactgttttacgaaagggtgggagactaa

SEQ ID NO: 72698 - DNA, 939 bp, Oryza sativa
  unsure (1)..(939): unsure at all n locations
  Clone ID: PAT_MRT4530_73051C.1
gcacgagggagaactagtctcgagttntttttttttttttttttttgtggtgttttttttttttgcttttttttgtttttaaacaaccttttttttgtttttttttgtttttttttggtggtgtttttttgttgtgtaccccaggaagttcctccctttggtttttaaccggggggggtggccccctgttgttttgcggggggggaaaaaagggggaaaacccccgggggaaagcgctgtttttttgttggtcttttttgtggcgcttgggggtttgtatgggggggggttatttatggtgggcccgtgtttcggggggcccttccggggggcgctgttttgggggcgcccacgtccagggcggggtgtttttggggggctgtggggggctggcttttttgaggcgccttttgttgttgttggcgttggtgggggaacgcttggcgggggggggttttttttgggggcgggcggggggtacactcgcgctggggttgggtggggccccccccccctcgggggggggggttgtgggtgtttgtgttatacccccttggtttctttgcgtggttggttggggggggggggctcccctccgtgcgtggggggggggggggtgcgccggttatttatcggggccccgggcgcttttttatgttttgtttggtgggcggttattggggcggcgtgtggggtgttcttctctttttttttgtgtggggggcggaggggggtgcccccgtctcgcctctttttttttgtgggggggtggggagtatatatgggggggggggggctgattgtgtggggggtgtatcactcctggggggggggggaggtatttttttggttgggcatgtggtggctgtcttgttttcttcctctggagggagggggcgttttgtattctcgtcctaggtcttcatgggggttgtttgt

SEQ ID NO: 72699 - DNA, 2111 bp, Oryza sativa
  Clone ID: PAT_MRT4530_73052C.1
caatcgaagaacaagctttgatttgatttgattagctgcggcgcgaattcgatcttgccagctcgagctaagctagctaagctgcccatggcgccggcaatgttcgtcggaatcgccgccgccggagggaagaagggaggggcgaaggatgaggcggaggagctgcggcggcggaacgcggagctggagagggaggtggcggcgctgcgggcggaggtggcggcggcgcggcggcgcgcggagaccgcggaggaggccgaggagcggctgtgcgtgcagctgggccaggcggaggtggaggcggtggagctcgcgcgggagtaccagtgccgcgtccacgacctcgcccgcgagctcgccggggctcgggttctccctcacacactgaacaccatggcggcggcggcgccggctacactgatatccatggcggcggcggcggcggctccggctctatccttggccgaggcggcgccggtgacagcagttctggcaccgtgtcccacgccctcgaggacgttccgccgccgcagctgggtcgcggctatctgccggcccgccctgaaatgccaccacagtcgtcccctgaccgccgtggtcgccgcggctgcggctgccgctgcggcgggggactcgacgtcggccggcgtattccacggcgagtgcttcgtcgtgggggataacatcgacaccgaccagatcatcccggccgagcacctgaccctggtcccgtccaagcccgacgagtaccgcaagctcggctcgttcgccttcgtcggcctccccaccgcggcctacccgacgccgttcgtcgcccccggcgaggagaccacccgctacgccgtcatcatcggcggcgccaacttcggctgcggctcctcccgcgagcacgcgcccgtcgccctgggcgccgccggcgcccgcgccgtcgtggccgagggctacgcgcgcatcttcttccgcaactccgtggccaccggtgaggtctacccgttggagctagcggacactggagcctggaaggagtgcaagaccggggatgtggtcacggtggaacttgataattgcgtcatgatcaaccacacatccggcaagcagtacaagctgaagcctatcggcgatgccgggccggttattgaggcaggcgggatctttgcctatgcccggaagaccggaatgatcgcatccaagtctgcgtgagggaaaggcgagtttggtctgctgtcaagatagtcgaggcctctgcagatagcaagtaagactgggttgtggatttgaacctattgcacctctatgcgattgtccatcagttgtactgctgtttttacctaggttgtgtgtcatcagtggtgtttttggaataagttaaaagttacagagtactgaactatgatgtattagtccatgtgatcttatgtaacaccttatgtaatacactcgtttatacctgccgatttgcctatctcgtttcgataatattgtttcttataccaaagaaattatcattatataatggcaattcatattcctgtttccaaaaaaaaaaaaaaaaggagcagattttttcgcaaacaggaggagatgctttctgtgaaaacaaattacattcgcaagctgaattacagaggaacggacttgtttgttctgctgatcaggcagccttgggcagccggatagttgtggccgccgacggcagtgacggcctggccgccggcggggacagggatgggcacgacgccatgcgtgagcatggactggtagatctctacgagcaccttctcgccgtactccttgagctgccgcggccgcacgaaggaatactggcccgcggtgcagtagggcgtgccggcgacgacgccagccacagcatggccgagacgtaggcgtcgtggaggagcacgagccatcctccgagctccgcaatggggagcgtcgctggcggcggcggcgtcgaggcggtagtagccggcgatctgggttccttggtttgctctcttcgccggcgatcttgctgacacggtgacaccacccccagccgcgaacggtgaacgcccggggcaaccgtgtgcacataccaacaaccacccggtcagcccgccgccaccgtacat

SEQ ID NO: 72700 - DNA, 441 bp, Oryza sativa
  Clone ID: PAT_MRT4530_73053C.1
atgctgcatccatctgcagatctgctcgtgctcgcctcatccatcacctgccttgcgcccttgcctttccctctgcctgactgcctctgcctctctgcttcgctcgcttgggtgaaccggtgggtgcgtgcggggcggggcggggcggaacggggcctacgaaaaagaggccgcacccacgcacgcgcctttacgccgcggagcccctaccagcacaccacaccacaccacagtaccacacgggcccgtctcgtctatgccgtgagagttgagactgcccgccgcctcgcctccctctcgtcgttccacgcggttgtcacgctgccggcctcgccgcgggcggggcgggagaccgggaggggaagccgaccgcgtgctggcgtgcgagtagctttcttcttttcgaagggccacgcgacggtgatttctggtcagaattga

SEQ ID NO: 72701 - DNA, 336 bp, Oryza sativa
  Clone ID: PAT_MRT4530_73054C.1
ctagatcgagagcgccgcccttcattttcttcgtcgccgtaacggaaaattgccgactgaagactctgactaaactgaaagagaggaaacaacgccggaccaaaagagacaccaaaaccctcctatacacagaagaacaacgccttcaagtatgacatcaccctgccttttttgtctgaaaacaccatccagcaccagattacattgcccacctgatccattattactattttggcacgcgattgcaaggacaagataacaactgggcttgtgagccggttcagtacagaggagcacctcagtctaattcaggatctgggatcatgagatcaactt

SEQ ID NO: 72702 - DNA, 951 bp, Oryza sativa
  Clone ID: PAT_MRT4530_73055C.1
atggcctctcacaccaccctcatcctcctcctccctctcctcgccgccgcggccgtcgccgccgcggacgtcgcccctgcgccggcgccacctgcggcgcagacgatcaacctcacgggcatcctcgagaagggcgggcagtacaacacgctgctccgcctcctcaacgccacccgcgtcggcgagcagctgggcagccagctgaagaccacctacgacggcctcaccttcttcgcgccgacggacgccgccttcgccgcgctgaggccgggcacgctcaacggcctgagcgaccaggagcaggtgcagctggtgctctaccacgtcctcccgcgctactacaccctcgccacgttccagacggccagcaacccgctgcgcacgcaggccacgggccccgccggcgtgtacaccgtcaacgtcaccaccaccacggggcagagcctcgtcaacgtgtccaccggcgtcgccgccgtccccctcggcaccacgctctccgccgacttcccgctcgccgtctactccgtcgacggcgtgctcctgccggagcagatgttcgggaaggccaaggctcccgcgccggccgccgcgcccgcgtccgccgccgggaagggcgccaataaggagcacaagaagggcggcgccatgcccaagaatgaggtcgcggccaccgcgccgacggccggagctggaggagaagattcagatgacagcgccaccaccaatgcggtggccgttgcaggcgcggccggtgtggtgtggactgctgctctcgtggggattgccaatcttgtcatcgcgtagaaagtgtgtgcttgtctttttctccttcccgttttctttcgttttcgtcgttgcatatgtttcattgcacgtgtcctattttgtatgtatgccagagtatttatatatgttgatgatgattcactcagtgaaaaaaaaaaaaaaaaa

SEQ ID NO: 72703 - DNA, 2209 bp, Oryza sativa
  Clone ID: PAT_MRT4530_73056C.1
gtagcattcgaagcttgtagaagaagccctagcctctcctcctcatcaccgatggcccgcaccaagcagacggcgaggaagtccaccggcggcaaggcgccgaggaagcagctggcgacgaaggcggcgcgcaagtcggccccggccaccggcggcgtgaagaagccccaccgcttccgccccggcaccgtttttccaccggcggaaagccgcccagccatctggcaatcaggtcggcgagtcgacctcgccgccccctctcgatcgaggcccacttccggcgcggactgttcgcctttccacgccagtttggtcgctctcgatttcgatttcccccaaatccaccgcaagagaaagccaagtcgccgccgagaagcgaagaggagatggcccgtacgaagcagaccgcccgcaagtccaccggcggcaaggccccgaggaagcagctcgccaccaaggcggcgaggaagtctgctccgaccaccggcggcgtgaagaagccccaccgctacaggccggggacggtggcgctccgcgagatccgcaagtaccagaagagcacggagctcctgatccgcaagctccccttccagcgcctcgtccgcgagatcgcgcaggacttcaagaccgacctccgcttccagagccacgcggtgctcgccctccaggaggccgccgaggcctacctcgtcggtctcttcgaggacaccaacctctgcgccatccacgccaagcgcgtcaccatcatgcccaaggacatccagctcgcccgccgcatccgcggcgagcgcgcgtaagccgccgccttcgacgcggttgcgttgcgtagcgccgaagcgatctggggggatcaacgacgacgacgtgacgtggtcaacttgttgattcccctctcgcttccgcgttttagatctcgttttcattagcagctttgtaatagggtttggtcggttaattagtgtaaaaacagggttcggttaaagactcaaaatcaaatgttattgccgttctttggattttgcggttaagcaaaacagtgttgaagactattaaaattcgtttactgactaacaaggttcaacggcctggcgtggctcttcctcggggtgcccaccagcagcacgctgctgtacagggaggagttcgagcggatgaaggagatcgcgccggagaggttccggctggacttcgcggtgagccgggagcagacgaacgcggcgggggagaagatgtacatccagacgcggatggcggagtacaaggacgagctgtgggagctgctcaagaaggacaacacctacgtctacatgtgcggcctcaagggcatggagaaaggcatcgacgacatcatgatcgacctcgctgcaaaagacggcatcgactggcttgactacaagaagcagctgaagaagtcggagcaatggaatgtggaagtctactgatggatatatatatgttaataattaattaatccctttttatctcgattttcatgcatgcatgcgcaacctgcatacgccatcttgttgtactcgatctgatctcatctgatgagatgcatgtagatattatactgacgattcgtcgactataaagtggtttcccattttctgctgtattttgacaaaaaaaaaaaacaaaaaaacacctactcggcggttgtgcagagggggtgtgttagatcaggtagacctgtgttcgttccccctctcattatcatcaaatgttgttatccaaaaaaaaaaaaaaaaaaggcggccggccaaggacacccagctcgccccccgcatccgcggtaaacgcgcctgattaatttatcagttccttcttctcagctcgcttttcctagtaaattgcttagtagtagtgatgtacttgttgttgctgttgcttttttagttgctcttcttataaatgggaaatgttttaatcgggcttttcctttttgtcccgaaagcggttgcgttgagtagcgccgaagcgatctggggggatcaacgacgacgacgtgatgtggtcaacttgttgattcccctctggattccgcgttttagatctcgttttcattagcagctttgtaatagggtttggtcggttaattagtgtaaaaacagggttcggttaaagactcaaaatcaaatgttatcgccgctctttggattttgcgcctacccaaaacagtgttgaagactattaatattcgtttact

SEQ ID NO: 72704 - DNA, 578 bp, Oryza sativa
  Clone ID: PAT_MRT4530_73057C.1
ttgtgacgctgaattatcatacacccaaccattcatttcattttacgcgatgcgagagttggttttcggccgccgggatgccggcccgtcccacagtgtgcagcctggcctgagttggatgagaggcctggagggcaaattcccggtgcacatcagactacccatcgtctcgtcctcttgctgtctagcataaataaaccaccaaccaccagagccctagcccgtaggcgccgtcacacgagaaccctcggagcctcagccgcctctgcgaagtcgagccaaggagctgcgccggcaccgcctccacgcccttccaccgccggctccgtctcgttggtgccctttcgttcctccggctcttgtgcaggtcgctgccgcctccttctccacgcagatcgagatttggctggttccctaccccccccgcgaggctggcccggccgcgtgggcctcagcctgacgagggggagaccatacaattcaattcttagacgtaggatttcctacggaatcaaacctagctaggaactaggaccaatacataaatggaacatattattttagcctgcaatatctca

SEQ ID NO: 72705 - DNA, 291 bp, Oryza sativa
  Clone ID: PAT_MRT4530_73058C.1
atgcatgttgccaattgccatgcgttaccgtgcacacagatacgtacaaccgaagggtatttccgcgaaaacgtacgccagtggcaggagaggagggagaaaaacgcacaaaaacgtttcccggtcgtcgtcacagcaaacaaagcagccggggtgagaaaaatcggcgtggcgcgcgagcgacgagccgatcgttcacgtacgttgggatctccgccaggcagggcagccaggcagccgccgccgcggaccgaccccgcgcgcaccacgaatatgcgttctcatatgcgc

SEQ ID NO: 72706 - DNA, 581 bp, Oryza sativa
  Clone ID: PAT_MRT4530_73059C.1
cccacgcgtccggctacgtataacataatagagatctgggcagctaatgaataaattgatgtcctgtcaggcatctctagcacattgtgagctgtgcaactagactaacgctaacattgacttatgcaataaactacagattatttaccatggttggccagatgaagagactgcagccctgtatagagacattggtaatgcctttagccggccactgaacacctatacggactacacacgggtaccgaatagtctatatagatatggactgagctttgtttattttgaggaccagagacttgactggactgacatactgtatcttcatgtgcatactatcgatccaagggacctaaggttatggcccactgatacagcgtatttcatgtgatctaccacaagacaagagcaaccgtgcaatatagcttttgatacgcatatgaatcttcttaactggagatgtctggaagtagacaatccgttgatgcatactcattatacactaacagcgctgcactcaggatgttcgaacccatggctaacgatgtggacgcttagccagagtcacttttatatttatt

SEQ ID NO: 72707 - DNA, 189 bp, Oryza sativa
  Clone ID: PAT_MRT4530_7305C.1
atggccgccgccggcgagcgcttgcttgggctcggctactccgccgcagagtcgaggggatgccaatctccaaagaactccgaggttaagcatgtaagcgggtccgtccggcctgagaaaggcgggacgttacatgggtggcaggcgacgacggagtcaccactggtggagaaaacctttgtagtcccg

SEQ ID NO: 72708 - DNA, 255 bp, Oryza sativa
  Clone ID: PAT_MRT4530_73060C.1
gcgcacactcctccggtgcgaactatccgaaagtggagatattgcaggggtaccggcttacagagagcacagccatcggtgcgtgcacggactccttctaggagagcctacggaacctaacagtcgggattcagattcccaatagggacgttaggattgtcgacccagatagcggtgaggcgctgcccgtaaaccgaagcggggagctttgaataccggcaccgcacctcatgaaacgctactacaagatcgcag

SEQ ID NO: 72709 - DNA, 561 bp, Oryza sativa
  Clone ID: PAT_MRT4530_73061C.1
ggggcaaaaaaaattttttttttcccccccccttcccgcccaaattggggcttgaaagccccaatcttttgttatttcccagggcccaccttttttgggtgcttaaaggcccccttgaaaacccccccccaaacaaacagacaaggggcccaacttttctgggctgaccccccccttttgtttgttttaaaaccttcccccccccaatgttaaaaacccccccaaaaaacccgggggggccccccaattaaaaaccaaatggggccccggaaacccctccccccggttataaagcataattttttccccccaaaaacctttaaaaaaggggtttttaagggccccctttcccccccccttgattttccttttcaaagcgggaaagcaaattccgtcccctcaatttttttgaaacaaatttttaattttttttccccctttttcaaaaaattccccccccccctttttaaccttgttttttgtgcaaaggaagtacccgcccaaaaaatccccccccctaaaaacctttgggggggcccttttacccccccaaaacccccc

SEQ ID NO: 72710 - DNA, 3310 bp, Oryza sativa
  Clone ID: PAT_MRT4530_73062C.1
atggtgggttgtgagcacatggttttgagagtcgtgctcatgacaattaaggaccgccgtgtgccgccgtcgctccagctgtcgccgccgctcgggaagaccgccgtcgtcatcgccaagtcgccgccgtcctcgtccgccccttcgcagccgtcggaacccgccggagcttcgtcgccgtcgacaacccgaagtagccgccgcttccttctcgtcgccgtcgtcgtccgttccttttccgccgccgttttggtcaccgaaattccgggcgtgacaccaaaccagtacttgaacgaggaagggaacgtggagagggatgcggagaggaaccagcaggggcacgtggaaaggaatgtggaggggaaccaggaggaggaggctagtggtagtcaaccctccgttggacagaagagggcacgcggacaacgaggtgcagcgaagaagcttgagggtcggcacatcataacggaagtggaagaagatggacgtcctagtgccccggccgaagccgccaagaactatgtacgtcacagcggttgggttgtgcgggataacgtgcctgtcagtacagtgtactggcgaagaacaagggcacgcggagatcatgagagctttgtcccagattcggagaaagagatgctgtggaccacaatgctcgagacattcacccttcctgcgggtagagaggacaaagtgaaaaggtggactctgaagaaaatggcagaacagtttcagagcttcaagggagatctgtaccagaagtatatcctgaaggggcagacaccgaacttcgacacattcccaaagctaagggatcactgggatgagtttgttgcatataagacaggtgaacaagggcaggcgatgatggaaagaaacaaagaaaatgccgccaagaagaagtaccatcaccacttggggtcagaaggctatagcgtcgcgatgccaaagtgggaggtgatggaggctagcttgattgagaggggtatcgaaccggcaaccgccaattggccggaacgatcgaagttctggtactatgctcacggtggaacgctcaacccagctgatggctcactggtcttcggcgatcagatacgagaggctgcgcgacgactaacagatgcagtggaagcctcctctcagggcacgttccgaccggacagagatagggacgagctgacactcgccctacaaactccagagcatccaggatgaatacgagggaaaggggtgattccttggaagattggtttcaaggaggacatccacacgtacaggagtcggatgaggagcaagagagataccgaggcgaagattgcagatctagagttccgggtatcgagctacgaactcagcatgcaagaggaggtggcaaggaaggttgatgaacgcatggccgcacatcggtcccatgatccccagccgaccattcctcctgcaatggtgagcccgttaggaaaaccgtagcagctgcgcctcaacggggcaggtaggatcacagagcatggacgccatgcaaacacaggacgaatcgacctgtcccattgatgacatcactcagcggacaccatgtgagctgcatattccttacaagaacttatcaataaaggtggcgtcgggcatggccatcccaacggacccttcaggtacttaccactgcaggccgattccagcaggatactcgaaggtcgaagttgagttggtcgaaggcgcgtacgaggacctcgagctggattaccctggaggagacagtgagacgcatctacgacacacaagccagcggtacatcatcctccctgggcgacaagcggcgtctcgtgcaccatctcctcctcaggatcctgcaccgtctcctcctcatgctccgccagcaccgtctccacctcaggctccagcactgactcctcctcaggatcctgcactgactcctcctcgggctcctacacctactcctccgtaagctcctcttccggcaccttcaaagtcaagggcccccccagctccaccgcctgcccacacaagggcaacgaagaaggcgaaagttgacgccgccaagaacaaggacccggggtacgattgcacgcaagaggagcttgacgcttacgttgcatcagaagtcaagagacaattcaagcctcgaagtccagaaaagaagattcctatagaccccaatgtcaggaacttcttcaggggtatgtctgcacctgtcaaggaggccatcaagctatcggactatgagcgaacgctgaagaaagcatcttctggaaagtccaaaccagtccctcagcttggagagcaaccaaaccaggagatcgagccgttggtgatcggggaagacatgacgatagaagaatttattattgacaccggtctaactacggatcaattgctaggagttgaaccaatagaaaaggcggaattgaaatacatgtacgaactcgataaaccgcttgtcaagcccgagctggtgcagtccctacccacacaaatgtacaagttccatcagctgtacatggagatgagcgccaccggtagagagatgatcggagcgaggatcagggacccggacttcttgcaaggagatgatattctctagatcaatttcaagggaatctatgaagtataccagctggacgccctcgacgtctctattatgagttgctggattttaatggagattcaaagggcccgacggcggagggttttcaatactggattcatcgaccctcggagagtaaatgtcgcaatgctcgaccaatatccacaagaaacagaggacaatctcgtccatctcctgaaggcgcaacattacaagacgttcatactgttgccgtacaacacagaattccactgggtgcttttactcttcgacctgtcggcctgcactatcaacgtatatgactcaatggataaaaacgagtctacgtttgacaaggttttcgaacttatagacatggcttggtatcggttccatcatttggtccgtggcaactggagagaaagacttaggcggaggttcaaattttcttgcgcaaagcaaaagcagggaactaacttgtgcggctactacgtgtgcgagtattgccactgccttgctgaccaaatcatcaccacaagagagctcgattttattcgcatgagggataacctgaccacacacaaggaatttatcgcggcggttcaagaacaactcatgggattcatcaacaaagaaatccttgatcccaagggtgaattctactacgacggaaacacaattcaccggtccttagcttctgagctagcagcgagtactactactacgtcgaaa

SEQ ID NO: 72711 - DNA, 4569 bp, Oryza sativa
  Clone ID: PAT_MRT4530_73063C.1
atgcctgcgacagcggcggccgcggcggcgcggagcgcgtgcaggagctctgctgcttgcctgcttctgctgcgcagcagcaattgttgtcttcggtttggatatgatggcggcacggcagcggcggcgtggtggtgtcgcaggatggcgaacttgtcattgccgtcgctgcgggaccagccgccgacgccgatgaggtcgcgcaggcgccagcgccgcgatgatgaggacgacgactctcagccggcggaggcgctcttgggaacctgtcgtggatgggcgagcctgtccatcagccgtatcacgtttttgcggtgtctctcagccaagaacatattttttgagtgtcctatagcaaattttgcctataaagatgcaatggaccttgaccctgatgatgccaccttgttctcaaataggagtctttgctggcttcgcagaggtcatggaggcaaggctttgctggatgctcacgaatgcagaaaaaaacagcctgattggtcaaaggcctgctaccggctgggcgcatctctgatgtcactgaaggactatggaagtgcgtgcgatgcactttttgatggactcaaattggacccagcagatgttcagattgagaatgcgttacggtatcccatctttccctttgtatacataactaatgtaggaagcttttcagaacttgaagttatctcgaagcaccaaggccaagtgaacttgttcttccttgatggggattcactgatggatcggcaatggatgtacgctgaccggcggtccaaagagtttattgacggcgtgcactattttttgagagtggccgaagctaacaggcaaaggggttttatttgttgtccatgcaataagtgtaagaatcagaaggagtattctgcatccaggactattcatttccacttgtttgagtcggggttcatgccaagctataattgttggacatcccacggagagcaaggtgttgaaatggaagaagatgaagtggaagacgacaatattccggactttgctcagtatgttggatttgaaggaaatcaaacgggcgaggaggaaatagctgccgatggtaacgacgttgcggaggatcttggtcagatgttgcaggacgctagggaggactgcgaaagtgaaaaggaggcccataaattggacaagatgttggaggaccacagaacttcgttgtacccaggttgcgagcaggggcacaaaaagttggataccactctggagttgttgcaatggaaggcaaaaaatggggttagtgacaaggcatttggcgatttattgaaactcgtcaagaacattcttccggggggaaacaaattgcccgagacaacgtacgaggctaagaagatagtctgcccgttagggctggaagttcataagattcacgcatgtccgaacgattgtatcctatatcgcggtgaggagtatgagaacctagaagcatgccctgtttgcaaagcactacgatacaagattagacgggacgatccaggagaagttgacgggcagctaacaaagaagagagttcctgctaaggtgatgtggtatttccctataataccacggctaaggcgtttgttcaggaacaaggggaatgctagaatgttgcgatggcacgctgaagagcgtcaacaggacgggatgctgagacaccccgccgatggttcgcagtggcgaaacatcgacagaaaatttaaagaatttggaaaggacgcacgaaacatacggtttggtttaagtacggatggcatgaatccttttggagagatgagcagcggccatagcacttggcccgttacgatgtgtatctacaacctccccccctggctatgcatgaagaggaagtacataatgatgccgattattattcaaggccccaagcaacctggtaacgacatcgacgtgtacctaagaccactggtcgaagatcttaaacagttgtggaagaaggaaggtgtccccgtgtgggacgaggacaaacaggaggagtttaacctacgagcgctgctgttcgtaaccatcaacgattggcctgcacttaccaacctatccggacagtccaacaaggggtacaaggcttgcactcactgtatggatgaaacagaaagtacgtatcttaagcactgtaggaaggttgtatacatgggtcatcgtcgattccttgcagcaaaccacccggtacggaagaaaggcaagcacttcgaacataaggccgaccaccgtacgaagcctaaacatcgcagcgggaaaatagtgtttgctatggttaaagatcttaaagtagtgttcggaaaggggcctggaagccagcatatagagagcgaagatggtcacgcggcgatgtggaaaaagaactctatattttgggagttaccatattgggaattcttggacactccagagcatccaggacgaacacgagggaaaggggtgattccttggaagattggtttcaaggaggacatccacacgtacaggagtcggatgaggagcaagagagataccgaggcgaagattgcagacctagagttccgggtatcgagctacgaactcaacatgcaagaggaggtggcaaggaaggttgatgaacgcatggccgcacatcggtcccatgatccccagccgaccattcctcctgcaatggtgagcccgtcaggaaaccgtagcagctgcgcctcaacggggcaggtaggatcacagagcatggacgccatgcaaacacaggacgaatcgacctgtcccgttgatgacatcactcagcggacaccatgtgagctgcatattcctttcaagaacttatcaataaaggtggcgtcgggcatggccatcccaacggacccttcaggtacttatcactgcaggccgattccagcaggatactcgaaggtcgaagttgagttggtcgaaggcgcgtacgaggacctcgagctggattaccctggaggagacggtgagacgcatctacgagacacaagccatgccattattctatggcgcaggcggtacatcatcctccctgggcgacaagcggcgtctcgtgcaccatctcctccggctccgccatctcctcctcaggatcctgcaccgtctcctcctcttgctccgccagcaccgtctccacctcaggctccagcatcgactcctcctcaggatcctgcaccgactcctcctcatgctcctacacctactcccccgcaagctcctcttccggcaccttcaaagtcaagggcccccccagctccaccgcctgcccacacaagggcaacgaagaaggcgaaagttgacgccgccaagaacaaggacccggggtacgattgcacgcaagaggagcttgacgcttacgttgcatcagaagtcaagagacaattcaagcctcgaagtccagaaaagaagattcctatagaccccagtgtcaggaacttcttcaggggtatgtctgcatctgtcaaggaggccatcaagctatcggactatgagcgaacgctgaagaaagcatcttctggaaagtccaaaccagtccctcagcttggagagcaaccaaaccaggagatcgagccgttggtgaccggtaaagaaatgacgatagaacaatttattactgacaccggtctaactacggatcaattgctaggagtcgcaccaatcgaaaaggcggaagtgaaatacatgtacgaactcggtaaaccgcttgtcaagcctgagctgctgcagtccctacccacacaaatgtacaagttccatcagctgtacatggagatgagcgccaccggtagagagatgatcggagcgaggatcagggacacggacttcttgcaaggagatgacattctctggatcaatttcaggggaatctacgaactataccagctggacgccctcgacgtctctattatgagttgctggattttaatggagattcaaagggcccgacggcggagggttttcgatactggattcatcgaccctcggaaagtaaacgtcgcaatgctcgaccaatatccacaagaaacagaggacaatctcgtccatctcctgaaggcgcagcattacaagacgttcatactgttgccatacaacacagaattccactgggtgcttttactcttcgacctggatgcctgcaccatcaacgtatatgactcaatggataaaaaagagtctacgtttgacaaggttttcgaacttatagacagggcttggtatcggttccgtcatttggtccgcggcaaatggagagaaagacttaggcggaagttcaaatttccttgcgcaaagcaaaagcagggaactaacttgtgcggctattacgtgtgcgagtattgccactgccttgcaaaccaaatcatcaccacaagagagctcgaatttattcgcatgagggataacctgaccacacacaaggaatttaccgcggcggttcaagaacaactcatgggattcatcaacgaagaaatccttgatcctaagggtgaattctactacgacggaaacacaattcaccggtccttagcttctgagctagcagcgagtactactacatcgaaatcgtag

SEQ ID NO: 72712 - DNA, 522 bp, Oryza sativa
  Clone ID: PAT_MRT4530_73064C.1
gcacgaggatttctcctcccccttcggctctccgccatgccgccagatacagatctagggcaataccggccgtgggaggcgctctcctccccatggcctcagcgcgcctacggcgacggcggagcggccgcgcgaatggcactatcggagctggcactggtgccctcttctccctcacggttcccccctccccttgtggatgatgatgttgctggcggcggcggcggcagcatggcgcgtggaggcgctgtcggtgaaggccaccgatacggagtgcatcgacgagtccgtgccctatgagggggacactgtgtcgggaacttcttcatcttcttgcacgacatctactggagttccgaccatcccggcatcgacctcacggtgcctgcgtcgatcctcctcgttttctctatgcttttgattttgatgccaggatctgtaactatatgcggaccagataggcttagggcacccacaatggttatctataggctcatgtcagcatattttcctacttggaag

SEQ ID NO: 72713 - DNA, 4665 bp, Oryza sativa
  Clone ID: PAT_MRT4530_73065C.1
atggctgaccgcgatgaggaacaaatattgtacgatacaatcgcggagggaagcagccagtactggaatgaagaagaggggaacgaggatccaaaccagtacttgaacgaggaagggaacgtggagagggatgcggaggggaaccagcaggggcacgtggaaagggatgtggaggggaaccaggaggaggaggctagtggtagtcaaccctccgttggacagaagagggcacgtgggcaacgaggtgcagcgaagaagcttgagggtcggcacatcataacagaagtggaagaagatggacgtcctagtgccccggccgaagccgccaagaagtatgtacgtcacagcggttgggttgtgcgggataacgtgcctgtcagtacggtgtactggcgaagaacaagggcacgcggagatcatgagacctttgtcccagattcggagaaagagatgctgtggaccacaatgctcgagacattcacccttcctgcgggtacagaggacaaagtgaaaaggtggactctgaagaaaatggcagaacagtttcagagcttcaagggagatctgtaccagaagtatatcctgaaggggcagacaccgaacttcgacacattcccaaagctaagggatcactggtacgagttcgttgcatataaaacagctgatggctcactggtcttcggtgatcagatacgagaggctgcgcgacgactaacagatgcagtggaagcctcctctcagggcacgttccaaccggacagagatagggacgagctgacactcgccctgcagactccagagcatccaagacgaacacgagggaaatgggtgattccttggaagattggtttcaaggaggacatccacacgtacaggagtcggatgaggagcaagagagataccgaggcgaagattgcagatctagagttccgggtatcgagctacgaactcagcatgcaagaggaggtggcaaggaaggttgatgaacgcatggccgcacatcggtcctatgatccccagccgaccattcctcctgcaatggtgagcccgtcaggaaaccgtagcagctgcgcctcaacggggcaggtaggatcacagagcatggacgccatgcaaacacaggacgaatcgacctatcccattgatgacatcactcagcggacaccatgtgagctgcatattccttacaagaacttatcaataaaggtggtgtcgggcatggccatcccaacggacccttcaggtacataccactgcaggccgattccagcaggatactcgaaggtcaaagttgagttggtcgaaggcgcgtacgaggacctcgagctggattaccctggaggagacggtgagacgcatctacgagacacaagccatgccattattctatggcgcaggcggtacgtcatcctccctgggcgacaagcggcgtcttgtgcaccatctcctccggctccgccatctcctcctcaggatcctgcaccgtctcctcctcatgctccgccagcaccgtctccacctcaggctccagcaccgactcctcctcaggatcctgcaccgactcctcctcgggctcctacacctactcctccgcaagctcctcttccggcaccttcaaagtcaagggcccccccagctccaccgcctgcccacacaagggcaacgaagaaggcgaaagttgacgccgccaagaacaaggacccggggtacgattgcacgcaagaggagcttgacgcttacgttgcatcagaagtcaagagacaattcaagcctcgaagtccagaaaagaagattcctatagaccccagtgtcaggaacttcttcaggggtatgtctgcacctgtcaaggaggccatcaagctatcggactatgagcgaacgctgaagaaagcatcttctggaaagtccaaaccagtccctcagcttggagagcaaccaaaccaggagatcgagccgttggtgaccggggaagacatgacgatagaagaatttattattaataccggtctaactacggatcaattgctaggagttgaaccaatagaaaaggcagaattgaaatacatgtacgaactcggtaaaccgcttgtcaagcctgagctggtgcagtccctacccacacaaatgtacaagttccatcagctgtacatggagatgagcgccaccggtagagagatgatcggagcgaggatcagggacccggacttcttgcaaggagatgatattctctggatcaatttcaagggaatctacgaagtataccagctggatgccctcgacgtctctattatgagttgctggattttaatggagattcaaagggcccgacgacggagggttttcgatactggattcatcgaccctcggagagtaaacgtcgcaatgctcgacaaatatccacaagaaacagaggacaatctcgtccatctcctgaaggcgcagcattacaagacgttcatactgttgccgtacaacacagaattccactgggtgcttttactcttcgacctgtcggcctgcaccgtcaacgtatatgactcaatggataaaaaagaatctacgtttgacaaggttttcgaacttatagacagggcttggtatcggttccgtcatttggtccgcggcaactggagagaaagacttaggcggaggttcaaatttccttgcgcaaagcaaaagcagggaactaatttgtgcggctactacgtgtgcgagtattgccactgccttgcagaccaaatcatcaccacaagagagctcgattttattcgcatgagggataacctgaccacacacaaggaatttatcgcggcggttcaagaacaactcatgggattcatcaacgaagaaatccttgatcccaaggctgcttcatctgttcgtccacaagcaactaagatgatgggtgagaatcgagcgagggtcgtggcgttggtggtggctgtagtggtggtcgtcgttggtgtcgccggcaatgtcgcggcggcgcaggcggcggtgacggtggcggacctgcagagggtggccgggtcgctgcagatgtacgtggacgcgctgccgcagatggccaagatccgtggctatggattccagcgcggccaagccgtgcccatcaacctcaccatcggcatgtaccagaagacctggaaattccaccgcgacctgccggcgacgccggtgttcgtgtacgggcagtgcccggactcggcgacgttcccggggccgacgatcatggcgcggcacgacgtgccgctgttcgtgaggtgggagaaccacctcccggcgtcgcacatccttccgtgggaccccaccgtccccaccgccatccccaagaacggcggcgtccccaccgtcgtccacctccacggcagcgcccacccgccgcagtccgacggcagcgccttcgcctggttcaccgccggcttcgccgagaagggacccgcctggacccaggccacctaccgctaccccaacgtccagcctccgggcaacctctggtaccacgaccacgccctcggcctcacccgcgccaacctcctcgccggcctcctcggcgcctacgtcatcgagaagcccgaggtggacacccccatggacctcccctgcgacgacgacgaccttcacctcgtcatcgccgaccggagcttcaacgtcgacggctcgctctacatgaactccaccggcgtcgcgcccaacatccacccgcaatgggcgccggagtacttcggcgaggccatcaccgtcaacggcaaggcgtggccgttcctcgtcgtccaccgccgccgctaccgcctccgcatcctcaacgccagcaacgcccgctacttcaacgtctccctctccaacggcctccccatccacgtcgtcggctccgacgcgtcctacctctccgcgccggtcaccgtctccaacctcctcctctccccggccgagatcttcgacgtcgtcgtcgacttctcccagtcgccgacggccgagatcgagctgctcaactcggcgccctacccgttccccaccggcgccgcccccggcccgctcaacggcaaggtgatgaagttcatcgtccagccgaacgggccgctcgacccgccggacaactcgacggtgccggaccacgaggtgccgtacgcgagcgtgacggcgctgccgccgacgacgatgacgaggtacatcgtgatgtacgagtacctgacgccgacggggcagtcgacgcacctctacatcaacgggctccgcctggaggacccggtgacggagacgcccaagtccggcacgacggagctgtggcaggtgatcaacctcaccggcgacaaccacccgctgcacatccacctggggatgttccaggcggtgaagatgcagcagctcgtcaacctgcaggccttcaccgactgcatgacggcggtcaacgacgcggtcaagtgcaacgtcgaccagcacgccgtcggccccgtcgtgccggtgccggaccacgagaagacgtggaagaacgtcatcaaggtgcccccgggcttcgtcacctcggtggtcatcgccttcaagctcgtcgacaccaaccagacctaccccttcgacaccaccgccgagccgggatacgtctaccattgccacatcttggatcacgaagacaatgccatgatcaggccactcaagttgcttgcatga

SEQ ID NO: 72714 - DNA, 303 bp, Oryza sativa
  unsure (1)..(303): unsure at all n locations
  Clone ID: PAT_MRT4530_73066C.1
ctncccaccccntctgncctcccccaaaagtgtccccngggtgggtggcccgcggttcccgtcnccccggggaaggctgaaaagcactggggacatgtttgtcccctatcctaaagctcgggttgtaattgtgtggcttgggctgtaaccgttgagaacactttgaaatactgccactcatcacaatttcccgtaaaacacgtcatataagggggcccctncntgatctgctagctnttgnncgttgaaacactatgtctgcaaaggtggtttcagtccgttctttgtaatatgttcttataa

SEQ ID NO: 72715 - DNA, 3584 bp, Oryza sativa
  Clone ID: PAT_MRT4530_73067C.1
atgcatctcgatctctccgatctcgatctctctccgtcgcgccgcccgccacgagacgccgcgccacgacgacgacgcgccacgccgccgccttcgacgccgcgcaacgccgccgccgcatgccaacgccacgccgccgccgccatcgccacgccgccgccgccttcgccgccgcgcgcgcaatgccgccgccgccacgccacgccgccgcgccaaccgccgccacgccgccgcgccaaccgccgccccgatgccgccacaccgccgttaacgaacgagaacgagaacgatcgaacgaacgagaagcgagaacgaacacgtcaacgtacgttgccgtgagaacgtgaacgagaacgagaacgatcgaacgaacaaaagacgtgttgtcggagtcgtccgtcaagcctgagtggaagagctagccctagaaggaattggagcaggcaaatggctgaccgcgatgaggaacagatattgtacgatacaatcgcggagggaagcagccagtactggaatgaagaagaggggaacgaggatccaaaccagtacttgaacgaggaagggaacgtggagagggatgcggaggggaaccagcaggggcacgtggaaagggatgtggaggggaaccaggaggaggaggctagtggtagtcaaccctccgttggacagaagagggcacgcgggcaacgaggtgcagcgaagaagcttgagggtcggcacatcataacggaagtggaagaagatggacgtcctagtgccccggccgaagccgccaagaactatgtacgtcacagcggttgggttgtgcgggataacgtgcctgtcagtacggtgtactggcgaagaacaagggcacgaggagatcatgagagctttgtcccagattcggagaaagagatgctgtggaccacaatgctcgagacattcacccttcctgcgggtacagaggacaaagtgaaaaggtggactctgaagaaaatggcagaacagtttcagagcttcaagggagatctgtacaagaagtatatactgaaggggcagacaccgaacttcgacacattcccaaagctaagggatcactgggacgagttcgttgcatataagacaggtgaacaagggcaggcgatgatggaaagaaacaaagaaaatgccgccaagaagaagtaccatcaccacttggggtcaggaggctatagcgtcgcgatgccgaagtgggaggagatggaggctagcttgattgagaggggtatcgaaccggcaacagccaattggccggaacgatcgaagttctggtactatgctcacggtggaacgctcaacccagctgatggctcactggtattcggcgttcagatacgagaggctgcgcaacgactaacagatgcagtggaagcctcctctcagggcacgttccgacccgacagagatagggacgagctgacactcgccctgcagactccagagcatccaggacgaacacgagggaaaggggtgattccttggaagattggtttcaaggaggacatccacacgtacaggaggggatcctctagagtcgaatgaggagcaagagagataccgaggcgaagattgcagacctagagttccgggtatcgagctacgaactcaacatgcaagaggaggtggcaaggaaggttgatgaacgcatggccgcacatcggtcccatgatccccagccgaccattcctcctgcaatggtgagcccgtcaggaaaccgtagcagctgcgcctcaacggggcaggtaggatcacagagcatggacgccatgcaaacacaggacgaatcgacctgtcccgttgatgacatcactcagcggacaccatgtgagctgcatattcctttcaagaacttatcaataaaggtggcgtcgggcatggccatcccaacggacccttcaggtacttaccactgcaggccgattccagcaggatactccaaggtcgaagttgagttggtcgaaggcgcgtacgaggacctcgagctggattaccatggaggagacggtgagacgcatctacgagacacatgccatgccattattctatggcgcaggcggtacatcatcctccatgggcgacaagcggcgtctcgtgcaccatctcctccggctccgccatctcctcctcaggatcctgcaccgtctcctcctcatgctccgccagcaccgtctccaccgcaggctccagcatcgactcctcctcaggatcctgcaccgactcctcctcgtgctcctacacctactcccccgcaagctcctcttccggcaccttcaaaggcaacaaagaaggcgaaagttgacgccgccaagaacaaggacccggggtacgattgcacgcaagaggagcttgacgcttacgttgcatcagaagtcaagagacaattcaagcctcgaagtccagaaaagaagattcctatagaccctagtgtcaggaacttcttcaggggtatgtctgcatctgtcaaggaggccatcaagctatcggactatgagcgaacgctgaagaaagcatcttctggaaagtccaaaccagtccctcagcttggagagcaaccaaaccaggagatcgagccgttggtgaccggtaaagaaatgacgatagaacaatttattactgacaccggtctaactatggatcaattgctaggagtcgcaccaatcgaaaaggcggaagtgaaatacatgtacgaactcggtaaaccgcttgtcaagcctgagctgctgcagtccctacccacacaaatgtacaagttccatcagctgtacatggagatgagcgccaccggtagagagatgatcggagcgaggatcagggacacggacttcttgcaaggagatgacattctctggatcaatttcaggggaatctacgaactataccagctggacgccctcgacgtctctattatgagttgctggattttaatggagattcaaagggcccgacggcggagggttttcgatactggattcatcgaccctcggaaagtaaacgtcgcaatgctcgaccaatatccacaagaaacagaggacaatctcgtccatctcctgaaggcgcagcattacaagacgttcatactgttgccatacaacacagaattccactgggtgcttttactcatcgacctggaggcctgcaccgtcaacgtatatgactcaatggataaaaaagagtctacgtttgacaaggttttcgaacttatagacagggcttggtatcggttccgtcatttggtccgcggcaaatggagagaaagacttaggcggaagttcaaatttccttgcgcaaagcaaaagcagggaactaacttgtgcggctattacgtgtgcgagtattgccactgccttgcagaccaaatcatcaccacaagagagctcgattttattcgcatgagggataacctgaccacacacaaggaatttatcgcggcggttcaagaacaactcatgggattcatcaacgaagaaatccttgatcccaagggtgaattctactacgacgaaaacacaattcaccggtccttagcttctgagctagcagcgagtactactacgtcgaaatcg

SEQ ID NO: 72716 - DNA, 3719 bp, Oryza sativa
  Clone ID: PAT_MRT4530_73068C.1
tcaatgtatgttgccccgagaacgtgaacgagaacgagaacgatcgaacgaacgagagcgataacgagaacgatcgaacgaagacaagtgagaacgagggaacgaacgtgaacgagctagggaacaaaagacgtgttgtcggagtcgtccgtcaagcctgaatgtttcttgtatcaacagatggctgaccgcgatgaggaacagatattgtacgatacaatcgcggagggaagcagccagtactggaatgaagaagaggggaatgaggatccaaaccagtacttgaacgaggaaggaaacgtggagagggatgcggaggggaaccagcaggggcacgtggaaagggatgtggaggggaaccaggaggaggaggctagtggtagtcaaccctccgttggacagaagagggcacgcgggcaacgaggtgcagcgaagaagcttgagggtcggcacatcataacggaagtggaagaagatggacgtcctagtgccccggccgaagccgccaagaactatgtacgtcacagcggttgggttgtgcgggataacgtgcctgtcagtacggtgtactggcgaagaacaagggcacgcggagatcatgagagctttgtcccagattcggagaaagagatgctgtggaccacaatgctcgagacattcacccttcctgcgggtacagaggacaaagtgaaaaggtggactctgaagaaaatggcagaacagtttcagagcttcaagggagatctgtaccagaagtatatactgaaggggcagacaccgaacttcgacacattcccaaagctaagggatcactgggacgagttcgttgcatataagacaggtgaacaagggcaggcgatgatggaaagaaacaaagaaaatgccgccaagaagaagtaccatcaccacttggggtcaggaggctatagcgtcgcgatgccgaagtgggagcagatggaggctagcttgattgagaggggtatcgaaccggcaacagccaattggccggaacgatcgaagttctggtactatgctcacggtggaacgctcaacccagctgatggctcactggtcttcggctatcagatacaagaggctgcgcgacgactaacagatgcagtggaagcctcctctcagggcacgttccgaccagacagagatagggacgagctgacactcgccctgcagactccagagcatccaggacgaactcgagggaaaggggtgattccttggaagattggtttcaaggaggacatccacacgtacaggagtcggatgaggagcaagagagataccgaggcgaagattgcagacctagagttccgggtatcgagctacgaactcaacatgcaagaggaggtggcaaggaaggttgatgaacgcatggccgcacatcggtcccatgatccccagccgaccattcctcctgcaatggtgagcccgtcaggaaaccgtagcagctgcgcctcaacggggcaggtggcgtcgggcatggccatcccaacggacccttcaggtacttaccactgcaggccgattccagcaggatactcgaaggtcgaagttgagttggtcgaaggcgcgtacgaggacctcgagctggattaccctggaggagacggcggtacatcatcctccctgggcgacaagcggcgtctcgatcctgcaccgactcctcctcgtgctcctacacctactcccccgcaagctcctcttccggcaccttcaaagtcaagggcccccccagctccaccgcctgcccacacaagggcaacgaagaaggcgaaagttgacgccgccaagaacaaggacccggggtacgattgcacgcaagaggagcttgacgcttacgttgcatcagaagtcaagagacaattcaagcctcgaagtccagaaaagaagattcctatagaccccagtgtcaggaacttcttcaggggtatgtctgcatctgtcaaggaggccatcaagctatcggactatgagcgaacgctgaagaaagcatcttctggaaagtccaaaccagtccctcagcttggagagcaaccaaaacaggagatcgagccgttggttaccggtaaagaaatgacgatagaacaatttattactgacaccggtctaactacggatcaattgctaggagtcgcaccaatcgaaaaggcggaagtgaaatacatgtacgaactcggtaaaccgcttgtcaagcctgagctgctgcagtccctacccacacaaatgtacaagttccatcagctgtacatggagatgagcgccgccggtagagagatgatcggagcgaggatcagggacacggacttcttgcaaggagatgacattctctggatcaatttcaagggaatctatgaactataccagctggacgccctcgacgtctctattatgagttgctggattttaatggagattcaaagggcccgacggcggagggttttcgatactggattcatcgaccctcggagagtaaacgtcgcaatgctcgaccaatatccacaagaaacagaggacaatctcgtccatctcctgaaggcgcagcattacaagacgttcatactgttgccatacaacacagaattccactgggtgcttttactcttcgacctggaggcctgcaccgtcaacgatgtcaagttgaggaagccggccggcgccatggcagctggaagctcccatgtttctgctgatgcaaggaagctggtgggcaaggtggcggtgatcaccggcggcgcgagcggcatcggcgcgtgcacggcgcggctgttcgtgaagcacggcgcccgcgtcgtggtcgccgacatccaggacgagctgggagctagcctcgtcgccgagctcggcccggacgcgtccagctacgtgcactgcgacgtcacgaacgagggcgacgtcgccgccgcggtcgaccacgccgtcgccaggttcgggaagctcgacgtcatgttcaacaacgccggcgtcagtggcccgccgtgcttcaggatgagcgagtgcaccaaggaggacttcgagcgcgtgctcgccgtgaacctggtcggcccgttcctgggcaccaagcacgcggcgcgggtgatggcgccggcgcgccgcggcagcatcatctcgacggcgagcctgtcgtcgtcggtgtccggcgcggcgtcgcacgcgtacacgacgtcgaagcacgcgctggtggggttcacggagaacgcggccggcgagctgggccggcacgggatccgcgtcaactgcgtttcgcccgccggggtcgccacgccgctggcgagggctgccatgggcatggacgacgaggcaatcgaggcgatcatggcgaactcggcgaacctgaagggcgcaggcgcactcaaggcggacgacatcgccgccgcggcgctgttcctcgccagcgacgacggccggtacgtgagcggccagaacctgcgcgtcgacggcggcttgtccgtcgtcaacagcagctttggtttcttcagggactgaaaatgatttgggaccagtcgtcagtcgatcgacaatactacattacgtcgttatatatggttgatgttatttgtgttgcattcttgaataaactagcatccatggttccccgcttgtttgcgaggacattccatcgctagctagattctgtcttgtatttgtatttgttggaagagtgaaatacatgcatgaacggtgcttaaactaaaaaaaaaaaaaaa

SEQ ID NO: 72717 - DNA, 5877 bp, Oryza sativa
  Clone ID: PAT_MRT4530_73069C.1
ggcacggggctcggggcgggacgcgacgggcgccggcgtgcggcgcgcggacgagcgagaaggcggcggtgcggcggcgcgagggcggtgcgacgacggcgcacggcgcggcggtacgaaggcggcggcgcagcgcggtggaggggaagggggaaaaaggaggggaaggaggggggtggtgtgggatggaagggcgaccggggagggggggtttatagggcgcgggggaggggcggacggcgcgcggcgcgtggggcgcgagacgatgggacgtcgacggcgatggatggcgacagcggtggcgcgcggctcggggcgggacgcgacgggcggcgcggcggcacgggatgggcgcgtggcgccggcgatgggacgggtgcgcagcggggcaggggcgcggggcgcggcagcggtgatggtgacggcgcgcggcggcaggcggcgatggcgacggcgacggcgtcggacggcgacggcgtcggacggcgacgcgacgggcggcggtggcgcggggcgcaaggccggctagggcgccgtggtgagagaggacggggaagggctaggagaccacatcgaacacctatgccgtaatgaacagtgacttttcctatttatcccggggctcaccattgcaggaggaatggtcggctggggatcattggaccgatgtgcggccatgcgttcatcaaccttccttgccacctcctcttgcatgctgagctcgtagctcgatactctaaactcaaaatctgcaatcttcgcctcggtatctctcttgctcctcatccgactcctgtacgtgtggatgtcctccttgaacccaatcttccaaggaatcacccctttccctcgtgttcgtcctggatgctctggagtctgcagggcgagcagctcgtccctctctctatccggtcggaacgtgccatgagaagaggcttccactgcgtctgttagtcgacgcgcagcctctcatatctgatcgccgaagaccagtgagccatcagctgggttgagcgttccaccgtgagcatagtaccagaacttcgatcgttccggccaattagcggtggccggttcgatacccctctcaagcaagctagcctccatctcctcccacttcggcatcgagacgctatagccgcctgaccccaagtggtgatggtacttcttcttggcggcattttctttgtttctttccatcatcgcctgcccttgttcacctgtcttatatgcaacgaactcgtcccagtgatcccttagctttgggaatgtgtcgaagttcggtgtctgccccttcaggatatatttcttgtacaactctcccttgaagctctgaaactgttctaccattttcttcagagtccaccttttcactttgtcctctgtacccgcgggaagggtgaatgtctcgagcattgtggtccacagcatctctttctccgaatctgggacaaagctctcatgatctccgcgtgcccttgttcttcgccagtacaccgtactgacaggcaagttatcccgcacaacccaaccgctgtgacgtacatagttcttggcggcttctgccggggcactaggtcgtccatcttcttccacttccgttatgatgtgccgaccctcaagcttcttcgcggcacctcgttgcccgcgtgccctcttctgtccaacggagggttgacttccactagcctcctcctcctggttcccctccacatccctttccacgtgcccctcctggttcccctccgcatccctctccacgttcccttcctcgttcaaatactggtttggatcctcgttcccctcttcttcgttccagtactggctgcttccctccacgattgaatcgtacaatatctgttcctcatcgcgatcagccatggtgccatcgaggacatatgggaacttgactatggtcctctcaaggttcctctgttccggtgccaatgggttaggttgactggtggaggcgtaatgattgatgacagtgggatgacaactgttgaccttaacaaggttcgatactcggacgaaccttttgtccttgccaatgatgtaacgcaagtctttttcgtgaaggacatgtctagcaaaggaaagaagggcagagggcctgatgagcctaagcgtcaagtggttctcccaggcaaaagaaaaatcgtcggagttgaggacaagacgccactgcctagggcatccccgcgccgacgccgccgccatatctcgccgtcgtctcgcgctcgtcgtcatcgccaccgcctccgtctcctccgctctcggttgtcgccggccgccgagtttcagacgccgacgccgacctcgtcacgacacgacgccgtggccacgagacgccacgacgccgccgcgccaccgccgcgccacgccaccgccgcgccacgcgccaccgccgccacgccaccgccgcgccacgcgccaccggcggccggcgcaccacgctgccgccgcgcaacgccgccgccgcgaaacgccgccaccgggcgtagcgccacgacggcaccgcgccgcacgccgccgcggcgccacgccgctgcgccacgcgccggcctgatgccgcgcgcggcgccacgctgccgccgcgccgccccaccaccgctccgctgccgccacaccgccgtccagctgccgccacaccgagaacgtgaacgagcgaacgaacgtgaacgagaacaaggtgaatgaacgtgaacgagaacgagcgaacgaacgtgaacgagccaacgaacagaaaagacgttgtcggagttgtccctcaagccggagtggtagagctagccctcgaaggaattcgcccagacagatggctgatcggatgagcgacagatattgtacgatacaatcgcggagggaagcagccagtactggaacgaagaagaggggaacgaggatccaaaccagtatttgaacgaggaagggaacgtggagagggatgcggaggagaaccaggaggggcacgtggaaagggatgtggaggggaaccaggaggaggaggctagtggaagtcaaccctccgttggacagaagagggcacgcgggcaacgaggtgccgcgaagaagctcgagggtcgacacatcataacggaagtggaagaagatggacctagtgccccggcagaagccgccaagaactatgtatgtcacagcggttggtttgtgcgggataacgtgtctgtcattacagtgtactggcgaagaacaagggcacgcggagatcataagagctttgtcccagactcggagaaagagatgttgtggaccacaatgctcgagacattcacccttcccgcgggtacagaggacaaagtgaaaaggtggactctgaagaaaatagcagaacagattcagagcttcaagggagagctgtacaagaaatatatcctgaaggggcagacaccgaacttcgacacattcccaaagctaagggatcactgggacaagttcgttgcatataagacaggtgaacaagggcaggcgatgatggaaagaaacaaagaaaatgccgccaagaagaagtaccatcaccacttggggtcaggcggctatagcgtcgcgatgccgaagtgggaggagatggaggctagcttgcttgagaggggtatcgaaccggccaccgctaattggccggaacgatcgaagttctgctactatgctcatgcgctcaacccagctgatggctcactggtcttcggcgatcagatacgagaggctgcgcgtcgactaacagacacagtggaagcctcttctcagggcacattccgactggatagagagagggacgagctgtcactcgccctgcagactccagagcatccaggacgaactcgagggaaaggggtgattccttggaagattgggttcaaggaggacatctacacgtacaggagtcggatgaggagcaagagagataccgaggcaaagattgcagatcttgagttcagggtatcgagctacgagctcagcattcaagaggaggtggcaaggaaggttgatgaacgcatggctgcacatcggtccaatgatccccagccgaccattcctcctgcaatggtgagcccgtcaggaaaccgtagcagctgcgcctcaacggggcaggtaggatcacagagcatggacgccatgcaaacccaggacgaatccacctgccccgttgatgacatcactcagcggacaccatgtgagctgcatattcctttcaagaacttatcaataaaggtggcgtcgggcatggccatcccaacggacccttcaggtacttaccactgcaggccgattccagtaggatactccaaggtcgaagttgagttggtcgaagcaccgtctccacctcaggctcctgcaccgtctcctcctcatgctccagcaccgtctccacctcatgctcctacaccgtctcctcatgctccagcaccgtctccacctcaggctcctgcaccgactcctcctcgggctcctcctactcaagcttctgcagtgactcctcctcaggctcctgcgccgactcctcctcaagctccttgtccggctccttccaagtcaaggtcccaccaagctccaccgcttgtccgcacaagggcaacaaagaaggtgaaagttgacgccgccgaaaacaaggacccggggtacgattgcacgcaagaggagcttgacgcttacatggcatcagaagtcaagagacaattcaagcctcgaagtctagaaaagaagattcctatagacccgagtgtcatgaacttcttcaggggtatgtctgcacctgccaaggaggccattaagctatcggactatgagcgaacgctgaagaaagcatcttctggaaagtccaaaccagtccctcagcttggagagcaaccaaaccaggagatcgagccgttggtgaccggtaaagaaatgatgatagaagaatttattactgacaccggtctaactacggatcaattgctaggagttgcaccaatcgaaaaggcgaaagtgaaatacatgtacgaactcggtaaaccgcttgtcaagcctgagctgctgcagtccctacccacacaaatgtacaagttccatcagctgtacatggagatgagcgccaccggtagagagatgattggagcgaggatcagggacacggacttcttgaaaggagatgacattctctggatcaatttcaagggaatctacgaattataccagctggacgccctcgacgtctctattatgagttgctggattttaatggagattcaaagggcccgacggtggggggttttcgatactggattcatcgaccctcggaaagtaaacgtcgcaatgctcgaccaatatccgcaagccacagaggacaatctcgtccatctcctgaaggcgcagcattacaagacgttcatactgttgccgtacaacacagaattccactgggtgcttttagtcttcgacctgtcggcctgcaccgtcaacgtatatgactcaatggataaaaaagagtctacgtttgacaaggtttttgaacttatagacagggcttggtatcggttccgtcatttggtccgcggcaaatggagagaaagacttaggcggaagttcaaatttccttgcgcaaagcaaaagaagggaactaacttgtgcggctattacgtgtgcgagtattgccactgccttgcagaccaaatcatcaccacaagagagctcgattttattcgcatgagggataacctgaccacgcacaaggaatttatcgcggcggttcaagaacaactcataggattcatcaacgaacaaatccttgatcccaagggtaaattctactacgacggaaacacaattcatagatccttagcttctgagcaagcgactactactacgtcgaaatcgtag

SEQ ID NO: 72718 - DNA, 582 bp, Oryza sativa
  Clone ID: PAT_MRT4530_7306C.1
atgcgcgacaggcaggcctacctccccagatccttctgggttgaggctctccacaccgccacctacctcatgaaccgtcaccccactaaaaccctccaacaccacactccctacttcgccctccacggtctgggcctgcacatccatcgctcctccaagagcgacctcatcgtctactccgacgcagactgggccggctgcccccacactcaccgctccagctccggctacgccgtcacggtctcccgctccaacaccgaggccgagtaccgtgccgtcgctaatgcggtcgccaaggtcacctggcttcgacaactgcttcatgagctccactcccctccatccacgatgaccctagtgtattgcgacaacgtcagcgccatgtacctctactccaattcggttcagcaccagcggaccaagcatgttgagatcgatctccacttcgtccgggagaaggtggccctcggcgccgttcgggttctccatgttcccacctcctctcagtatgccgacatcttcaccaagggatttccgtctccggttttcaccgagttctgttccagtctcaacgtgcgctaa

SEQ ID NO: 72719 - DNA, 615 bp, Oryza sativa
  unsure (1)..(615): unsure at all n locations
  Clone ID: PAT_MRT4530_73070C.1
tcggccgccgaaanttgcgaattcngcacnanaccgccgggcaanctgggcgagcgatggangcggtcccgtgactcncgtcaccccgggcgctggcgcgggacggcgggatgcgggcgcggcggctggcgctggcgcggcgaccanagaagaagcaanccngcgacnacnacaacngtgcgggcggcgatngccgcgtccgcgggaagcggcggctggcgggangaagcngccancgggantttgcggccgccggcgggggangcnccanctcngaaaccctgccggtgaccacaaccacncggacccnacgacgacgacngtgcnnaccccaccacnaccaccatncngacccnactnccacnacgttccggcgcccaaaactcttctgntggangccgcngcccctnccgccngcgggacaangcaactccgcnacnaaanaagangcnacccgcnacnaccgatctggggaaccccttaaaaaaggcnacngcngtngcccgggaanaaagnagttaagcnncgcngcnggaaaaaaangaancccnncngcccgggtnctngccaaaaactttcncnaagggcngnccgcnattcccnanaaaggatttt

SEQ ID NO: 72720 - DNA, 2343 bp, Oryza sativa
  Clone ID: PAT_MRT4530_73071C.1
ggagctcctagcctcctagcctacacagagctaagcaaagaggcaaagagctcagcaagaagctccattaatccattccatatactcatatagagaggaggaggaggaggaagaggaagagaggggaagcaaagcaagaagctttttttacttctcgggtttgcaagccaccgggaaaggccggggcttggtggtggtggtggtggtaagttttctttaaagcggcggagcgggaggccttcctgggcgctccggagatgcagcagcggcggaagtcggtgttcgcctcggcgccgttcgcgatgaagcaggcggcgctgggggccggcgtggcggcgcgcaggaacggcgcgccgctgtcgctggcggcggtggtgttcgcgctcttcgtgttcgcgacgttcctctacaacgaggacatcaagtccatcgccgacttccccttcggcgccggcgcgctccgcgccaagtcccccgacctccacgtcctccaggagaccgtgggcgccgcgcacctcgccgccggcagcatcgccaagcgcggcgaggaggtcatcgtccgtgtcctcgacgcgcccgcctccacggcgatggcggccgccgccggcagcagcagcaacaacagcacgattgaggtggccaaggccaatgccaacgccaacgccaacgccgccgacgccggtgtcaaggtggacgaggggcaggagagggagcgggacgtgacgctcccgagtgtcaaggaaggcggcgccgacgaggcgaggcggcgggaggacgaggaggccgccgagaaggagtcctcggcgaaggccgccgcggcgacggcggcgctgcggaccgtggtgagcgtgccggacacctgcgacctgtaccgcggcaactgggtgtacgacgaggtgaacgcgccggtgtacaaggagtcgcagtgcgagttcctgacggagcaggtcacctgcatgcgcaacggccgccgcgacgactcctaccagaagtggcgctggcagccgaccgactgcgacctgccccggttcgacgcgaggctgctgctggagcggctgcgcaacaagcggctgatgttcgtgggggattcgctgaaccgcaaccagtgggagtcgatggtgtgcctggtccagtccgtgatccccaagggcaagaagacgctcaccaagttcgtcaacggcggcaacagcaacatcttctacgcacacgagtacaacgcgacggtggagttctactgggcgccgttcctggtggagtcgaactcggacaacccgcaggtgcacagcgtccccgaccgcgtcatccagtggcactccatcgccaagcacgcgcacaactggctcggcgtcgactacctcatcttcaacacctacatctggtggctcaacaccctcgacatgaaagtcctgaaggggtcgttcgaccagggtgcgacggagtacgtggaggtggaccggcccgtggcgtacaaggaggtgctcaagacgtgggcgaagtgggtcgaccgcaacattgaccccaaccggacgaccgtcttcttcatgagcatgtctcccaaccacatcacgccggaggcgtggggaaactacggagggatcaagtgcgcgatggagacgctgccgatcacgaaccggacgacgtcgctggacgtgggcacggactggaggctgtacgccggggcgcaggaggtgctccagacgttccgccgggtgccggtgcacctcgtcgacatcacggcgctgtcggagctccgcaaggatgcgcacacgtcggtgcacacgctccggcaggggaagctgctcacccccgagcagcagtccgaccccaagacgtacgccgactgcatccactggtgcctcccgggcctccccgacacctggaaccagttcctctacgcccgcatcgcctccgccccatggtcatccgaccagtagaaaaagagccaaataaggctagcttccaagtgttctgcgagacaagaaaaggagccaagaacaccgttgacacaccatcgatgcccgccgcccggccgcggccacctcactttttcttactttgggttacttttttttcttctctttttttcaccatttttctttctttctctggggttgcgtaaagctgtcttgtgctgtgtttaacatgtgattcttttgttaaaaaagaaatggagggtttaggatggtgaaggaggatctgtgggcgggctgtgttgactatagctcatttcttgtcctgctgataaaggatgcatggataggagaaagcaaaaaaagggtgtgatgtgagatgtaaggggggaaagaaaaacggagggttacatgtaaagaatttttgtgtatt

SEQ ID NO: 72721 - DNA, 2712 bp, Oryza sativa
  Clone ID: PAT_MRT4530_73072C.1
atggctgaccgcgatgaggaacagatattgtacgatacaatcgcggagggaagcagccagtactggaatgaagaagaggggaacaaggatccaaaccagtacttgaacgaggaagggaacgtggagagggatgcggaggggaaccagcaggggcacgtggaaagggatgtggaggggaaccaggaggaggaggctagtggtagtcaaccctccgttggacagaagagggcacgcgggcaacgaggtgcagcgaaaaagcttgagggtcggcacatcataacggaagtggaagaagatggacgtcctagtgccccggccgaagccgccaagaactatgtacgtcacagcggttgggttgtgcgggataacgtgcctgtcagtacggtgtactggcgaagaacaagggcacgcggagatcatgagagctttgtcccagattcggagaaagagatgctgtggaccacaatgctcgagacattcacccttcctgcgggtacagaggacaaagtgaaaaggtggactctgaagaaaatggcagaacagtttcagagcttgaagggagatctgtaccagaagtatatactgaaggggcagacaccgaacttcgacacattcccaaagctaagggatcactgggacgagttcgttgcatataagacaggtgaacaagggcaggcgatgatggaaagaaacaaagaaaatgccgccaagaagaagtaccatcaccacttggggtcaggaggctatagcatcgcgatgccgaagtgggaggagatggaggctagcttgattgagaggggtatcgaaccggcaacagccaattggccggaacgatcgaagttctggtactatgctcacggtggaacgctcaacccagctgatggctcactggtcttcggcgatcagatacgagaggctgcgcgacgactaacagatgcagtggaagcctcctctcagggcacgttccgaccagacagagatagggacgagctgacacttgccctgcagactccagagcatccaggacgaacacaagggaaaggggtgattccttggaaaattggtttcaaggaggacatccacacgtccaggagtcggatgaggagcaagaaagataccgaggcgaagattgcagacctagagttccgggtatcgagctacgaactcaacatgcaaaaggaggtggcaaggaaggttgatgaacgcatggccgcacatcggtcccatgatccccagctgaccattcctcctgcaatggtgagcccgtcaggaaaccgtagcagctgcgcctcaacggggcaggtggcgtcgggcatggccatcccaacggaccctttaggtacttaccactgcaggccgattccagcaggatactcgaaggtcgaagttgagttggtcgaaggcgcgtacgaggacctcgagctggattaccctggaggagacggcggtacatcatcctccctgggcgacaagcggcgtctcgtgcaccatctcctccggctccgccatctcctcctcaggatcctgcaccgtctcctcctcatgctccgccagcaccgtctccaccctaggctccagcaccgactccttctcaggatcctgcaccgactcctcctcgggctcctacacatactcctccgcaagctcctcttccggcaccttcaaaaagtcaagagacaattcaagcctcgaagtccagaaaagaagattcctatagaccccagtgttaagaacttcttcaggggtatgtctgcatctgtcaaggaggccatcaagctatcggactatgagcgaacgctgaagaaagcatcttctggaaagtccaaaccagtccctcagcttggagagcaaccaaaccaggagatcgagccattggtgaccggtaaagaaatgacgatagaacaatttattactgacaccggtctaactacggatcaattgctaggagtcgcaccaatcgaaaaggcggaagtgaaatacatgtacgaactcggtaaaccgcttgtcaagcctgagctgctgcagtccctacccacacaaatgtacaagttccatcagctgtacatggagatgagcgccaccggtagagagatgatcggagcgaggatcagggacacggacttcttgcaaggagatgacattctctggatcaatttcaggggaatctacgaactataccagctggacgccctcgacgtctctattatgagttgctggattttaatggagattcaaagggcccgacggcaaagggttttcgatactggattcatcgaccctcggagagtaaacgtcgcaatgctcgaccaatatccacaagaaacagaggacaatctcgtccatctcctgaaggcgcagcattacaagacgttcatactgttgccgtacaacacagaattccactgggtgcttttactcttcgacctgtcggcctgcaccgtcaacgtatatgactcaatggataaaaaagagtctacgtttgacaaggttttcgaacttatagacagctgcatccacggcctccgttccgtcgccggcgtccgctccgccgccggcgtcgtcatctccgtcgctgcgctcttctccagaaccttctccatctcggcggcgcccctcttccctctccgcggcctcgccatcaaggtcgaggtcatcgagaccgacctcgccgaggacgacgctgccgacactccgcctccaccggtgatatag

SEQ ID NO: 72722 - DNA, 3853 bp, Oryza sativa
  Clone ID: PAT_MRT4530_73073C.1
atggctgaccgcgatgaggaacagatattgtacgatacaatcgcggagggaagcagccagtactggaatgaagaagaggggaacgaggatccaaaccagtacttgaacgaggaaggaaacgtggagagggatgcggaagggaaccagcaggggcacgtggaaagggatgtggaggggaaccaggaggaggaggctagtgatagtcaaccctccgttggacagaagagggcacgcgggcaacgaggtgcagcgaagaagcttgagggtcggcacatcataacggaagtgcaagaagatggacgtcctagtgccccggccgaagcagccaagaactatgtacgtcacagcggttgggttgtgcgggataacgtgcctgtcagtacggtgtactggcgaagaacaagggcacgcggagatcatgagagctttgtcccagattcggagaaagagatgctgtggaccacaatgctcgagacattcacccttcctgcgggtacagaggacaaagtgaaaaggtggactctgaagaaaatggcagaacagtttcagagcttcaagggagatctgtaccagaagtatatactgaaggggcagacaccgaacttcgacacattcccaaagctaagggatcactgggacgagttcgttgcttataagacaggtgaacaagggcaggcgatgatggaaagaaacaaagaaaatgccgccaagaagaagtaccatcaccacttggggtcaggaggctatagcgtcgcgatgccaaagtgggaggagatggaggctagcttgattgagaggggtatcgaaacggcaacagccaattggccggaacgatcgaagttctggtactatgctcacggtggaacgctcaacccagctgatggctcactggtcttcggcgatcagatacgagaggctgcacgacgactaacagatgcagtggaagcctcctctcagggcacgttccgaccagacagagatagggacgagctgacactcgccctacagactccagagcatccaggacgaacacgagggaaaggggtgattccttggaagattggtttcaaggaggacatccacacgtacaggagtcggatgaggagcaagagagataccgaggcgaagattgcagacctagagttccgggtatcgagctacgaactcaacatgcaagaggaggtggcaaggaaggttgatgaacgcatggccgcacatcggtcccatgatccccagccgaccattcctcctgcaatggtggcgtcgggcatggccatcccaacggacccttcaggtacttaccactgcaggccgattccagcaggatactcgaaggtcgaagttgagttggtcgaggcgcgtacgaggacctcgagctggattaccctggaggagacggtgagacgcatctacgagacacaagccatgccattattctatggcgcaggcggtacatcatcctccctggtcgacaagcggcgtctcgatcctgcaccgactcctcctcgtgctcctacacctactcccccgcaagctcctcttccggcaccttcaaagtcaagggcccccccagctgcaccgcctgcccacacaagggcaacgaagaaggcgaaagttgacgccgccaagaacaaggacccggggtacgattgcacgcaagaggagcttgacgcttacgttgcatcagaagtcaagagacaattcaagcctcgaagtccagaaaagaagattcctatagaccccattgtcaggaacttcttcaggggtatgtctgcatctgtcaaggaggccatcaagctatcggactatgagcgaacgctgaagaaagcatcttctggaaagtccaaaccagtccctcagcttggagagcaaccaaaccaggagatcgagccgttggtgaccggtaaagaaatgacgatagaacaatttattactgacaccggtctaactacggatcaattgctaggagtcgcaccaatcgaaaaggcggaagtgaaatacatgtacgaactcggtaaaccgcttgtcaagcctgagctgctgcagtccctacccacacaaatgtacaagttccatcagctgtacatggagatgagcgccaccggtagagagatgatcggagcgaggatcagggacacggacttcttgcaaggagatgacattctctggatcaatttcacacatatctacgaactataccagctggacgccgtcgacgtctctattatgagttgctggattttaatggagattcaaagggcccgacggcggagggttttcgatactggattcatcgaccctcggaaagtaaacgtcgcaatgctcgaccaatatccacaagaaacagaggacaatctcgtccatctcctgaaggcgcagcattacaagacgttcatactgttgccatacaacacagaattccactgggtgcttttactcttcgacctggaggcctgcaccgtcaacccgagcgccgccgccattccagacgtcgccgttgctcgggaagaccgccgtcgtggtcgccaagccgtcgccgtccttgtccgccccttcgccgtcgccgaagatcgccggagcaccatcgccgccgtcgacccgaagaccgccgccgttttaacctcgtcgccgtcgccgtccgttggtcttccgccgctcttttggtcaccgcgtcgccgttcgccggcgagcgtgcgccgtccgagccgccgagccgccgccgccggtggtgacgtcatcgctgacgtcatcgtccccgtctcccgtgagccggtcgtggaccgatcgatctcggccgtccgttttggatagggttgatctcggccgtccgttcccgtgaaccgccgccgtgcacccggtccaccgaaaccctagccgctgacgcaataatcctccttttccttttgtatagcatgattcattgcggagcaccagactgagaagtggcggagataagcccacgggggtcgctggggagtccattacctctggttttgagggggagattatgatccaggaacggtgcactgtagtggattgtgttgtgcgagagatgccgcgctacaagcctgagtacttgtttggtgttgagggttttgtccaggagttgcgtacaatgtcctttgtcattggattcgggactgcccctttttatgcccagattcctcatgatcgtcatgaagagaagtgccgagtcaaagtcaccttgaacagtaatagtgaagatatcccctcagtgatgttcgaagctggaggaagaaactacatccatgcaagtcaggaggtggcaaggatcgccataggagagctccgcgatcgttatagtgatcagttggccgatactgagtatcgctatcatcctcgtcaaccccagggaagtgaccgtggcagttaccttgagactgaaggaattgagaatgatgctaccacaaggcatttggttgagatgctgtgggctatggatgaaagtcgtgcggagattgtgttggcagctcaagatcgtgaagaccggaatcgtggtaagatttgcaagctagaagacaaagtggatcgtttggagaaggaactagccgcattgaagggagaagcgccaccgcagaaggccagaattcgtcttaccgcaaggaagagagctctatttgtccctcgctatcaattggcgccaaaggttcgtgtggtggagaaagaagttgccctaactcaagcagatcctccggtcatcatcataagtgatgatgaagaagaagaatccaaacgcaaccattccaagattgagtgggtagcaactcaagatgatgaagacgagccgaaagaaccttcaatcgacctccgatgctcggaagaattagagtga

SEQ ID NO: 72723 - DNA, 3639 bp, Oryza sativa
  Clone ID: PAT_MRT4530_73074C.1
atgcatctcgatctctccgatctcgatctctctccgtcgcgccgcccgccacgagacgccgcgccacgacgacgacgcgccacgccgccgccttcgacgccgcgcaacgccgccgccgcatgccaacgccacgccgccgccgccgtcgccacgccgccgccgccttcgccgccgcgcgcgcaatgccgccgccgccacgccacgccgccgccgccacgccacgccacgccaccgtcgtcacgccacgccggcgccaccacggccccacaacgccacgccgccgccgccgtcggcacgccggcgggccaaccgccgccccgatgccgtcacaccgccgtttacgaacgagaacgagaacgatcgaacgaacgagagcgagaacgaacacgtcaacgtacgttgccgcgacaacgtgaacgagaacgagaacgatcgaacgaacaaaagacgtgttgtcggagtcgtccgtcaagcctgagtggaagagctagccctagaaggaattggagcaggcaaatggctgaccgcgatgaggaacagatattgtacgatacaatcgcggagggaagcagccagtactggaatgaagaagaggggaacgaggatccaaaccagtacttgaacgaggaagggaacgtggagagggatgcggaggggaaccagcaggggcacgtggaaagggatgtggaggggaaccaggaggaggaggctagtggtagtcaaccctccgttggacagaagagggcacgcgggcaacgaggtgcagcgaagaagcttgagggtcggcacatcataacggaagtggaagaagatggacgtcctagtgccccggccgaagccgccaagaactatgtacgtcacagcggttgggttgtgcgggataacgtgcctgtcagtacggtgtactggcgaagaacaagggcacgcggagatcatgagagctttgtcccagattcggagaaagagatgctgtggaccacaatgctcgagacattcacccttcctgcgggtacagaggacaaagtgaaaaggtggactctgaagaaaatggcagaacagttttagagcttcaagggagatctgtaccagaagtatatactgaaggggcagacaccgaacttcgacacattcccaaagctaagggatcactgggacgagttcgttgcatataagacaggtgaacaagggcaggcgatgatggaaagaaacaaagaaaatgccgccaagaagaagtaccatcaccacttggggtcaggaggctatagcgtcgcgatgccgaagtgggagcagatggaggctagcttgattgagaggggtatcgaaccggcaacagccaattggccggaacgatcgaagttctggtactatgctcacggtggaacgctcaacccagctgatggctcactggtcttcggctatcagatacaagaggctgcgcgacgactaacagatgcagtggaagcctcctctcagggcacgttccgaccagacagagatagggacgagctgacactcgccctgcagactccagagcatccaggacgaactcgagggaaaggggtgattccttggaagattggtttcaaggaggacatccacacgtacaggagtcggatgaggagcaagagagataccgaggcgaagattgcagacctagagttccgggtatcgagctacgaactcaacatgcaagaggaggtggcaaggaaggttgatgaacgcatggccgcacatcggtcccatgatccccagccgaccattcctcctgcaatggtgagcccgtcaggaaaccgtagcagctgcgcctcaacggggcaggtaggatcacagagcatggacgccatgcaaacacaggacgaatcgacctgtcccgttgatgacatcactcagcggacaccatgtgagctgcatattcctttcaagaacttatcaataaaggtggcgtcgggcatggccatcccaacggacccttcaggtacttaccactgcaggccgattccagcaggatactccaaggtcgaagttgagttggtcgaaggcgcgtacgaggacctcgagctggattaccctggaggagacggtgagacgcatctacgagacacatgccatgctattattctatggcgcaggcggtacatcatcctccctgggcgacaagcggcgtctcgtgcaccatctcctccggctccgccatctcctcctcaggatcctgcaccgtctcctcctcatgctccgccagcaccgtctccaccgcaggctccagcatcgactcctcctcaggatcctgcaccgactcctcctcgtgctcctacacctactcccccgcaagctcctcttccggcaccttcaaaggcaacaaagaaggcgaaagttgacgccgccaagaacaaggacccggggtacgattgcacgcaagaggagcttgacgcttacgttgcatcagaagtcaagagacaattcaagcctcgaagtccagaaaagaagattcctatagaccccagtgtcaggaacttcttcaggggtatgtctgcatctgtcaaggaggccatcaagctatcggactatgagcgaacgctgaagaaagcatcttctggaaagtccaaaccagtccctcagcttggagagcaaccaaaccaggagatcgagccgttggtgaccggtaaagaaatgacgatagaacaatttattactgacaccggtctaactacggatcaattgctaggagtcgcaccaatcgaaaaggcggaagtgaaatacatgtacgaactcggtaaaccgcttgtcaagcctgagctgctgcagtccctacccacacaaatgtacaagttccatcagctgtacatggagatgagcgccaccggtagagagatgatcggagcgaggatcagggacacggacttcttgcaaggagatgacattctctggatcaatttcaggggaatctacgaactataccagctggacgccctcgacgtctctattatgagttgctggattttaatggagattcaaagggcccgacggcggagggttttcgatactggattcatcgaccctcggaaagtaaacgtcgcaatgctcgaccaatatccacaagaaacagaggacaatctcgtccatctcctgaaggcgcagcattacaagacgttcatactgttgccatacaacacagaattccactgggtgcttttactcatcgacctggaggcctgcaccgtcaacgtatatgactcaatggataaaaaagagtctacgtttgacaaggttttcgaacttatagacagggcttggtatcggttccgtcatttggtccgcggcaaatggagagaaagacttaggcggaagttcaaatttccttgcgcaaagcaaaagcagggaactaacttgtgcggctattacgtgtgcgagtattgccactgccttgcagaccaaatcatcaccacaagagagctcgattttattcgcatgagggataacctgaccacacacaaggaatttatcgcggcggttcaagaacaactcatgggattcatcaacgaagaaatccttgatcccaagggtgaattctactacgacggaaacacaattcaccggtccttagcttctgagctagcagcgagtactactacgtcgaaatcg

SEQ ID NO: 72724 - DNA, 2064 bp, Oryza sativa
  Clone ID: PAT_MRT4530_73075C.1
atgtcgtcgccgctcgccgtcgtctccagcttctggaaagactttgatctggagaaggaaagaggtggtttggatgagcagggtttaaagattgcagagaatcaagagaccagccagaaaaacagacgccggcttgctgagagcactagggatttcaagaaggcgtcttcagatgataagcttagtttattcaattctttgctgaagagttatcaagaggaagttgataatctcacaaagagagcaaaatttggagaaaatgcatttctcaacatctaccagaagctctatgaagcccctgatccatacccagctcttgcttctatggctgagcaagatcagaaactatctgaactggagactgaaaatcggaagatgaaacttgagcttgaagagtaccgggcagaagccgcccacctaaagaaccaacaagcaacaattaggcgacttgaggagcgaaaccgccaactagaacaacagatggaggaaaaagtcagagagatggttgaaatgaagcagaggagtttggcagaagatagccagaaaactcttgaagccctgaaagacagggagcgggcattgcaggaccagctaagacaagccacagaaagtgtaaagaatatgcagaagctacatgaatcagcacaaagtcaattgtttgagcttcgtactcaatcagaggaggaccgggctgcaaaggaaactgaagtcaatcttctgttggatgaagttgaacgggcccaagcacgtttagttagtcttgagagagaaaagggtgatttacgatctcagttgcaaacaacaaatgaagatgcaaccaatagtagtgactacgtggactcaagtgatatacttgagagttccttgaatgccaaggagaagatcatctcagagctgaatgcagaactgcgtagtattgaaaatactttatcttctgagagagaaacacatgttaatgaactgaaaaagttgactgctttgctcagtgagaaggaaaatgctctgacagagttgaagaaagaacttcaagaaagaccaacaagaagactagtagatgatctcaagaaaaaggttcagattttgcaggctgtagggtacaactccattgaagctgaagattgggagctagcaacaaatggtgaagaaatgagcaagttggaagctttgcttcttgataagaaccgtaaaatggagcatgaactaacacagctgaaggtcaaaatatcagagaagtcaaatcttcttgaggaggctgaaaaaaagattgctgagctaactgcaaaggctgaagagcagcagaagttgattttgaaactcgaggatgacatactaaagggctatagttcaactgataggaggacttcacttctgaatgattgggatcttcaagaaattggctcaaatgaagtagcagagggtactgatccaaggcatgcaccacaagaccaagaccaaagttccatgcttaaggtcatttgcaatcagagggatcgtttccgtacacgtctacgtgaaactgaggaggaactaagaagactaaaagagaagtatgaaatgctagttgtagaattggaaaaaactaaagcagataatgttcaactgtatgggaagattcgttacgtgcaggactacagccatgagaagattgtttccagaggaccaaagaagtatgcagaagatgttgaaagtggttcttcagatgttgagacgaagtacaagaaaatgtatgaggatgacataaatccttttgctgctttttcaaagaaggaaaaggatcaacggtacaaggaacttggtttaagagacaaaatcactcttagcagtggacgttttctccttggtaacaaatatgcccggacatttatattcttctacactattggattacatctccttgtatttacattgctgtacagaatgtcagctttgagctatctcagacgtctgaatacgttttctgtagataaaaattttccagatatggagacggggtggatgggaaatgacaggatgaggcgtggtcgtgcgtttgagccgttattatgtaaactgttgtatcactaa

SEQ ID NO: 72725 - DNA, 320 bp, Oryza sativa
  Clone ID: PAT_MRT4530_73076C.1
aacaacaaaacatgcaggtgtgttttttgcagtgacggaatcgcgccatcatttgttcttggaccactgcaaaacctaacattcttcccataacataaaccgtcctgcaagggtagagttagaatgctacaacaaatattcgtgcatggttaggcaattaaaaaaagccattgagcatggctacctagaaaaacagaggagcgggttaataatcctccatgcggagctaaaccggaaacgccaaaccatggggaggacctacctccaacggtacataaggcagacatttttgcagaaggcagcctcaactaaaaggcgct

SEQ ID NO: 72726 - DNA, 1047 bp, Oryza sativa
  Clone ID: PAT_MRT4530_73077C.1
atggcggcggttggggcgacgggaggggattatgtataccttcgtgtcactccgctccggggagtacactgtttccagacgaaaggcaagttggcaccacgcttcatgggaccatacaagatcttggaacaaagaggagaagttgcatatcagctagaactcccatccaacatggcgggtatccatgatgtgttccatgtggggcccacctgtcgggtcctctcccaacctccagccggcgccgccgcaccccgcaaccgccgctcccgctctctcccgggccacgtcgcccacatcgccagcgtcgtcgcctttcccgcgcctccccgcgcccactccctctctctcccgcccgcgcccgcgttcgagatggccgggattcaatttttgaatcccgcctctctctgcacctccacctccccatgtcggccggcgaaatctggccgctcccggccaccaccgtgcacccaccaccgccacaacttttccgctctccagccgccgctagccatcgctagccgccacgccaaacctcgccgtctacaccaccgcattcgccatcgcgtgaagcaccctggccatcgcccgatcgtcgccgtccgtcgccggaaccccgtccgtcccatgcgccggtcctctcgaagcccgtccgactctcgccgtctgcaaccgccgtccgtcgcgccgttcgccgtcggcatcgtccgtgccgtcgaggatgcctgtggagtggatgggcaccaactggggatgcacccggatggacccaagctccacgccatagcattagagtctcaacctggacaagtgccagtgaggaccggtggcatgtgcctcatgacatccaatggggggataatcaacctcccagatcaagtgacgggggagatccagtacaacctcacagaacacataactcaaacgcaagaatggcaacaatctgctaatgctcagttcgccaacatcaacaacatgatgcagcaacagcacgatgaccttcaggcgtactttcgttttcaggggttcaatccttatcaaggaccctga

SEQ ID NO: 72727 - DNA, 5238 bp, Oryza sativa
  Clone ID: PAT_MRT4530_73078C.1
atggatcggcaatggatgtacgctgaccggcggtccaaagagtttattgacggcgtgcactattttttgagagtggccgaagctaacaggcaaaggggttttatttgttgtccatgcaataagtgtaagaatcagaaggagtattctgcatccaggactattcatttccacttgtttgagtcggggttcataccaagctataattgttggacatcccacggagagcaaggtgttgaaatggaagaagatgaagtggaagacgacaatattccggactttgctcagtatgttggatttgaaggaaatcaaacgggcgaggaggaaatagctgctgatggtaacgacgttgcggatgatcttggtcagatgttgcaggacgccagggaggactgcgaaagtgaaaaggaggcccataaattggacaagatgttggaggaccacagaacttcgttgtacccaggttgcgagcaggggcacaaaaagttggataccactctggagttgttgcaatggaaggcaaaaaatggggttagtgacaaggcatttggcgatttattgaaactcgtcaagaacattcttccggggggaaacaaattgcccgagacaacgtacgaggctaagaagatagtctgcccgttaggactggaagttcataagattcacgcatgtccgaacgattgtatcctatatcgcggtgaggagtatgagaacctagaagcatgccctgtttgcaaagcactacgatacaagattagacgggacgatccaggagaagttgacgggcagctgacaaagaagagaattcctgctaaggtgatgtggtatttccctataataccacggctaaggcgttttttcaggaacaaggggaatgctagaatgttgcgatggcacgctgaagagcgtcaacaggacgggatgctgagacaccccgccgatggttcgcagtggcgaaacatcgacagaaaatttaaagaatttggaaaggacgcacgaaacatacggtttggtttgagtacggatggcatgaatccttttggagagatgagcagcggccatagcacttggcccattacgatgtgtatctacaacctccccccctggctatgcatgaagaggaagtacataatgatgccgattattattcaaggccccaagcaacctggtaacgacatcgacgtgtacctaagaccactggtcgaagatcttaaactgttgtggaggaaggaaggtgtccccgtgtgggacgaggacaaacaggaggagtttaacctacgagcgctgctgttcgtaaccatcaacgattggcctgcacttagcaacctatccggacagtccaacaaggggtacaaggcttgcactcactgtatggatgaaacagaaagtacgtatcttaagcactgtaggaaggttgtatacatgggtcatcgtcgattccttgcagcaaaccacccggtacggaagaaaggcaagcacttcgaacataaggccgaccaccaatttcgaaatagcgagaacgtgaacgagaacgagaacgatcgaacgaacgagagcgagaacgagaacgatcgaacgaagacaagcgagaacgagggaacgaacgtgaatgagaacaagcgaacgaacgtgaatgagaacgagcgaacgaacatgaacgagctagggaacatggctgaccgcgatgaggaacagatattgtacgatacaatcgcggagggaagcagccagtactggaatgaagaagaggggaacgaggatccaaaccagtacttgaacgaggaagggaacgtggagagggatgcggaggggaaccagcaggggcacgtggaaagggatgtggaggggaaccaggaggaggaggctagtggtagtcaaccctccgttggacagaagagggcacgcgggcaacgaggtgcagtgaagaagcttgagggtcggcacatcataacggaagtggaagaagatggacgtcctagtgccccggccgaagccgccaagaactatgtacgtcacagcggttgggttgtgcgggataacgtgcctgtcagtacggtgtactggcgaagaacaagggcacgcggagatcatgagagctttgtcccagattcggagaaagagatgctgtggaccacaatgctcgagacattcacccttcctgtgggtacagaggacaaagtgaaaaggtggactctgaagaaaatggcagaacagtttcagagcttcaagggagatctgtaccagaagtatatactgaaggggcagacaccgaacttcgacacattcccaaagctaagggatcactgggacgagttcgttgcatataagacaggtgaacaagggcaggcgatgatggaaagaaacaaagaaaatgccgccaagaagaagtaccatcaccacttggggtcaggaggctatagcgtcgcgatgccgaagtgggagcagatggaggctagcttgattgagaggggtatcgaaccggcaacagccaattggccggaacgatcgaagttctggtactatgctcacggtggaacgctcaacccagctgatggctcactggtcttcggcgatcagatacgagaggctgcgcgacgactaacagatgcagtggaagcctcctctcagggcacgttccgaccagacagagatagggacgagctgacactcgccctgcagactccagagcatccaggacgaacacgagagaaaggggtgattccttggaagattggtttcaaggaggacatccacacgtacaggagtcggatgaggagcaagagagataccgaggcgaagattgcagacctagagttccgggtatcgagctacgaactcaacatgcaagaggaggtggcaaggaaggttgatgaacgcatggccgcagatcggtcccatgatccccagccgaccattcctcctgcaatggtgagcccgtcaggaaaccgaagcagctgcgcctcaacggggcaggtaggatcacagagcatggacgccatgcaaacacaggacgaatcgacctgtcccgttgatgacatcactcagcggacaccatgtgagctgcatattcctttcaagaacttatcaataaaggtggcgtcgggcatggccatcccaacggacccttcaggtacttaccactgcaggccgattccagcaggatactcgaaggtcgaagttgagttggtcgaaggcgcgtacaaggacctcgagctggattaccctggaggagacggtgagacgcatctacgagacacatgccatgccattattctatggcgcaggcggtacatcatcctccctgggcgacaagcggcgtctcgtgcaccatctcctccggctccgccatctcctcctcaggaccctgcaccgtctcctcctcatgctccgccagcaccgtctccacctcaggctccagcatcgactcctcctcaggatcctgcaccgactcctcctcgtgctcctacacctactcccccgcaagctcctcttccggcaccttcaaagtcaagggcccccccagctccaccgcctgcccacacaagggcaacgaagaaggcgacagttgacgccgccaagaacaaggacccggggtacgattgcacgcaagaggagcttgacgcttacgttgcatcagaagtcaagagacaattcaagcctcgaagtccagaaaagaagattcctatagaccccactgtcaggaacttcttcaggggtatgtctgcatctgtcaaggaggccatcaagctatcggactatgagcgaacgctgaagaaagcatcttctggaaagtccaaactagtccctcagcttggagagcaaccaaaccaggagatcgagccgttggtgaccggtaaagaaatgacgatagaacaatttattactgacaccggtctaactacggatcaattgctaggagtcgcaccaatcgaaaaggcggaagtgaaatacatgtacgaactcggtaaaccgcttgtcaagcctgagctgctgcagtccctacccacacaaatgtacaagttccatcagctgtacatggagatgagcgccaccggtagagagatgatcggagcgaggatcagggacacggacttcttgcaaggagatgacattctctggatcaatttcaggggaatctacgaactataccagctggacgccctcgacgtctctattatgagttgctggattttaatggagattcaaagggcccgacggcggagggttttcgatactggattcatcgaccctcggaaagtaaacgtcgcaatgctcgaccaatatccacaagaaacagaggacaatctcgtccatctcctgaaggcgcagcattacaagacgttcatactgttgccatacaacacagaattccactgggtgcttttactcatcgacctggaggcctgcaccgtcaacgtatatgactcaatggataaaaaagagtctacgtttgacaaggttttcgaacttatagacagggcttggtatcggttccgtcatttggtccgcggcaaatggagagaaagacttaggcggaagttcaaatttccttgcgcaaagcaaaagcagggaactaacttgtgcggctattacgtgtgcgagtattgccactgccttgcagaccaaatcatcaccacaagagagctcgattttattcgcatgagggataacctgaccacacacaaggaatttatcgcggcggttcaagaacaactcatgggattcatcaacgaagaaatccttgatcccaagggtggtggcaaaactcgcggggagatgaacaaagatgatgaggtgatcgggacgttcgacacggcggtggaggcggcgctggcctacgacgccacagcgcgatggctctacggcagcaaggccgtgaccaacttccccaccaccaccggcgatggtgacgacggcctcccggttgctgaacccgccgtcgtcgtcgttgccgctcccgccttcgccggcgaggagatggacaagcaggtagctccggcggcggcgacggcggcagagacagtagccgcagaccccggcgccggcgagttgggtccagtggtgctttgtcatgaactggaggccaccaacggctggcagtacgaggcgtacggctacggctacagcatggggctggagctgcttgagaactacgcgtacgccggcgacgtccagccgctgggcctgggggggtcgacgagcaacgccgccgccgccaacgactgcctttggatgttctaa

SEQ ID NO: 72728 - DNA, 534 bp, Oryza sativa
  Clone ID: PAT_MRT4530_73079C.1
tcaaacacggctttggaccgggatgatacaataaaccaagtttagggacctcgatgtgcgctttgcaaattcgtggacataagtaaaacctcctgacaagtttaaggaccgctggtgcattttactccataatttaacaggtgccgacgcacagccgccgctgtctcccacatccgctgcacggcccccgtcatccctcgcctgcacggttgccgccgtcttccgcctctgcagcgcggcccggccaccgctatcttcgacgcccgccgcacggccaccgccgtcttccacctccactgccatctcctgcgtctgccactgccgtcttccgttgtcggtgacagcgaatcgaagcgccgataactgcgcggttactgcggttaccgggcttatcacggggtacggtaatataaataccgcggtaacctccgccgggacgcggtaaccccggccacagtggtttgggagacccatgtttgttaacgagccattttttatgcgttttgggttctggccaccacttctccacgtcat

SEQ ID NO: 72729 - DNA, 552 bp, Oryza sativa
  Clone ID: PAT_MRT4530_7307C.1
atggaccggccttgccggagagcaagaaatggaaggagcagccaccgcttcatccgcagcgccggtggcttcgctgttccccggcctcccgccattgccgccgctgccagcgctccccgctctgccgccgcttccaccgctgcccgccttaccgccgctgccaccgttgccgccattgccgccgctcccttcacccgggacgacgacgacgcggccgcggccaccatcgccaccgccgacggagtgcctgacgtcgctcgtggagctgctgccgtgcgtcgactacctcaccaacgacgccaccgcgccgccgggcgcctgctgcgacggattcaggtcgctcgttggcagcgcgctcatctgcctctgccacggcatcaatggcgacatgagcaggatgatctccaggcccatcgatccggtccgcatggtgctccttcccgccatgtgcagcaccatgctgccgccgcagtcgcttttcatatgctacacggaaacagtgccaccattggtgccatagttctacggtgcatatgctactgtcttcagtaa

SEQ ID NO: 72730 - DNA, 204 bp, Oryza sativa
  Clone ID: PAT_MRT4530_73080C.1
atgccgctcgaccggatctggtgggatggcgatggcggcggcgacggggacggcgacggcggcggggttggtgacgacgaagatcgggaacagcagcatcaaagagatgatgagaccggtgaattcgatgagataagctgggtttcgcgtcaggttgcaggcattcctactgatgtccctcttgctaatgcagatgccatttga

SEQ ID NO: 72731 - DNA, 630 bp, Oryza sativa
  Clone ID: PAT_MRT4530_73081C.1
atgccgccgcggcgtccggcaccacggcgagggagcgccgcctcgccaagggttctggagaatgcctgcagggacgacgacgaactccgcgccattctcggtgatagcatcgggaacccagagctcatgaagcaaaggatccaagaaagggtacgcaagaaaggcagggcacaattcaacaaatccaagacagggtctattgttgcattcaaagtcagctttcgagaaaagaaatcaccctgtcttgacatcaacatcatttatattctgcaggtgattcaggcttggtatgtcatggggagattaggagcttacaactcttcaaatttgcagctggccaattcaatgctggactatgacccttcatatgattctgatcaagcttctggtgtgatgccttcatctttccatgatatcagtgatgtcgaattccaagacaattggggcagagtttgggtggatcttggaacatcggattatcttggattggatgtattactcaactgtcttacacaattaagctcagagcacttgggcatcaaacaagtggtatttggtggcaaaaaaatgggcgactgggaagaggggatgaagaactctgattacggatacaggcatttcaagatatag

SEQ ID NO: 72732 - DNA, 1101 bp, Oryza sativa
  Clone ID: PAT_MRT4530_73082C.1
atgcgccggatttgggcaagaagccagatccggctgccctccttaccaccaacgttggccgacgccaagaagcgtcggagaacgccagtggcagtcgcgggatgcctgcgtgtgctgcccaccaccggccgtcgcgccgccgccggatccgcgcctccaccaccgccgccctatcgtcgtcgccatccccgccgccataaccacaactccacccggtgcaactcacctcgaccgccaccatcacccgtccccaccgccttccccgtagccagccaccccgccagatctggccggaacggcgcaggtttggcagtcaccgccatcgccgctccgggcggctccctagaccgcccgagcgcgagaagacgaggagagccccgacgccgccatccttgcggccacgcggctttgccggcggccgctcgagcgacggtgaggaggagaagggaggtgggggagaggggcggccgaatcgtcgcctcccaagccacccctggggagagcgacgtgatagaagagtttgcaacaggaatggccatggatttatgcggtattcatgaccattggggtttgaacccttacggggaaaaggcaattatatccagcctacaaccaaattcatcgagcgccggcgatggcgtctccacacagcggcggcgctgcttcgtgtggacggcgggatccagcgaggaaatcatcaagaagggaaaagaaaataacaggaggaaatccatgcatctagtagagacaacaatctgcttgcgaagcatcgctgcttcacgaggagaccaaatccaagcgaagcggcagagacgacatgatctgacggtggctccgctcgatgatgggtacggcactccggcaagcgacgacatgagcttcgtgtggcttcggcggtctcgcgcgacggcagcggcggtggactcggcagcttcttgcgcagttttcacggcggtgaccacggcgcgcgacagcctcgggcagcctagtgacaaggggattatggtgctaatgcgaagcgttgccgcgcctggagcccaggctaatcccacgcctgagctgcatcagggcaagagaggtggaaggagactcaggctgtga

SEQ ID NO: 72733 - DNA, 650 bp, Oryza sativa
  Clone ID: PAT_MRT4530_73083C.1
atctcgcgagcctcacaccgccgagggcgggacgcgaggacgttgagtagcgcgcgcacagggatggcgcgtataccacgaagggccttcggccgggcctaccgaaaccgaaaacttgggcaacaggctcagaccggaggcgagcggagaagaagcccagcgggccgttgcgtccccgaaaaggattcgccagatcaatgggccaagccatttagcccaattagggtccatacatgtaaaggacactatgtatccctaataatgtccttatcgtaagggtaaccatttgtccattcgataacagctggcgccgtccgtggggacctctaagcgaaaccattgagagcgaatgccaccgaagaaggtcgcgaaggagaaggttgctaagcgaaaggagagtgaagcaggaggggagatggctgccgaagagggagtagagccttcgacgcccctcgccgaagctggtgtggcaccttcggctctcgccgcttcgacggggcaaatgtcggacacggttgacgcggcaagggtagttgtggcggcgagggcactccagaccagggcggagatcctttcgacaagccaacctctcccccccgccgggaccccgaccccgcgccgcctcctcccgttcgctaccgccgcggcgc

SEQ ID NO: 72734 - DNA, 513 bp, Oryza sativa
  unsure (1)..(513): unsure at all n locations
  Clone ID: PAT_MRT4530_73084C.1
gcggaggctgcggttgccggcgaggtcgtcagtgcgcccgcgccgccgcattgctccgcattccccaatggcggcagcagcagcggcgggcaacaagtagcgagcacctcacgcggaggagcagccgggggagcgcgagcggcagcagcggcgggcacgcgaagaaaacgagggggacgacgcgcggtcacgcggggtattatcgtgacggttaggggatcagggaggcgcatccagccgtcgatctgtaatcggatggtaaagagatttcgtgtgtcctggcatcctggggcccgcgaggctgtgggctatagttggccatgtgggccgcccggcacggcacggccaggcccccggccgtgcctgggccgaggcttgtcggggccggcacggnccgaccgacgcaccgngccgngccgngccagcccacgngccgnactcacggnccaggcacggnccaacacgcctcgggcccgngctgggccggcccaaaggcacgaggggccggcatgc

SEQ ID NO: 72735 - DNA, 834 bp, Oryza sativa
  Clone ID: PAT_MRT4530_73085C.1
atggcacaccgtgagccacgacgcgtcaccgaagccagcagcagcttttcctgtgatgccgtgtcatcccactgcgacctccacaacaaggcgacgacctctgcagcgactgccacccccagcgggcacatgttcccatcgttggtcttggcaacggcgccgtcatcgcttccctcaatgcagacggagagagaaaaatacctaaaagtgttgcgccagcttgtcttgacgcgcgcagcggggagggaggcggaggccggcgcgcggcgcggggaggaaggggagctgggcctggcggcggaggcggcggcgtctgcatcggcgcgcggggatggaggcgaaggccgtcgctggcgaagggagggaggggagccgggcctggcgacagaggcggctgcggcggcatctgcatcggtgcgcggggtgggaggcggaggccgtcgccggcgaagggagggaggggagccaggcctggcggtggcggcggcggcggcatctgcatcagcgcacggggagggaggcgaccggcgccggcgaagggagggaggcgaagaccggcgccggcgaagggagggaggggagccgggactggcggcggcggcgctcggtggcgtcggcgtctgcggaggcggcgccggtggcgtcggcgtctgcgcgcgcagcggggagggaggcggaggttggcgcgcgaagaagggaggcaggggcggcggcgacggcagccggcgccgagggaagaagcgacgcggaggaatgaaggaggcggcgtcagaagaagaagagaaaagaggaggagaggagaagagagaactgacgggtgggtcccacatgtaa

SEQ ID NO: 72736 - DNA, 497 bp, Oryza sativa
  Clone ID: PAT_MRT4530_73086C.1
ggactaagatccgatctttactcccggttatttcacccgggactaaagatagcgatctttagtcccggattggtactcccggtttggaaaccgggactaaaggggggttacgaaccgggactacaaagggtttctccaccagtgataatcaccagcgctctggccgagagcatatagcacctggccccggtccccctgtccaaccacatgcccctgagcctatctggaaggaggagtaggccggcggagaggcgaggaagcgctccttcttggaacgcggcggcggaaagagctcaccgtcggcgagctgcagggacgaatcgtctggctggaacttgccccagacgacgtcggagtcggcgatggcgcggaaggccggggagacggcggcggcgcggcatgcgtcccgcggcgtctcgagggggatcactctctggaggacatcctgcggcaggcgatcgatccatgcctcctccatcgttttccttcctctctct

SEQ ID NO: 72737 - DNA, 627 bp, Oryza sativa
  Clone ID: PAT_MRT4530_73087C.1
atgacgcagaaatacttctggattacttggacgggattcagggctgtcaccacctaccgcctacctctgacaaatccgtgggatacacaacaaacaaaggtattgacggtcagatattatgatttaaggaccgtcaacacggatctacttcacgttcatggagtcggtgaagcgggtggcgctggggatcgtggcgagcacgcacatacgctggcacacatcgtcggaccactcgtcgtgtgcgaacgccgtggtggtgctcgccatcgcctccttccagctcttcttcatccgcaaccgcgctcgcctgccgccgccgccgctgttccgcagccacactcgcccgccgacgtcatcgctttgcctgctctgggcgcccgttgccgctccctctccgcaggaagaacgaaagataagaagagaaaaaagaaaagagaaaggaagaagatgatgctgacacttttacatagttcaaagccagttagtagggtccaagatgccatgtgggacaaaatcacccagggagtcgatttggaacggttttcaaagttgggggacaggttatacccggttttgcggttgagggatgccattcaactagagacatttttggagggaggaaaatag

SEQ ID NO: 72738 - DNA, 677 bp, Oryza sativa
  Clone ID: PAT_MRT4530_73088C.1
ctctctccttctctcctctcttcatctctctcttgcgctaggggatgctcgccggcggcggaaggtagcgccgccatctcctgttgggtttccatgggccgcagcgagcagatcgatatgggttcctcgtcagtccggccggaacggtgttttcttgcccaaaacaatgatcattcattcattcatcaaccccgtcataacacaagcaaatgatgatgacgaagcaaaatatactccagtcagctagtactagtcgctattgcttctacctttgtatgattaggcacataaatgcggagcggagtttgtcggctctggtgcccaagccgaggccgtggacgaagagcttcctgctcacgggatcggcctccgtcgcgcgccgcacggtcgtcatcatcactggggtcgtcttcgcagccggccgcctctcccctctcccgccggcgaggtggccccctcacccgcccacgtggacggccgcctccgaggatgcgcgtgtcgacgtcgacgtcgtccgcagccacggccgcgctgcctccgccgccgggctggttcccttctctccgttagtttccctcccaccagccgccgcgccgcgccccttttcccagccggacaccgtactctccccgccgcccgtgaaccggagagaagagagagaggagaggagagagaga

SEQ ID NO: 72739 - DNA, 513 bp, Oryza sativa
  Clone ID: PAT_MRT4530_73089C.1
ctaagagaaggggcgcggcgcggcggctggtgggagggaaactagtggagagaagggaaccagcccggcggcggaggcagtgccgccgcggccgtggctgcggacgacgtcgacgtcgacctcggcatctcggcggcgggatgaacgtgtcccgccgaccggccgacacacgcgcgcatcctcggaggcggccgtccacgtgggcgggtgagggggccacctcgccggcgggagaggggagaggcggccggctgcaaagacgaccccagtgatgatgacgaccgtgcggcgcgcggcggaggccgatcccgtgagcaggaagctcttcgtccacggccttggctggggcaccagagccgacgacctccgctccgcgtttatctgccttccgccgccggcgactactaatggtgggtgatgctcgagcacattgacgaactcgaggtcgacgacgaggactccaactacaactcctgctccgccgctgtgccgctgcctggctccctcctccat

SEQ ID NO: 72740 - DNA, 1053 bp, Oryza sativa
  Clone ID: PAT_MRT4530_7308C.1
atgggcatcgagaaatcttatgttgctggtgagcaagcaggcttgttacttgagaaaccattccaaattggtgaagcactacgacaaggttacaccctagatgttgaagctgaggtgcaattagtagacaggatcaagtcaaaactcagaataaaatcttccattcacaacaagttagaaaaaacaaccatgaagaaacttgggcttaaaagggctatgcactttggttggccaaatacatatgtgctgacaaaagctatgggggagatgttacttcgacaattgggaggagaccttccagttgtcatcgtccggccaagcataataacaagcacttttcaggatccaatgcctggatggatagaagaaactaggacaattgatgccatatttgttgcctacaatgaccaaacccttccttgttttatatttgatggtagtgttatatttgacctgataccaggagatatggtgattagtgcaatgatggcagccataaatagtcactggaataaacaagctcaagtgatataccatgtgacttcggctcaccaaaatcccatacaattatctcttattgaagaatcgatgtacaaatacttccacacaaatccacgtacaaataaagatggggagagcataaaaaacaaaagagttttaatgttcaagagattcgcatacttccaggcatacatggctctacggtataaggtgccattggagatgatgcgtgctgcaaatgctctgttcggagggatatactccaagaactacaataagcttaaccgaggctacaacattttaatgactgtggcaaagctgtacgccccatatgtcttcttcaaaggatgctttgatgacaccaacttgaggaagctgtcgaaggctatggctgtggaccaaaatgatgtatccatatttaattttgatactaggtgcattaactggagctcatacctcgtgaacaccaatattccggctgctataaagtgttgcttaaggcctcgggagagtgttgccgatgatagatcggagtcgacttgggagaagtag

SEQ ID NO: 72741 - DNA, 706 bp, Oryza sativa
  Clone ID: PAT_MRT4530_73090C.1
gagtaatcatctatgaacactttctcgagttctatcttcatcatcaaaagctcggagattgtagccagcttacatatgcgggcaatgtcagtcgccattaatttcatctcaacttctccagccatagtaagtactctaattgaatagaggatagcagatggatatctctcttcatcgccattgttgttgaccttttctctttcaatgaggaacttggcgaagatgtcgacggcagccttggatgttgatggtatgttgatcatgcagttctggaggatcttccatctcatgtgcgctaccatcaccgagagtaacttgtatctttccatcctccatcggaaagctagatacggggatacatatatggatatgctatacggggatacgaggatacggcattttcgagacttagcggtggtgacgggcttggaggccggcggagacgcttcgcccaatggttgtgatgcagagaccgccgaccagcagaggccctccgccggggagcggccacaacgacgcctagatgccggtggacattcctgtagctcagatggcgagacgcggcggaacccaacagccggctagtggaggccctgcgcggctgcgcctgcctcggactgcttcggggatgagtgagatagcaggcggtgaggcagcgcattcccggcgccgcgggtggattgggtcgacgcttccgtccgtgtga

SEQ ID NO: 72742 - DNA, 1488 bp, Oryza sativa
  Clone ID: PAT_MRT4530_73091C.1
atgcttcgcaccggcggcggagcgcgagccacggcggcggcgcagctgctctcctcctcctcctcgccgccgccgctccgcctcccccgacgcttcctctcgctgacggccaccccctacccgctctactacgacctcctcctctaccgcccctcctaccccaatccgcccaaatcctccgccgccgatgaccgccacacccggcccaccgacgaccacctcgaccgcgccaagcgccggtacctccggaagcgccgcagccgcctcctccccgaccccgacgccaccaccgccaagccctcctcctcctcctcgtcggagttcgtggagctgaagccggaggtggtggacttcccgcggctgcacgcgcgggaggaggcgctctacttccacgacgcgttcgcgctaccctgggagaaggacaagcactaccgcatgctctaccgcctcgagaagaagtacttcccggaccaatccctcgacaacgccttcgtccccgccgacgcctcgccgccttcctccgacgccgccgacaagggcctcgtcttcttcgacgacgacgataacaacaaggaggcggaggtgaagaagaagaaggatggcgaggatcgaggggaggtgttggagaggaaggtggaggatttcttcaggtcattgaagaaaggccctggccatggcgaggctaacgtgatgaaggcgaagaagaaggagcctccgcaggtgaggcacgaggcggatgaatggccgcagccgcatctcgcgagcaggagaacggagctgccgccgaggtggaacggcccgaccgggacagtcgtgctcatcgacaagcccaaaggtgatgcctctttatcctctcttgatgaacggtctaatgcacgtttcaagagattgcatcagaatttggttctgtttatggagctcaacatatgcctttcttgtaaaccaggctggacttcatttactgtttgtggaaagctgcggcgattagtgaatgtgcaaaaggtcgggcatgctggtactctggatccaatggcaactggactgttgattgtttgtgtgggtaaagcaaccaaagttgttgatagatatcaaggaatggttaaaggctatagtggtgtttttcgacttggagaagctacatcaacctgggatgcagattcaccagttatccagagagaaccatgggaacacattaaagatgaagatattagaaaggtagcagcatcattcaggggcgagatatggcaagttcctccaatgttttctgccattaaggttggtggtgaaaaaatgtatgacaaagcaaggaggggtgaaacagtagagctttcaccaaggcgaatatcaatacaccagtttgatattgagcgcagtttagaagacagacaaaatctgatatttcgagttatttgctcaaaaggaacatatattcgatccctctgtgcagatttggggaaagcgctcggaaggcggttctgcattgaatga

SEQ ID NO: 72743 - DNA, 2046 bp, Oryza sativa
  Clone ID: PAT_MRT4530_73092C.1
atgagccttgttatggttacaattcttggagggcgcttgtgcttcattcttggagcttagctcggagcagtgagccggtcaaagctttctccccctccgaatcccaatggtccagtttgatatgcagcagctgtttataagacagacacaatctcatatttcgagagatttggctcaaaaggcagcgaatattcggatccctctgtccagatttggggaaagcgctcggaagctgtgcccatttaactgccttccggagagactcaattggcgacttttcagtcaatgatgcttggagttttgctgagctggaggaacaaatcccataagggatatttatgattactcagccatgtcatttggcaaaattgcagccatcgttgggttcagtttgagtttcagcgcttagcgaacaagtgctttcttccaatcttccctggtaggcaattggtcgttgagtactgagaagctattaaccaacagtaacgctcaacccagagatcagcacttaatctgacgtttcagaccttgggggaaaggaattcattctggtgtccctggacacatacggatgtagcagctttatatattgcaatgatgcatacctgatgtagcatgcatcctaaattttgatgtggaacatttgtcaacattacgatgaaatagaatgtggttatacttgattatgaatttatgatcaaagaaaatgaaatagtaaaaagagaagaaccaactaaagaaaagattggggttcttgatgcacagtggattgttcaccgagcagatccatttccacgggaccagggcagggccaagaatggaagaccagctggggaaggtatgagggcgaggagcaggaaggatggggttatgtttaagataagaatggaggaggaggagaaggtgtacaccaagatgatgggcatcacccctccgaactccacactgctgctctcctcctcctcctcgccgccgccgctccgcctcccccgacgcttcctctcgctgacggccaccccctacccgctctactacgacctcctcctctaccgcccctcctaccccaatccgcccaaatcctccgccgccgatgaccgccacacccggcccaccgacgaccacctcgaccgcgccaagcgccggtacctccggaagcgccgcagccgccttctccccgaccccgacgccaccaccgccaagccctcctcctcctcctcgtcggagttcgtggagctgaagccggaggtggtggacttcccgcggctgcacgcgcgggaggaggcgctctacttccacgacgcgttcgcgctaccctgggagaaggacaagcactaccgcatgctctaccgcctcgagaagaagtacttcccggaccaatccctcgacaacgccttcgtccccgccgacgcctcgccgccttcctccgacgccgccgacaagggcctcgtcttcttcgacgacgacgataacaacaaggaggcggaggtgaagaagaagaaggatggcgaggatcgaggggaggtgttggagaggaaggtggaggatttcttcaggtcattgaagaaaggccctggccatggcgaggctaacgtgatgaaggcgaagaagaaggagcctccgcaggtgaggcacgaggcggatgaatggccgcagccgcatctcgcgagcaggagaacggagctgccgccgaggtggaacggcccgaccgggacagtcgtgctcatcgacaagcccaaaggctggacttcatttactgtttgtggaaagctgcggcgattagtgaatgtgcaaaaggtcgggcatgctggtactctggatccaatggcaactggactgttgattgtttgtgtgggtaaagcaaccaaagttgttgatagtaaacctcctgttctagcattcttgaaaactttcctgagtgaatgtccatatgcttttaaagatatcaaggaatggttaaaggctatagtggtgtttttcgacttggagaagctacatcaacctgggatgcagattcaccagtatgtatcttgtattctgataaaatga

SEQ ID NO: 72744 - DNA, 392 bp, Oryza sativa
  unsure (1)..(392): unsure at all n locations
  Clone ID: PAT_MRT4530_73093C.1
ttnttttttacacaaagtttcttttttaattttttggggtttttttattttttttttgggggtaacccaaaaacaaaattacaacactagtacaaaacaaaaagcncccccgcggcaaaggggcaagcacacaagaatccaccaacacgcaaaccaggggggggagcaaagatcagggggggggggggggggaaccaccacgaaaaggggtagacggcgggggcagggaaacaaaagacggagcccccccgggaccgaaaccagcgggacagggggagccaaaggcgggaccccccccaacaggagagcacaccgcccgccaaaacaaaaacaaaggggggcaggaacggcagccgccccacaaggaaacacaagggacgaccccaaggccc

SEQ ID NO: 72745 - DNA, 284 bp, Oryza sativa
  Clone ID: PAT_MRT4530_73094C.1
atggggtcatttttcaattataatatttacttttaatatcattatcacaaacattaaaaaacaacaaacaaacatgatactcctaacttatctaccaaacatttataattaattaaccaaaggactaacttaattattaaccactcatgaaataattaatctaatccatgccttcaccaaacattaggcattctaaagaaccgctccttttctccatgttacacccataaaaaaccatcaccacgctcaacataccgaaattttcattacgtgaaacccttaaa

SEQ ID NO: 72746 - DNA, 1221 bp, Oryza sativa
  Clone ID: PAT_MRT4530_73095C.1
cggacgcgtgggcggccggggcgcgtggcgtgggcgtgtggtggtgccgtgcgccgcgcgcgcgccctcttcgcccttgcctgccgcgcgcgtcgtccaatggcgccagcggccaccggcggtggcggcggcgaggacgacgcggcggtgccgctgctgctgcccgtgctgccgccggcggcggggtggtgcagctgggagtgggaggacgtggcgatctccgcggggctggtggcggtgcagctcgcgggcgcggcgtacatggtggtgctcgcgccggtgctggcgctcggcctcgacccgctcttcctcgtcaccttcggcagcctcgccacgggcctcttcaccctccctttcgccatcaacctcgagaggaagagatggccgtcgcacctcaacgccaaccaccttcttctccgcctcttcttgctcgccctcggaggggtgacggtgttccaggcgctgatgctgcacggcatgaagaagacgtcgccggccatcgcctccaccatgcccaacctcgccccggtcttcatcttcgtcgtcgccgcgtgcctcggcttcgagagggtcgacctcagctgccggtacacgagggccaagatcgccgggacggtgctgtgcctcgccggcgccgtcaccatgagcgtcctgcagagccccgccgccgccgccgccacgcgtagcagcagccacaggacgacgacggcggcggcggcgaacgccggcgggggggactgggccgtcgggtgcgcgtgcctcctgggcgcggtgctggtggtgtccggcaccaccgtgctgcaggcggccaccatggtgcacttcccggcgccgttcacgctctgctccgccacgtcgctcgccggcgcggcgctcacgggggcgttccaggccgccaccgccgcgggcgggctcagccccggcacgccgcagatcagcctccagatcatcctctccctcctcctcgtgacatgggcgctggagaagaaagggcccgtggtggtctccctctttagcccgacgcagaccgtcggatcggcgatcttctcggccttgttcttgggtagggtggtccacccagtgagcatgctgggaatggttttcctgttctccggcctttatgtcgttctgtgggctaagaagaaagaatgccaggttgacagaatggttgaggacggaacagccaacgatatagagaaaccgctgttatttcaagattag

SEQ ID NO: 72747 - DNA, 851 bp, Oryza sativa
  Clone ID: PAT_MRT4530_73096C.1
ccacgcgtccgcccacgcgtccgcccacgcgtccggttccaggcgctgatgctgcacggcatgaagaagacgtcgccggccatcgcctccaccatgcccaacctcgccccggtcttcatcttcgtcgtcgccgcgtgcctcggcttcgagagggtcgacctcagctgccggtacacgagggccaagatcgccgggacggtgctgtgcctcgccggcgccgtcaccatgagcgtcctgcagagccccgccgccgccgtcgccacgcgtagcagcagccacaggacgacgacggcggcggcggcgaacgccggcgggggggactgggccgtcgggtgcgcgtgcctcctgggcgcggtgctggtggtgtccggcaccaccgtgctgcaagcggccaccatggtgcacttcccggcgccgttcacgctctgctccgtcacgtcgctcgccggcgcggcgctcacgggggcgttccaggccgtcaccgccgcgggcgggctcagccccggcacgccgcagatcagcctccagatcatcctctccctcctcctcgtggcgtatgtatgcagggcgggctagtaagctcggtgtgcgtgatgttccagacatgggcgctggagaagaaagggcccgcggcggtctccctctttagcccgacgcagaccgtcggatcggcgatcttctcggccttgttcttgggtagggtggtccccccagcgagcctgctgggaatggatttcctgttctccggcctttatggcgtcctgtgggctaagaagaaagaatgccaagttgacagaatggttgtggaccgtacagtccacgatttagagaaaccgctgtttttttaagat

SEQ ID NO: 72748 - DNA, 579 bp, Oryza sativa
  Clone ID: PAT_MRT4530_73097C.1
cactttttgcttaggccaaagtgcgtgtgattatgtgcccaataccttaaaatccttttatactgcagttactcaattttttaggagttggtacaatgcattttaaaaggtgcccaatagtgaagtttttcatagctgccccgctgacttttttatatagtcaaggcactgtttgggttttttaagcaattgattagatacaatatcattgctttttgccacccctctacaatcttcatatttggtaaaagtactcaggagaccatggcaaagatgattgaagcacttggctttggagtaatctggttcgagagaagattatcttttcgacttcttccatgcatattgttttttattttcttcatgagacttgctgtttgaccgtaccagcgctgtacaccctaacaaactggaaatcctgttcggcgatcgatcgctctggggatggatcagcgatcgatcgcctcctccctccctggctccctccctccacccctctacctggtttctttttttttggcaccgcattactttcctattttagtaaatttatatacttaaagtttatacacctcaagt

SEQ ID NO: 72749 - DNA, 179 bp, Oryza sativa
  Clone ID: PAT_MRT4530_73098C.1
ggtaaaaaaaaaaactatgatacgcaatagcgccatatcatttgatgagaaatcccgtgtttgctacgagcttgcctgcactatacattgtaacacccgaatacaaaatcatcttttaagggacccataaagaacacctacgggcgactttccattagttaattcttttatgacagtaa

SEQ ID NO: 72750 - DNA, 3005 bp, Oryza sativa
  Clone ID: PAT_MRT4530_73099C.1
atggctgaccgcgatgaggaacagatattgtacgatacaatcgcggagggaagcagccagtactggaatgaagaagaggggaacgaggatccaaaccagtacttgaacgaggaagggaacgtggagagggatgaggaggggaaccagcaggggcacgtggaaagggatgtggaggggaaccaggaggaggaggctagtggtagtcaaccctccgttggacagaagagggcacgcgggcaacgaggtgcagcgaagaagcttgagggtcggcacatcataacggaagtggaagaagatggacgtcctagtgccccggccgaagccgccaagaactatgtacgtcacagcggttgggttgtgcgggataacgtgcctgtcagtacggtgtactggcgaagaacaagggcacgcggagatcatgagagctttgtcccagattcggagaaagagatgctgtggaccacaatgctcgagacattcacccttcctgcgggtacagaggacaaagtgaaaaggtggactctgaagaaaatggcagaacagtttcagagcttcaagggagatctgtaccagaagtatatactgaaggggcagacaccgaacttcgacacattcccaaagctaagggatcactgggacgagttcgttgcatataagacaggtgaacaagggcaggtgatgatggaaagaaacaaagaaaatgccgccaagaagaagtaccatcaccacttggggtcaggaggctatagcgtcgcgatgccgaagtgggagcagatggaggctagcttgattgagaggggtatcgaaccggcaacagccaattggccggaacgatcgaagttctggagtcggatgaggagcaagagagataccgaggcgaagattgcagacctagagttccgggtatcgagctacgaactcaacatgcaagaggaggtggcaaggaaggttgatgaacgcatggccgcacatcggtcccatgatccccagccgactattcctcctgcaatggtgagcccgtcaggaaaccgtagcagctgcgcctcaacggggcaggtggcgtcgggcatggccatcccaacggaccctttaggtacttaccactgcaggccgattccagcaggatactcgaaggtcgaagttgagttggtcgaaggcgcgtacgaggacctcgagctggattaccctggaggagacggtgagacgcatctacgagacacatgccatgccattattctatggcgcaggcggtacatcatcctccctgggctacaagcagcgtctcgtgcaccatctcctccggctccgccatctcctcctcaggagcctgcaccgggttctcctcatgcttccccagcaccgtcttcacctcaggctccagcatctactcctcctcaggatcctggaccgactcctcctcgtgctcctacacctactcccccgcaagctcctctttcggcaccttcaaagtcaagggccctccaactacaccgtctgcccacacaagggcaacgaaaaaggcgaaagttgacgccgccaagaacaaggacccggggtacgattgcacgcaagaggagcttgacgcttacgttgcatcaaaagtcaagagacaattcaagcctcgaagtccagaaaagaagattcctatagaccctagtgtcaggaacttcttcaggggtatgtctgcatctgtcaaggaggccatcaagctatcagactatgagcgaacgctgaagaaagcatcttctggaaagtccaaaccagtccctcagcttggagagcaaccaaaccaggagatcgagccgttggtgaccggtaaagaaatgacgatagaacaatttattactgacactggtctaactacggatcaattgctaggagtcgcaccaatcgaaaaggcggaagtgaaatacatgtacgaactcggtaaaccgcttgtcaagcctgagctgctgcagtccctacccacacaaatgtacaagttccatcagctgtacatggagatgagcgccaccggtagagagatgatcggagcgaggatcaaggacactgacttcttgcaaggagatgacattctctggatcaatttcaggggaatctacgaactataccagctggacgccctcgacgtctctattatgagttactggattttaatggagattcaaagggcccgacggcggagggttttcgatactggattcatcgaccctcggaaagtaaacgtcgcaatgctcgaccaatatccacaagaaacagaggacaatctcgtccatctcctgaaggcgcagcattacaagacgttcatactgttgccatacaacacagaattccactgggtgcttttactcatcgacctggaggcctgcaccgtcaaccttgagatgggggaactggagcatcaggtcggtgcaatcagggacgcggcattggctgaaggcagcgacgcggagggtgttggagaagcggaaaatggatggcggcagcggaaggagttgtctcatatagcagaggtcttccgtgaactcgagctcctcgaggttgttgaaccttggcgatgtcagccagccttcgaccatggcggggcgctcgtggatctgctgcgcggggatgcaaaagcggcgtacgggccccgcatgagcgaggagtatatgggtgaggaggacggctagcgccgccccgttggcgccgggggcgagatcgctggcgccgtccttgctcgggaggagcgagatgatgatgccaagaacggcgtcagggaggtggctgacgaagtcgacgccctcctcgccgccgtctcctccaactccgagtggcggaggtacatggctgcgcccccttctgctccccgtggccagaggcagcgacggcttgcatggtggtgctgcttcatccgggaccgggtcgtcgcccttcgtcgccccccttcccctcttcctggtaggcttcctggtaggcggtggcggcggcggcggcggcggaatcggcggatttgcgggctccat

SEQ ID NO: 72751 - DNA, 1374 bp, Oryza sativa
  Clone ID: PAT_MRT4530_7309C.1
atggagcccgtcgccaagcgggcccgtacgggcggcggaggcggatccgccgccgtagatcgcctgagcagcctgccggacgccctcctccacgccgtcatgtcctccctcccggcgcggcagatggtgcagacgtgcgtgctgtccaagcggtgggtacatctgtggcgctcggtgcctagcctcaacctcgacagcagggaatttctcctaccaatatatgatagatggcagaagatggaggatttcaccaccaacctgctcatgttccaccacgctccgaccttagacgcgttcagcatccgtgcagacgtagctgttggcaagcacggccgccatgtcgataggtggattcgctgtggtatcaagtactgcccccgagtgctggacatcgcggtcgcaaccgttgattctaggtacaggctgcccgatctggcctccggttcttgtcgcctcggaaggttgcatctttcttatgtggctctgcacagcggcttcgcgaggcaggtgcgcgatagctgccccgtgctccgatgcttggagctccaccgctgtctcaccaagtttagccacattgagtccagcacactgaacaggttggtcattgaagactccatgggtggctccgatagtttagctatcagtgctcctcgtcttgcttccctgcgcctggtggcctttctgttccacacatacaagaatggtgtttcgttaaacggagcgaattcccttgtggaggcttctgttgctgtgaagtctggccgaacctcgccagaaggtgaagccatgcttctttgcggcctgttcagtgtttccagtttggagttgaagggtatacaggaactggcaatacttcatgaaaaatttgataaatcccaatcattccacaacctgagaaccttgtcactagacaattgttttcaagctgaaggtgatttgaaggacaaattcagggctctcggaaagttgctagaaatgtgtcctaatttggagaagcttacattgcagcattgctggtttttaggaggttctactcaaagggcaaagagaaagaccagaacgagtgggctctgtctcgaaaatttctctgaaaccctaggagatgcagacgtggatgcagcgttggattcttggcagcctgttcgaccaattttatctttacagcgccttgaggataagttctactacaaggttaccatgaagaagtttcacctgttcatatcaagtacgttctgtgtgtttcagatttcagaacgtctcaaaaggggtgaagacggcgagacggaccttgattctgtccctgatcctcatgatttcaacacttcacaatgtccgaatttgaaggtgatagagatcaagtataaattaatatga

SEQ ID NO: 72752 - DNA, 330 bp, Oryza sativa
  Clone ID: PAT_MRT4530_730C.1
atggacggcattcctaaattaactgcaaatgaattaagaagacaaagagaccgagagcggtacgcggcactcagcgttgaggagaaggcagcacgagttcaaaagaaccgtgaaaataggaagaggaagaagtctgcatctacatcgggcacagcccggaccgtgtggccgagtccccgccgcgttgcgtgccagctccgacgtgatgctcgccacccgctcacggcggcggtgctgcccttcaacgcacctgacgtggagctagccgccgggttccgcccctacgacgtcatcctcttctccggcgaaccacgctctagcacgtgctag

SEQ ID NO: 72753 - DNA, 527 bp, Oryza sativa
  Clone ID: PAT_MRT4530_73100C.1
gccgctccagatccggccgtcgtcagcgcctcctctctcaccggccaccgctgcgcctcctctctcacccaccgccaccccgtctcctctctccccgaccgccgccgtgcgtcctctctcgccggcgcggcacgccgcccccagatccggttgccgtcggcgcatcctcttcccgtctcctctctcaccggccgccgagctcgcgtcccactgccgccgcgctcgtcgcccacgccggccgccgagctcgctgcccaccgtcgtcgcctcctctctcgtcgcctggcttggctgccgccgagctcgcgtcgtcactcaccctagccgccgccaagctcgcactgtggtgagaggggtgacgcgacccactgtcgctcgcccctgctcgcccgggcgctcgggcggctgcatccggccgaatcggccggatccccccatccagcatctggggggaatattcccctccgggccgccctatcccacctccgaccaggaaccaaacacccacaaaaaaatgggccgccatg

SEQ ID NO: 72754 - DNA, 1473 bp, Oryza sativa
  Clone ID: PAT_MRT4530_73101C.1
atgtttcttggattaacagaatggctgaccgggaagaataaccaaatttattaccggaccattccccaaagggaagcagccagtactagaatgaaaaaaaatggaccaaggatccaacccattctttaataaggaaggaaccttgaaaaggaatccgaagggaacccaccagggccccttgaaagggaatgtgaagggaaccaagaagaagaagctagtggaagtcaacccttccttggacaaaagaggcacgcgggcaacgaagtgcagcgaaaaagcttgaaggtcggcacatcataacggaagtggaagaagatggacgtcctagtgccccggccgaagctgccaagaactatgtacgtcacaacggttgggttgtgcgggataacgtgcctatcagtacggtgtactggcgaaaaacaagggcacgcggagatcatgagagctttgtcctagattcggaaaaagagatgctgtggaccacaatgctcgagacattcacccttcctgcgggtacagaggacaaagtgaaaaggtggactctgaagaaaatggcagaacagtttcagagcttcaagggagatctgtaccagaaatatatcctgaaggggcagacacccgaacttcgacacattcccaaagctaagggatcactgggacgagttcgttgcatataagacaggtgaacaagggcaggcgatgatggaaagaaacaaagaaaatgctaccaagaagaagtaccatcaccacttggggtcaggcggctatagcgtcacgatgccgaagtgggaggagatagaggctagcttgcttgagagggacgtagtggaagcctcttctcagggcacgttccgaccggacagagagaaggacgagctgttactcgccctgcagactccagagcatccaggacgaacacgagggaaaggagtgattccttggaagattgggttcaaggaggacatccacacgtataggagttggatgaggagcaagagagataccgaggcgaagattgcagattttgagttcagggtatcgagctacgagctcagcatgcaagaggaggtggcaaggaaggttgatgaatgtcacgcccagaaattcccgaatagaattccaagcagaatgtgcattaaaatccccgtccaggaccggccggggtacacaaacgacaatgttgacattcagatccacgtcttacaaacatcataaaagtcttacataaatgcagcggaaaaacgaaagacaacaggagctaagccttgactagaactgcagcgggaacaccactccacaggcatcctcaacggcacggacgaagcctactcctcggagaaacctccatctgacacatactcatactctggggttgggaaaaatagagcaagactgagtactacccactgtactcagcaagtcataccggaataggggtatgatgcagggaattatcaaaggagagctagagtg

SEQ ID NO: 72755 - DNA, 3494 bp, Oryza sativa
  Clone ID: PAT_MRT4530_73102C.1
atggtcggtgcgggagctccgttggcgccgcggccgcgcagcgccacgccgccgccgccgccgtggcgccgccgcgtcaaccgccgctccgatgccgccacaccgccgttaacgaacgagaacgagaacgatcgaacgaacgtgagcgagaacgaacacgtcaacgtacgttgccgcgagaacgtgaacgagaacgagaacgatcgaacgaacgagagcgagaacgaacatgtcaacgtacgttgccgcgagaacggaacgagaacgagaacgagaacgatcgaacgaacgagagcgagaacgagaatgatcgaacgaagacaagcgagaacgagggaacgaacgtgaatgagaacaagcgaacgaacgtgaatgagaacgagcgaacgaacgaggacgaacaagaggggaacgaggatccaaaccagtacttgaacgaggaagggaacgtggagagggatgcggaggggaaccagcaggggcacgtggaaagggatgtggaggggaaccaggaggaggaggctagtggtagtcaaccctccgttggacagaagagggcacgcgggcaacgaggtgcagcgaagaagcttgagggtcggcacatcataacggaagtggaagaagatggacgtcctagtgccccggccgaagccgccaagaactatgtacgtcacagcggttgggttgtgcgggataacgtgcctgtcagtacggtgtactggcgaagaacaagggcacgcggagatcatgagagctttgtcccagattcggagaaagagatgctgtggaccacaatgctcgagacattcacccttcctgcgggtacagaggacaaagtgaaaaggtggactctgaagaaaatggcagaacagtttcagagcttcaagggagatctgtaccagaagtatatactgaaggggcagacaccgaacttcgacacattcccaaagctaagggatcactgggacgagttcgttgcatataagacaggtgaacaagggcaggcgatgatggaaagaaacaaagaaaatgccgccaagaagaagtaccatcaccacttggggtcaggaggctatagcgtcgcgatgccgaagtgggaggagatggaggctagcttgattgagaggggtatcgaaccggcaacagccaattggccggaacgattgaagttctggtactatgctcacggtggaacgctcaacccagctgatggctcactggtcttcggcgatcagatacgagaggctgcgcgacgactaacagatgcagtggaagcctcctctcagggcacgttccgaccagacagagatagggacgatctgacactcgccctgcagactccagagcatccaggacgaacacgagggaaaggggtgattccttggaagattggtttcaaggaggacatccacacgtacaggagtcggatgaggagcaagagagataccgaggcgaagattgcagacctagagttccgggtatcgagctacgaactcaacatgcaagaggaggtggcaaggaaggttgatgaacgcatggccgcacatcggtcccatgatccccagccgaccattcctcctgcaatggtgagcccgtcaggaaaccgtagcagctgcgcctcaacggggcaggtaggatcacagagcatggacgccatgcaaacacaggacgaatcgacctgtcccgttgatgacatcactcagcggacatcatgtgagctgcatattcctttcaagaacttatcaataaaggtggcgtcgggcatggccatcccaacggacccttcaggtacttaccactgcaggccgattccagcaggatactcgaaggtcgaagttgagttggtcgaaggcgcgtacgaggacctcgagctggattaccctggaggagacggtgagacgcatctacgagacacaagccatgccattattctatggcgcaggcggtacatcatcctccctgggcgacaagcggcgtctcgtgcaccatctcctccggctccgccatctcctcctcaggatcctgcaccgtctcctcctcatgctccgccagcaccgtctccacctcaggctccagcaccgactcctcctcaggatcctgcaccgactcctcctcgggctcctacacctactcctccgcaagctcctcttccggcaccttcaaagtcaagggcccccccagctccatcgcctgcccacacaagggcaacgaagaaggcgaaagttgacgccgccaagaacaatgacccggggtacgattgcacgcaagaggagcttgacgcttacgttgcatcagaagtcaagagacaattcaagcctcgaagtccagaaaagaagattcctatagaccccagtgtcaggaacttcttcaggggtatgtctgcatctgtcaaggaggccatcaagctatcggactatgagcgaacgctgaagaaagcatcttctggaaagtccaaaccagtccctcagcttggagagcaaccaaaccaggagatcgagccattggtgaccggtaaagaaatgacgatagaacaatttattactgacaccggtctaactacggatcaattgctaggagtcgcaccaatcgaaaaggcggaagtgaaatacatgtacgaactcggtaaaccgcttgtcaagcctgagctgctgcagtccctacccacacaaatgtacaagttccatcagctgtacatggagatgagcgccaccggtagagagatgatcggagcgaggatcagggacacggacttcttgcaaggagatgacattctctggatcaatttcaggggaatctacgaactataccagctggacgccctcgacgtctctattatgagttgctggattttaatggagattcaaagggcccgacggcggagggttttcgatactggattcatcgaccctcggagagtaaacgtcgcaatgctcgaccaatatccacaagaaacagaggacaatctcgtccatctcctgaaggcgcagcattacaagacgttcatactgttgccgtacaacacagaattccactgggtgcttttactcttcgacctgtcggcctgcaccgtcaacgtatatgactcaatggataaaaaagagtctacgtttgacaaggttttcgaacttatagacagggcttggtatcggttccgtcatttggtccgcggtaaatggagagaaagacttaggcggaagttcaaatttccttgcacaaagcaaaagcagggaactaacttgtgcggctactacgtgtgtgagtattgccactgccttgcagaccaaatcatcaccacaagagagctcgattttattcgcatgagggataacctgaccacacacaaggaatttatcgcagcggttcaagaacaactcatgggattcatcaacgaagaaatccttgatcccaagggtgaattctactacgacggaaacacaattcaccggtccgtagcttctgagctagcagcgactactactacgtcgaaatcgtag

SEQ ID NO: 72756 - DNA, 3385 bp, Oryza sativa
  Clone ID: PAT_MRT4530_73103C.1
atgccgccgccggcacgccacgccgccgccgccacggccccgcaacgccacgccgccgccgccgtcgccacgccgccgcgccaaccgccgccccgatgccgccacaccgccgttaacgaacgagaacgagaacgatcgaacggacgagagcgagaacgaacacgtcaacaaaagacgtgttgtcggagtcgtccgtcaagcctaagtggaagagctagccctagaaggaattggagcaggttacggccaagttcgatggctgaccgcgatgaggaacagatattgtacgatacaatcgcggagggaagcagccagtactggaatgaagaaaaggggaacgaggatccaaaccagtacttgaacgaggaagggaacgtggagagggatgcggaggggaaccagcaggggcacgtggaaagggatgtggaggggaaccaggaggaggaggctagtggtagtcaaccctccgttggacagaagagggcacgtgggcaacgaggtgcagcgaagaagcttgagggtcggcacatcataacggaagtggaagaagatggacgtcctagtgccccggccgaagccgccaagaactatgtacgtcacagcggttgggttgtgcgggataacgtgcctgtcagtacggtgtactggcgaagaacaagggcacgcggagatcatgagagctttgtcccagattcggagaaagagatgctgtggaccacaatgctcgagacattcacccttcctgcgggtatagaggacaaaagcttcaagggagagctgtacaagaaatatatcctgaaggggcagacaccgaacttcgacacattcccaaagctaagggatcactgggacaagttcgttgcatataagacaggtgaacaagggcaggcgatgatggaaagaaacaaagaaaatgccgccaagaagaagtaccatcaccacttggggtcaggaggctatagcgtcgcgatgccgaagtgggagcagatggaggctagattgattgagaggggtatcgaaccggcaacagccaattggccggaacgatcgaagttctggtactatgctcacggtggaacgctcaacccagctgatggctcactggtcttcggcgatcagatacgagaggctgcgcgacgactaacagatgcagtggaagcctcctctcagggcacgttccgaccagacagagatagggacgagctgacactcgccctgcagactccagagcatccaggacgaacacgagggaaaggggtgattccttggaagattggtttcaaggaggacatccacacgtacaggagtcggatgaggagcaagagagataccgaggcgaagattgcagacctagagttccgggtatcgagctacgaactcaacatgcaagaggaggtggcaaggaaggttgatgaacgcatggccgcacatcggtcccatgatccccagccgaccattcctcctgcaatggtgagcccgtcaggaaaccgtagcagctgcgcctcaacggggcaggtaggatcacagagcatggacgccatgcaaacacaggacgaatcgacctgtcccgttgatgacatcactcagcggacaccatgtgagctgcatattcctttgaagaacttatcaataaaggtggtgtcgggcatggccatcccaacggacccttcaggtacttaccactgcaggccgattccagcaggatactcgaaggtcgaagttgagttggtcgaaggcgcgtacgaggacctcgagctggattaccctggaggagacggatcctgcaccgtctcctcctcatgctccgccagcaccgtctccacctcaagctccagcatcgactcctcctcaggatcctgcaccgactcctcctcgtgctcctacacctactcccccgcaagctcctcttccggcaccttcaaagtcaatggcccccccagctccaccgcctgcccacacaagggcaacgaagaaggcgaaagttgacgccgccaagaacaaggacccggggtacgattgcacgcaagaggagcttgacgcttacgttgcatcagaagtcaagagacaattcaagcctcgaagtccagaaaagaagattcctatagaccccagtgtcaggaacttcttcaggggtatgtctgcatctgtcaaggaggccatcaagctatcggactatgagcgaacgctgaagaaagcatcttctggaaagtccaaaccagtccctcagcttggagagcaaccaaaccaggagatcgagccgttggtgaccggtaaagaaatgacgataaaacaatttattactgacaccggtctaactacggatcaattgctaggagtcgcaccaatcgaaaaggcggaagtgaaatacatgtacgaactcggtaaaccacttgtcaagcctgagctgctgcagtccctacccacacaaatgtacaagttccatcagctgtacatggagatgagcgccaccggtagagagatgatcggagcgaggaccagggacacggacttcttgcaaggagatgacattctctggatcaatttcaggggaatctacgaactataccagctggacgccctcgacatctctattatgagttgctggattttaatggagattcaaagggcccgacggcggagggttttcgatactggattcatcgaccctcggaaagtaaacatcgcaatgctcgaccaatatccacaagaaacagaggacaatctcgtccatctcctaaaggcgcagcattacaagacgttcatactattgccatacaacacagaattccactgggttcttttactcatcgacctggaggcctgcaccgtcaacgtatatgactcaatggataaaaaagagtctacgtttgacaaggttttcgaacttatagacagggcttggtatcggttccgtcatttggtccgcggcaaatggagagaaagacttaggcggaagttcaaatttccttgcgcaaagcaaaagcagggaactaacttgtgcggctattacgtgtgcgagtattgccactgccttgcagaccaaatcatcaccacaagagagctcgattttattcgcatgagggataacctgaccacacacaaggaatttatcgcggcggttcaagaacaactcatgggattcatcaacgaagaaatccttgatcccaaggatagtcttttcacggctgacactaacgtgatcaagtctggtggaatcaccggtgtcaatgccatcacgaccgatgaggttggacgacagggtgggcagagtttacatcaagacgacgtcaccaacattggcgcacggaccgacgaggctgcaaacactgctggcgcctgggagaacgtgaagcgaagatcgatgacgacgaccagcgcagcttaa

SEQ ID NO: 72757 - DNA, 352 bp, Oryza sativa
  unsure (1)..(352): unsure at all n locations
  Clone ID: PAT_MRT4530_73104C.1
ggggaaccaatttgggtaattatgatgggaaaaaaaaaaagatgaccgctctgcatgtattcaacggtcatttgtaaaggaatgccggatcaacaatagtatgccaactggtaaactttaataacgacagaggggattttcagagttgggacaatcaggtctgtgtaaaggatcaccgttaaacaacagcaaagggggttttaagggacttctagnataaggtctaaaaccgggcttttttaaaaacacacaacggggaaatttaaaagaacaggggaaagggtttgccctccgggctgttacctttgggtttggcgcaattaccggcaaaatacattcctggcaggcttta

SEQ ID NO: 72758 - DNA, 3219 bp, Oryza sativa
  Clone ID: PAT_MRT4530_73105C.1
atgccgccgccgccacgccacgctgccgccgccacggccccgcaacgccacgccgccgccgccgtcgccacgccgccgccacgccgccgcgccaaccgccgccccgatgccgccacaccgccgttaacgaacgagaacgagaacgatcgaacgaacgagagcgagaacgaacacgtcaacatggctgaccgcgatgaggaacagatattgtacgatacaatcgcggagggaagcagccagtactggaatgaagaagaggggaacgaggatccaaaccagtacttgaacgaggaagggaacgtggagagggatgcggaggggaaccagcaggggcacgtggaaagggatgtggaggggaaccaggaggaggaggctagtggtagtcaaccctccgttggacagaagagggcacgcgggcaacgaggtgtagcgaacaagcttgagggtcggcacatcataacggaagtggaagaagatggacatcctagtgccccggccgaagccgccaagaactatgtacgtcacaacggttgggttgtgcgggataacgtgcctgtcagtacggtgtactggcgaagaacaagggcacgcggagatcatgagagctttgtcccagattcggagaaagagatgctgtggaccacaatgctcgagacattcacccttcctgcgggtacagaggacaaagtgaaaaggtggactctgaagaaaatggcagaacagtttcagagcttcaagggagatctgtacaagaagtatatactgaaggggcagacaccgaacttcgacacattcccaaagctaagggatcactgggacgagttcgttgcatataagacaggtgaacaagggcaggcgatgatggaaagaaacaaagaaaatgccgccaagaagaagtaccatcaccacttggggtcaggaggctatagcgtcgcgatgccgaagtgggagcagatggaggctagcttgattgagaggggtatcgaaccggcaacagccaattggccggaacgatcgaagttctggtactatgctcacgatggaacgctcaacccagctgatggctcactggtcttcggcgatcagatacgagaggctgcgcgacgactaacagatgcagtggaagcctcctctcagggcacgttccgaccagacagagatagggacgagctgacactcgccctgcagactccagagcatccaggacgaacacgagggaaatgggtgattccttggaagattggtttcaaggaggacatccacacgtacaggagtcggatgaggagcaagagagataccgaggcgaagattgcagacctagagttccgggtatcgagctacgaactcaacatgcaagaggaggtggcaaggaaggttgatgaacgcatggccgcacatcggtcccatgatccccagccgaccattcctcctgcaatggtgagcccgtcaggaaaccgtagcagctgcgcctcaacggggcaggtaggatcacagagcatggacgccatgcaaacacaggacgaatcgacctgtcccgttgatgacatcactcagcggacaccatgtgagctgcatattcctttcaagaacttatcaataaaggtggcgtcgggcatggccatcccaacggacccttcaggtacttaccactgcaggccgattccagcaggatactcgaaggtcgaagttgagttggtcgaaggcgcgtacgaggacctcgagctggattaccctggaggagacggatcctgcaccgtctcctcctcatgctccgccagcaccgtctccacctcaggctccagcatcgactcctcctcaggatcctgcaccgactcctcctcgtgctcctacacctactcccccgcaagctcctcttccggcaccttcaaagtcaggggccccccagctccaccgcctgcccacacaagggcaacgaagaaggcgaaagttgacgccgccaagaacaaggacccggggtacgattgcacgcaagaggagcttgacgcttacgttgcatcagaagtcaagagacaattcaagcctcgaagtccagaaaagaagattcctatagaccccagtgtcaggaacttcttcaggggtatgtctgcatctgtcaaggaggccatcaagctatcggactatgagcgaacgctgaagaaagcatcttctggaaagtccaaaccagtccctcagcttggagagcaaccaaaccaggagatcgagccgttggtgaccggtaaagaaatgacgatagaacaatttattactgacaccggtctaactacggatcaattgctaggagtcgcaccaatcgaaaaggcggaagtgaaatacatgtacgaactcggtaaaccgcttgtcaagcctgagctgctgcagtccctacccacacaaatgtacaagttccatcagctgtacatggagatgagcgccaccggtagagagatgatcggagcgaggatcagggacacggacttcttgcaaggagatgacattctctggatcaatttcaggggaatctacgaactataccagctggacgccctcgacgtctctattatgagttgctggattttaatggagattcaaagggcccgacggcggagggttttcgatactggattcatcgaccctcggaaagtaaacgtcgcaatgctcgaccaatatccaaaagaaacagaggacaatctcgtccatctcctgaaggcgcagcattacaagacgttcatactgttgccatacaacacagaattccactgggtgcttttactcttcgacctggaggcctgcaccgtcaacgtatatgactcaatggataaaaaagagtctacgtttgacaaggttttcgaacttatagacagggcttggtatcggttccgtcatttggtccgcggcaaatggagagaaagacttaggcggaagttcaaatttccttgcgcaaagcaaaagcagggaactaacttgtgcggctattacgtgtgcgagtattgccactgccttgcagaccaaatcatcaccacaagagagctcgattttattcgcatgagggataacctgaccacacacaaggaatttatcgcggcggttcaagaacaactcatgggattcatcaacgaagaaatccttgatcccaagggtgaattctactacgacggaaacacaattcaccggtccttagcttctgagctagcagcgagtactactacgtcgaaatcgtag

SEQ ID NO: 72759 - DNA, 495 bp, Oryza sativa
  unsure (1)..(495): unsure at all n locations
  Clone ID: PAT_MRT4530_73106C.1
ttttttttttttttccgaaacaatttactcaggtngcaaatatttctcanccacaaatccaaacacttggtccttcctatcaaaaaatcagaatgaacaggttttcaaattcatctcccaactcgacaanaatttacacntncatttaacacattcttccacccttctcaaactcctcccttcttcttcccgggtnaaattaaaattaacttgaggccagccagcntccccggcggcnaaatttttacaggctgggcntcctctcggcggcgccggaaatnacggtnaacaggttgttgcccaaggggtccctnaagtgcttggaaangttctcnacggggcctccccggtnactttgcctggataaaaaacccnncatggaaaacatggccagccgcccgttcttgatctccttcaccttcancaacgccncctggtccgggtccctcgccanccccagcgggtccaatgggccncctgggtggaacttgtcct

SEQ ID NO: 72760 - DNA, 3336 bp, Oryza sativa
  Clone ID: PAT_MRT4530_73107C.1
agcgttgcctgcgtaacggatcctccgcgtcaccgccggcccgaagccgccaccccgccgttaacggacgagaacgagaacgatcgaacgaacgagagcgagaacgaacacgtcaacgtacgttgccgcgagaacgtgaacgagaacgagaacgatcgaacgaacgagagcgagaatgaacacgtcaacgtacgttgccgcgagaacgtgaacgagaacgagaacgatcgaacgaacgagagcgagaatgagaacgatcgaacgaagataagcgagaatgagggaacgaacgtgaatgagaacaagcgaacgaacgtgaatgagaacgagcgaacgaacgtgaacgagctagggaacatggctgaccgcgatgaggaacagatattgtacgatacaatcgcggagggaagcagccagtactggaatgaagaagaggggaacgaggatccaaaccagtacttgaacgaggaagggaacgtggagagggatgcggaggggaaccagcaggggcacgtggaaagggatgtggaggggaaccaggaggaggaggctagtggtagtcaaccctccgttggacagaagagggcacgcgggcaacgaggtgcagcgaagaagcttgagggtcggcacatcataacggaagtggaagaagatggacgtcctagtgccccggccgaagccgccaagaactatgtacgtcacagcggttgggttgtgcgggataacgtgcctgtcagtacggtgtactggcgaagaacaagggcacgcggagatcatgagagctttgtcccagattcggagaaagagatgctgtggaccacaatgctcgagacattcacccttcctgcgggtacagaggacaaagtgaaaaggtggactctgaagaaaatggcagaacagtttcagagcttcaagggagatctgtaccagaagtatatactgaaggggcagacaccgaacttcgacacattcccaaagctaagggatcactgggacgagttcgttgcatataagacaggtgaacaagggcaggcgatgatggaaagaaacaaagaaaatgccgccaagaagaagtaccatcaccacttggggtcaggaggctatagcgtcgcgatgccgaagtgggagcagatggaggctagcttgattgagaggggtatcgaaccggcaacagccaattggccggaacgatcgaagttctggtactatgctcacggtggaacgctcaacccagctgatggctcactgggcacgttccgaccagacagagatagggacgagctgacactcgccctgcagactccagagcatccaggacgaacacgagggaaaggggtgattccttggaagattggtttcaaggaggacatccacacgtacaggagtcggatgaggagcaagagagataccgaggcgaagattgcagacctagagttccgggtatcgagctacgaactcaacatgcaagaggaggtggcaaggaaggttgatgaacgcatggccgcacatcggtcccatgatccccagccgaccattcctcctgcaatggtgagcccgtcaggaaaccgtagcagctgcgcctcaacggggcaggtggcgtcgggcatggccatcccaacggacccttcaggtacttaccactgcaggccgattccagcaggatactcgaaggtcgaagttgagttggtcgaaggcgcgtacgaggacctcgagctggattaccctggaggagacggtgagacgcatctacgagacacatgccatgccattattctatggcgcaggcggtacatcatcctccctgggcgacaagcggcgtctcgtgcaccatctcctccggctccgccatctcctcctcaggatcctgcaccgtctcctcctcatgctccgccagcaccgtctccacctcaggctccagcatcgactcctcctcaggatcctgcaccgactcctcctcgtgctcctacacctactcccccgcaagctcctcttccggcaccttcaaagtcaagggcccccccagctccaccgcctgcccacacaagggcaacgaagaaggcgaaagttgacgccgccaagaacaaggacccggggtacgattgcacgcaagaggagcttgacgcttacgttgcatcagaagtcaagagacaattcaagcctcgaagtccagaaaagaagattcctatagaccccagtgtcaggaacttcttcaggggtatgtctgcatctgtcaaggaggccatcaagctatcggactatgagcgaacgctgaagaaagcatcttctggaaagtccaaaccagtccctcagcttggagagcaaccaaaccaggagatcgagccgttggtgaccggtaaagaaatgacgatagaacaatttattactgacaccggtctaactacggatcaattgctaggagtcgcaccaatcgaaaaggcggaagtgaaatacatgtacgaactcggtaaaccgcttgtcaagcctgagctgctgcagtccctacccacacaaatgtacaagttccatcagctgtacatggagatgagcgccaccggtagagagatgatcggagcgaggatcagggacacggacttcttgcaaggagatgacattctctggatcaatttcaggggaatctacgaactataccagctggacgccctcgacgtctctattatgagttgctggattttaatggagattcaaagggcccgacggcggagggttttcgatactggattcatcgaccctcggaaagtaaacgtcgcaatgctcgaccaatatccacaagaaacagaggacaatctcgtccatctcctgaaggcgcagcattacaagacgttcatactgttgccatacaacacagaattccactgggtgcttttactcttcgacctggaggcctgcaccgtcaacgtatatgactcaatggataaaaaagagtctacgtttgacaaggttttcgaacttatagacagggcttggtatcggttccgtcatttggtccgcggcaaatggagagaaagacttaggcggaagttcaaatttccttgcgcaaagcaaaagcagggaactaacttgtgcggctattacgtgtgcgagtattgccactgccttgcagaccaaatcatcaccacaagagagctcgattttattcgcatgagggataacctgaccacacacaaggaatttatcacggcggttcaagaacaactcatgggattcatcaacgaagaaatccttgatcccaagggtgaattctactacgacggaaacacaattcaccggtccttagcttctgagctagcagcgagtactactacgtcgaaatcgtag

SEQ ID NO: 72761 - DNA, 3251 bp, Oryza sativa
  Clone ID: PAT_MRT4530_73108C.1
atgaacgagaacgtgaacgagcgaaagaaacgtgaacgagaacgagaacgagcgaacgaacgtgaacgagaacgagcgaacgaacgtgaacgagcgaacgaacgtgaacgagaattgaacgtgaaagaacaaacgaacatattgtacgatacaatcgcggagggaagcagccagtactggaacgaagaagaggggaacgagaatccaaaccagtatttaaacgaggaagggaacgtggagagggatgcggaggggaaccaggaggggcacgtggaaagggatgtggaggggaaccaggaggagaaggctagtggaagtcagcccttcgttggacagaagagggcacgcgggcaacgaggtgccgcgaagaagcttgagggtcggcacatcataacggaagtggatgaagacggacgacctagtgcctcggcagaagccgccaagaactatgtacgtcacagcggttcggttgtgcgggataacgtgcctgtcagtacggtgtacgggcgcagaacaagggcacacggagatcatgagagctttatcccagattcggagaaagagatgctgtggaccacaatgctcgagacattcacccttcccgcgggtacagaggacaaagtgaaaaggtggactctgaagaaaatggcagaacagtttcagagcttcaagggagatctgtacaagaaatatatcctgaaggggcagacaccgaacttcgacacattcccaaagctaagggatcactgggacgagttcgttgcatataagacaggtgaacaagggcaggcgatgatggaaagaaacaaagaaaatgtcgccaagaagaagtaccatcaccacttggggtcaggcggctatagcgtcgcgatgctgaagtgggaggagatggaggctagcttgcttgagaggggtatcgaactggccaccgctaattggccggaacgatcaaagttctggtactatgctcacagtggaactctcaacccagcagatggctcactggtcttcggcgatcagatacgagaggctgcgcgtcgactaacagacgcagtggaagccccttctcagggcacgttccgaccgaacagagagagggacgagctgtcactcaccctgcagactccagagcatccaggacgaacacgagggaaagaggtgattccttggaagattgggttaaggaggacatccacacgtacaggagtcggatgaggagcaagagagataccgaggcgaagattgtagatcttgagttcagggtatcgagctacgagctcagcatgcaagaggaggtggcaaggaaggttgatgaacgcatggccgcacatcggtccaatgatccctagccgaccattcctcctgcaatggtgagcccgttaggaaaccgtagtagctgcgcctcaatggggcaggtaggatcacaaagcatggacgccatgcaaacccaggacgaatccacctgccccattgatgacatcactcagcggacaccatgtgagctgcatattcctttcaagaacttatcaataaaggtggcgtcgggcatggccatcccaacggacccttcaggtacttaccactgcaggccaattccagcaggatactccaaggtcgaagttgagttggtcgaaggcgtgtacgaggacctcgagctggattaccctggaggagacggtgagacgcatctacgagacacaagccatgccattattctatggcgcaggcggtacatcatcctccctgggcgacaagcggcgtctcgtgcaccatctcctccggctccgccatctcctcctcaggatgctgcaccgtctcctcctcatgctccagcaccgtctccacctcaggctcctgcaccgactcctccgcaggctcctgcaccgactcctcctcggtctcctacaccgactcctccgcaagctcctcttccggcaccttcaaagtcaagggcccctcaagctccaccgcgtacccacagaagggcaacgaagaaggcgaaaattgacgccgccaagaacaaggacccggggtacgattgcacgcaagaggagcttgacgcttacgtggcatcagaagtctagagacaattcaagcctcgaagtccagaaaagaagattcctatagacctgagtgtcatgaacttcttcaggggtatgtctgcacctgccaaggaggccattaagctatcggactatgagcgaacgctgaagaaagcatcttctggaaagtccaaaccagtccctcagcttggagagcaaccaaaccaggagatcgagccgttggtgaccggtaaagaaatgacgacagaagaatttattactgacaccagtctaactacagatcaattgctaggagtcgcaccaatcgaaaaggcggaagtgaaatacatgtacgaactcggtaaaccgcttgtcaagcctgagctgctgcagtccctacccacacaaatgtacaagttccatcagctgtacatggagatgagcgccaccggtagagagatgattggagcgaggatcagggacacagacttcttgcaaggagatgacattctctggatcaatttcaagggaatctacgaactatactagctggacgccctcgacgtctctataatggagattcaaacggctcgacggcggggggttttcgatactggattcattgaccctcggaaagtaaacgtcgcaatgctcgaccaatatccacaagccatagaggacaatctcatccatctcctgaaggcgcagcattacaagacgttcatactgttgccgtacaacacagaattccactgggtgcttttactcttcgacctgtcggcctgcaccgtcaacgtatatgactcaatggataaaaaagagtctacgtttgacaaggttttcgaacttatagatagggcttggtatcggttccgtcatttggtccgcggcaaatggagagaaagacttaggcggaagttcaaatttccttgtgcaaagcaaaagcagggaactaacttgtgcggctattacgtgtgagagtattgccactgccttgcaggccaaatcatcaccacaagagagctcgattttattcgcatgagggataacctgaccacacacaaggaatttatcgcggcggttcaagaacaactcatgggattcatcaacgaacaaatccttgatcccaagggtgaattctactacgacggaaacacaattcataggtccttagcttctgagctagcgactactactacgtcgaaatcg

SEQ ID NO: 72762 - DNA, 3603 bp, Oryza sativa
  Clone ID: PAT_MRT4530_73109C.1
atgccgccgccgccacgccacgccgccgccgccacggccccgcaacgccacgccgccgccgccgtcgccacgccgccgccgccgccgccacgccgccgcgccaaccgccgccccgatgccgccacaccgccgttaacgaacgagaacgagaacgatcgaacgaacgtgaatgagaacgagcgaacgaacgtgaacgagctagggaacatggctgaccgcgatgaggaacagatattgtacgatacaatcgcggagggaagcagccagtactggaatgaagaagaggggaacgaggatccaaaccagtacttgaacgaggaagggaacgtggagagggatgcggaggggaaccagcaggggcacgtggaaagggatgtggaggggaaccaggaggaggaggctagtggtagtcaaccctccgttggacagaagagggcacgcgggcaacgaggtgcagcgaagaagcttgagggtcggcacatcataacggaagtgcaagaagatggacgtcctagtgccccggccgaagccgccaagaactatgtacgtcacagcggttgggttgtgcgggataacgtgcctgtcagtacggtgtactggcgaagaacaagggcacgcggagatcatgagagctttgtcccagattcggagaaagagatgctgtggaccacaatgctcgagacattcacccttcctgcgggtacagaggacaaagtgaaaaggtggactctgaagaaaatggcagaacagtttcagagcttcaagggagatctgtaccagaagtatatactgaaggggcagacaccgaacttcgacacattcccaaagctaagggatcactgggacgagttcgttgcatataagacaggtgaacaagggcaggcgatgatggaaagaaacaaagaaaatgccgccaagaagaagtaccatcaccacttggggtcaggaggctatagcgtcgcgatgccgaagtgggagcagatggaggctagcttgattgagaggggtatcgaaccggcaacagccaattggccggaacgatcgaagttctggtactatgctcacggtggaacgctcaacccagctgatggctcactggtcttcggcgatcagatacgagaggctgcgcgacgactaacagatgcagtggaagcctcctctcagggcacgttccgaccagacagagatagggacgagctgacactcgccctgcagactccagagcatccaggacgaacacgagggaaaggggtgattccttggaagattggtttcaaggaggacatccacacgtacaggagtcggatgaggagcaagagagataccgaggcgaagattgcagacctagagttccgggtatcgagctacgaactcaacatgcaagaggaggtggcaaggaaggttgatgaacgcatggccgcacatcggtcccatgatccccagccgaccattcctcctgcaatggtgagcccgtcaggaaaccgtagcagctgcgcctcaacggggcaggtaggatcacagagcatggacgccatgcaaacacaggacgaatcgacctgtcccgttgatgacatcactcagcggacaccatgtgagctgcatattcctttcaagaacttatcaataaaggtggcgtcgggcatggccatcccaacggacccttcaggtacttaccactgcaggccgattccagcaggatactcgaaggtcgaagttgagttggtcgaaggcgcgtacgaggacctcgagctggattaccctggaggagacggtgagacgcatctacgagacacaagccatgccattattctatggcgcaggcggtacatcatcctccctgggcgacaagcggcgtctcgtgcaccatctcctccggctccgccatctcctcctcaggatcctgcaccgtctcctcctcatgctccgccagcaccgtctccacctcaggctccagcatcgactcctcctcaggatcctgcaccgactcctcctcgtgctcctacacctactcccccgcaagctcctcttccggcaccttcaaagtcaagggcccccccagctccaccgcctgcccacacaagggcaacgaagaaggcgaaagttgacgccgccaagaacaaggacccggggtacgattgcacgcaagaggagcttgacgcttacgttgcatcagaagtcaagagacaattcaagcctcgaagtccagaaaagaagattcctatagaccccagtgtcaggaacttcttcaggggtatgtctgcatctgtcaaggaggccatcaagctatcggactatgagcgaacgctgaagaaagcatcttctggaaagtccaaaccagtccctcagcttggagagcaaccaaaccaggagatcgagccgttggtgaccggtaaagaaatgacgatagaacaatttattactgacaccggtctaactacggatcaattgctaggagtcgcaccaatcgaaaaggcggaagtgaaatacatgtacgaactcggtaaaccgcttgtcaagcctgagctgctgcagtccctacccacacaaatgtacaagttccatcagctgtacatggagatgagcgccaccggtagagagatgatcggagcgaggatcagggacacggacttcttgcaaggagatgacattctctggatcaatttcaggggaatctacgaactataccagctggacgccctcgacgtctctattatgagttgctggattttaatggagattcaaagggcccgacggcggagggttttcgatactggattcatcgaccctcggaaagtaaacgtcgcaatgctcgaccaatatccacaagaaacagaggacaatctcgtccatctcctgaaggcgcagcattacaagacgttcatactgttgccatacaacacagaattccactgggtgcttttactcttcgacctggaggcctgcaccgtcaacgtatatgactcaatggataaaaaagagtctacgtttgacaaggttttcgaacttatagacagggcttggtatcggttccgtcatttggtccgcggcaaatggagagaaagacttaggcggaagttcaaatttccttgcgcaaagcaaaagcagggaactaacttgtgcggctattacgtgtgcgagtattgccactgccttgcaaaccaaatcatcaccacaagagagctcgattttattcgcatgagggataacctgaccacacacaaggaatttatcgcggcggttcaagaacaactcatgggattcatcaacgaagaaatccttgatcccaagggtgaattctactacgacggaaacacaattcaccgatgcagccatcaagctggcttttgttactgcagggtaacacctaggtttagcacatttatgtgctacaatgacaccgtcattaaaggcagtgatactttatcactgccggttcaatctgtatccccaaccaaaaccgatggttcaagctatgaaacaacagtgatccgatcacccgaaggtgacgacgacagtgcactattcaatagcgggaacgagggcatcaactatggctgctgcttgacgacggggatagcggcgacaatgatgatggctgcttga

SEQ ID NO: 72763 - DNA, 256 bp, Oryza sativa
  unsure (1)..(256): unsure at all n locations
  Clone ID: PAT_MRT4530_7310C.1
caacaggcagggcaaacaccagaaccaaagcgaacncaacncaggggaacagcacggacgaagaacaccgaacacggcacggggggaagacngggncncgacncgagagagccacgggacacganaacgacgcgacgcgagganaagagganncggacccgganagcggaggacaacgggccaggaaggggcccaccaancagcaccgccaggccccgccggagacgccgccggagccgccggcacgggggccacc

SEQ ID NO: 72764 - DNA, 7162 bp, Oryza sativa
  Clone ID: PAT_MRT4530_73110C.1
tcaggagaggataggctcctccgggtgaatgtatggtggggaaccagctgctggaggcgatggcaccgacgacgaccttggtgaggaagacgacgatgcttccaccggttcatgatcagcatcagctggtgtatccttgctcttggccagctcttggttctggtcgtccagtttgtcatcaggcctgcatatacatagcaaggaaaacaaaacattacaagtacattaatatattcagctatacaccatatgtacactgtgttactctggcaaggaaatcagaacagtacgagtttcttttgcgagattgcacgtcaattaatgtattagtagaagcagttgaaattaaaatggatcggcaatggatgtatgctgactggcggtccaaagagtttattgacggcgtgcactattttttgagagtggccgaagctaacaggcaaaggggttttatttgttgtccatgcaataagtgtaagaatcagaaggagtattctgcatccaggactattcatttccacttgtttgagtcggggttcatgccaagctataattgttggacatcccacggagagcaaggtgttgaaatggaagaagatgaagtggaagacgacaatattccggactttgctcagtatgttggatttgaaggaaatcaaacgggcgaggaggaaatagctgctgatggtaacgacgttgcggatgatcttggtcagatgttgcaggacgctagggaggactgcaaaagtgaaaaggaggcccataaattggacaagatgttggaggaccacagaacttcgttgtacccaggttgcgagcaggggcacaaaaagttggataccactctggagttgttgcaatggaaggcaaaaaatggggttagtgacaaggcatttggcgatttattgaaactcgtcaagaacattcttccggggggaaacaaattgcccgagacaacgtacgaggctaagaagatagtctgcccgttaggactggaagttcataagattcacgcatgtccgaacgattgtatcctatatcgcggtgaggagtatgagaacctagaagcatgccctgtttgcaaagcactacgatacaagattagacgggacgatccaggagaagttgacgggcagctaacaaagaagagaattcctgctaaggtgatgtggtatttccctataataccacggctaaggcgtttgttcaggaacaaggggaatgctagaatgttgcgatggcacgctgaagagcgtcaacaggacgggatgctgagacaccccgccgatggttcgcagtggcgaaacatcgacagaaaatttaaagaatttggaaaggacgcacgaaacatacggtttggtttgagtacggatggcatgaatccttttggagagatgagcagcggccatagcacttggcccgttacgatgtgtatctacaacctccccccctggctatgcatgaagaggaagtacataatgatgccgattattattcaaggccccaagcaacctggtaacgacatcgacgtgtacctaagaccactggtcgaagatcttaaacagttgtggaagaaggaaggtgtccccgtgtgggacgaggacaaacaggaggagtttaacctacgagcgctgctgttcgtaaccatcaacgattggcctgcacttagcaacctatccggacagtccaacaaggggtacaaggcttgcactcactgtatggatgaaacagaaagtacgtatcttaagcactgtaggaaggttgtatacatgggtcatcgtcgattccttgcagcaaaccacccggtacggaagaaaggcaagcacttcgaacataaggccgaccaccgtacgaagcctaaacatcgcagcgggaaaacagtgtttgctatggttaaagatcttaaagtagtgttcggaaaggggcctggaagccagcatatagagagcgaagatggtcacgcggcgatgtggaaaaagaactctatattttgggagttaccatattgggaattcttggacgtacgccacgcaatcgacgtgatgcacctcactaagaacctttgcgtaaaccttcttggcttcctaggtgtatacggaaagtcgaaagatacactggaagcacgtaatgatctgaagcatatggaacaacgcggcgaccttcacccggaaccaaaggagaaaggaagccattacttgagtccagccagctacactcttagcaaggcagagaaggaaagtatgtttgaatgcttggagagcataaaggtaccgtctggatactccacgaatatcaagcgaataataagcacgaaggagaagaagttcacaaacctaaagtctcatgactgtcacgtgttgatgacacaactgctaccagttgtaataaggggtatccttccagacaatgtccgggcaacaataacaaagatatgtgcattcatgaacgcaatttcacagaaggtcatcgatccggatagattagaagcccttcagaatgaagtggtgcaatgtctcgtcagttttgagttgatatttccaccttcatttttcaatataatgacgcatctgctttgtcaccttgtgaaagagatccgtattctcgggcctatgtacctacacaacatgtttcctttcgagaggtacatgggcgttctgaagaagtatgttcgtaaccgtgctcgtccagaggcaagcatcgccaaggttatggaacagaggagctccttacatcgaggagcacttggctctagttcgcgcaaggaacatcggacatatgggaacttgactatggtcaatgggtacacattctacacgagagcccaagacatgaagagcacgaaccaaaacagcgctgttcgtgtcgatgccatgggacacgatggaacaactgccacgtattacggtgccatcgaggacatatgggaacttgactatggtcctctcaaggttcctctgttccggtgccaatgggttaggttgactggtggaggcgtaatgattgatgacagtgggatgacaactgttgaccttaacaaggttggatactcggacgaaccttttgtccttgccaatgatgtaacgcaagtctttttcgtgaaggacatgtctagcaaaggaaagaagggcagagggcctgatgagcctaagcgtcaagtggttctcccaggcaaaagaaaaatcgtcggagttgaggacaagactgacgaggattacgatcagttggatgggcaaccccctttcacggtgacgattgaccctagcatcctcctatcaaatgaagacaccccttactcacgcagcgatcacaaggagggaacaataatggctgaccgcgatgaggaacagatattgtacgatacaatcgcggagggaagcagccagtactggaatgaagaagaggggaacgaggatccaaaccagtacttgaacgaggaagggaacgtggagagggatgcggaggggaaccagcaggggcacgtggaaagggatgtggaggggaaccaggaggaggaggctagtggtagtcaaccctccgttggacagaagagggcacgcgggcaacgaggtgcagcgaagaagcttgagggtcggcacatcataacggaagtggaagaagatggacgtcctagtgccccggccgaagccgccaagaactatgtacgtcacagcggttgggttgtgcgggataacgtgcctgtcagtacggtgtactggcgaagaacaagggcacgcggagatcatgagagctttgtcccagattcggagaaagagatgctgtggaccacaatgctcgagacattcacccttcctgcgggtacagaggacaaagtgaaaaggtggactctgaagaaaatggcagaacagtttcagagcttcaagggagatctgtaccagaagtatatactgaaggggcagacaccgaacttcgacacattcccaaagctaagggatcactgggacgagttcgttgcatataagacaggtgaacaagggcaggcgatgatggaaagaaacaaagaaaatgccgccaagaagaagtaccatcaccacttggggtcaggaggctatagcgtcgcgatgcgcgaagtgggaagagatgcagtggaagcttgattgagaggggtatcgaaccggcaacagccaattggccggaacgatcgccctgcagactccagagcatccaggacgaagcctcctctcagggcacgttccgaccagacagagatagggacgagctgacactcgccctgcagactccagagcatccaggacgaacacgagggaaaggggtgattccttggaagattggtttcaaggaggacatccacacgtacaggaggtggcaaggaaggttgaggagcaagagagataccgaggcgaagattgcagacctagagttccgggtatcgagctacgaactcaacatgcaagaggaggtggcaaggaaggttgatgaacgcatggccgcacatcggtcccatgatccccagccgaccattcctcctgcaatggtgagcccgtcaggaaaccgtagcagctgcgcctcaacggggcaggtggcgtcgggcatggccatcccaacggaccctttaggtacttaccactgcaggccgattccagcaggatactcgaaggtcgaagttgagttggtcgaaggcgcgtacgaggacctcgagctggattaccctggaggagacggtgagacgcatctacgagacacatgccatgccattattctatggcgcaggcggtacatcatcctccctgggcgacaagcggcgtctcgtgcaccatctcctccggctccgccatctcctcctcaggatcctgcaccgtctcctcctcatgctccgccagcaccgtctccacctcaggctccagcatcgactcctcctcaggatcctgcaccgactcctcctcgtgctcctacacctactcccccgcaagctcctcttccggcaccttcaaagtcaagggcccccccagctccaccgcttgcccacacaagggcaacaaagaaggcgaaagttgacgccgccaagaacaaggacccggggtacgattgcacgcaagaggagcttgacgcttacgttgcatcagaagtcaagagacaattcaagcctcgaagtccagaaaagaagattcctatagaccccagtgtcaggaacttcttcaggggtatgtctgcatctgtcaaggaggccatcaagctatcggactatgagcgaacgctgaagaaagcatcttctggaaagtccaaaccagtccctcagcttggagagcaaccaaaccaggagatcgagccgttggtgaccggtaaagaaatgacgatagaacaatttattactgacaccggtctaactacggatcaattgctaggagtcgcaccaatcgaaaaggcggaagtgaaatacatgtacgaactcggtaaaccgcttgtcaagcctgagctgctgcagtccctacccacacaaatgtacaagttccatcagctgtacatggagatgagcgccaccggtagagagatgatcggagcgaggatcagggacacggacttcttgcaaggagatgacattctctggatcaatttcaggggaatctacgaactataccagctggacgccctcgacgtctctattatgagttgctggattttaatggagattcaaagggcccgacggcggagggttttcgatactggattcatcgaccctcggaaagtaaacgtcgcaatgctcgaccaatatccacaagaaacagaggacaatctcgtccatctcctgaaggcgcagcattacaagacgttcatactgttgccatacaacacagaattccactgggtgcttttactcatcgacctggaggcctgcaccgtcaacgtatatgactcaatggataaaaaagagtctacgtttgacaaggttttcgaacttatagacagggcttggtatcggttccgtcatttggtccgcggcaaatggagagaaagacttaggcggaagttcaaatttccttgcgcaaagcaaaagcagggaactaacttgtgcggctattacgtgtgcgagtattgccactgccttgcagaccaaatcatcaccacaagagagctcgattttattcgtatgagggataacctgaccacacacaaggaatttatcgcggcggttcaagaacaactcatgggattcatcaacgaagaaatccttgatcccaagggtagaagaagccatcaagcaattagggtcaccaatggagtgaacatggatggccgggcaaagcttgcagccccagttgcagtggtcactggagcatctagagggattggaagagccatcgctgtggctcttggcaaagcagggtgcaaggtgattgtgaactatgccaagtcaggtatggaagctgaagaagtgtgcagagagattgaggagtccgggggcaccgcgatcaccttctctgctgacgtctccatcgaagccgaggtcgaatccatgatgagagccgcaattgacacttggggaacactagacgtgctggtgaacaatgcagggatcacaagagacgcactgctgatgcggatgaagcggacacagtggcaggaggtcgtcgacgtcaacctcaccggcgtctacctctgcgctcaggctgcggcgggggtgatgatgatgaagaagaagggaaggatcatcaacatcacctcggtttccgggatcatcggcaacattgggcaggccaactactgcgctgccaaggccggggtgatcggtctgaccaaagccatggccagggagtacggcagcagaaacatcaatgcaagtactcagctagcagtagcagtgatcatgtcactacaactgcagtctgaagaacagaagaaacaaattctgaagcacttgctgattgagcttgtgccaaacttggttttgcaggtgaacgccgttgctcctggctgggtgacctccaacatgaccgcaaaactaggcgacaatgtcgaacagaaggctctcgagacgataccgttaggacggtttggcaaaccagaagagatagccggtctggtggagttcctggccgtccatcctgctgcaagctacatcactgggcaggcaagcacaactgcagaaaatggtcttcagatatgtgatcaaatgaacatgttttga

SEQ ID NO: 72765 - DNA, 639 bp, Oryza sativa
  Clone ID: PAT_MRT4530_73111C.1
cccgggctgcaggcttcgctgtttttctggcggccttccctgcactcctcaggaagtatgtcaaggctctgctgcatacctggtctagaggacgaggtgctatgcctcttgtttcatttttgttccttcgagatttgtgcattcaactaggttcggagtgccttgatacgtccctcaagggtatctacaaggcttatttggtgaactgtaaattgtccaaatcaatcagtggatcaaaattgcagcacattcaatttcttggtaattgtgtcagagaattgtacaatgtggacccacaaagtgcatatcagcatgcttttgttttcatccgtcaactggcagtcatcctaaggggagctcttactgaaagaggaccaaagacatcgaaggacaaaaagcagaaagaaagtatcaaaccaacgaagaaacggatggagaaatcctaccaaaaagtttatgattggcaatacatattctgccttgagctttggacaagtgttgtgtgtggatgtagttctgaggaagaccttcgacctttggcttatccactaacccagataatacatggtgtggcatgcctggtaccaagtgcgcgttactttcctgtacgcctgagatgtgtgaagatgcttaatcgca

SEQ ID NO: 72766 - DNA, 318 bp, Oryza sativa
  Clone ID: PAT_MRT4530_73112C.1
aagacgaacgtcattctaatgtgatatcaagaagactccttactagaatgctaaataaatacgaagaaggcagcacctatacctgtaggttatacgtgcaaaacttacaaacttaacacctcattgttctatctgatggggggggtcgtctgctgatgcaaacctgtttccttcagtgtttgggagagtgattgtggaccgtgtgttacctttgggaagttcgaagataggctgtgcttctttgctttcaagcagttcatggattaacatagtgatcacagggaagtgatggttgagggactgtagaatatctttgtt

SEQ ID NO: 72767 - DNA, 543 bp, Oryza sativa
  unsure (1)..(543): unsure at all n locations
  Clone ID: PAT_MRT4530_73113C.1
ctagtgcccaatgattacctccatagcttcttaatacagactcactatagggaaagcttgtgtacncctccaggtaccgtgtccggaattgcccagggtcaagacccacagcgtccgcacgctagcatgatgacacccccaaggatcaggctgtgactggagaaacaccnaaaatgggataatcctggaagtttgctggaagcctgcgcaagaacacaagaatgctgccaaacaatcaagaagaaactcctggtggcaaaatgttatggaaccagcctaaattgtgactggttgcttgtgcgtgcttggtgaatttggtgggtttactgattgatgtgattgcagtggagaaatgtttagccagatgagtggatgccatgataaaaagctaagccacacacctggtgagtgattaactaccgtagttatggtgaagaagaggtaccctaaataatgtacagtaattagcttctctattataccttccctttctttccccttggtaaataagataaaaggttccaaaaaaaaaaaaaaaaaaaa

SEQ ID NO: 72768 - DNA, 304 bp, Oryza sativa
  unsure (1)..(304): unsure at all n locations
  Clone ID: PAT_MRT4530_73114C.1
gctactggacatactctactactactagccagtaagctagctaactaactacgtggctatggcccccaaccgtgatggcctcctcggccacctccgtgntcccattccaagggctcaagtccaccgcggggttccccgtcagccgcggttccaccaactcgggtttggcaagtcagcatggcggaagnttcagtgcatgcaggtgttggccatttanggcatcaagaantcgagacctatcgtanctgccaccactcaccgtggagntcttttttaagagatcgagtacttcttcgatccaagt

SEQ ID NO: 72769 - DNA, 358 bp, Oryza sativa
  unsure (1)..(358): unsure at all n locations
  Clone ID: PAT_MRT4530_73115C.1
gaggaaagcggcgtcgnatcgcacggacgcgcgcgcccgcgcccgcgccgcgcagcgatgctgccgcgctcccactcgcacccggccgcgcggcggcgctccggcctgggcgcgcagctctgcgccgtggtggcggcgctcctcctgctcgtctccctcgccgtcctccactcccgcctctcctcctcctcctcctccccgttccccctctcctcctccggcgacggggtctccaactcctcgntcgtggaggacgaggacgacggtgccgcggtgctcgaccccacggttacgattacggcgaccaccaccaccaccaccatcaccaccaacgccgtcgntgattccaccaccgatg

SEQ ID NO: 72770 - DNA, 285 bp, Oryza sativa
  Clone ID: PAT_MRT4530_73116C.1
atgggagcgaagacgacaacgaggtgggagcgtgtgacggcggcgtggacgggcagtgggggcgagcggaggaggaggcagcagcacacagcgtctgcggtgcagacgagggcggcgcaaatgagctcggcggaggagcgcgagactacgctgaaggggcatttggataattgcccacgccagcgcaagcttgtgacggccagatccggtgcccttgagctcgagacggacagatccggcgcccttgtgctcggtgccaccggatccagccccaatgcgacgtag

SEQ ID NO: 72771 - DNA, 242 bp, Oryza sativa
  Clone ID: PAT_MRT4530_73117C.1
agccgtacgcatgcaggtaccggaccggactcccggatgcaacgccacgcgtaacgtagaaataactatagagcggacagaactaaattaataataaaaaaaaaaaaaaaaaataaaaaaaaaaaaaaaaaaaaaaaaaaaaaaagaaaaaaaatttaaggtttttaattttaaaaaatcaagtttacaaacgataaaattattaaaaattggtttttatttaaagtcacttaaatttattt

SEQ ID NO: 72772 - DNA, 225 bp, Oryza sativa
  Clone ID: PAT_MRT4530_73118C.1
atgacggcggcggactgcggcgcgtgccgcgacgccggccctcgtcaagaacctcgccgccacgagggaggcgcggcgccctcttcattgctccggctctggcgtctggcggcgctggctagcgacggtggcggctggacgggggtggtcgtggcggtggcagtggtggctgtggcagtggaagtggcggctgtcgacgatggtacctatggtggcgatggttga

SEQ ID NO: 72773 - DNA, 375 bp, Oryza sativa
  unsure (1)..(375): unsure at all n locations
  Clone ID: PAT_MRT4530_73119C.1
tttccgtcttatgcatacaggggagcttgaggttcactggcttaaagcacccctttgaccagccaagaaacttctgaatgagctaaacgagcacttgctaaacccgtaagtgtgcctaccagaacatccaaatctgtatggccaccttctacttcgtctgcaacgacaacaacacacaattcccaaccctagccggcggttggatgtgctgttacgaatgagcggaaatgctctctacatgaaccgttagggctaccgagccgatcgagcggtgggcctaaaaccctagccgagagaggatgcattctgggggtggattgnggatattcctccaaaattgtaaactagaaaccactatcctggtggaagccttgg

SEQ ID NO: 72774 - DNA, 2056 bp, Oryza sativa
  Clone ID: PAT_MRT4530_7311C.1
catcaccaatctttggccacaggctaaaaagatggctttcgatctcaagctaaccgcatgcctcctcctcgccgtcttctccctcgccgccgccgccgactgcgagtgccagcccagcgacgaaggccacgacgcggccaagtcccggacgctcaaggtcatcgccatcttctgcatcctcgtgggcagctcagcggggtgcgccattccgtcgctcggccggaggttcccggcgctccgcccggacacgagcctcttcttcgccctcaaggcgttcgccgccggcgtcatcctcgccacggcgttcgtgcacatcctcccggtgtccttcgacaagctcggctcgccgtgcctcgtggacgggccgtggcggaagtacccgttcacggggctcgtcgccatgctcgccgccgtggccacgctcctcctcgacacgatcgccacgggctacttcctgcagcgcgcgcaggacagccgcggcgccgtcgccgccgtcgccgcgtgcggcggggacgcgtcgtcgtcgcacgaccacgagcgcgggaacgcgcacggcgtgtcgtcggccgtgatcgcgtcggcgacgatgccgaacgacgccgccgacgactgcgacgacgccgaggaccgcgcgaagctcgtccgccaccgcgtcatctcacaggtttactatatatatatatatagtaaatttgtttggtgctccatggtgcccgggcaccattgttgaaattgagtatatacccaattcaaatgagcatgaaactttttcaattatttaggtattaatattaactactttactaactagttgaaagcaagtttgaactgaatttgaacttgtttttgttagattttgattctaggtatatagcatccatacatatattttctcggttagtggacatcggagtagcgccggcggcgagtccgagcggaagacgttttcgggtggtggtgcatgtgcgcctacgaccatgtattgcttaaatgcgtgcatgcatgtggttctattatttaccaggaggctcactgaagattgactgtggcttggagaggcccgacgaggacttggcgatggatggacattggcggcggcggtaagaacctccgggatgacggtgacagctcaaacggctccaagatcagaggaggcggaatcaacgatggtagccggcagtcagagttggagaagatgatgccgatctccgtccatgatgcttcattctccacggttcttgaggggttttggtcgtgatggtgtggggatactagtggcgtggtggctcggcttgacttggtccagaacgacgggaacggcgatgagatcacgacgacgtcgcgcagagcacgtcccaaggccggcgatgacacagtggcgttcccattgatttgctgcacgatagaggatgaaatcaaaaggagaaatcttcggaatggtgagtagaatatggaacaggaaagagataatggcgagcgcggcttgacgacaatcggcaatgcatccttctcggcggccgacgatggagtggaaggcgaggaggacacgatggagctctccctctcggtttctttggctcaggggtggagagcggcgagagaggaggcgccggcgacgtgcgcggggtgttgcacgagccgctcttccccatcgagtggacaccgccacccgcctctccgccacgcccgcctcgccgacacttccgtctctccgccatgtctgccgtcgtgcgcgccgactgttggcccgtccccgcgcgccgctacccgccttcacgtccgcctccgctgccggctacacgagcgcgccaccggcgcccgagcaagcccgcctcccccgccggccgctcgcactacctcctcctctgctctcggagcggaagggcaaagtcggcgacgccgcgcgggagggcagcggggcccgccccgtgcgccaccatctgccgcccgcccctccatgtcggcgttcgccgctcgccaccaacgcctcgccgtgcgcacctgccgacctgtgtccgagagagagagagatttaggaagacgggaagcaaaatag

SEQ ID NO: 72775 - DNA, 1702 bp, Oryza sativa
  Clone ID: PAT_MRT4530_73120C.1
ttaagaagagtgaagtatattattcttcatccgtgaaatatttacttgtattgctgatattgtctgaaaacaagacaggcggcagtggggtaaaccataagcagtcgctgctactggcttctccaaagacttgttcaccgtagctgctactgcgtgcttctctgtgtcttctactgccagctcccctggcaggtgaaaatgaatgtctcctgtgtctcctactgcctgcggcccgtgaaggaggaagtcccctgtggctccaactgcctgcttcactgacaggtgaatgaccccagttttgctccgcatagattccaactgcacatctgcgtggccatgaatccagtccaacgacgaattccaatcagatggattagcatgtgataatccattcccatcaatttcagccgtattgatgtgccccaaagaatgttgttgctgtgagctcgacacttctaacatattgttatccatggatgaaaccgacataacctcatttcctaccgatgaaacttgccggtcgacaacttggatacgctcaagttgtccatgatgcatcaagttttggtctgaagtgtctggttggaacttggacctatttggcacaatcactgataatccaccggatgatagtccattacacgttgaagaaatttgctggcgagttccttgaacatcaagttgttctgtgagtttttgaagaatcaataaaccttgtgatgtatgacttggttgcattgagcatgatccctgaaggtaatagctgccattgcttctaaaaaatgcctcatgttcatgagacacattactctcttgaaggcaactagagtaaattcctggtcttggattacatttcagagcatgactaatgatcaaatcccaatcttgatcagaaatctttcccaaaattttacgcagatcatctggactcttgttgtagaaagataagaagtcctccactgtcttgataccattctgctctagtaacttgtgcctgtcaccgttctttgcaattttgctcagtttatatacagcatcacgtggggatggattgggattcttctttgttaagtatccccgaacatccttcacagcaaaagattcagttattccttcttgaattctttctgagattctttcatcagctgccataacacccaacttgaactttttgcttggaacaaaactagaattgtcttggaacttggcattgagataacccacaccattttgcagcctaaaatacagcttcccagacagcaaatgtcctttttgaggtcgtccaggtactattttactacggaagtactcttcagtccactgaagggggctctcgtcatctgcttctattttgtgtgttgagtacttatcgttactgcatgaattcacaaattgtaatcgaagtggttcgctgcagttctgatcaggtaacatcctaggcgcagggattcgcttatggtaaccaacaacttcacttattgccgctgttaggctggaaactttttctcgcagctcctgattctccctaagcactaatttgatcctctcattttgctgctgcatcattcgattcatccgtagaatctcctggagcatttcagtctgcttgtcacatttagcagttcgggaagcgtgcgcatagaaaacgagagagtagaagttgggaaagaggatgttcgaccgcagcctaaaggtggatcta

SEQ ID NO: 72776 - DNA, 657 bp, Oryza sativa
  Clone ID: PAT_MRT4530_73121C.1
atgccttccatgatggtgcggtccgccggcatcaaaaggctccgccgtgagatggagagcaggagaagaagatcaccggagctcgcgccgacaggacgcgtcgcgaagaggtcctcgacgcctcctccacttcatccttcgcctgacgacgagcgctccgccgacgtcctggccatgccggcgccgcctcccgtgcccggtcgtcccgcgacgtcggccgccgccgctgccaccgccaacgagccgacgccgacgatcgagaagggcacgcaggtgagcgtgcgcacccgcgtaggcaagatcagcgtcacgggccaccagacgcgccacctcgtgctccggctcgacgcggtcgtcgtctccgccgacgaggacggcttcctcgacgtcgtctacaaggtcgggttcccgcacgacgatcccttccgccccgtgcgcgttgccaggggccaggttcaggtgattctgcagcctgcagccgcggcgccgtccgtcgactcctccacggccaccgacgccgccgtgcgccgcgctccaggccatgaccacgcgcgaagtcgaaggacaagtgtactgcccggaagaccgacggtcgccggcaagtctctgcgactgctgacggcggaggagaggaagagagctagctggagcaactaa

SEQ ID NO: 72777 - DNA, 977 bp, Oryza sativa
  Clone ID: PAT_MRT4530_73122C.1
cttttgaacatggtgcatcaagttcttgtcccaaagtgtctggctggaatctatatggcacaccaatgtctgataatccaacagatccatcataggttgatgaaatttgcggatgcattccttgcacatcaagttgttcttgtagtgtatggcttggttgcattgagaatgattcctgaaggcaatagctgtcatttcttatagaaagagcctcatgttcatgagacacactgctctctttaaggcaactagagtaaactcctggtctacatttctgagcatgagcaatgatcaaatcccaatcttggtcggaaatcttccccaaaattttacgcagatcatattcgctattattgtagaaagataagaagtcctccactgtcttgataccattctgctctagtaacttgtgcctgtcaccgttctttgcaattttactcaatttatatacagcatcacgtggggatggattgggattcttctttgttaagtatccccgaacatccttcacggcaaaagattcagttactccttcttgaattcttactgagattctttcatcagctgccataacccccaacttgaactttctgcttggaacaaaactagaattgtcttggaatttggcactattgagataacccacaccattgtgcagtctaaaatacagcttcccagacagcaaatggcctttatgaggtcgtccaggtactattttactatggaaatactctttagtccactgtcccttgttatcatcgtcaaagtcaccgtcaatggctacaatatgaactctcatcgaagaaaatggttccattgttacgatcttgtcgttatgatcatatatggctacctgaagggggttctcatcatctgcttctattttgtgtgttgagtacttatcgttactgcatgaatttacaaattgtaatcgaagtggcacggtgcagttctgatcagaatcatcagataacatc

SEQ ID NO: 72778 - DNA, 1044 bp, Oryza sativa
  Clone ID: PAT_MRT4530_73123C.1
ctcaaagcaaaaatataactatggtatgcataaaatgtactgaaagctatggtctgtaaatatactaataacatccaaatatgcactaaagttgaactgaatacaagcaatccgatgggagtaacttctgaataaacggcggcataaaggcatcacccgtttcatcagtgaagtatatatatatatttttaagaagagtgaagtatattattcttcatccgtgaaatatttacttgtattgctgatattgtctgaaaacaagacaggtggcagtggggtaaaccataagcagtcgctgctactggcttctccaaagacttgttcaccgtagctgctactgcgtgcttctctgtgtcttctactgccagctcccctggcaggtgaaaatgaatgtctcctgtgtctcctactgcctgcggcccgtgaaggaggaagtcccctgtggctccaactgcctgcttcattgacagccccattgtagttcatgctacctgcttcactgacaggtgaatgaccccagttttgctccgctgcagtgacaggcgaatgaccccagttttgctcagctgcactgcaggaacctcctgagccaggagttcccgtgaaatcatgctccccccgccccacatattcactcagcaaattttctctcctctgtgcatttaccatagattccaactgcacatctgcgtggccatgaatccagtccaacgacgaattccaatcagatggattagcatgtgataatccattcccatcaatttcagccgtattgatgtgccccaaagaatgttgttgctgtgagctcgacacttctaacatattgttatccatggatgaaaccgacataacctcatttcctaccgatgaaacttgccggtcgacaacttgaatacgctcaagttgtccatgatgcatcaagttttggtctgaagtgtctggttggaacttggacctatttggcacaatcactgataatccaccggatgatagtccattacacgttgaagaaatttgctggcgagttccttgaacatcaagttg

SEQ ID NO: 72779 - DNA, 292 bp, Oryza sativa
  Clone ID: PAT_MRT4530_73124C.1
gccctcctccacgtccaactcggggtagaaactaaaggaaacctgaaacatgccttcccgagcaaggaaacctcgagacccgacgaaacacagtcagactcggacctgccggtcagaccggccacacaccgccggtctgaccggccctcaatcagcggtctgaccacccaacacacggcggtcagaccgacccactcggaggaaattgatcccgtcaggtgggccaaatctaaatccaaaacatgcagaactttattttcttcccttttaagacgacaaaagtgacatgggg

SEQ ID NO: 72780 - DNA, 297 bp, Oryza sativa
  Clone ID: PAT_MRT4530_73125C.1
atggctactttgggcatgtggctggagtacgtaacaaaaataaaaaaagggtttggtttgccaggagggcaagcagaggcagcttctgcatttgacggggtcaggtcagaattcagatcagggccatttgattatcatcaatcagttggtactccagtatgcatggtcacaactactgtattaggcgcgcactgcacggttgccgcgcaacgccggcgtttcgtgtccaagcatgggatgggcagggaaggtgtgtgtgtgctcatcatcttggatgttgaagatgcgctcagctga

SEQ ID NO: 72781 - DNA, 826 bp, Oryza sativa
  unsure (1)..(826): unsure at all n locations
  Clone ID: PAT_MRT4530_73126C.1
ccggctgcggacgaatgggatcatctcttctgatgcctctcaaccttaccataagctggtttgctaaggcatggaggacggcggcgtttggggtctacggcttcacgcagttcaccaaatccggcttcgtggaacatgccaagaaattcagagaggaggatatgcagatccggctggatgggaaaaattgcctagtaactggggctaattccggcataggttttgctacagccgagggcttggcatcacgtggtgccactgtttatatgctttgccgtaacaaggaaagaggagagactgctctcagtcaaatacgatctaaaactggcaacatgaatgttcatctggaggagttcggtgaaaacaacttcgatggaacacagcaatatgcccgtaacaaaagagttcaggttgcactcaccgaacggtggtctgaaaaatgcagcaacaagggggtaggtttctattcgatgcatccaggatgggctgacacacctggagtctccaagagcctgcctgggctttcagagaagtagtcaggaaacctgagatcaaacgatgaaggtgctgatacagtgatctggttagctttgcaacccaaagagaagctaacctcagggtcttttctactttgaccgagctgaagcaccgaaacatctgaagtttgctgggactgcanttcgcacgggcagataggctcgattgttgatagccttcgctccatttgtggcatttagggaaaaaatatttgctgggactgcagcttcccacgttcagataggctcgattctagtttctggataaaaaaaaaaaaaaaaaanaaaaa

SEQ ID NO: 72782 - DNA, 542 bp, Oryza sativa
  Clone ID: PAT_MRT4530_73127C.1
tgttgcggacgcgtggggccgaattgctcttcagattctttatccgatgttatcatgtttttgtcaagtgaataaactaaaactgtatgacaacagttacgtgttgaatcaactaaatttctgacagtagatgttcttaagtgcacaacctaaaatttctttaattcataagaacatgtaaccacattaggtataaagtttgcaagatatcaatcttgatggcctgttgctgctaggtgtatgcattaattctggtgcgctggatgtagtttgcttgcctctaggattatatgataagttagatgtattttgttggcctgctggatgtatgcattcagctcctgacttattcttgatttatttgtgcatgccggatccatggaagtatcaacccactaaagtctgaactttgaaataaggcttttggtatactgaggcctatatattctgcacgtcatagagctatcatgtaacaatatttgtgcaggttagcactggatggaaattaataccttatttgttttctatcttttgaacaactt

SEQ ID NO: 72783 - DNA, 517 bp, Oryza sativa
  Clone ID: PAT_MRT4530_73128C.1
cggacgtattcaattcacagcgaagaagacgactggcacgaggagagcgggctggccaggcggctgcctgcgcggcggcgtgggggtggcgcagggcggcggtggccggtgccgcggcgtgtggggccgcgcggaggcggcctgcagccgctcggcgacggccggcgcggcggcgcgggaggccgcgcggcctgcgcggcggcggcggccagccggcgaactgcaccagccagaacgcccgccccgttctccgatcctccttctgcatatgtaaatcaacacatctctatatagtattgtgtggtctctgctgtatgcctgcccaccaaacgaatggtgtccccaactccgtgagttcttccgcgtctttgatctcttttgcgcacaagagattgggatttttagggcttccgaaactctgttcgtctgagttcctcatattccagcggagagccattctcagggtatatatctatcatcaacgcgctcatatttggattaaaaaaaaaaaaaaaaa

SEQ ID NO: 72784 - DNA, 240 bp, Oryza sativa
  Clone ID: PAT_MRT4530_73129C.1
atgaatggctcatgttggcctaagctttgtgcagcatctatggaggagggcattggccgcggagggcaccgggcgaggaagaggttaggcaatgaggaggacgctagcgagggaggtggcactctgggaataaggtcgttgggcgaggaggaggtcgtgcgacgagaaggccgcgcgggtagggaggtggctatcgcggtgggaaggagggtgtcgggcaaggaggtgaccgttgggtga

SEQ ID NO: 72785 - DNA, 625 bp, Oryza sativa
  Clone ID: PAT_MRT4530_7312C.1
catttgtgagctagtagtagctatgaaatgaagatgcttatgaagtagccaattaacttgtgcgaatagaggtttacttattttggaagcttaattttttttcttgtttgtgggagattataagttaacttgctttgttggggcatcttgatctgcaagcctaatgattactgatgtttgtaagaacggagatctgaatgcgctcctccgtcgaagcccgcttggtctatgtggtggattatgtagtagtactgtactccctccgtttcccataatattccatcaatttcatgatgtatgttccattttcacatgtccctctcattgtcattctcttccacttccacccagcaggcttaagcaggctccggggatgcgtatgtagacgcaagtgttatgaaggctctgacggctttaattatgcccccctcaggattcatggctttgttataagtgcaattggttaattctagttttatgtggatgacatgatcttctcagtgtccacgacagattttgattttgacagctaatatgctgtcagcttgctagtgctacgtgaatttggtttattgtcttcatatcttgcaagatttcactacgaatttggcatatgatgagaagc

SEQ ID NO: 72786 - DNA, 251 bp, Oryza sativa
  Clone ID: PAT_MRT4530_73130C.1
gtgaagctgcagagtgaaggttatagtgaagactggcctgctatatgtgcattgcgacaagacgatctgcagtctttttgtcctcttgatttgaatataaaggttctaattctactaaaaatgaatataatacaagcattcaataaactgtttaggacttgcacatgtctcatcatttagattgtgataaaaaaaaaaaaaaaaaaaaataattataaaaataaaatataaaaataaaatatattaaagag

SEQ ID NO: 72787 - DNA, 492 bp, Oryza sativa
  Clone ID: PAT_MRT4530_73131C.1
gcgtaaagaatcaataagctataaagtcaaattcctgcagccactcatgagggaagcttgtcaccaacaaatgctcacagggatacgatggcctcgacggtcaggccgcgtgcgttcagtctttccagttcctcccttgcaggtcgattgtggcatcatttattgcctgctcattgcagttgaaacgcgatatccgtttcaagacccgagtatggatggtacttcggaggatatgagcacttgccagacttcgtgggcgcagacttaattaatccgatggcgaggttactgacgacggaccttatgagtgggccttctaaaggtcgcacttatctaaacagttcctggccccgcttttgtcatagtgacaaagcagcgttttctagggtggactacgtttacctagctgacagcattgttgctggagagaacccatgtggggaagcttggatccattagttctagagcggacgacaacgctgtggagctcca

SEQ ID NO: 72788 - DNA, 216 bp, Oryza sativa
  Clone ID: PAT_MRT4530_73132C.1
acatcactatattttattgatcattatcaaaacgtgctcatgaatacacagtaccggcacagagcttaccttctctccaatactggcacatacaaccacgcggttcaaacaaatgcgtacatctatacggcacacgagcgtacaaatactggaccgaggacacccactcacactctctaccagagacgcccatccctgcatacctaactagtctta

SEQ ID NO: 72789 - DNA, 1035 bp, Oryza sativa
  Clone ID: PAT_MRT4530_73133C.1
atggagctctccctgctgtacgacatcatgtacaccaaggctggcgtcatccacacgtggcatggctactgcatccgtgtcttttcgccgctggccaccgccggtgccttggtgatgttccatctcagcctccacggcgcccttgggcatggggctatgctagtcgacgtggccatcacctacacattgctggttggcgccgtccttgtagacacatggtggctgctcatggcagccgggtcgacctgggcgtacgccttcttgatccgcatgccgctgcggggttggctgtaccacgcggcggtctgcagcggacgatggcgccaggtcggccgcgcgctcacgtggatccgctggcttgtcaatgcggaggacagcagaaggtggtccggcaccatctggcagcacaacatgttgcagtactgcacacgcgacggctccaaggacgtctggtacgaccttgccaagaagatacatgtcaagtggcgcaagaaagacaacacctactccggcaccacggtcattcctgatcgtgtcatggagcaggcagaaatgtacgacttgttcttgaggttagttcgcgacgagatccagcagcaaatcattatctggcacatcgcgacggacatctacctccgcacctccgacaaggcagagaccaccgagtatgttgaagcaatcaatcttatttccaactacatgatgttcctagttctggaacgtccctacatgaaaacacagagccttgccaagcagctgggagtcaccgaccgggaccccagtaaggtctcgctcaatgctctgccgcttgccctccttctagtcaaaaagctcaacaaatacgacggggccagtgtggaatttctgttcaaggtgtgggtggagatgctccactacgttagccaccgatgcagcagggagtcccacgccaagcaactcagcagcggcggctggcttgtaactcttgtcttggccaagctcagccttgctagtcacatgcatgcaaaaagatttgtttgctggctgaaaaattga

SEQ ID NO: 72790 - DNA, 2019 bp, Oryza sativa
  Clone ID: PAT_MRT4530_73134C.1
atggcaattaaggaccggttcacgggaaaccctggaagacttacagcgcttgccacaagcgggagtgggtgcgtggccgtggagagcacaggcggccgcgtctccaccggatgtctatatggccggagctgcctctctgatagtgcagattttcacttccgcggcgtacttctggaggaaatggacgatcgagttcgtggtcctctccagcttcgggctgcagctagtgctcctcttattcgccgggatccggcggcgccgcgccggaggcgtgccgcctacgccatccaggacaaccagctctggttgcgcctgctgctgaccactttcttcgccaagatccttgccgccggctacgccattttcgtcgcatcttccagcggcagcggcagcagcagcttggctatgcttccggccgcgtcgtggctgatgttcgtcgtcggtgttgtcaagtacggggagaggatatgggcgctctacaatgggcacctgagcaccatccggagcacaattgagaagcagaagcaggaggaggcaaagagggagaagaagagaggagacagcgagcagggaggagctagagatcctcccactccacctgcagtgagcaagaaagatcctgactatgccctgcttcaggctcatgccaatttcggcgcgtgcaaggccgcgttggttgatatctcctgggacgagaaagctacaattgatcaatggcgttgggacgagacgtgggttgtcctccagatggagctctccctgctgtacgacatcatgtacaccaaggctggcgtcatccacacgtggcatggctactgcatccgtgtcttttcgccgctggccaccgccggtgccttggtgatgttccatctcagcctccacggcgcccttgggcatggggctatgctagtcgacgtggccatcacctacacattgctggttggcgccgtccttgtagacacatggtggctgctcatggcagccgggtcgacctgggcgtacgccttcttgatccgcatgccacggcggggttggctgtaccacacggccatctgcggcgggcgatggcgccaggtccgccgtgtgctcgcgtggatccgctggcttgtcaatgcggaggacagcagaaggtggtccggcaccatctggcagcacaacatgttgcagttctgcacacgcgaccttgccaagaagatacatgtcgagtggcgcaagaaagacaacacctactccggcaccacggtcattcctgattgtgtcatggagcaggtgttcaactatttaatagatattctaagaatcgacgacaaatataaggatgacgaggcccaaaaggacaaaaatgaagatgaaccaccaacagggcaatcgggtatcccattggactcgacgggcttgctcaaggcagaaaggggctggaggatcctgaagaaattagccaaaaaggaaggccataaggatggccataagaaagtgaacgacttgttcgggaggttactccgcgacgagatccagcagcaaatcattatctggcacatcgcgacggacatctacctccgcacctccgagaaggtagagaccaccgagtacgttaaagcaatcaatcttatttccaactacatgatgttcgtagtggtggaacgtccctacatggtacctggtcttgcactacgcactatttacagtaaaaccatcgaagatatcatccaaagtaggatcgggtcctccgtccagagccttgccgagaagctgagtgccaacaaccggaaacacaataaggtctcgctcagtgcgctgccgcttgccctccttctagtcaaaaggctcaacgaatacgacggggcccgtctggagtttctgttcaaggtgtgggtggagatgctccactacgttagccaccgatgcagcagggagtcccacgccaagcagctcagcagcggcggtgagctcacaacggttgtgtggattatggcggaacatgctcgcaatttctatatctcgaaaaaaaacttagattaa

SEQ ID NO: 72791 - DNA, 410 bp, Oryza sativa
  Clone ID: PAT_MRT4530_73135C.1
ctggggctagccaaattccctttggtgatccatacagggaacggaaggcaaagtagtatatagctgggaaaaggggcaaaagaaatccccgggaaggccagggctgcatttgcatgtataaaaaaaaaccgggggtttttcacgagcccccaccgggggggaaggacgcgtccagccatccaccctttttggggcgctcgacgtaacaaaaaaactgtttgccggggtccggcccgttgagcgcgaggtcgttgacccagccggccacccgtttaaagcccttggtcatttggttcggcgggaagaggccccggccgtaacactcggggaggaggccccacagccgttggtccttgccacgcttttccatgatcgccaccagggcctttttaaccacctggtgggggaaa

SEQ ID NO: 72792 - DNA, 366 bp, Oryza sativa
  Clone ID: PAT_MRT4530_73136C.1
atggagagggtgaacctgaagctgtacctggagaacgtgtacataatggaggagaacgagcggctgcggaggaaggcgcaggcactcaaccaggagaacaaggccctcctcgccaagctcaacaccaaccacgccgccgcctcctcgacgtcgacgacgacccagcaccggccacccaccgccgcctccgcggccggcgccggcgcgtcgtccaccctcaagcccggcaagcagcagccaaatccaaccggtgatataccggcggtcagaccgacagcaagcggcggtcagaccggaggcatacgggcggtcagaccggcggccgcgataggcgcggcaggtgacatcggcggtcagaccgggtga

SEQ ID NO: 72793 - DNA, 1002 bp, Oryza sativa
  Clone ID: PAT_MRT4530_73137C.1
atgctgccgtacgcgccgcggccgccgtcgctgctggtggatcgccggtacaagcagggcgccgaggcggcgcccaactgcccgcgctgcgactcgcccaacaccaagttctgctactacaacaactacagcctcagccagccgcgctacttctgcaagggatgccgccggtactggaccaagggcggctcgctccgcaacgtccccgtcggcggcggctgccgcaagaaccgccgcgggaagtcctcgtcgtcggcgcggtcggcggccgacgccgtctcgagcggccgcgacgcggcgttcggccaccggttccccggcccggtccggcctgacatggtcctggaaggcatggtcgggaacccggcgaaccccggccaggcgatgcccgacgtcgccgccgcggcggacggctcgaccatcgacctcgcaatgctgtacgccaagtttctgaaccacccgccgaccgacgccgggctcggcgccgtcacgccggagtcgggagggcacgtcgacgaggcgttcgacacgttcagcgcgtccagcgatctgagccccggcatcctggcggcggcgtcggcgcagttcgacccgaaccaggacgggttcggcgagtggtccagtccagcgagcggcaacgacccgacgagtactgcaaccaccgcaaccacctccatgctgtgcacggacgcgagcgtgcaagccgcgctcggcgagctcaacttcgccatggatcagagctgcttcgactcgctaggtttgcccacggacgtcgccggcgccggcagcctgtcgtcgtggtgctcgatcgtgccgagcttgtcgacatgggaggagcccaagtacgactcgttggattcgtttcccgacgacgccatgagcctccatgagtgcatgatcggcgctcctgatcatgattggagcgtggattgccaaggattggaggctctttacatgccataaatatatatacgattaaaattttttcttctaaaaaaaaaa

SEQ ID NO: 72794 - DNA, 460 bp, Oryza sativa
  Clone ID: PAT_MRT4530_73138C.1
ggcaagatcgagtacatcagcagcgggagccgcagcagcagctgcaccccgtcccgagcaccgtgttaacaaccaaatttggtaattcaagtatcggagatgaagatagaatcgaagtggaatccaagatggagatcgttctagaaacagagcgagaatcggctaaagtccgaatcggctgcgatcaggattcgaagagttcgagtcggacaaggttggccgattaagccgattccgacaatatgactcgtttgggcaaaagtctgccgcaaagacttatggtatcttagagtttgttaaagataagagtcgtgtccgatatggacatattttgatcaaatcaactggcacgctcacgaacctaaaagcaagatttttggacctgcactgaagttaagtagatcttctaggcatcgtattttcgcatcaacaccgccacagaaaagaataggtggcagtt

SEQ ID NO: 72795 - DNA, 642 bp, Oryza sativa
  Clone ID: PAT_MRT4530_73139C.1
atggacagctatgttaatttgttgggctcaaacattgatgtagaaacttgggatcctagtcaaaattttccccaaactggacagcaaccacaatatagtcctatggttggtgaacagccaagtgctgaagttgggggtcctctagacccaacaataagagatccaaaaatttcagcattgcggaagattcttaatagacctcaaaatggaatgactgttcaagattatgctactactttgtacaagtcagaagagaagaagacattttctttaatgtactgttgggagattttgcatcatcatccaaagtggaatgataggttgtcccagaaaaaacagaaagcgaatgtcgatcctttggtgataccatctgcaaggacaaactccagggaatttcattgcagccctgacattagtatctctgatcctttggtgagaccacctgggaggaaggtggaaaaggcaaaacgcgctcgaggtgatacttcttcatgctcaagtgagagtagtcttgtagttattgcattaactaacatgtggtcggagaaaaaggagatgagtgcacaatctagggaggaaagaaatgaccggttgggtgaagttatttcactagagaaagagaggttgaaaatagaaaaatga

SEQ ID NO: 72796 - DNA, 2356 bp, Oryza sativa
  Clone ID: PAT_MRT4530_7313C.1
gctcactgatcacttctcatagatcatgtccaggcagccgccgtgatcaatggacctcaactgggaggacctaaccatgcagcagcttgacctacaagctttggtagccaaaatcacagaggaagaagtcctggccacaataaaacagatgtcatgtgacaaagctccaatggcttcaccggtgctttctacaagcactactgggaagatattaagcacgacctcgtagcagccatccgcgctattggaaaccaaacaaataacaccctagggatcctaaacacggaaaatgtggtactactgccaaaaaaagaaggcatcgactcgcttgccgactacagccccataaggttgatccacggcatcccgaaaataatctcaaaggttctatccatacgtctccaacctcacatgagcactctcattgccagaaatcaaagcgctttcataaagaagaggagcttacacgacaattttatgtatgtgagaaacatggcaaggcggtataatcaaacaagaacatcaatgctcatcttcaagctagacattgcaaaagcttttgacaccatctgatgggactaccttcttgagctgctgacacaaagggttttcccgtggagatggcgaaactgggtcaccaccctattctcttcctccacatcaaaattcctgctcaacgggaccccaaggctgccgatcacacacggtcgtggtttaagacagggtgaccccctctcggcactccatttcatactagccattgacccctcgacaagttgcttgataatgcgaatgaggcgggactcctgacagccctaaacgggcgcctgcctcgactcgggacctccctctatgctgacgatgttgccatcttcctacatcagtcaaaacatgacatcaacaacttcagccatttgcttacaatgtttggagaagcgactagcctgaagacaaaccttcaaaagacacaagtagtgccaataaggtgcgacagcattgatcttcagaaaatcctacataacttcccagcaactataaagagtttccctataaaataccttggcttaccccctctcaatttcgaaactcaacaaaatccacttccaacctatcctcgacaaagcaggctcatgcctagcaaactggcagggcaagatgataaatacgaaggacaaatcgatgcttctaaaaacagccctcacagtgctaccgacctaccacttgacaaccctaaaggtgccggcaaccacactacgtgcaatggacaagctacggaggaaattactgtggatgggaggagataatatgtcgggggaaaaatgcaaagtaagctgggacaacgtttgcatgccgaaggacctaggcgatttgggaatcatggatttgtcaaagttcgggagagctttgcgtcttcactagctttgggtagaatggtcgactgacgagccgccatgggtggggacgccaattccatgctatgaggtagatagacagatgttcaatgccaccacagagattcgcctgggaaacggaactaaagcctcattttggatttcgaagcggcttgctggccaagtgccaaaagaaattgctccacacatcttcgtggtgtcaagaagaaaaaacaataaagtaaaggaagccctaacaggcgagagatagacaaaggaccagtgcatccaagatttcaacaaaccaaagcacttccagcagtttgtggagatgtggtagaagatacaacgagtaagtttagtcgacgaacaaagagatgagatcagatggcaactaaccgctttagggaagtagtcggcaaagtcagcttacaaactgcaattcgagggcatgatggcaagaccgtaccggcacatcatatgggagccttgggcacctcctaagtgcaagtttttcatgtggctaattatgcaaaattgagtgtggacagctgacaggctacaaaaaagaggatggacaaaccagtggatatgctccttgtgcagaacgagaccagaatcaggaatccacctccataggaaaatgtcggctcacaattcaaatttgggaggcagtgcagcacttgactagcttcgacctcaggatacaggagtaggcaagctgtggcgcggggaagcaatggttgcttttcctcacttccaccccaggtgtcccaaagaaacttttaagaacattggccatcttgatctcatggatgatctggaatgagaggaacactagaatctttcagcatgtggctcaaacaccaacattaatcatctagacaatcaaagacgaggcattacaatggcgaagggcaggagcccaagaccttgcagagttacagcctttgggagagtgattt

SEQ ID NO: 72797 - DNA, 558 bp, Oryza sativa
  Clone ID: PAT_MRT4530_73140C.1
atggataaccaactcgcgatcgacgacaaggtagtcttcctccttgagtatgaacccgtcgagatcagagatggtgctagatccctttgccggcctccgttggcatcggatggggactactctcacttgagcatgaagaagtattacctcgcgggcattttgccttttccaccttcttcccaggtggtctcactaaaggatcagagcgggatggccgataggcggcggccgagctggcaacaggcgacggcgggcatgcagccaaggggcggcggcggacgaccggactggcgagaggcaggggggatgcacgcgacggccgcggaggcggacaggcagggaagagccatggatggcagctgccgcgggcagggcgacggcggaagtctgcaggcgtgcgcatggcgacgacggcagacggcagtcgcgcggctccagatctgcgcatccgacacttttagcgctttggatggcacatctcctggaccttgttttttcgctcctatacgccaaaatgcggatggagtagcgggtagcgtatgtcctgggatgctctga

SEQ ID NO: 72798 - DNA, 1469 bp, Oryza sativa
  Clone ID: PAT_MRT4530_73141C.1
cttgcatagaacagcataaaggtcacaaaacattaagttccaacaataaccattacataatacatcaaagcctacacggcatacaacataaaagttcacaacccattaaaaaataggaataaatagtacatatccatacatcatgaaatcaatccatatgagcctttatgatctcctgctgcaaacgcaagtaatatgtttttcttggcccatccatagcactaagatccatattcataattctttcttctctttcatgggtttctatatctaactttcgtttttctactttcaacctctctttctctagtgaaataacttcaaccaaccggtcatttctttcctccctagattgtgcactcatctcctttttctctgaccacatgttatttaatgcaataactacaggactactctcacttgagcatgaagaagtattacctcgcgggcattttgccttttccaccttcttcccaggtggtctcactaaaggatcagaggtattaatgtcggggctgtaatgaaattcactagagtttgtgcttgcagatggtctcactaaaggatcgacatgagccttctgtcttttctggaacaacctatcattccactttggatgatgatgcaaaatctcccaacagtgcattaaagaaaatgtcttcttctctgctgacttgtacaaagtaaaagcctgagttatataatcttgaacaaccattccactttgaggtccattaagaatctgctcataatatccacaaaacttgttaacttgttcttgaatggtaccccaacagttgttaagtgaattttggttttgatctgaggggaaatttttgttttcatggaagtattgatgaatccttgcccaataagagtcacggtgttgctcaacacctgtgattgcatctaaagttgtattcagccaagctgacaccaacatttgatcttccgcagtgttgaaattttttgatcgcttattgttgggtctagaggaccctccaacttcagcacttggctgttcaccaaccataggactatgttgtggctgctgtcctgttgggggaaaattttgactaggatcccaattttcttctttgctagtactactttgcagcgggatggccgataggcggcggccgagctggcaacaggcgacggcgggcatgcagccaaggggcggcggcggacgaccggactggcgagaggcaggggggatgcacgcgacggccgcggaggcggacaggcagggaagagccatggatggcagctgccgcgggcagggcgacggcggaagtctgcaggcgtgcgcatggcgacgacggcagacggcagtcgcgcggctccagatctgcgcatccgacacttttagcgctttggatggcacatctcctggaccttgttttttcgctcctatacgccaaaatgcggatggagtagcgggtagcgtatgtcctgggatgctctga

SEQ ID NO: 72799 - DNA, 240 bp, Oryza sativa
  Clone ID: PAT_MRT4530_73142C.1
gaaaccgggggggaaaacacaccaaaactaaaaactgttataatttaacacggtccaaccttagggtcccacggtgaaataatcccagtgcattatagtggcacctcctaggatgaggcgaactctacacattaggtcacccctggctcgtgaaaggtaacctgcaactatgttttaaaatgcggccacccctgtcctggcaagtacactggcctataggcttacctgatcctaggaccc

SEQ ID NO: 72800 - DNA, 402 bp, Oryza sativa
  Clone ID: PAT_MRT4530_73143C.1
atggacggttgcgcacgcacgtatcgcgaatcaagcgaagcgtcgcttccccctaaatccatgcagatgcagcgatggttaaatgcatcggaggggttccttggtctcagtgcaaacgaagccaggggaacgccgctcgtcgctggcaccgttcgcgtactccttgccgtttgccgcgccgccggcctcgtgctcctccgcgtggagagcgggaactcgcgggcgagcgtgccgagacggagcgactgggcggcggcggcggcttatcgaggcggcgcggcgttagacggggtcggcgtcgggcggggaggaaaaggggcggcgccggcgtcgggcggggagggcggcggccagccggccggagggcaggggcggcccacggcgccgggaagcgccgcttga

SEQ ID NO: 72801 - DNA, 530 bp, Oryza sativa
  Clone ID: PAT_MRT4530_73144C.1
aaaaaaaaaagcctttttttatttgggattttatttttttaccccggaaaaaaacaaaaaaaaaccgaaggggcaaagcctttcagccgggggggattttacagagcatatttttcccaccggaaaagttccaacaaaaaaaaaagcccgcaaaaaatgggatttccccaaaagcccccccccaaaaaagggaaaaggggggggaaagtttttgggggaattattttattaaccccggggggaattcccccggtttccccgggtttcccttccccatttaaaattcaaaccccgagggggggcaacggcaacatgttgttaaatttaaaaaaccggatccttttcctcctaaacctttgggggaaaaaaaaggaaagctccagggacggggacccgttcaccctcgggtccaagggggggggggagcggccccccaggtcatcgaaggggacggttcgggaaccccccaagcactcggttacgttttgcccagtcatttggggggggacccccccgggggggcttccttt

SEQ ID NO: 72802 - DNA, 169 bp, Oryza sativa
  Clone ID: PAT_MRT4530_73145C.1
ggcacgagccagaccagcagcgtctcatcttcggcggcaagcagctggaggatggccgcacccttgctgactacaacatccattaggagtccacccttcaccttgtgctcaggctcaggtgaggtatgcagatcttcgtcaagccccttaccggaaagaccatcaccct

SEQ ID NO: 72803 - DNA, 262 bp, Oryza sativa
  Clone ID: PAT_MRT4530_73146C.1
gggagggaagaaaacactttattccaaccaagcccccccctgatggccaggcccccccccctgaaaaaatgcccccggaaccccactttttccaagccccctaaaccagggaagccccacctgccccatgccggacccccccatggttcaaaccccctgtttcccgccccccccttgccccattccaaaaggcccgacccccgggggcccccccccaagcctgggaagaccccaactcccagcttccctttgtccccgggcc

SEQ ID NO: 72804 - DNA, 369 bp, Oryza sativa
  Clone ID: PAT_MRT4530_73147C.1
atgaccgaggtggacgcaagtcatggtgacggcgcaacggcagtggccggggtggacaacggccacagctgcggcggttgcaggcgacgagatggctgcggccgcggtggacgagagccacggccgaggatgcaagcaatggcgacggggatggccggggtggaccagagccacaactgcgcggacgtgggtggcgatgatggctgcgactgcggtggacgagagccacgactgaggatgcaagcgacggcacgacggcgagggccacagggggatgagggcgacggtggcaggcggcagccacagggggatgaggatgacgacgcgacgatgccagtcgagccggacgagggcagttggtcgacgtag

SEQ ID NO: 72805 - DNA, 1584 bp, Oryza sativa
  Clone ID: PAT_MRT4530_73148C.1
ggaaaattcaaaatctaccgtcactgtacctccaccatctgttgttgatcgtgttatgaaagatcttttcaatgatgaggttgggaactcgaattatgtggaagcagaaaataagtatggccgcgctatgaaaggagcaccttcagattcactctttgcccaattctgtttgcatgctctgtggttcggcaactgcatatacgagcaatagcagtcctgtggattgactttgttcgtgaaattcgttggtgctgggaggaatcagagcgattgccgaggatgaagagcacttctagtatcgacctctgtacttgtctgatacaccaaaagttgcatatgcttgcaatatgcattgagagaaagaaatcattgagtcgcgagaagggtactgatcatgcacatgaagatggtatttcaaatagcgtggcacaaaataagactcgtaaaggatcagcaggtgttgtcccctcaatgatgcttctgaatacatttcaagaaatgcatgcaccatatactcaggatgcatttttgatgactgaagatatgcatgaagaaaggctccatgctgctgaagcttttggcaatgctgttggattatctggtcaattggaacgagatgtattatcttctgatatgtctgcttttaaagctgcaaatccagatgctgtttttgaagattttattcggtggcactctcctggtgactgggtgagtgaggacggagcagagggttcttcaggttggccacccaaaggaaggctttctcagcgtatgtctgaacatgggaatatgtggcgtaaaatctggaatgacgctcctgctttacctgtctctgaacagaaatttctgcttgatcctattcgagagggagaaaaggtaattcattaccttgaaactttaagcccacagcagctccttgagcaaatggtctgcactgtgttcaaatcgtcagcagacatactgaacagaaccacatatgttgtcccgaaatgaatgaagactaaaaaggatcagctatatgctacgttggcttcaacattgaagtctctccaaggtaaatctgacatcagtgatttgtctgatgacttgaagcggctttgtcaagttttcgagcacattgagaagttacttattcttgctgcttcagtccaccgaaaacttattgatgctccacgtctgtctcaagcaattttcgctgactacttcaattactatctaccaaaaatgggcactagcttggaaagtgtttgctatgagaaggaattcactgctaaggaaaaggtggggatgcatgagagagatgctgtatcaaatctgtttcctcctccaactgctaaccaatcatggaggaaagttttgagcatgggaaatcttttaaacggtcatgaacccatacaaagagaaattgtattctctgtcattgaaagaattagcaatggccattattcgagcccaaccccattaagtacagatgaacagattgagacacatcggatgtatatatctgggacgtccaatgatctttgggttgcattatctgtgacatcctgggattgagccagtcagatggtttacctatgggtt

SEQ ID NO: 72806 - DNA, 395 bp, Oryza sativa
  Clone ID: PAT_MRT4530_73149C.1
atagcatagaagaacacaattcctggtgtgattccaaaacagatttttgtcttctaaattgttcagggatatatatcatagtctatctactgttctaccttaactatggctttatttcactactattggtatatggaattgccgtgtacaaggtttgctaattaccatttgtgaatatatgatgattccgcataaataaacccattggtcattcattccaaaatagatttctgtatactaaattgatcagccatttcataatctactactctaccttgaactatggtgctggtactattcaaggaccccttatactgattgctggcatccacaaattaagcaatatgttctaacttttttctgaaccttcctaatcttcctaaacatattatgcc

SEQ ID NO: 72807 - DNA, 1200 bp, Oryza sativa
  Clone ID: PAT_MRT4530_7314C.1
atgtctttctcccgcctcctaaccccaagaattctcctggacaccaccgccgtgttcccgccaagcagcagcgtcgtcgccccgtcgctctcccgccaactgcggtgcacgcgcacgggtgggtcgccgccggcgccgccgcataggctcgtggcgcggcgggcgatgagcaacggggcggcggagccggccatctacggcggcggcggcggcgcacaacaggcggcgtcgtctgctgcggcgcggcgcgtgacgctggcgacgctccgcgggaagcaccggcgcggggagccgatcagcatggtgaccgcctacgactacccgtccggggtgcacgtcgacgccgccgggttcgacatctgcctcgtcggcgactccgccgccatggtcgcgcacggccacgacaacaccctccccatctccctcgacctcatgatcgagcactgccgcgccgtggcgcgcggcgcggccaggacgttcctcgtcggcgacctcccgttcggcagctacgaggcctccaccgcacaggctgtcggctcggcggtgagggtgatgaaggaaggcggcgtgaattcaatcaagctggaagggagcgcgccgtcgaggatcagcgcggcgagggccatcgtggacgccgggatcgccgtgatggggcacatcgggctcacgccgcagtccgtcagcgcgctcggcgggttccggccacaggggaagacggtcgagagcgccgtcaaggtcgtggaggcggcgctcgcgttgcaggaggccggctgcttcgccgtcgtgctggagtgcgtgccggctccggtggcggcggcggcgacttcggcactgacaatcccgaccattggcatcggcgccgggccattctgcagcgggcaggtcttagtctaccacgacttgttagggacgttccaaacaagtcatgccaaggtctcgccaaaattctgtaaacagtatggtaacattggggacgtgattaacagagctctatcaaagtacaagcaagaggtggaaacccagtcttttccgggtcctagtcacacgccctacaaactagctgccacagatgttgatgcctttctgaatgcgctgaagatgaagggcctgaatgtggctgctgatgctgcagccgatgctgttgaatatacagatgagaaagagataaatggaacgccgcagctcaaggtctatgcttga

SEQ ID NO: 72808 - DNA, 570 bp, Oryza sativa
  Clone ID: PAT_MRT4530_73150C.1
ccctcgaggccggccgatccgatccccccgcgatcttgtggtgggtgaggagcgcaaaaggtggtcgccgaatcttcgtgtggttgcttggttcctagatcttacaagtgtcctccgtgccaacacttgtacacgtgctcactgtcacaggctgcaaccactcatgcatcacccaggagatatggacattcacaatttcagacatctcgagctagatgcatctcatttataaggtagacgtctgctaaagcattattaacaacctcaagatgcaatgccactcatacccatagtgtctctgagaaatcttcaactggaaaagtctatcgacctgatcccaaaggaaaaattaaggcgccaaaactgcatgatgggaccgccgcttttcctccatcccttctccaaaaacttggtgcagcgcacgagatctctgaaggcaacatcagctacttcggcggattccctctcttcactcgaccggagcacctagaatacccgaaggagcttgacacagagctgcttgctctaaggcaacgctatgtatatgatgcgaataatgacaagttccaa

SEQ ID NO: 72809 - DNA, 1743 bp, Oryza sativa
  Clone ID: PAT_MRT4530_73151C.1
atgcggggtgtcgagtcgggtggcggaggcggcggcgcgtcttcttcctcccccgccgccgcaggtaattttgatgctgggcagtacgccttcttcgggaaggagccactggagggactcgagctcagttgcttggaggatggcggcggtgatggcaatggcggtggattcagcgggccagaagatgggctgtaccggctctcttctgttggagaagaggtgcggatcccggaaccttcatttgatcatattgataatctgagtaacttgtcagaaattgatgatcttgcgagcacttttgcaaagttgaaccgaagcattagtggaacacggaatcctggtgttattggtgacagaagatccatctcaagaggaagttctctaactgttgattgggctgaagatgctgagtttcccaactgggtagatcaagacatattagagggaaggtttgattctatcagcaatgttccttcattgagagacaagaggtcaaggcctcggtctcttcttgaagttgaccttccttcatctggtgatggttctcatgatcagaagtcttctctgaggcccctggagaaagaaccaatgctggcagctagagtcactgttgaagatgccatctgcctacttcttgagagctcgctcgcgcggccgttgccgcggcccccgatccggccggcctgcgggaaccctgtctgccggagccggcccggctcggtctccgtggcccggtgccgcgcggaggctgcgccgccggctccggcgccggcggcgcgtagggcggcggggccgtacaccgggagggacccggaggtgaagaagccggcgtggctgcggcagcgtgcggcgcagggggagaagtacgcgcggctgcgggagtcgatcggcgagctcaagctcaacaccgtctgcgtcgaggcccagtgccccaacatcggcgagtgctggaacggtgggggaggggcgggcggggaaggcgacggcatcgccacggcgaccatcatggtgctcggtgatacctgtacgcgcggctgccgtttctgtgccgtgaagactagcaacaagcctccaccaccggatcccctggagcctctgaacacggccttggcagttgcaagctggggagtggactatgttgtactgaccagtgttgacagagatgacttgcctgatggtggtagcagccattttgcgcagacagtgagagctttaaaggagctcaaacctgggatactggtggagtgcttgacctcagattttcgaggtgacctggaggctgtttcagctttggccaactctggtctggatgtatttgcgcacaacatcgagactgtgaggagcctgcaaagaattgttagggatcctcgagcaggatatgatcagagcttagctgttctgaagcatgcaaaaagttgcaaagagggtatgataactaagtcctctatcatgcttggtcttggagagactgacgaggaggtgaaacaagccatgattgacttaagggccattggtgttgatatcttgacactgggccagtatttgcagcccactgaaagacatttgacagtaagggagtatgtaactcctgagaagttccaattttggaaggagtatggagaatcggtgggtttccgctatgttgctagtggacccctggttcggtcttcatatcgtgcaggagagctctttgtccaaaatttggtcaggaataacaaacctaagctacctgcttcatcttag

SEQ ID NO: 72810 - DNA, 831 bp, Oryza sativa
  Clone ID: PAT_MRT4530_73152C.1
atggagtgcaagagcgaggagatcagggtggactccctggaggcggtgcagaagctggccgagaagaggggcgacgagcgcggcgtcctcgtcttcatctacgccgtcgacggcgtccaccacgccaaggaaatcgccgacgcgctcggcgacctgaagaagaacaacgactggcacgtcaacaacctcggcgtcgtcgaggcgctctccaccctctacggccccctcttcctctccatcgggattctccgcatcatcctccgccatcgccacgacaacggcatcaccgctgtgcggaaacaggctccccagcttctccgccaaggtcgcaagctcaaaaccatggagctcggcgggattaccggcacagtcttcctcgggcagaatcatcaggagtcggttcctcaaggcggacgcggcatgggcgaccgcatcatcaacctctgcaatcaagtcatcggcaacgacgcggagcatcgcacgaagcggaacaacccggtgtccgatgagtggttcgacaaggctgacaaactcctcaaggacatcgagatgttcgtcacacaacctgtgcacctccccgtggaccccgacgccgcctctgggcgagacgagcgcctccccgccgccgccgcggacgacgaccacctcccgccgctcccggctctgcttcgcaacaagaggagcgcctcccccgccgccgctgctgaagctgaaggcgagcacctcctagcggcttccggctctgcctcagaccatgaggagagcctcccccgccgccgccgccggctgtctccgaacctccccgccgtccccgacgtcatccccaagtaa

SEQ ID NO: 72811 - DNA, 287 bp, Oryza sativa
  unsure (1)..(287): unsure at all n locations
  Clone ID: PAT_MRT4530_73153C.1
ntagctaggtgtaagagaccatggagagaccttcaggataagagtaatctaagnaggngccagaagcgaggtnttnaaagggtaaacggagaacaaagggagnagtgagtgaatgtttttgtaccactctgagaatgtttnacctttgncanggccagagncaganctccgtttttccagcacgatgactttgtactcggtcctgattcatcatccaaatgngggtaatcatnccagcagccaaaaaaaaaaaaaaaaaaaaaaaaaaaaaaaaaaaaaaaaaaaaa

SEQ ID NO: 72812 - DNA, 2803 bp, Oryza sativa
  Clone ID: PAT_MRT4530_73154C.1
atggcacagaggtcgtcgccgacgaggaggtcccctcgcaccggttcaccccggcgagggtcatacgtgtcgtccgtcaacgacaacgactgcatcaatgagcccatccaccggagcgagagtatgaaccgcgccgacgcgctccgcagccggagctacaactccgagggtgacatccaggacactatctgctcgccccgggcgtcgagcttgtcgtgggagagaggacagagaggggggagagagatgaatagaggggagttgaggagagagagaaggaagaagaggaggggtgagaatgacatgtggggcccacatcaggacggccagggcgacgctgctggtgacgaggtcgatttgcagcaggcggcggcggaaggggcggcggaagggatggcagagtgtcgcgccgaggtggtgactggtttggcgcggccgccgacaacatcgagctcgacctggatctggtggtggcctaggcgtggctgccggcaaccaccttggggcgacctcggtagggagtcggagctaggtgcggcggccggcgggggtttcatcggcgagtattccccccgcaatccgacatccgaatccggcaggtttcatctgaagggcgtatttgttttagatgggagtgagaagaaatattgtggtggatctgaggctctatcatatgtagaaagagacaaggtttctttgcccgagctatttggacacctaaaggaccattgcaatgtgatgtctgggactttgctccactggttgtttcctggtaaagatttgcaaacaggtcttcgtgctctttctaatgataaggcttgcaaactgatgtgtgactgtactggagaattggatgtagcagatgtatatgttaaagagccagagattgttgatttgtgtaatgggtctgatgatgacagtgattgggaggtagaaatggagttagaagttgaaagtgaagaggagggtgggaaaatggaggttgatatagatgtatccaaagggaaaggggttgatgaggttggtggtagtggatgtaagggtaaagaactggcagaggaagaaactgataggaggatagttatttaccactctgattcagcacctattgctaggcatcaacattgtcaaagtgcaccctgtggtagccatcaaccttctgccaatgcacccattcctgactatccaacatatgacagtacacccatagctagccacccaccttctgacagtgatgaagacagtgattatactccaggggatgatgctcaatcagatgatgatgaaaaggctgttgagatagagaaacattacaaggaggtcaagaggaaggttaaggcaggacaactagagaacctagatgacattttttttcagaaggctgaaccaagaatgcatacaggtggtgatgaggcagggaatgaaaccccttatgcagatagtgatgaggaggaatcatttgatgaacttggcagtgatggggagatgaggactaatggcagccatcaagcaaggtataagaagagccaaggggtccctaaatttgaattggggatgaaattcagttgtaagaagcaattcaagaaagctattacaacatatgctattgcagagaggaaagtgatcaactttgctaaggatgatgggcaaagggttagggcaaactgtgattgggaaagttgtccctgggtatgtctgctttctaagaattctaggtcagacagctggcaaatagtaacctttgacaacctgcatgcttgtccacctaggagggatagtaggctggttacatctgttaggatagcagaaaagtttggcaatttcatagctgctaatccttccaagccaatagctcatatgaaatcaactgtacaagaaaaaatgtttgtagatgcatctatctctaagctgaagagagcaaagtggcttgtgatgaagaagaagtttgactcagctaaggggcaataccaaaagttgtttaattaccaacttgaacttctcagaagcaaccctggcaacactgtagttgtgaatagggagattggcatggatccaccagtagttaagaggatgtacatctgtttggatgcatgcaagaaaggtttcacagctgggtgtaggagagtggtggggctggatggatgttttttcaagggggcaaccaatggagagctactgtgtgctataggccgagatgccaacaatcagatgtatcctctagcttgggtagttgttgcaaaggaaaacgatgaggaaagggactggttccttgatttgctttgtggtgacattgttgacagaaaacacgtggcctgggagatctgcttaactccagtgcaggtcgaaagctcgccttcggatgtattagcgtgccagttgatttgatcctgtaatcaacaagaaatagaagcaaagaaaccgtggttaaatctataaatgatagccgatcggctaaaactctctccgtgcgtggcaatcatcttgaaatacattaacttgaacccgatgtcgcgtacaagttgtattgtcagaatcggctatatcggcttatttagcccgactcagatacaaccgatcctaaccgtagccgatcttgattccagccgattcctgctctgcttccgaactcgatctccgcctccgactccgctttgattaaatcctccttcgccgtgacttccgttttctctctctcttcttcggcgattcctctggcgcaaaggcgattcctaggcgatttcctccccgacgagatctccgcccgcaccaatgtcatcttctgccagcccatctggtgcaccat

SEQ ID NO: 72813 - DNA, 2187 bp, Oryza sativa
  Clone ID: PAT_MRT4530_73155C.1
atggacgcctccgccggctcgtcggcgccgcactcgcacgggaacccggggaagcagggtggcggcggcggcggcggcggcggacgggggaaggccccggcggcggagatcaggggtgaggcggcgagggatgacgtctttttcgctgacgataccttcccgttgctcccggacttcccgtgcctttcttccccgtcaagctcaaccttctcgtcgtcgtcgtcgtcgaactcgtccagcgctttcaccaccgcggcgggagggggttgcggcggtgagccgtccgagccggcctcggcggcggacgggtttggtgagctcgccgacatagaccagctcctcgacctcgcgtcgctgtccgtcccgtgggaggccgagcagccgctgttcccggacgacgttggcatgatgatagaggacgccatgtccgggcaaccgcatcaggcggacgactgtaccggcgacggcgatacgaaggcggtgatggaggcggccgggggaggagacgacgccggcgacgcatgcatggaggggagtgatgcgcccgacgatctgccggcgttcttcatggagtggctcacgagcaaccgtgagtacatctccgccgacgacctccgcagcatccgcctccgccgatccaccatcgaggcggcggccgcgcggctcggcggcgggcgccagggcaccatgcagctgctcaagctcatcctcacctgggtgcagaaccaccacctccagaagaagcgcccccgcacggcgattgacgacggcgccgcgtcgtcggaccctcagctccccagccccggcgcaaaccccggctacgagttcccctccggtggccaggagatgggctccgccgccgccacatcctggatgccctaccaggccttcacgccgccagccgcgtacggcggcgacgccatgtacccaggcgccgccggcccgttccctttccagcagagctgcagcaagagcagcgtggtcgtgagcagccagccgttctccccgccgaccgcggcggcggcgggcgacatgcatgcgtcgggcggagggaacatggcctggccgcagcaattcgcgccgttccccgtctcctccacgagctcctacaccatgccgtcggtcgtgccaccgccgttcaccgccggattccccgggcagtactccggcggccacgccatgtgctctccacgcctcgccggagtcgagccgtcctcgacaaaggaggcccggaagaagcggatggcgaggcagcgccgcctctcctgcctgcagcagcaacgtagccagcagctcaacctgagccagatccacatctccggccatccacaggagccctcccctcgcgccgcgcactcggcgccggtcaccccgtcgtcggccggctgccggagctggggcatctggccgccggcggcccagatcatccagaatcccctatcaaacaagcccaatcctcctcccgccacgtcgaagcagccgaaaccctcgccggagaaaccgaagccgaagccgcaggcggcggcgacggccggagcggagagccttcagcgctcgacggcttcagagaagcggcaggcgaagacggacaagaacctgcggttcctgctgcagaaggtgctgaagcagagcgacgtcgggagcctcggccgcatcgtgctccccaaaaaggaagcagaggttcacctgccggagctgaagacgagggatggtgtctccatccccatggaagacatcgggacgtctcaggtgtggaacatgcggtaccggttttggcccaacaacaaaagcaggatgtatcttctcgaaaacacaggtgattttgttcgttcaaacgagctgcaggagggtgatttcattgtgatctactccgatatcaagtcaggcaaatatctgatacgtggtgtgaaggtgaggcgcgcggcgcaggagcaaggcaactcgtcgggggcggtaggtaagcataagcatggctcgccggagaaacccggcgtctcgtccaatacaaaggccgccggcgccgaggacggcaccggcggcgatgacagtgccgaagccgcagcggcggcggcggcaggcaaggctgacggcggcggctgcaagggcaagtccccgcacggcgtgcggcgttctcgccaggaggccgccgccgccgcctccatgagccagatggcggttagcatctga

SEQ ID NO: 72814 - DNA, 780 bp, Oryza sativa
  Clone ID: PAT_MRT4530_73156C.1
atgactggtttcaaattgccgaaaaatttcatagaaaatccagaagttttctttcggagcatcaagccgcgagtcgttgcgccgtagaaaactcatccgacaaagaaaccagccattctagtgccaccaaccttcaagactacggctaacaagaccatccgcaagttcgctgctccctcagctgacaacgtggccactgggccgcaaatcaacatgggagacgtggactttgatttgaagtccagcctcatcatgatggcgtaggctagcctgttccgtggcaagccaaacgaggatgccaatgcacatctgcagcagttcctggaaatctgcagcacgtacacaatgaagggcgtcagtcctgacgccgtcaggctccgactattcccattttctctctagggaaagctaagcagtggttctatgccaaccatgatatgatcaacacctaggacaaatgctcaatggcaatcctatcaaagttcttcccaatgggcaaaaccaacgccctacgcgggagaatttcaagtttacagcagacgagagatgagtctattcccgaggcgtgggaatcactacaggaactcactcccacatcccgtgaccacctggacgcggcagctgcaggagctttcttttctaagacggttaaaggagccgtcgatcttatagaaaagatggtctccaatttgggctggagcgaggaacgactccggacctgttagcgaggaatgcacaccgtcaaggagatgaaaatgctcgctgcaaagctagacctct

SEQ ID NO: 72815 - DNA, 1080 bp, Oryza sativa
  Clone ID: PAT_MRT4530_73157C.1
cggcgagcagccagatgccaagatcctccccgcggctactcctcccatgtcggacgaccacagcggcggcggaggcgagcagcggcaatgccggcgagggttcgcggtggacgtggtggagctcggtgcggccctggctctggccgacatggccggcgccgccgtcaaaccggccatgcagctgcagctgcagccgaccgccgctcaggaggaggacgaggagatggcgaccacgaggctgagccttcagctcggcaacaacgtcggcagcatcatccagtcctcctcctgctccagcagcggctccagcgccggcctccccgcgccacccgccgccgccgccgcgccggccaccgcctacggcaccaagcccctccacatgctcaccgaggaggagaaggaggcgaagcggctgcggcgagtgctcgccaaccgggaatccgcacgccaaaccatactccgccgtcaggctattagagatgaactggcaagaaaggtcgcagatctgtcaacacagaatgagagcatgaagaaggagagggagacagtgatgcaggagtacctctcactgaaggagacaaacaagcagctcaaagaacaggcacagcatcatctttcgctttccttgttctaattaatctcttagtagtataatcttcttcttttttgttctcttttactacaaaattattattactcctaccattctgaggccaaagagagcccaagagaatctactctactctactctaccatgttcccaaatccaaacctccagttactttaatccctaatcccttttctcttttacttgtactacaaattaagctaagtaccattctgagttaaggccaaattaaagagaatctactagcatgttcctccatttgccacatgactgcactttactgctgctactggtcctagtagtggtcaaatcaatttggccattgctgtacggctgtagctagctgctggcgaattgggaactgaaaatgtttttattggatgctctggcacttgtgtagtgctgtgtatgtgccacactgacatctgtaatggatataaccattttttcta

SEQ ID NO: 72816 - DNA, 1122 bp, Oryza sativa
  Clone ID: PAT_MRT4530_73158C.1
atggcgagggtgccgggggcggcgaggggggcgaaggtggtgctgccggacggcgcggtgagggcggtgaaggtgccggcgaaggcggcggagctgatgctcgaggcgccgggccacttcctcgcggacgcgcgcgcgctgcgggcggggggaaggatcgcggcgctcggcgccgacgaggacctcgagctcgggggcctgtacgccgcgttccccatgaagcgactgggcgcgcccgccgcgccggcggacatggcgcgcctggcggccgcggtgtccagggatcaggccgccgcgcggaggtcgtccgccacggccaaggtggcggccgtcgtggtggcgccgcagcacgacgccgcgatggccgaggaggaggaagacgccgcgcggccgaggctggacgagatggccgtgggcgacgcggcggccgaggcggagatcagcgagctcaagcagcggatcagcggcggccgccgaggaaaggggaatatatggaagaaaaagctcggtggaaagatgattaatgaaatgaagatatttgaacatttcacctacttatgcactctgattcagccctatgcaaacaggcctcattgccatgaatcggtgacgatcctctttgaggagataaaggacagggacaatagaccacagcgtcggcttctccctggcaatctgtgcatcaatgaggaaggaggtggtggtgttggccaaggaggcatcaacaacaaggaccaagcgtcgctggtggcctccctagctacgcactatcgtccccaatgtcatagtggccagtcgcaatcgagcggcggcatcaacttcttgagtgagaaaaaggacgaaagggaggagaaggaagagaatgacaggtttaatggactaatgatatctctattagaattattcagaagagtaaatcttttggtgactatttcattgctgcagcccactgctcttccagctctgccgacaaccacacctacaagagctacagctgaagcatcacatagggcagaggaggcatcacaggtttggaattatgaagagcgcatgacgatttgcagctataggttttgcaggtctgttgaaatagatttggaataccagaacacctacctctaa

SEQ ID NO: 72817 - DNA, 2656 bp, Oryza sativa
  Clone ID: PAT_MRT4530_73159C.1
cttcgaggaggaagcaacagcgtcgctccacgaaaccatcgctgcggttgcgtgctcgcgcgaagaagaggagagagaggaccaaaccctcgtctcctcctcctccggtggtggggggagaggaggcggcggcggagaggacgagccgtctactggatcggccgcccacgaggagattaagccaagtttgatcagattgttcacgtgttatggctggacatcagtataataattcccagatgtcccggatggatcatatggacaggctaaaccatgagtccgcaccttttggccaaaagttatttatgcatcctaggagtgatccagctaacggagctggatcgtctggctatgtgggtaacacaatgagatcgaatgatcttccgtcttcaagttatgctggccaagcttatggtcagcagaatagagcccccatccatgcttcatattctggtcatgcacctgctggaagctctagtggtagctatgcaccatacaatactcaacatatgcctgcttcaagctatccacacggatctgaggataatttcattccaagttcccatgtggatggcagaagggttgcattgaagagaagaaatcccatcattcatcctacagatggattcggtgttggaaattattatgctgggagttcttccaatactcagttctctcggcccatgcctccaaatcctattccacctcctgaatcctgtgttcgaatgccctcacacttgggttcgaaccactggaatgatcaccgctatgttaatcatgaaggatctcaacgggggtaccggaacccttgaagcagcagttcagaactgactacactgagtattttccctgaagatatctacttgatcgaggtcgaaggaaagagaggctagtcaatagccaaaactcatctctgcctcctccggcggagggggctaacggagcggagtcggcgggttctgtgggtataccaatttgatcgaataagaggcgatcaaccagtaattcatgagaaggttaacgtctggtgaatggaacccgattcaataattcataatctgctcatacacctcctataatctcttgaaggaatgatgcgccatacattaccaaacagatatctttttaaagccggggctagggatctcaggatatttctatgcccagttccgccgtgaatgttataagcttggcttttcataaagctattagtttagcttgtcacatttatggaagttttattcgaccttattgttgtgcttgtttttctcttatttaatcttctggtatctctcctacaagtcatagcccaatatgtcaaaggtctttacccttttccacgtaaatatttgagatccagtcgaatgattatccctgttaccatctggaaggcggatggaggaatgtgaggggaagacatgatcatagtactatccatttggaacaaagtccagctgcagcttgcccgtcaagcagcatcaatgtgccaccataccatccaaatgcaaatggtccttttggaagtgcaccagtacaacgtgacagagctcctttatctgtgcatccaagaattcttcctccagggcctgatggtagtagcatagcattcagagagaggccatactatcctgctccacagagcaccaacataagtgcacctgtgccaacgcttcctatttcttgtgacagtgcaccatttgctcatggtgggtacgcccctagatcagctcatcgtaacaacttacgcacttatcctcctccagcttttgcatcttcttccaaccctggagcagtctcccatgagccagctattcctagctatccacctgctgcccctagctatccacctgcaacctctgcagcatcatcaagtgtccagccatttcatgctgaagctgctgcacatttgaggcatccaaggcatgtatctgtagggggcagtggtagtgcaaggagtagaaggatgagggattcctatcatggttttcatcatttgatgattgaagacaataacttgggaagatcagcagctgagcggtttatgatgctggatcagttagttatccatgaatcaagagaagcattcgatcctcactgggacatgagactggacattgatgacatgagctatgaggagctgctggctttggaagaacgcataggccatgtgaacactggcctcgctgatgagaaaatttctggctgtgtgatggaggtagcctgctgcagcagtagtcatttgcaggatgatcaggacaatgaaagatgtgtaatctgcctggaggaatacaagcatgaggacacacttgggaggctgaaatgcggccacgggtttcactgcaattgcatcaagaagtggctgcaggtgaagaacacctgcccagtttgcaaagctgctgccgcagatgaaggcagctgatgaggggaccaattgatcttcccctccatttatataatgatgcagttcaaggtcaggccaaattatgcctgtctccattgctccgcaatctgtgggctcttgtgaataagttatctcggtcgatatggaattattttgtgagctattagactattataaactcaagcaaaacctatgtgcaatgtaaatctcccaagttagttaatttcgctcaaagcatccaaaaaaaaaaaaaaa

SEQ ID NO: 72818 - DNA, 517 bp, Oryza sativa
  Clone ID: PAT_MRT4530_7315C.1
ccggccgccgctcacatcggagctcttcttctacaccgaccccaagacgtccaatgactctcactgacgctgaaccgtttagaatgtgctctccttgtcattgctgcctgtgcatcactacatgcgctactgcctatgcaccatatcatacccaacttgcatagagccagtgcggccacttcgccctgcgtacaacgacaccggcttagaccacatctacagcgacaagggtgccaacaagaactaccggctaggcccctcttgccatcacgtgctctccatgtgcaaaacaaccacatatgccaacaactcccaactgcttgcatgctgcaacactcactatcaccgtgcattagcattgaatcacgtcatatcacaacaagtacaactccagcaacatggtgatctctactatgatcgaaatctggtctcaagctcgagctctgttgcgttttaacgtgccatctagatatggtatctaccctaggtactatggtgcacccagtaaccttaccac

SEQ ID NO: 72819 - DNA, 359 bp, Oryza sativa
  unsure (1)..(359): unsure at all n locations
  Clone ID: PAT_MRT4530_73160C.1
accgctcctcattcccgaatcaccgcactcgggcgcccactcctccgatcgatcaaccgatctccccgcagaatgaagatgagcaaacatgtcntctttggtcaacagcgattagacggcgccgggggttcggcttcctcaacgccacctccaacctcatcttctcatgcatgggtgcggcttacgggactgcgaagagcggcgtctgcttngcgtccatgggcgtgatgcgccctgagctcgcgatgaattccatcctgcccgtgctcatggcttgtgtgctcgggatctacggcctcatcatcgccgtcatcatcagtacaaggatcaaccccaatgctaagccctactacctcttt

SEQ ID NO: 72820 - DNA, 317 bp, Oryza sativa
  Clone ID: PAT_MRT4530_73161C.1
ggcaacaaaattttaccggagggattaacccaaacaggggagcggggcccttcccgcaaaggggtaataaacccccgggaagggcaacgggaccccccctagcgaaataagaacaaaagccatggggacaccccaatacacaagaaaaagagggggggttcccccccaaaaaaaaaagaaaaagaaaaagaagctccggcgaacaggttcccacccaaacggtaaaagcccaaagggggggcaaagttttagccccccttcctttagggaccaaaggggttggcccccggggttttttgaatttttttaggaaaata

SEQ ID NO: 72821 - DNA, 162 bp, Oryza sativa
  Clone ID: PAT_MRT4530_73162C.1
gacccacgcgttcggtcttgcaaacacacgcagcaaaatccacaccgcttcccctccccgagaagaatatagcagcttacatggctgccaatgcggagagcatgctaagctagtagaagcccgcggaggatgagcctcctgcggagaatgccgagaaggccc

SEQ ID NO: 72822 - DNA, 396 bp, Oryza sativa
  Clone ID: PAT_MRT4530_73163C.1
cacagacaaggcctgactcaaggaaagggtagaaacaccttgctgttctctgacttcagagaaaccaactcctggcgtgtgatactctactcaagtgcatccttccttgcgaagaagaatgaatggggtgccaccctccaggataggcgccacaacacggtgactgtctacatggttgtcctcactgcagccatacgaacatcagcttgtcaagagccgggacaaccatcgcatcagacaggagaggggtgtctccagccatggatgactccaacgcgagctgcggtatgaggctcgcgtcaataggtcttgagaacaccgacgccaaccggcagacttaccgcaccatctttgcgaccggaaccagcttgcgacagcacatctcctgtgctattc

SEQ ID NO: 72823 - DNA, 189 bp, Oryza sativa
  Clone ID: PAT_MRT4530_73164C.1
atgggcagtcttgccgaaattggtggccacctcaaactgtcgtgccttcttctccagcgccaagtcgaggacgatagtaaccttggtgctgttactctcctcttccaggggtcagggctagtcctgattgtgttcagagaaataatgaaagcatttccctacagatcaagaaaaaagtcagcaagttag

SEQ ID NO: 72824 - DNA, 1071 bp, Oryza sativa
  Clone ID: PAT_MRT4530_73165C.1
atggagaaagctttctgggatgtggttgtggattcacttagaggagacatgccagactacagctatctggttcagctggtaaaggaagtcagggatacatttggttcaaattcatttgtaattgctgttatcaaaggtttgcgcttcaccatggaagaactaaaggctctgaagacagaagtcagtagagcacgtatccaactattagaaccaattataaagggctcaggtggagtggaatacctgcagaaggcttttgctgatcgctatggattcccgtccaatgcatcagttgctctccgttcaactgctcagtggatttccacatcaaaagataccgtggaagtagaatggaatgagcatgctcagccatttgttgccaccctccgatcaggtcatggagttccagatcagcgacagtctacaatacctgtgtcagatgatacggggctaccagagtgcacggggcaaaggcttgaccagctaataaggattgggttgttacagctcatcagtggcatagagggtgtgcaaatgcagtcagtaactgagaccttcaagctcaattggttgaggctgagcatgcttgtgcagcgtcaagttttggcgaccgacgacccaaacatcactcccacagagctggaaagcgcgacatcacaactgttcaacactctcgcagagctactggacaacttccccgacgttagcaccgccaagatcatggaggtgatgctccgttcgtcgtcgtcgtcgtcatcaggctcgacaaccggctctccatcagatgaaagaaccgagagcaggaagcagatactggccagggtcttcctcaagagcctccagaccgatgaccccgtcttcaagaaggtctcccggtccgtctactgtgcgttccgcgcgatcaccctcggtggcagcggtgccaggggacggaagctcgccgacgccgccctgaggcgcatcggcgcgacgaagctcaccgaccgggtggtgagatcggccgaaatcctcatcagggccgcgtccatttcacagcaggtccacggcccttggtacaatcacttggtgtga

SEQ ID NO: 72825 - DNA, 1367 bp, Oryza sativa
  unsure (1)..(1367): unsure at all n locations
  Clone ID: PAT_MRT4530_73166C.1
gngggggnccccccccttttttttcgggttttaatttctggnatagggggcgggcgggttggcggggccccccccccncccctcttcggggggttattaccgggaaaaggggacctttgggttcctggttccttggggtttccccaatccgggncccccncccccctttattaggaaatgggtccctccngggtttgggcccgttttttgggacccttnccccccccctcccccccccnggntttgggtccctttttttggggcccccctttttttgggtcccgggngggggggggtnccaccaccgttttttttttaccccccntttcccgaccgggggggtcccatttccccgggggggggaaggaccaaaaccgggtttttccccccccccccctattccctaggggggggccccctattgccccttggggggggatttcccgaccccatttttttcccccccccccatgggtttattttggggggggcccttttntttacccccccgggacccctttggggggcccaccccccctttccccnggggccccccccttttccccgggggggggtttgggggggggtttacccngggtccctggggggggggggggcccccccnttttccccgggaacccccccctttcccctttttgggggtttggggggccccaaaaatttgggggcccccgggnaaaaattttgggggccccttttncccccgggggggggcccgtttttgggggggggcccctttttgggggaccccntttttccccggggccccccgttttggggtccccgggaccccccccccccccggggtggggggcccccggggncccagggggccccctttttggggggggggccccctccctgggggccccccgggggccccccccttggggccccccccaggggccccctatttcccccgggggccccgggttcccctttttttttgggggtccccccttggggcccccccccccccccccccccgggtttttttaggcccctttttttttggggggcccccttttttttattggggcccccctttttcctccccacccccccccgggggggggggggggtccccccggggtacccccccccaaaaaagggggggcccctttttttttttttttttgggggggggggggccccccccccgggggggcccccccggttttggggggggccccccccccccnggggggggggggccccccccgngggggggggggcctgggggttcccccccccccccccccccggggggggggccccccnggaaaaaaaaagggnntttttttcccccccccnaaaaaaaaaaagggggggggggggaaaaaacc

SEQ ID NO: 72826 - DNA, 4840 bp, Oryza sativa
  Clone ID: PAT_MRT4530_73167C.1
caccaactagctagctagctagccacgccatccctttctcctcctccttcttcttcttcttcttcttcttcttggtccggagagagtagagaggagggcgcgcagcgagatggcttgcccggcgcagtcgatgctgtcggcgagcaccaccagctgctgcgcgttcctgaggagcagcgccgccgccaagccacaggccgcggcgtcggcggcggcgagcctcgcgcgaggggggaggctgttcctgctgtcctgcaacgcctcgtcgtcgtcgtcgtcgccgtcgccttcttcacctccgccgccggcgccggcggcggaggactgcaacgaggaggagtgcgcgccggagaaggaggtggggagcctgagcgcggagtggctggcggaggagcggaccaaggtggtcggcaccttccctcccaagaagaagggatggaccggctacgtcgagaaggacaccgccggccaaaccaacatctactccgtcgagccgacggtgtacgtggcggagagcgccatcagctcgggggcggcgggcgcggcggcggacgggtcggagaacacggcggcgatcgccggcggcctcgccctcgtcttcgtcgccggcgtgtcgtccatcctcatccaggtcggcaagaaccagccgccgccgcaggccaccgtctactccggcccgccgctcagctactacgtcgccaagttccagccgtccctcgccgcggtcgcgctccagcagcagcccgccgtcgacgcgcccgccacagaggacgcctcgtcgccggcgccggcgtcccccgccgccgccgccgcagaggaccagctctcctcctgaactgctgctgctgcagatagagaagaagaagagaagatcagaaatgtctgtgacttcagacatgatgcttgtatacgtatcatcacagttcacaaagattcaaatgtactgatgaaggatatgcacgtatacactacatggtagattgatgaaaccatttttaagtttcgtatatatacaagcatagatttgatcacacgtatgaacaccaccacacacgcacacattgttcaggatttcagatacaagcatagtacagtaccatctcttttatttattcacacaaagcagcagggcattgctcacgtaccaatctaccatctgccttgccactactaacaagtaaacaagacgagatcttcggttcttcacacgaacgcttagcggttcagatggctcaaacaacgccgttttcactagcttttccaccatgaatcacaccaagtgattgtaccaagggccgtggacctgctgtgaaatggacgcggccctgatgaggatttcggccgatctcaccacccggtcggtgagcttcgtcgcgccgatgcgcctcagggcggcgtcggcgagcttccgtcccctggcaccgctgccaccgagggtgatcgcgcggaacgcacagtagacggaccgggagaccttcttgaagacggggtcatcggtctggaggctcttgaggaagaccctggccagtatctgcttcctgctctcggttctttcatctgatggagagccggttgtcgagcctgatgacgacgacgacgacgaacggagcatcacctccatgatcttggcggtgctaacgtcggggaagttgtccagtagctctgcgagagtgttgaacagttgtgatgtcgcgctttccagctctgtgggagtgatgtttgggtcgtcggtcgccaaaacttgacgctgcacaagcatgctcagcctcaaccaattgagcttgaaggtctcagttactgactgcatttgcacaccctctatgccactgatgagctgtaacaacccaatccttattagctggtcaagcctttgccccgtgcactctggtagccccgtatcatctgacacaggtattgtagactgtcgctgatctggaactccatgacctgatcggagggtggcaacaaatggctgagcatgctcattccattctacttccacggtatcttttgatgtggaaatccactgagcagttgaacggagagcaactgatgcattggacgggaatccatagcgatcagcaaaagccttctgcaggtattccactccacctgagccctttataattggttctaatagttggatacgtgctctactgacttctgtcttcagagcctttagttcttccatggtgaagcgcaaacctttgataacagcaattacaaatgaatttgaaccactgttattacactcagagtgttcagttaattcacccaataatttgtcatggcttctcttcatttcgtcttcctttgcaggagaggatagttttcgcagcatacccagagagtactgcaaaatctgtcccaaatattgcatgtcctgggtgcccgattcaagtacctgcaacaaaatttcaaggtcaatattgttgattatttcttctttccaacctttaggaaccatctcatacaatgtatccctgacttcctttaccagctgaaccagatagctgtagtctggcatgtctcctctaagtgaatccacaaccacatcccagaaagctttctccattgtttcccttactttttccttgaaaccaccctcaacagtcccaatattactagagctgtcagctagaaaaccatgaagaatctcattgaccatctgctcgttctctgttggccgtttttctgacagagtgctgctcactgtcattggattactcatggtgatgcctgctgtgttactttcagatggtgaagagggaactctgaacatagattggacagcctgacttggccttttatcattaatgttggaattctccttcatgtcagaaataggagattctccagaagaacatgtagctgctacattttttatagttgttgccaaggggctcctgtttccctttgcttcaaaaaactttgtccttgcttctgataaagcaacttccatccgctcaataccagcttcaccacccaagtgccgaaccttctcccttagaagtgtctggtctaccataacctctttctggatggcctttaaattatcattaaggttctctggttggccttcagcggtaaatttacatgtttgcatcattgatagctcaagtttgcatgcagctctgacaagatcttcctctagtgactttgcatcttttgctttccacaccacgaagtggtaaagataggcacaccaagctttgtcaaaagaagccaactgagatctgaatttcttccgatcagcaacaacggcagaagattcctgataattagaagatccaggagacagatcatctagtattggctgtttcagtatgcatgcaccacttgacccatcaagtattgtcttaatcagcagttcgaattccttcacaaagttttctgctgactccacaagtagtttctctcgctcacctcgttcattaaaaacaacacttgggtgacctagtatcatgtaagcacaaagaactatcctcggtgaatatctaggtaacttgctaacatctgaatttctagctgcctttgttggtgtcactctagttcttcccccactttttgatagagtcctctttggtgatcccagatgcttgagcagatgatcaatattttctggtgatgatggacttgatgactgagataaagtaaaacgactctccaagcgatcaagaaatgcccttgtggtctgaagaactgtgggagattcaatgcaaagagctagtttttcaaatggcataggcttaacagattcctcatttattcttagcatgtcaaaggccctagccaacaccactgttgtcttcctagatgttatgaatcttctccagcatcttgccagatttcttgaaagaaaatcaccgtgtttaactgaagcggtgtatgtaaagctgtgagtacttcctcgctgcttcaaatactcagctctctgccgctttgccctctgaagtttgtcttctagttgttcttttaacttgctcctgtcagcttctctctggcaagataaagtcctggcagcaagttggacctgtgaaaacctaccctgggctctccttttctcaccttccaatagccccgtccttctcttctcagctgcagtgcgcttctgcaggatcgctgaatgtacacgctccctgtacttgttttcccacgccactctctgcacaaggtactttgttgttctttcctccagtgcagccctcctctgcgaacgagcatgcatgagttgtgtacgtttctcccccgcttgccgaactctagattcaactttcatgccaagttcctccctctccttcttgaacctcaactccgcatcattcttagcagcctgacgcagctcgtccaacttagcaagccgactttgttccttagccaggaggcttaaccttttctgctcggcagccacaagctttgcttcaaggcgcttcttaggatcctcctcctgagatggacacgaagggtatctgactgtgcacctcgctttgcacgataacgcttcatgaaattgctgcctccggaggtccgcatcgcggagcttggcctcgatctcctccgcggtggccggcgctcccccgcggtgccggaggaggagccgcctcctgatccgcggcggcaccctggccaccaccggaggcgaaggcgacccctcctcctcctcaacctcctcctcggcctccgccgccgcaggtatctccagcgccaccgcctccggcacccccatccggcaattggtattcgcagtgctgtgtaatgttcatgtgtaataccgtatatactgccggactccggttcccaggttctggtataaaatttcagggtgttcccccccaccatt

SEQ ID NO: 72827 - DNA, 1486 bp, Oryza sativa
  Clone ID: PAT_MRT4530_73168C.1
tgtgtttttttttttttattgttttttttttttttttttcatcaaccatgttactacccgttatccataaatccaattgcaatatactgcatatactaaagtctctcacattgagacctgaatatgatgtaactggactgatccgcgaagccacttatagttatagaccaaataagtaggccttggattacccactaattttacatataaatagattcacgggtcggtcaaattttattacctataaatcggtttacgggttggcccatagcccacttgtatttttagacctgaagctgcattggccagatgagaaatgattcatcagagcagggacctgatcctgtcaccctcggtcatgacatggctgcgggtgatctcgccgacgctccggcagccgcagagcgccatggccacctccagctcgccgttgagcatctcgatcacgtgcctcgcgcctgcctcccccctcgccgccagcccgaagaacaccggcctcccaaccatgaccgcccgtgcgccgagcgccagggccttgaacacgtcagtgcctcgccggattccgccgtcgaccagcaccggcacggcgccggccaccgccctgaccacctcttccagggcggcgatggtcgccggcgcgtagtccagctgccgcgcgccgtggttggagacgatcacgccggccaccccggcctccactgctctcctcgcgtcctcagcggtgacgatgcccttgagaaagatcggcatgctggttatggacttgagccactctatatccttccatgataatgatggatccagcgtcgctcgtgcgaatcgttcgagctgagaaccgtttgtggtatcatggtcatctgttgtcattaaaccttcgagattaccactccgtgggaaaaccattttgtttcggatatctgcttcacgccgaccgagcataggagtgtcaactgtcaaaagaagtgccttgaatccacaactctcggcccgccgtactaatgttgctgaaacattcctattcttatacacatatagctgataaaagcgaatggcattgcaactggaggcaacatcctcaatcttgcaactggaagaaaaggaaagaaccattatggcgttacatgatgctgcagctcttgctgtagccttctccccttctggatgtgctaatttgtgccccccagttggagccacaattatgggtgaacgcatggtgtatcctaataaagttgttgacatgtctatcttgctcacatccacaagaacgcgaggtcgtaatataattcttgtgtatgctgcgatattctccctcagtgtgtgctcatcctctgctcccccattgatgtaatcataagccatctttggcaacgcttttttggcgagttcttgatactcccggacattgactggtagattgtcctccatttctctagagatttaggggaggaaggaggaggaggaggatagcaatcaatgatatcagaaa

SEQ ID NO: 72828 - DNA, 562 bp, Oryza sativa
  Clone ID: PAT_MRT4530_73169C.1
gtgaaaaagtaatcacagggaaagttccttgcagttgaagttgcaaacctgcagtcgactgaccactgatcactgaccatggcatctgcctgcaacatcacaaggagttataaaaggaaaagaataatttccttcatgagggcaggaaggaatgcccagttgctgaattctgagttgatctggatcagaagctaccctattctattgtcttggaagcagccaagcaggtgaagcatgaattggaagcttgtgttaacaactctactccttttgtctttgcacgcttaatagactggcacatacagtcattctctgtttataaaaatccagagctgtcccatttttaatttcagtaaggcagcatgctaccccaggatcaggtgagcagttctgttctgtctgacagactggatctgttgggtgacaaaaacttctttttcttgttgataacatgatctcacctaagcctccagattaattgatgaaaactaaatagtattatcacatatcccccctcctgatcgcgtttcattttgcctattttaatcaatttcagttctat

SEQ ID NO: 72829 - DNA, 597 bp, Oryza sativa
  Clone ID: PAT_MRT4530_7316C.1
aactagtggatccccgggctgcaggattcggcacgagggccaaacttgttgagctcatgaaggaagcagcttgcagctcctcgctgtagcagggagtcaggtgctgcattgattttaatttgggaactggggcacgtcaaatcctttgcgatgagcagcaaacggggacgttttgctgaagtagtccaccaagatgcgcaaggtgtgggtagagagtgtacatcgagtcccggcgcctgacgaaagtcgagctcactaacagagcaagacatgaatctttgctctgacctcttcttccccaaagtcccaaacccattgtctctgtgttcatgtctccattttcccttgcatccctccctcttctattatgttgttccgctcacatcaagatcttgagcttgagcagtccggcatctctctcttgtttctcatcaatctggtgccggctatgattagaaacaagaagagatcaccggcgttgttggagaacgctctgacgtgcgggccatagggccatattgcaaagtttggtaacaaaacctagtgtaaagtgaaaaggcatatggatgtatggtttaaaatgcaacttgggtaata

SEQ ID NO: 72830 - DNA, 339 bp, Oryza sativa
  Clone ID: PAT_MRT4530_73170C.1
atggcgatggcgatggagcggcggtggtggaggccacagatccggcggcggcgtggcggccggcggtgggcagcgcacgcaggcatcccgcggctgccactggcgttctccggcactcctttggcgtcggctggcattggtggtgaggagaacggccggatctggctctcttgcccagatccggcgcgtcctcgggtggggatgggaatattgcaggtaccctcggtgtgcagaaaatgttgtctcaaaaatccattttcccaggagtggattctaatctcctgtggggatgtcccctcatgtaccttttccttccatattcgatacaaatggttgtga

SEQ ID NO: 72831 - DNA, 406 bp, Oryza sativa
  Clone ID: PAT_MRT4530_73171C.1
aagcttgcaccatgtacgaaaaaaaaaaagcttatagcttgcaccatcaagagcaaaacatgaagtgacggaaaaggagatgtattacgtggagaatactggaaatgtgaatccaggtcaaaagttgggacaacaggcgacgaatactggaatggcggcaatggagaacgcttctgggagtttgggaccagcggagaagtcaattacgacggagagggagagtgagtacattcaaagtgccgagaatagagaaggaataacctcgaatccttaatgtttaatgtgatttttgttgttgtgatgtttacaatttttagtatgattgatagtatattaagctttaatgtgtataagaaattgagaaaataaaaaagaggagaaattccttgatgaaaaaaaaaagctt

SEQ ID NO: 72832 - DNA, 494 bp, Oryza sativa
  Clone ID: PAT_MRT4530_73172C.1
gcacgaggcagcagcgcgccggggggctgcttggtgtggactctggagttgtgaccgccgtccagtcctccttcattcagggtgtgttcgcagacgctggtttccaaccggctacggtacatacggaaaatcgaacgattcattaattagtgcgtaattaattaagtattagctattttttaaaaaaatgaattaatttatttttttaaagcaactttagtatataaacttttttaaaaaatacactgtttagtagtttaaaaagcgtgcgcgcgaaaaacaaggaggtagggttggaaaaagggacatcctaacacagccaatttgcttggaatcctataccctttagacaagacagggtacttcctctgtctcatacaaaaaatcaatatctagccataaatatttagatgtaaccaagacaagacatgtacttccccgtgttataaaaaatcaacatctagccataaaatttagatgtaacctatgtctaa

SEQ ID NO: 72833 - DNA, 266 bp, Oryza sativa
  Clone ID: PAT_MRT4530_73173C.1
gacggatctataggatcctaggttaccgagctcgcatgcacaattgcgactgaccggatcgttgtatcaatggggcatcctggatcgatctcgcgagctattgaagccgatgacatggaatgcatggctgagagaatctactgagtgatttaaataagatggaggtcgcagtgatcattggggggacgatatgagggtctacggtcgagtcaggtggattattctgttggccaacctgggcggtgtaggctgtatcatatgcgacg

SEQ ID NO: 72834 - DNA, 645 bp, Oryza sativa
  unsure (1)..(645): unsure at all n locations
  Clone ID: PAT_MRT4530_73174C.1
cggacgcgtgggcggactcgtgggcggacgcgtgggcggacgcgtgggccgccattaataacagccagaaagagtgtagtaaaggtgtgtgcacaaagcatcagtaaagagcacaggcatgctggaacaagcaggacagcgatcgatccagtaggcaggcagtggcaatagcaatggctaggccttctctcccgtgtgccgtcgtggccgtcctcctcctcgccctcctccccacgccgtccaccgccggcgaccctgacctgctccaggacatctgcgtcgctgacctcacctcagccgtgaaggtgaatgggttcgcgtgcaaggcggcggtgacggaggacgacttctacttcaaggggcttgccgccgccggcaacaccaacaacacgtacggctcggtggtgaccggcgccaacgtggagaagttgccggggctcaacaccctgggcgtgtccatgtcccggatcgactacgcccccggcggcctcaacccgccgcacacccacccgcgcgccaccgagatggtgttcgtcctgcagggcaccctcgacgtcggcttcatcaccaccgccaacaagctgtacaccaagaccatctctgccggcgacgtcttcgtctttccgcgcggnctgctccacttcc

SEQ ID NO: 72835 - DNA, 394 bp, Oryza sativa
  Clone ID: PAT_MRT4530_73175C.1
acgcgtccggcaaattccaccgatcctatttggatggttcacgtcgcaaggatcatttgattggaatggggtgccgcgaagctatacatacgtggcacactactacctcctcgtcagtctgatgacaacggccagctcgatcatctcgcgaggcacgcgtccggcgggcggcggccgtccgctttctcgagaagcccgacgatacccgtgacctgtatcggagctagaagatgaaagtgcagtttgcttaatctgacgccgacaagataatacatggtcagatcaagcaccgatcattatcattgtctaaagaaaaagaaaagatcaagcaccgatggtcgcgcaaaggaggcgtccgagcagaacgcgggtccgaggcatgaaaccaaaaaga

SEQ ID NO: 72836 - DNA, 174 bp, Oryza sativa
  Clone ID: PAT_MRT4530_73176C.1
atggcgaatatgacggcagaagagagagggggagacgttggacccaaggaaggacttggagtcaatggttttaagaaggaagaggtaaatatttcccctggtgagcgcgctcgacaagggtcgaacccgggccagcggggtgcatgccagcgacccctgccactgcgctactag

SEQ ID NO: 72837 - DNA, 243 bp, Oryza sativa
  Clone ID: PAT_MRT4530_73177C.1
atgatgaggaggtcgatgttccttcccgtctgcgcgctcgtcctcgtcatgctctgcgtctgcgtggcgagccacatggacgtggacgagcgccgaggcggagctcgcgcctacatgggcggccacggcaggcccgtgggcatcagacccagaaccagcggcagcccgcgcggcctcagcggcggcacctgggcggcgtgcgccggctcatcgctgctcgccgccgcggccatgctcatgtag

SEQ ID NO: 72838 - DNA, 1020 bp, Oryza sativa
  Clone ID: PAT_MRT4530_73178C.1
atggacaatgtcggtcatgggcctcacctttttaaagctctctcatggaggaaccaaagttacatgaatgatatcgctgatcgatgtgccccttcaccccatcctttaagtatgtgccagtcacgagcagcagcttttggctatccatgtgaagaatacaaggtcacaacagaagatggctacattcttagtttaaagaggattccccatggtcctcatgactctaacacctcgactgagatgaggccaccggtactgcttttccatggacttatggtggcttactgggaatggtcgtgggacgaacttgcttcctacgatcttcctgcagtgctgcagtttgcctatgatcacacaggcgagaaaatccactatatcggtcactccctgggaaccttgatgattcttgcagccttctctgagcacaagttactagatgtagtgcgatcagctgttttgctctgcccaatagcttatctgagcaggacgaaatccaaactccttaagcttgctgctcacatcttccttgcagaaatcatggttgattctatttatctctttgtttgtcttgtgcagacagttcactggctaggcttttacgagttcaatcctgttgggccagttgcacatgaagttctaagccaaatatgcggcgatcctgaaattaattgctatgatctattttcggctgtagcagtggtaagaaatggaggtgtcagcaggttcgactacggcaacgccaaggataacatgaagcattacaaccagccacgcccaccgccgtacaacctctcctccattccgaatcatgtccccatcttcctcacccatggtggcgaggactacctcggcgatgtccccgacacaaggcacctcctgaggacgctggtcaagaagcacaacagcgacagcatcgaggtgatctacgtgccagactacgcgcatgccgactttatcatggcctacaatgctccagaactcatatacggaccgatggtcgacttctttaagcgtcactga

SEQ ID NO: 72839 - DNA, 219 bp, Oryza sativa
  Clone ID: PAT_MRT4530_73179C.1
atggttttgaaagtcgtgctcatggcaattaaggaccgcgaggacaagatctacgtcgaggaccggccaccggtgaaaaacaagtcgagcatacagggagtgggatggcaatcacgaagccaatccgaggagttggataagcaattgtgcatccaggagcgtcccatgatggagaacttcttgctcgtcggcagtcagtcagaacgtgttcggcagtag

SEQ ID NO: 72840 - DNA, 877 bp, Oryza sativa
  Clone ID: PAT_MRT4530_7317C.1
ttatttttgaaaaggaaaagaaggattattgcgtcagcgggctagggtttcggtggaccgggcgcacgacggcggttcacgaaaacggacggccgagatcgatcggtccacgaccggctcacgggagagggcgacgacgatgacgtcagcgacgacgtcagcgatgacgtcagctccggcggcggctcgggagcgcaagctcgccggcgaacgacggctcgacgacgcgaacggagggcaccaacgggtagagggcgacgcggcgaactcaccggtgaccaaagaagaagcggcggcggagatcgggtcgacggcggcgacggtgctccggcggtcttcggcggcggcgaagcggcggacgaggacggcgacgacttggcgatcccgacggtggccttcccgagtgacgacgacgaccgtagcgacggcggcgcacggctggacgaacggcggcgacggcggcgcaaaagctcacgaggctagggcgctacacacgacggcgggcgaaggcgagagaggcagcgggggctaggaggcggcgacgaaggcccacggcgaccggagacggcgaaggaaagctagggttcggaggagagaggtcgatccgaatcgaactcgaatccacggatttccaaaccgaattaggcgatgattccaaaagagaaaaggaagaggagatctcaaggatcatttcccctctatcaattcggccggagaaggaaaggatcgacgggccccacctgtcagcggctgagagagagaggagagcggcggctcggcggattgggccggactgggccgagggagagagagagagggttttgggccggctttcggcccaaagccaaaagaagactttttaaaacctttttcaatt

SEQ ID NO: 72841 - DNA, 426 bp, Oryza sativa
  Clone ID: PAT_MRT4530_73180C.1
atggagatcgtgatcgtcgctccgtccattttgctttcgcttctcctcgtccttcactcaaccgccgccgcgcgctctgctgccatggcccctgccgccgccgacgagctcgcgccctccgccttgggccctgccgccgacgagcacatttcggacgtctacattgtcttcgttagccgcgacgactacgtcgattcggtggactacgacgtccgactgctcgcctccgtcatcggaagcgcatcggaagcaaagacggcgatgatctaccactacagcggccttgggttcgcggcgagcctcgcaccagaacaagctgagaggctgtcaaggaaggagggcattgcaatcttcaaggacaggatgtaccatgtcgagaaggaagaagatggtcgcttgcctcgcttctttgaagagaatgtctga

SEQ ID NO: 72842 - DNA, 1347 bp, Oryza sativa
  Clone ID: PAT_MRT4530_73181C.1
attcttgcagctcactgttcgacagagcgaaccgtgcgggctcgtcttgatggatttaagaaccgtcttcgggtcaaggatgacgaaataggccgtaagaacttggagatggaggccctcgccaacaccctgaaagaggcgaaagccgaaaacaagcggctccaatccgagttggagaaaggaagtgaggctacggccgaggtcgatcgcctcaaggccgaactggagaaagggagagaagccatagctgaggttgatcgcctccagaccgaattaaagaaagaaaaggcccattccgccgtgctgacggattattataaccttactgagccgaagatggaggctcttcgcctggaggtcagcaaggccgaagcgagcgctatggaggagtcgcggcggttttcgcgggagatggcgaaaactaccgaatccgcaagaacggcgtgccaaacgctttgccttgcccttactgacatgggtgcaaaagtgccgaggggtccctgccgaagatgcctcggccttcaacttcttcgagtggacccaacagcggcctttactatgggtctcctgcaacagttcagctacgagcacgtcgccgagttccctaactatgcgaagggggattgggagattggcgcacaggacatttcgcccgcacttcgtgcatggcggaagcagttctggcagaaggacggtcgttctaccgccaaggcgcgccttttggagcaactagcgaaggcagaggcggcagacctttgcgaagaagaggacgcggtggctgaagggggtggaggcgatgcccaggatcacctagagggtgttcgccaaaagttgtgcattcggcccccttctgggagttggcgaaaccaaaacgagaaatttgtggcattgaaggggctgccgaagacgcaatgtccatttcggcctacttatcgtgaaatggtgataaatggccgcagctataaggtttttaaggttgccgggtggcttcgggcgcaccctgggcgaaccttagaagactacgatcttgttcatccaagacgtttggaggatatggctcgcttttggcgaaaccatcagaagactgatcggcaggagccgatctcccagcgtcgttacagtctagtccgtgtttcgcccccttctcctcttaagattgtgtatgatattagtagtgatgatgaacctagttcgcccgatcattccttagagagagacagagatcgtgggggcgaagatgtaatttatctgtaagctgggctgtaacgccattgctcctttctcttcacttgtaccattgtgatgggtttgtattcttcgatacatttttatttaaaatcctcgtgc

SEQ ID NO: 72843 - DNA, 1914 bp, Oryza sativa
  Clone ID: PAT_MRT4530_73182C.1
atgtcgaagtggggccgccattggatggcgaggtggttttaccacactatccccttcgaggctggttctgactccgcaaaagcccttcggtgccggtgtagggcgattgagccgaaccgaaagcccaagatcgccgtggacggcgctatggaggcgcggttcgctctactgcgtaaggctgacgccgaagcccgtaggatgatcggcgacgtgtcggtcgtcgagtatagccagctgctaacgcgacaagcggctggccgggcgaaccgggtttacaacggtgaattgcctccccgggcgaacccccacaaggccgacgacgatgcaggaccttcacgaaagcgaacgcgcggacaagtaaagcttgcgcccaggaagcgaagggttcctgtttcgttcgattccgacgctaacgacgaggacgacgttgaagagcgtgacggcgaggaggaaggggaggaagaggaggaggttgaggtcgtggtcgaaaaggccgcggacgaggcggtcgaaaaccgcgtcgacacccctggctatactcctactccaagcccgggtcacaatgagaccggggtggagtcgaatagctccccccttcatcgaaaggagttggatggggcgaaggcgctaattgcgttttcgacaggcaaggcggcgaagggaggtccggtcaaaaatatttccaagaagaaaggactcgtcgatgtcgctcgcgtcttcagcgacgacgagtcttctgacgagactccgacttcgcccgctgcccgcagcctagacctttcgaccgtccccgttctttcacttggcgctgatggagtaggcggtagcgccgccgccggggcttcagcctccacggaacggatcgtgacagctgcggcgagggtcttcggtagccctctgcgtcagccggttgtttcgccgctagtcaaggcgaaggggaagggtgcggccgtcgaaatatctgcttcggagtattcccttgcggcgccccatttcgcccctagcgatttcgagacccgggtagaccttattccctttgtcgagggaattcttgcagctcactgttcgacagagcgaaccgtgcaggcttgtcttgacggatttaagaaccgtcttcgggccatggatgacgaaataggccgcaagaacttggagatggaggccctcaccaacaccctgaaagaggcgaaagccgaaaacaagcggctccaattcgagttggagaaaggaagagaggctagggccgaggtcgatcgcctcaaggccgaactggagaaagggagagaagccatagctgaggttgatcgcctccaggccgaattaaggaaagaaaaggcccattccgccgtgctgacggattattataaccttactgagccgaagatggaggctcttcgcctggaggtcagcaaggccgaagcgagcgctgtggagtcgcagcggttttcgcgggagatggtgaaaactaccgaatccgcaagaacggcgtgccaaacgcttcgcctcgcccttactgacatgggtgcaaaagtgcgaggggtccctaccgaagatgcctcggccttcgacttctccgagtggacccagcaggctggtggttcggtttcggactgcgccactacgtacggtgattgctgtgcgcgtgtatcagcggcctttactatgggtcttctgcaacagttcggctgcgagcacgtcgccgagttccctaactatgtgaagggggactgggagattagcgcgcaggacatttcgcctgcacttcgtgcgtggcggaaacaattctggcagaaggacggccggtccaccaccaaggcgcgccttttggagcaactagcgaaggcagagacggcagacctttgcgaagaagaggacgcggcggctgaagggggtggaggcgatgcccaggtgtga

SEQ ID NO: 72844 - DNA, 230 bp, Oryza sativa
  Clone ID: PAT_MRT4530_73183C.1
gccgcgccagaatctgctggacgaacgcgtccgcgcatctttcaatctcctaatatccacgccaatatttctatgaagacggacgagcaggggctaaacccaacgaccagcatcgggaaacggccacggaccgcgcagatctaagcggggtaggtcgccttggcgtcagacacaccgacgcgacagatggggctgaccttggtttaccttagccggacccgggggggggg

SEQ ID NO: 72845 - DNA, 133 bp, Oryza sativa
  Clone ID: PAT_MRT4530_73184C.1
cccacgcttacgctgacgcgtgggcggtcggccattattagtgatcctatacaatcattgacttgcaggtgattaagatggttgatgacttctccttcaccgttggagtttcggcgtgcactctgaccaactt

SEQ ID NO: 72846 - DNA, 2661 bp, Oryza sativa
  Clone ID: PAT_MRT4530_73185C.1
atgaagacagtgttcgggagcgtaaactttaatgttcaccccgagtggtccgatctctggccggtgaacgccgctatgtcgaagtgggatcgccattggatgttgaggtggttttaccacaccatccccttcgaggctagttctgactccgcaaaagcccttcggagctggcgtagggcgattgcgccaaaccgaaagcccaagatcgccgtggacggcgctatggaggcgcggttcactctactgcgtaagcaaatcgcagttgagcaaggcgaagaggttgatgggttgccgaagttggttctccctgaagggacgaacggcatggcggcgaagggaggttcggtcaaaaggatttccaagaaaaaaggacttgtcgatgtcgctcgcgtcttcagcgacgacgagtcttctgacgagactccgacttcgcctgctggccgcagcctagacttttcgaccgcccccgttctttcacttggcgccgatggagcaggcggtagcgccgccgccggggcttcagcctccgcggaacggatcgtgacagctgcggcgagggtcttcggcagccctatgcgtcagcgggttatttcgccgctagtcaaggcgaaggggaagggggcggccatcgagacatctgtttcggagtattctcttgcggcgccccgtttcgcccctggcgattttgagacccgagcagaccttattccctttgtggagggaattcttgcagctcactgttcgacagagcgaaccgtgcgggctcgtcttgatggatttaagaaccgtcttcgggtcaaggatgacgaaataggccgtaagaacttggagatggaggccctcgccaacaccctgaaagaggcgaaagccgaaaacaagcggctccaatccgagttggagaaaggaagtgaggctacggccgaggtcgatcgcctcaaggccgaactggagaaagggagagaagccatagctgaggttgatcgcctccagaccgaattaaagaaagaaaaggcccattccgccgtgctgacggattattataaccttactgagccgaagatggaggctcttcgcctggaggtcagcaaggccgaagcgagcgctatgaagaagtcgcggcggttttcgcgggagatggcgaaaactaccgaatccgcaagaacggcgtgccaaacgcttcgcctcgcccttactgacatgggtgcaaaagtgcgaggggtccctgccgaagatgcctcggccttcaacttcttcgagtggacccaacaggttagtggttcggtttcggactgcgccactacgtacggcgattgctgtgcgcgtgtatcagcggcctttactatgggtctcctgcaacagttcagctacgagcacgtcgccgagttccctaactatgcgaagggggattgggagattggcgcacaggacatttcgcccgcacttcgtgcatggcggaagcagttctggcagaaggacggtcgttctaccgccaaggcgcgccttttggagcaactagcgaaggcagaggcggcagacctttgcgaagaagaggacgcggtggctgaagggggtggaggcgatgcccaggatcacctagagggtgttcgccaaaagttgtgcattcggcccccttctgggagttggcgaaaccaaaacgagaaatttgtggcattaaaggatttgccaaagttggcgatttgggtgccacccgttctaaacatagaaacgcttgagagaggcagcgttccaggaatggtcgaactcttcgccttccagtgtcgccagtcgaaaggatcccgtcctggatttgtgcttgatgaggatcctttgggtaatggcggtggaggtgaatcttggactatttcggtttttgtcctggatggagattttgttgatattccacctgaagaggatttacctactgctgggccgcagccagggcctaatgatgatgatgctaatgacccagatgatggaaatatttggcagttaggacaccctggtaatcaggggggtggtgattgggataactttgtgcagcaacacttttcctggctaggctcaaaggagatagctgacagggaagggccaaagcatccatccttttatcctatggaaggtctattggaaaagattgatcatttgtgcaaagctagaaatcatgcatacaactttgaattctggcccttcagctctgccctatggaagccctttcatgaacttgatcatgcccctcctgtagttaaaagagcacattccagctgggccctattgccttcctctcctgatgatggacttactcatcaagagattttagatgccatgactttgcaagcccagtcatcaagtccagaagtcacccctgcagtgattctgattcctaaggctcatgtgaagaaaagggatgagaagactactttatacaaccctaccagaaggcacaattccaggattcttaatgccagccaagagcttaagattgatcatcgaatgggaattggcaaaccaagggggatatctgctaaaaagttgaacgagttggtaggtatatcgaaaattcttattcctggcagcaagattaatgaatctgatttctctgctctggatgatgatataaatttagattcatccccttctgattgttctttgtctttattgtaa

SEQ ID NO: 72847 - DNA, 1953 bp, Oryza sativa
  Clone ID: PAT_MRT4530_73186C.1
atggacagcggccgttcttgcggtgccaccaaaagagaaaacattcctaagctcctcgcgcatctacccatggttaactcaaggtcagaggttgtcggaaacaatcgtgacagtggtgtgagcggcggtggttcatggggtgaaagtgcatgtgtgcatggaagtcgattccgaacgaaaaggatgcatgcatgtggtcttctagccttcaggatgcttaccgtgggtcgagttaaggttgtcgaggtcttggcggcagcgatgacttgtggaacggctcggcgacggcgctcctccttgggtgaacgacgacggctcaaatgggacgatgagctgctacaagcaagcatgcacgagggttgtgaggtcaaggagatggtgtatgcgcgaggaatcgaacaatggctcaccgaggcagcagtaatcgatgatgacggcggaggcgattctagatcggtgccgagatggaaacgcgaaaaagatagaggtgaccttgactcaaacggagatggcgatggtcgtcacctccatggcccgggtcacaatgagaccggggtggaatcaaacagctccccccttcgtcgaaaggagttggatggggcgaaggcgctaattgcgttttcggcaggcaaggcggcgaagggaggtccggtcaaaaagatatccaagaagaaaggactcgtcgatgtcgctcgcgtcttcagcgacgacgagtcttctgacgagactctgacttcacccgctggccgcagcctggacctttcgactgcccccgttcttttacttggtgctgatggagcaggaggtagcgccgccgccggggcttcagcctccgcggaacgggtcctgacagctggggcgagggtcttcggtagccctctgcgtcagccggttgtttcgccgctagtcaaggcgaaggggaagggtgcggccgtcgaaacatctgcttcggagtattcccttgtggcgcctcatttcgcccatggcgatttcgagacccgggcagaccttattccctttgtggagggacttgacggttcggaaccgtcttcgggccaagatgacgaaataggccgcaagaacttggagatggaggccctcgccaacaccctgaaagaggcgaaagccgaaaacaagcggctccaatccaagttggagaaagaaagagaggctagggccgaggtcgatcgcctcaaggctgatctggagaaagcgagagaagccatagctgaggttgatcgcctccaggccgaattaaggaaagaaaaggcccattccgccgtgctgatggattattataaccttactgagccgaagatggaggctcttcacctagaggtcagcaaggccgaagcgagcgccgcggaggagtcgcagcggttttcgcgggagatggcgaaaactaccgaatctgcaagaacggcgtgccaaacgcttcgcctcacccttactgacatgggtgcaaaagtgcgaggggtccctgccgaagatgcctcggccttcgacttctccgagtggacccagaaagctggtggttcggtttcggactgcccaactgcgtacggcgattgttgtgcgcgtgtatcagcggcctttactatgggtctcctgcaacagttcggctgcgagcacgtcgccgagttccctaactatgcgaagggggactgggagattagcgcgcaggacatttcgcccgcacttcgtgcgtggcggaaacagttctggcagaaggacggccggtccaccgccaaggagcgccttttggagcaactagcgaaggcagaggcggcagacctttgcgaagaagaggacgcgacggctgaagggggtcgaggcgatgcccaggattacccacagggtgttcgccgaaagttgtgcattcggcccccttctgggagttggcgaaaccaaaacaagaaatttgtggcattaaaggatttgccaaaggtgtga

SEQ ID NO: 72848 - DNA, 619 bp, Oryza sativa
  Clone ID: PAT_MRT4530_73187C.1
ggttcctgtttcgtccgattccgacgccgacgacgaggacgacgtcgaagaggaaggggaggaagaggaggaggttgaggtcgaaaaggccgtggatgaggcggtcgaaaaccgcgtcgacacccctggctatactcctactccaagcccgggcatggcggcgaagggaggttcggtcaaaaggatttccaagaaaaaaggacttgtcgatgtcgctcgcgtcttcagcgacgacgagtcttctgacgagactccgacttcgcctgctggccgcagcctagacttttcgaccgcccccgttctttcacttggcgccgatggagcaggcggtagcgccgccgccggggcttcagcctccgcggaacggatcgtgacagctgcggcgagggtcttcggcagccctatgcgtcagcgggttatttcgccgctagtcaaggcgaaggggaagggggcggccatcgagacatctgtttcggagtattctcttgcggcgccccgtttcgcccctggcgattttgagacccgagcagaccttattccctttgtggagggagtaagtaatcttgtcttacctgccagcaccccgagcttgttcaccgaactgaatgagttcgatgag

SEQ ID NO: 72849 - DNA, 138 bp, Oryza sativa
  unsure (1)..(138): unsure at all n locations
  Clone ID: PAT_MRT4530_73188C.1
aagctcganggcgacgtccgcttggngtcncnanacggcaccgtttccntggtggcgccgcgggncccgncgacgagcgcacgttccgcgccgagtcgtggcacatcaagccgtacccncgcaaggncgacccgaacg

SEQ ID NO: 72850 - DNA, 2931 bp, Oryza sativa
  Clone ID: PAT_MRT4530_73189C.1
atggctccccgcaagcctgacccctcttcggtgaaagggcccgaccccgaccggattgtcgacgacaccaccgcctatttagggatttctctcatagacgacggcgagctggcaaagttggtcagctctggggcgttagtcgagggacaggctttcgccccggggaaagccgttgtaccgaagcccgttgataaccggacagtgagtgttcgccgtattttttgagacggggctccggtttccgtgcaacgcgttgttgccggagattcttcgccttttccaggtggagctcccgcagttgagcccatcggcgctggtccggatcgctatcttcaactgggcgtgccggacatccgggtttgagccaagcgccgaactcttcggcgccatattcttctccaccgtgaattcgaagacggctggttctgactccacaaaagcccttcggtgccggcgcagggcgattgcgccgaaccgaaagcccaagatcgccgtggacagcgctatggaggcgtggttcgctctactgcgtaagttctgctcccgccttagttgccgcgacttggtggaggaattctgcatgcttcgcatctttcccctctcctagtcgtgccaagtcgcagttgagcaaggcgaagaggttgatggtttgccgaagttggttctccctgatgggacgaacgtgttgaccctcgaccaggctgacaccgaagcccgtaggatgatcggcgacgtgtcggtcgtcaagtatagccagctgctaacgcgacaagcggttggccgggcgaaccgggtttacaacggcgaattgcctccccgggcgaacccccacaaggccgacgacgatgcaggaccttcgcgaaagcgaacgcgcgaacaagtaaagcttgcgccttggaagcgaagggttcctgtttcgtccgattccgacgccgacgacgaggacaacgtcgaagatcgtgacggcgaggagaaaggggaggaagaggaggaggttgaggtcttggtcgaaaaggccgcggacgagacggtcgaaaaccacgtcgacacccctggctatactcctactccaagcctgggtcacaatgagactggggtggagtcgaacagctccccccttcgtcgaaaggagttggttggggcgaaggtgctaattgcgttttcggcaggcaaggcagcgaagggaggtccggtcaaaaagatttccaagaagaaaggactcgtcgatgtcgctcgcgtcttcagcgacgacgagtcttttgacgagactccgacttctcccactggctgcagcctggacctttcgactgcccccgttctttcacttggcgttgatggagcaggtggtagcgccgccgccggggcttcagcctccgcggaacggattgtgacagctgtggtgagggtcttcggtagccctctgcgtcagccggttgtttcgccgctagtcaaggcgaaggggaagggtgcagccgtcgaaacatctacttcggagtattcccttgcggcgccccatttcgcccctggcgatttcgagacccgggcagaccttattccctttgtggagggagtaagcaatcttgtcttacctgctagcaccccgagcctattcaccgaactgaatgagttcgatgaggggtgttctgctattaaaagcttggcggttcggattcttgcagctcactgttcgacagagcgaaccatgcgggctcgtcttgacagatttaagaaccgtcttcgggccaaggatgacgaaataggccgcaagaacttggagatggaggccctcgccaacaccctgaaagaggcgaaagccgaaaacaagcggctccaatccgagttggagaaaggaagagaggttatggccgaggtcgatcgcctcaaggccgaactggagaaagaaaaggctcattccgccgtgctgatggattattataaccttactgagccgaagatggaggctcttcgcctggaggtcagcaaggccgaagcgagcgctgtggaggagtcgcagcagttttcgcgggagatggcgaaaactaccgaatctgcaagaacggcgtgccaaacgcttcgcctcgcccttactgacatgggtgcaaaagtgcgaggggtctctgctgaagatgcctcggccttcgacttcttcgagtggacccagcaggctggtggttcggtttcggactgcgccactgcatacggcgattgctatgcacgtgtatcagcggcctttactatgggtctcctgcaacagttcggctgtgagcacgtcgccgagttccctaactatgtgaaggaagggggactgggagattagcgcgcaggacatttcgcccgcacatcgtgcatggcggaaacagttctggtagaaggacagccggtccaccgccaaggcacgccttttggagcaactagcgaaggcagaggcggcagacttttgcgaagaagaggacgcggcggctgaagggggtggaggtgatgcccaggatcacccagagggtgttcgccgaaagttgtgtattcggcccccttctgggagtttgcgaaaccaaaacgagaaatttgtggcattaaaggatttgccaaaggtgcgatgcccatttcggcctgtttatcatgaaatggtgataaacggacgcagctataaggtttttaaggttgccgggtggcttcgggcacaccctgggtgaaccttagaagactatgatcttgttcattcaagacatttggaggacatggctcgcttttggcaaaatcatcagaagactgatcggcaggaggtgatctcccagcgttgttacagtctagtctgtatttcgtccccttctcctcttagggttgtgtatgatattagtagtgatgacgaacctagttcgcccgatcactccttagagagagagagatagcgggggctaagatgtaatttatctg

SEQ ID NO: 72851 - DNA, 460 bp, Oryza sativa
  unsure (1)..(460): unsure at all n locations
  Clone ID: PAT_MRT4530_7318C.1
atgatgggcaatcgacgaccgatccgtccccctcctctctcgatcctgatcttggaatcgggagcccatcccacccccaaattaatttgacctacagctcacgccttagctagctcccccagcttcccggatgcttccttcgatctcctctagctttctcgctcgcctctnctctcctgtnctgctgtncttggtgtggagacacggctaggcgtccatggcgacgagctgggagtnatttcccctgcttgatttgattggatttcagaggcgccanctcttttcctaataaagatcacgcgagantattcagaagcttgcaatggatcgcgaccagatgacgaacacgatgcgcgatcaggctgcgaacctgacctccatgaatctcttttctaaccggtcatgggggaataangccttctcggaatggngccgccgccgcggaanaagtgctgccgtt

SEQ ID NO: 72852 - DNA, 202 bp, Oryza sativa
  Clone ID: PAT_MRT4530_73190C.1
ctactgcgcactgggccgtgtactcatccacactagtgtgacaaagtatctgaatttcaaggctgacaacgacatgcttgtgtacaacaatggctagatccccaaagtctccagcaaccgatgtactgtactctcctcccagcggtggccccgccacaagaagcggtcctagtcccccgcctgcgttctgccactctccggc

SEQ ID NO: 72853 - DNA, 2920 bp, Oryza sativa
  Clone ID: PAT_MRT4530_73191C.1
atggctccccgcaagcctaacccctcttcggcgaaggggcccgaccccggccggattgacgatgacaccaccgcctatttaggaatttctctcataaacgatagtgagctggcaaagttggtcagctctagggcgttagtcgagggacaggctttcgccccggggaaagccgttgtaccgaagcccgtcgacaaccggacagtggtcttcgccgtgttttttgaggcggggctccggtttccgtgcaactcgttgccggagattcttcgccttttccagccaagcgacgaactcttcggcgccatattcttcgccaccgtgaattcgaagacggtgattaccccagttggaacgaagaagacagtgttcgggagcgtaaactttaatgttcgccccgagcggtccgatctctagccggtgaacgccgccatgtcgaagtgggaccgccattggatggcgaggtggttttaccacaccatccccttcgaggctggttctgattccgcacaagcccttcggtgccggcgcagggcgattgcgccgaaccgaaagcccaagatcgccgtggacggcgctatttgtttatgatctttactactatggttcatattttataaactagatatgctctaatctagactagcaatatattatattaacctagaaattgttatatgagctaagttcttctaagttttagtggatgaggatggaactatggcttcactggtcaatcaatcgattccgaacgaaaaggatgcatgcatgtggtcttctagccttcaggatgcttaccgtgggtcgagttaaggttgtcgaggtcttggcggcagcgatgacttgtggaacggctcggcgacggcgctcctccttgggtgaacgacgacggctcaaatgggacgatgagctgctacaagcaagcatgcacgagggttgtgaggtcaaggagatggtgtatgcgcgaggaatcgaacaatggctcaccgaggcagcagtaatcgatgatgacggcggaggcgattctagatcggtgccggtgaagaaaagttgcgttctccaagtccttcaccgggtcacaatgagaccggggtggaatcaaacagctccccccttcgtcgaaaggagttggatggggcgaaggcgctaattgcgttttcggcaggcaaggcggcgaagggaggtccggtcaaaaagatatccaagaagaaaggactcgtcgatgtcgctcgcgtcttcagcgacgacgagtcttctgacgagactctgacttcacccgctggccgcagcctggacctttcgactgcccccgttcttttacttggtgctgatggagcaggaggtagcgccgccgccggggcttcagcctccgcggaacgggtcctgacagctggggcgagggtcttcggtagccctctgcgtcagccggttgtttcgccgctagtcaaggcgaaggggaagggtgcggccgtcgaaacatctgcttcggagtattcccttgtggcgcctcatttcgcccatggcgatttcgagacccgggcagaccttattccctttgtggagggagtaagcaatcttgtcttacatgccagcaccccgagcctgttcaccgaactgaatgagttcgatgaggggtgttctgctattaaaagcttgacggttcggattcttgcagctcactgttcgacagagcgaaccgtgcgggctcgtcttgacgggtttaagaaccgtcttcgggccaaggatgacgaaataggccgcaagaacttggagatggaggccctcgccaacaccctgaaagaggctaggcccgaggtcgatcgcctcaaggctgatctggagaaagcgagagaagccatagctgaggttgatcgcctccaggccgaattaaggaaagaaaaggcccattccgccgtgctgatggattattataaccttactgagccgaagatggaggctcttcacctagaggtcagcaaggccgaagcgagcgccgcggaggagtcgcagcggttttcgcgggagatggcgaaaactaccgaatctgcaagaacggcgtgccaaacgcttcgcctcacccttactgacatgggtgcaaaagtgcgaggggtccctgccgaagatgcctcggccttcgacttctccgagtggacccagaaagctggtggttcggtttcggactgcccaactgcgtacggcgattgttgtgcgcgtgtatcagcggcctttactatgggtctcctgcaacagttcggctgcgagcacgtcgccgagttccctaactatgcgaagggggactgggagattagcgcgcaggacatttcgcccgcacttcgtgcgtggcggaaacagttctggcagaaggacggccggtccaccgccaaggagcgccttttggagcaactagcgaaggcagaggcggcagacctttgcgaagaagaggacgcgacggctgaagggggtcgaggcgatgcccaggattacccacagggtgttcgccgaaagttgtgcattcggcccccttctgggagttggcgaaaccaaaacaagaaatttgtggcattaaaggatttgccaaaggtgtgatgcccatttcggcctgtttatcgtgaaatggtgataaacggacgcagctataaggtttttaaggttgccgggtggcttcgggcgcaccctgggcgaaccttagaagactacgatcttgttcattcaagacgtttggaggacatggctcgcttttggcgaaaccatcagaagactgatcggcaggaggcgatctctcaacgtcgttacagtctagtctgtatttcacccccttctcctcttagggttgtgtatgatattagtagtgatgacgaacctagttcgttcgatcactccttagagagagagagatcgtgagggcgaagatgtaatttatctg

SEQ ID NO: 72854 - DNA, 477 bp, Oryza sativa
  unsure (1)..(477): unsure at all n locations
  Clone ID: PAT_MRT4530_73192C.1
tgtttgggatgttnaacgccaaatatgttnnnccnccctgattnaattgntttggggggacaggtatcgcaagctncgatcantgctcaaagtatctgccntcggaaganngggggngnacgaggggtgacaacatagcttcngaanaactatctgcgtttctttcctgggannaactcgaacatagcacanttccaaagctcnactgaagaatattgaggaactgctgnannncaagaacgnttaaatnntcccaagangatgaagaacaaactcnccatntgtcctcaangaanctgaagatannacancgatggtcgttgcctcncnctntaggattcctnaaagctacgngnnggggggagttccgtgccccnggcctgnnggggggaaaccctccnggtgnttgggggctnaatanttttcgattcccagcnaccctttttttattttcatcnggggtgccccggccncttc

SEQ ID NO: 72855 - DNA, 194 bp, Oryza sativa
  Clone ID: PAT_MRT4530_73193C.1
aggccatgccaacttgctgcctgcagtcgactctaaagatccccgggacggcgccagcgatcggctgtaggcagaagttggggggaggagggcgcggaagggtgcgccagcctagctggcgccgtgttatgcggggtggcgccaaggtggctagcgcccccctcttcctagtcagcacggtcacgacaccctag

SEQ ID NO: 72856 - DNA, 1269 bp, Oryza sativa
  Clone ID: PAT_MRT4530_73194C.1
ctaaccttttgtctgctcgttcctggggcacatccaccaccggtcgtgccagtaccctgcaggagtatctactaatgcgttgtagaatctatgccggcggcagcgcagcgctgcctctgctgctcctccaaccggcgggggcgagcgggagatggcgccagccggggcgcggcggactccccgacggagccgaccggcgggggcgagcgggagacggcgccagccggaacggcggcgcggcggactcttcgacgaagccgagtagaccggcggcggcgcggcgctacctctgctgctcctccgaccggcgggggtgagcgggagacggcgccagcaggggcgtggcggactcctcgacggagccgagcggaccagcggcggcgcggcgctgcctcggcgctccccttcccgtccctctccggggcccctcatctcccagccgacgatgagcatcgagggctcggagggccggcggcggcgcaggagctcggtcggcacggcatcctcccgagcggcgagcggcatccggcctccgcgccgcccccttcctccttcagccttcgtgcgctcaaggaaatcggcgcgaccttggtaggcggcaggatccggcgaggagtggctgcgcgtcggcaggcgtcggcgtcggtcagcaccatcctccctcgtcgcggagagctcggcgacgtgcctcccagtggccaccctgaggcgcgcggagagcagctgcacgaggaggcccatggccatggtccagaggaggagccagagcagcgcatcgcgagcggccgcgccggcctggaggtcgcccttgaggttgcccgtgtccagaaacgcgatgctcatcaggaccccgggccccgtgaacagccacagcctgcgccacaagaagggcggcacacggccaccgccggagaaggggtggtcgtcgtcgaagtgggagtcatcattgccggtgagccgtgcagatcgactccggagtccggactcccccataggttcgtagcgcaggccaatgagacgctcgtgagatgtcgggtgagacgtcgccgtagagagtgcgctgtcaactagcgcgcgcaccccggcgcctatgccgcgcgcgcgcgctaagatgtggggaagtaaagggaggaaggcagcgcagccgcggaggaaccagcacgcagccgcgatcgggacaggccgcgccacgcgacggggtcgcggggtcgccctcgtagggggaagcgacacgtacgtcgacggtagcgacgggttcctcacttccat

SEQ ID NO: 72857 - DNA, 1196 bp, Oryza sativa
  unsure (1)..(1196): unsure at all n locations
  Clone ID: PAT_MRT4530_73195C.1
ctactgccttttaacttttccatcggaggaagcgaggagggtggcgtcgagcgtctcccggcgactggcggggccgagcgagacacggcgccagccggagcggcggcgcggcggactcctcaacggagccgagcggaccggcggcagcgcagcgctgcctctgctgctcctccaaccggcgggggcgagcgggagacggcgccagccggggcgcggcggactccccgacggagccgaccggcgggggcgagcgggagacggcgccagctggaatggcggcgcggcggactcttcgacggagccgagcggaccggcggcggcgcggcgctgcctctgctgctcctctaaccggcgggggcgagcgggaaacggcgctagcaggggcgcggcggactcctcgacggagccgagcggaccagcggcggcgcggcgctgcctctgctgctccttggtaggcggcaggatccggcgaggagtggctgcgcgtcggcaggcgtcggcgtcggtcagcaccatcctcccctgccgctcggctgcctcgcccctcttccctctcccctctcccctctctcatctagcggcagtgtgggtcccatctgtggacccgctgagacgaagaacgcgtancaaagttggctacgcggagatgaggcgcgcgcgtggctagctaacgtgggcaaaagaatattcgcttttttggttgaggctgaataccacctagacccattgtgaatggcctaagaccgatggaggcaacattgctaccgaaggatggaagtggcttgtgttatcatctccttagagcatctccaagagactctttattcagctctctaagttaaaatttagccaatataaagaaaaaaaaagctctaacagactcttcatcctccggctggccaaatgtagccagtggattcatccagagggccaaattgctcctccggctggccaaatgtagccagtctctccactggctaaaggtgggtcccactaccactcttagccccatccttcctctctctctcccgtccgtgagccangaagncgcagcgcgcccagtccgggtactcgtcgcggagagctcggcgacgtgcctcccagtggccaccctgaggcgcgcggagagcagctgcacgaggaggcccatggccatggtccagaggaggagccagagcagcgcatcgcgagcggcc

SEQ ID NO: 72858 - DNA, 1898 bp, Oryza sativa
  Clone ID: PAT_MRT4530_73196C.1
atacaacaaaatatgtatgatatataaatcttttcctgtacatatatgatatatatacacaatctgaagatacagtaaaaggtatacatgcatatacacacacgcggtcgttgtctgcactaattaaaaatcagtagtgcatgaccgctaaactatttcaactccctagctaattaactaataattcactgctgttaattctttttactgttgcgttctactagtaaaaaaattaagcaactctgtaatttgatttttcactggctaattaatttgagctaagcttgtcgctgcagctcgttggcgccaatgaaggtgccgtgcaatccgtacggcacgcgccccggcagcttcacggccgcgacctcctccatcgcctcgctgccggcgtccaccaccaccagctccgacgtgccgcgctcctcgtcgtggacgaagcacagcacgtggccgtcgtcctccgccgcggcgccggcgcgcggaacgaagcatggctcgccgccgtacctcccctcgccgtagatgaacttctccgccgtgccgctctcgaggtccaccttggcgaagcccgacaccctcggccatggctcggcgatggcgaggtaggcgtaccgcgtcttccggccgagcagctgccggttcaccatgccggcctcgaggttcacctgctcggcggcgtcgcgcagcacgtcgcgccgccgcgacacgccggtgcgcgggtcgaggcggatctcggagagcacgctgcggaagctctcctcctccggcgactgcgacggctcgttgaacacggcgtccggcggcgtcatgcaggagccgatgaccacgatctcgccggtggcgtcgtcctcccacgcgttccagaggtggaagcagaagcagccggggacctccacccaccggagctccgacgcgtcggcggcgcgcttcgggagcacgccgaaccgcgacgccttctccctgtcgtataccaccggcgagccgccgcgcaccatctcctggagcttgaacacgatctgctggtcggggacgacggcatagttctcggtgacggcgaagtcgtggatcatcgtcggcgcgccgacggggatgtcgacgtctcgggacttgcggccgtcggcggtgaagtagaagtacttgaggtacggcttggacacgacattgtagctgagcgcgaagagctcgccggtgaccgggtcgagcttggggtgcgcgatcatggtgccgtcggcgtcgagctgcccatggaagtcgtacctcccgacggtctcgaggtcgccgtcgtgggtgacacggacgtggtaggggaggtcgtcctcggacatggcgaggaggcggccgtcgtggtagacgaggccggcgttggcgacgccgatgccccgggacgcgtcgagcacgccgcagagcgcgcgcgagccgaacagcagaagccgcgcgacgccggagtggccgtggagctcgccgatggccttggggaacacggggcgtcccatctcccgctcctgccgcagccgcgccgtctccgtgaaccggcacgcgtacgactcggcgcgccccccggcgagccgcacggcgtgcagcatcccgtcgccgtcgaacaggtggtgcccggcgcgcggcgcgtggagcgggttggcgccgttgcggacgtacaccccgtcgaggcacgccgggaggcggccggacaccggcagccccctcaccggcgggcgctccccgacgggcgcgtagttcccggcgatctgcacggccggatcagcggtgcgcggcagcgcgtgcccccgctcgagcaacccggcgacgaggccttcctccacggcgtcaatcgccgccgccgccagccgctggagcgggttcatccgccgccgcggctccaccggcggcgccgagacacgcat

SEQ ID NO: 72859 - DNA, 283 bp, Oryza sativa
  unsure (1)..(283): unsure at all n locations
  Clone ID: PAT_MRT4530_73197C.1
ccgcatcttcgccgcccaccccgcctcccaccgatgacaagtngctcgttgcccggctaatctccgccgcactctcagtcctcccccgcgatgtgtgatcgctgcgtatttacttgtcagatctttgccccatggcgtctaggcttgcacgcgatttgttcgtcgaaatgccgcacaggctgtgagcctgtaccgaaccgtgaactcgctgtttgaggcagaaacgcatttttgttgttggactgataagacgtcctataattctgagaaaaaaaaaaaaaaa

SEQ ID NO: 72860 - DNA, 515 bp, Oryza sativa
  Clone ID: PAT_MRT4530_73198C.1
gacgtcgcacgcctgcgtacgctgcatgctccgatgcggccgccctcccttttttttttttttttttttttttttttttttttggtgttttttttttttttttggggggtctttgggggaaaggcaagggtcgataaaaattggttcacttggccaaaggcccgataaaaataccctgctccctgacacggggagggccctgccccccccttatttggaccccccaagggcaagggtgccgaaaaaatcaagcaacccaaggtgaactcacgggcccacctggaagcctttcactgggcggggccggggacttttgggaaaaacaggaaccccccccctgccgaagaagacaaattattcccccccccaatgggcgacccgggggcccggaactaaccgcaagggatctgcccccccccggggacattgtgaagagggctgcccccccaagaagtggggctctctcttgccgggggacccctagggggttttgggggcctcttttttttgggggg

SEQ ID NO: 72861 - DNA, 496 bp, Oryza sativa
  Clone ID: PAT_MRT4530_73199C.1
gtgttcctggatgtgatagcctattttggttagaggaatgacactggggttggtatttggcataccttgcatgtctactgcacctatgtatatattggcgagctagccatggaagagtacatgccattggcacagttggtgggcacttcagctgttgaggccgatgggttgctactgaacttgcttaattactttgggaggctacatgctacactctgtcatgctgtgaaggatttcattaaccttggacgtcgggcacgattagctcaggttattcggctaagattcgtccgccgtatccgccttagttcactgcatcatataggtcgtctggttgcttgtcaatgtcacagttcatcacaagtgggaagaatgggatagctttgtaacgcagggaatatctttgttggcatactaaatatgagcagcgccatattcgtcttcaggctgatgccaattgcgtagatgtggacagattaccataacccagtgacat

SEQ ID NO: 72862 - DNA, 804 bp, Oryza sativa
  Clone ID: PAT_MRT4530_7319C.1
atggactccacagcgacccccgtgggcttatctccgccacttctcagtctggtgctccgcaatgaatcatgctatgcaaaaggaaaagaaggattattgcgtcagcggctagggtttgcggtggaccgggtgcacggcaacggttcacgggaacggacggccgagatcgaacctatccaaaacggacggccgggatcaaacggatccaccgcggctcacggagaacgacgacgatgacgtcagcgatgacggcagctatgacgtcagcaccggcggcggctcgggagcgcaagctcgccggcgaacgacggcacgaggacgcaaacggaggacaccaacgggtagagggcgacgcggcgaactcaccggtgaccaaagaagcggcggaggaacaacggacagcgccggcgatgaggaagaagcggcggcggagatcgggtcgacgacggcgacggtgctccggcggtcttcggcggcggcgaaggggcggacgaggacggcgatgacttggcgatcccgacgatggccttcccgagtgacgacgacgaccgtagcgacggcggcgcacggctggacgaacggcggcgacggcggcgcaaaagctcacggggctagggcgctacagacggcggtgggcaaaggcgagggaggtgacgagtagaggagagctcgggggtccttttaaaggggcaaggaggcggcggcgaaggcccatggctgccggcggcgagaaggaaaggtcggggttcggaggaaagaggccgatccgaatcgaactcgaatccacgagtttccaaacctaat

SEQ ID NO: 72863 - DNA, 795 bp, Oryza sativa
  Clone ID: PAT_MRT4530_731C.1
cgaggccggccggggaaaaaaaaacaaaaaacaaaaaccaaggtttttcttcttttttttttatcctttcttgagaatggcttcctcaccgctgctccgatccgccggcggcgtgctccggcggtcgatccatggagcgcgggagcaatccagcctcttcttcttccccaccgccaccgatttggctgggaggagacaatccgtctacaagcaggcggcgttcccctcctcctccttcgcccggccatcgctcgcggtcgcggaccacccgcggcgcctcttcagctcctccggttgcagcgggaggacggagcccgctgagaaacttttatcaatggatgagtttttggagcacagaaggcaattcgggaagaacggggaggaggatacttttagagatgcagaaatttcagaacatgaaaagcgggaggagaagctccttcgtaaaagattgtcatccacggatggcttgaaggccccagtcgagcggaccgtctccgacatgttcgcggcgtccaccttcttcgtgccgggagatggagagttaatgctcttctggtctgaccaatgcatcggtggccgctcggtggccttcttggctccagatctcctcttcaccgtgctccagtgcctctggggttcgcgcacggttgcttctggcttggtaaacaattcctgggtttctgacatccgcgatgccctcactgtcccgcagcgctactggacggccgatctcctctagctatcggtcttattcttgataaactccatgtgtttggttgactccaaaaagaa

SEQ ID NO: 72864 - DNA, 1464 bp, Oryza sativa
  Clone ID: PAT_MRT4530_73200C.1
atgcagctggtccacgaacgtgtggcaccaccacctgctgccgagctagccgggcgccgcggcggcggcggcggcgaaggcatggagatcgtgacggcgagggtaggcgggtgcgggtacgggtacgaggaggagggaggcacgaggcggcagcagcggcggcggcgcaaggtgagcgacgggcacgtggtggcgcagctgctcgattcgccgctcccgacgccgcggcggtcctgctgcgggtcgtcgtcggcggcggggaccccgcgcagcgccgcgcggtgcggtggtggtggctcccccggcgcgccgccgtcgtcgccaccgttgtcgccgcagcggacgcacgtgccgttctcgtgggagagctcccccggcgtgcccaaggacgccgcgtgcggccgaaaggtggtgagggaggtgctgccaccgaggccgccgccggggcggggcggcggcggcggtggctccccggctcatgcgcacgcgagggcatacttcgggaacgccaccgagacgacgagcagcgacgacgacgactcggacgacacgttctccgacgcgctcgacaggatctcggcgtccgaccggttcgcggcgttctcttcccggctgagctccatcgacggcgccgggtcgctgcggttgccgagcttcatcatggaccgcttcctcccggccgccaacgccatcgccaccacctccgccgacaagcgcccgaagaaaactccgcgccgcggcgcccgcagctccaagcaagacgaggaggcgacggcctcggcaagacgccgggcgcagtcgctgcgccgcgcttccggccgcgagcaaccgaagcaacccccgccgcgccaccacgtctccactctccaacgcaaggagagtgagccgccgccgccgccgcgacagagcagggacatcgacgaggagacgcagagcgacgagatgtccccgaggtcgtgcgggttcatgctgttcctcccatggagcgtcaagccggtgctctgcgggttcgcgcgcagccgtacgtcgcgcgccgccgacgcgtccaccaccgcgtcctccccaccacgccgcagcgtcacgctaggcaacgccctggagaaggagaaggagaaggagaaggacaagagcaagctacgcggcggcggcggcgacccgtcgcgctggtccgacgagaagagcggcagcggcagggagtggtcgagcccaggatggggcacggcgatcctcggcacgagcaagcgatactgcgccgacgcgaggaaggctctgagcaggctggctcgttcggcgacggacggccgtggcagcccgagggtaacaggggagaggagggccggcaagccggcggcggcggcctcgccgcggcgctcgacgtccggcgagatcccgccgttgtcgccgccgtccgagtcatggctcagtcacgcgcgcgggagcagcacactgagtaacaaaagatga

SEQ ID NO: 72865 - DNA, 673 bp, Oryza sativa
  Clone ID: PAT_MRT4530_73201C.1
gtttctgacatccgcgatgccctcactgtcccggtaatttcccagctccttcttgtgtaggatgtggtgcttcacatacaagctctcgccaggagtcggggatcatcttgtttggcgttggatgagtgaccagtgctactcggcgcgttcagtataccaggcgttcttttttggtcaacactcatttgtacgtgctgatcttctctagcacacgaagagtcctgctaaatgcaaggtctttctttggtttgcatttcagcagcgctactggacggccgatctcctctagaagcatggcattgatagtcactcggcctaccccttttgcactcagcatcttgagacggcgaaccatatccttctcgactgcgtgttcgctcggtaggtctggctccgtgtggtgtcgcttcctggctagggtacccaccccctcccccgaggtagctggctccaggactggtgatcatcctctagggcctacttgcctgagcatctctgtgtcggcttggactccctggtactcctggtctcttggcaattgtggaaggaacggaactccagggttttcgactttgcgctctcttctgtttcagtggttctggagtccattctctcagagggccatatgtggtctttaactggcgttgctgcttttggagatttcttgggagtt

SEQ ID NO: 72866 - DNA, 215 bp, Oryza sativa
  Clone ID: PAT_MRT4530_73202C.1
gggaaaaaaaatttagcccccaaacaggcaacccggggggggggctttataactaaaggaccctaaaaagggggaaacttttaagggcaaagggttttgccagggaaatcgggctaaagggggtcccaaccatattacatttgggggcacccccaccctttgaaggaaaaacggcataaacccccccggagctttgttgtagcagggccggcccc

SEQ ID NO: 72867 - DNA, 456 bp, Oryza sativa
  unsure (1)..(456): unsure at all n locations
  Clone ID: PAT_MRT4530_73203C.1
tttctgagttttnaaccagtcggctctcagtgcaggtcccaagcaagttcagtgccggatgttaaccatgtctgaatcttgncttttctttcatataagcagtgaagcacagggcttctactgacactaccatgtcatgctgctatttggaactgtgttaggggataggaacaccattaaacaacccgggattcgcgcgctcgtgttaatgtcaatgactaaatgactgtgttccaataattgccatcccnagatactgcacgtacaaggnagaaacacagccggagacatctcagtcagacggccattgcggctgctagctcagtagtacccacagtagtactctatccgttttacgatataagacnttttaatattatctatantcatatatagatatcaataaatctagatatataaccaaatatatatatatgtttatgttaaaaaaaaaaa

SEQ ID NO: 72868 - DNA, 1512 bp, Oryza sativa
  Clone ID: PAT_MRT4530_73204C.1
agatcaaaatttctgtttctttcatgtataacttttttctgtacactataagtctaaccatatactaaggatcagcaaatcctttaaaaggcggatgccaatcacagggtcttaagagtgacagatcttgacgagcatctatgagctaagaatgttcaggagagtaaccctgctctggaccaatctcctgaacagaagtcctgctccagcctcaagatctccgatgcagcactctaacacctgcaactgctcctcattgcaaatcaccgggtttttcttctggaatgccttggagatgagagacaattttggcatcgcaatttgcttcgacaagaggtccattgttgactcgaatagagaggtagtgatctctctagcctcgctcaacagcttgactatcttgcagtcctccttgtctgaggcaaccttcttcacagtcttcttggaatgcttctttgccttcttcaccaagcggatgtatgactggatcttggcttgaacaactgcatcatctccttttctgagagacacttgcagatcttggatgatggccttcaactcggtgaagacctcattcatagcgttgcagagatccagtagctcaagggagcattccatctctccatccaacaacttcctttgctgtgatgagcaaacttggttgctaggcaggcacatgatctcctcaatggagctgtagatgtccccaagcctcctcaaaccatcagagatcatctcgatggtcatggagggtgatgagatgcatgcctctatgctgtgcagctcctcttcaactttggagagaggcctagaaggcaagctaattgatctttggtggaaagccatcaatctcctgaacagaagtcctgctccagcctcaagatctctgatggagcactctaacacctgcaactggtcctcattgcaaatcactgggtttttcttctggaatgccttagaaatgagagacaattttggcgtagcaatttgcttcgacaagaggtgcgttgttgactcaaatagagaggtagtgatctccctagcctcgctcaacagcttgactatcctgcagtcctccttgtctgagacaaccttcgtcagagtcttcttggagtgtttctttgccttcttcaccaagcggatgtatgactggatcttggcttgaagaactgcaccatctccttttctgagagacacttgcagatcttggatgatggccttcaactcggtgaagacctcgttcatagcattgcagagatccagcagctcaagggagcattccatctctccatccaacaacctcctctgctcggatgagcaaacttggttgctaggcaggcacatgatctcctcaatggagctgtagatgtccccaagcctcctgaaaccatcagagattgtctcgatggtcagggagggtgaagagatccatgcctcaatgctgtgcagctcctcttcaactttggagataggcctggaaggcaagctaattgatctttggtggaaagccat

SEQ ID NO: 72869 - DNA, 3498 bp, Oryza sativa
  Clone ID: PAT_MRT4530_73205C.1
atggccgcgctgcgactgccaagagcgccgaccaccgcggcgctcgccgccggcgtcccccaccggttcccggcaccggagggggagcctccgccgccgcgcggccccaacagggcgcacctcaacgcgctgctcacgtcgtacggccgccgcggccgcctccgcgacgcccagctcctgttcgaccaaatgcccagccgcgacgtcatctcctggaccgccctcctcaccgcctacgccgacgggggagacctcgcctccgcgcgcctcgtcttcgacgacatgccccgccgcaacgccccgtcctggaacgcgctgctctccgtctacctccgcgcggcgcgcccgcgggctgcccacgcgctcttctacaagatgccggccaagaacgcggtgtcctacggtgccatcatctcggggctcgccaaggcggagatgctgcatgaggcggagttggtgtatgaggagatgccatggcagtggcgtgacccagtagggtcgaatgcgctgatggctgggtacttgagggtcggggagcttgccatggcactgagggtgttcgagggaatgacggtgagggatgtcatttcctggagcgccatggtcgatggcctctgtaaacatgggagtgtgtcagaggcgaggagggtgtttgacgccatgccagagcggaatgtggtgtcttggacttcgatgattcggggatatgtgaaacgtgggatgtgcagagatggtctcctcctgttcctgaatatgagaagagaaggtgttcaggttaacacaacgacactctcagttgcgctggatgcttgtgctgcggccagtcttgccagagaagggattcagattcacaatttgattatatcaatgggatttgagctggatattttcttgggtgattcaataatcataatgtattctcgttttggttggatggttgatgcaaaaagggcgttcgactgcatgcagcagaaagacatagtatcatggaactcactgatcacaggttacgttcagcatgacatggttgaagaagcacatgtgctgttcaagttgatgcatcagaaggatgctgtttcttggacatcaatggttgttgggtttgctaacaggggttggatgagggaatctgttgaacttttcgagcaaatgccagtaaaagacgaggtcgcttggactgcgatcatttctagttttatcacaaatggggactatctaagtgcagtgcggtggttttgccgcatgtcacaagaaggatgcaaacctaacacaatagctttcagttgtctgctgagtgctttggctagcctggcaatgttgaatcagggaaggcaagctcatgcatattcgatcaacatgggatgggtgtttgactctgccgttcacacttctttggtatcgatgtatgcaaaatgtggaaggttggctgaggcttatcatgttttctcaagcattagcaacccaagccttattgctattaattctatgattacagcatttgtgcaacatggtttcgttgaagatgcgctgaaactatttaccaaaatgcaaaatgctggatacaagcctaatcatgttacatttttaggaattctgactggttgcgcacgtgctggttttgttcaacaaggttacaactactttgaatcaatgagaccagtttatggtgtagagccaaaccctgagcactacacatgtatggttgatcttttaggtcgtgcaggcctccttgctgaagcactggaaatgattaactcaatgccccagaatgatcattctgatgcatgggcagctttgctcagtgctagtagtctccattctaatctcgcttttgcaaaaatagcagcacagaagcttcttgagaaggatccttacgatgcaacggcttacacagtcctgtcaaggatgttctcctcagcagggatggaggatgaagaaatgctaaaagttgtacaatggatctttgttgtagtgtcctggaaaaagctcaattgcatgaggcgaaggcttccacctggacctccaaggtggccaatctttggtaaccttctccagttgagccctcttccccacaaagacttcgctcgattctgcaccaagtatggccccctggtctatcttcgtcttggaaccatcgatgccatcaccactgatgaccctgaagtcatccgtgagatactcatccggcaagatgaggtatttgcttcacggcctcggaccttggccgctgttcaccttgcctatgggtgcggtgatgtggcccttgctccgctggggccgaactggaagaggatgaggagggtttgcatggagcacttgctgacaaccaagcggcttgaatcttttgctgctcaccgagcactggaggctgagcacctctgtcagtttgtgtgggctaaagcccagtcagggaaacctgtgaatctcagagaggttcttggggccttctcgatgaacaacgtgacaaggatgttgctagggaaacagtactttggtctgcagtcagcaggccctggtgaagcaatggagttcatgcacatcacccatgaactgttctggctgctgggcctgatctatcttggggactacttgccagcctggaggtggcttgatccatatgggtgtgagaagaagatgagggaggttgagaagaaggtggacgacttccaccagaagattattgatgagcacaggaaggctagggaggccaagaagagtgcatcccttgatgatgataacaaagaagacatggactttgttgatgtactgctttctttgcccggcgagaacggaaaagagcacatggacgacgtcgagatcaaagctttgatgcaggacatgattgctgctgccaccgacacatcatcggtgaccaacgagtgggtgatggcggaggtgatcaagaacccccgggtgctccgcaagatccaggaggagctcgacggcgtcgtcggccgcggccgcatggtggcggagtcggacctcggccagctgacctacctccggtgcgtcgtccgcgagtccttccggatgcacccggcggggccattcctgatcccccacgagtccctgaagccgacgacgatcatgggctacgacatcccggcgcggacgaggatcttcatcaacacccacgcgctcggccggaacacccgcatctgggacgacgtcgacgcgttccggccggagaggcacctgccggcatcggcggacggcggccgggtggagatcagccacctgccggacttcaagatcctccccttcagcgccggcaagcgcaagtgccccggcgcgccgctcggcgtcatcctggtgctcatggcgctcgccaggctcttccactgcttcgactggtcgccgccggacggcctccgccccgacgacatcgacacccaggaggtgtacggcatgaccatgcccaaggccaagccgctcgtcgccgtcgccacgccgcgcctgccgccgcagatgtacggtcgccatggcaagcaagtttga

SEQ ID NO: 72870 - DNA, 1070 bp, Oryza sativa
  Clone ID: PAT_MRT4530_73206C.1
agatcaaaactgtctctttcatgtatcttttcttttctgtacagtaagtctatgatatatacaaatgggaaggattagcaaatcctttaaaaggtggatgccaatcgcacggtcttaaagagtgtcagattttgaggagcgtctatgagctaagaatgttcaggagagtaaccctgctctggaccaatctcctgaacacaagtccagccccagcctcaagatctccgatgcagcactcttaacacctgcaactgttcctcattgcaaatcactgggtttttcttctggaatgccttggagatgagagacaattttggcatctggatttgcttcgacaagaggtgcattgttgactcgaggagagaggtagtgatctctctagccttgctcaaccgctttacaatcttgcagtcttccttgtctgaggctaccttcacagtcttcttgaaatgtttctttgccttcttcaccaagcggatgtatgaatggatcttggcaactgcattatctccttttctgagagacacttgcagatcttggatgatggccttcaactcagtgaagacctcactcatagcattgcagatatccagtagctcgagggagcattccatctctccatccaacaacttcctctgctgggatgagcaaatttggttgctaggcaggcacatgatctgctcaatggagttgtagatgtcatcaagcctcctcaaaacatcagaaatcatctcgatggtcatggacggtgatgagacgcatgcttctaggctgtgcagctcctcttcaactttggagagaggcctagaaggcaagctaattgatctttggtggaaagccatgcctgttgctaaaggtctgtatttacgctcaacatcttgtgttggagctgccctgttatttttattggtggagcaagatcgttgcttgctgctgaggcagcatttgtcatcttttggtactaaagcatgtgcatagacagtgtaatcaacaatagaagatggactgaatcctccaatctcgcgaccagcggcgccggcgtcctcgccgccggccggtgagcgcctcat

SEQ ID NO: 72871 - DNA, 468 bp, Oryza sativa
  Clone ID: PAT_MRT4530_73207C.1
agaaatgaatttaacaaatgttacaaaaatttaacggcatacggcgatgttttacacaggagaatgtgtttgcacatagtagtacatcgattgcacaaagtctgaagactagcaaggctagcagcccgcaggtgttcaaccatctgatttgtgccataactaaaggtgaccttactacatggccgataaataatagtacatggctggccagctcacgagcaagagcaacacggatttttttttctccgtgcactttgctctgcaattgggagggcaaaaaactgtgcaaggcatcttttggctcgccgcagtttaagttggctacaagtgtccccaagcactgcattactcacggtttaaagtgctttaacccatagaagaatcattccaatggcgcattctccataattgctgctgacaactttgcagccgcctcatcatttttcaccctgatcaagtatgttcgag

SEQ ID NO: 72872 - DNA, 675 bp, Oryza sativa
  Clone ID: PAT_MRT4530_73208C.1
atggccggacggccatcggcctcgtcatgtgcacgggaagcaattgttcgtactcgcgacggccactatcatcctcccgacgacgtggctcaagaacctcagcatgctcgcctatgtctagcggctgggctcgtctcgtcggtggcgctgacagtgtcgctgctctgggccggcgtggtcgacaagggcttccacgtggctcttgagtctgagcgggttgcccactgccctcagcctctacttcctctgcttcgcaggccatgtctcaactacgcagtgacaacaatgttgggttatctgatctatggtgaagttgtgcaggcgccggtgacactgaacttacccacggggaagctgtacaccaggatcgccatcctgacgacgctgatcaccccgctagcgaaggtgctcaccagcacagccgtcgttgtcagcacggtggtgctggcgtgcacggtacccttcttcagctacctcatgccgttcaacgtatcttcgctgaacttcaccattgtcgtgttgttcccatgcctgagctacctcaagatctacatgcctcgatttggagttggccgcttcgaggtggcggcgatcgtcggaatactagtcatcggagtatgcatcgccttcgttggcacctacacctcccttcaccagattatatgcacagtttga

SEQ ID NO: 72873 - DNA, 2178 bp, Oryza sativa
  Clone ID: PAT_MRT4530_73209C.1
ttaagcaaaactacctgtaatcagtcccagtgacttgctcacaatactagaaatggactcttcatgctcaaaagcaccaacacccgaatggaacaacaaaaaattttcaatctttgttgccgtctctgctgtttctttaagtatgatgtccatttcgtgcttcttaaacaccacaatatacgccgggttcttttccatcatccaattcatttgctgaattacaacccttcttacccctggaaaatcagcagttggagacttgtacacagttaatatcatcttaagcttcagcacgaactcgtcaactgtaatattggcactcctgagtgcatcggtgaaaaccatttcatccccgttggtgcaaatttgcacggtgagcccaataaaggactccagtagtttgcctttgccctctgcagaatctattagctcttgcgcatgtgaagaatgatcatcagaagaatctgactcaatttttgactctgctaggtcgatcgtctctagtacctttggcagtgctttatcaattatcttgaacaactcagtgtattctgctccttggtaggccctaagattctgcaggagtttccctactcctatcctatgatctgcagactcatcagagagtacatgaacaatattttccatgtcttccaccattgtttctgccagtatggcctgaacattgctttctctcacaatactgagcacaatcttttctttaaaatgagtagtaagcaaaactaacgcttcagttgctaaagtttccatcatctttctagggatgggatcttgaacaacattcatttctcctgcgaggaaagagatgagcatccgaacaattaggcgagagtttctgatctcctttcttgcagtatcatccgctgctaagaatgcaaggattcctgttacttgaacaagcagatcagcttgttggctttcagtatggtcagttagcaacgcgcggtacgggtaaccgtacccccgcggtacggacggtaaccgcggtaaccgcgcggttaccggcggtttttcacaccctggcttgagcaaggccttaagtgagctatgaactatttcaaagtcaagtttacagtccaatctgccttctctggtgagttcaataatatttggaatcagatccttggcatctttcacttgtgtgcagttgtcctgatcatccacaagcttctcaagaatctggaggtcaggcgcgagctccagcaatacgcgtgcagcatgccctcttgtgtctgtatccatgtctatcttcaagctcagcatgtggactgccatctgaattgtgccaatggaaactcgaatcttcttcagcaccctctgtttgtacattttgcttctgagaaggtggtcgacaatacgaaatcctataagctggttctctattgagtcggaacttagcagctcgtttgaaaagctaaccaaatccatgctgaccgcaccacgaagatcaccactgacgcatttcagaagacattcctcaacatagcgagcaagagatagcacaccccaaaatcccagcttatatgtgaggccaactcgtagcatccgtttcaacgggtttgccaagatcgaaaccaggaaatagacaatgcactgggagagcgccaatccatagaagatgttcagggaccatctgatgttcttatggtcatcgttttgttgatagattggatcgacataatcttgccttttcaggcgcaacgaactgataaccatggtaccgatcactgcagccagctgtgcatatccaagggtggtctgatataggaccgccaagcaggagcgaccattgatgaaggccgaaaacaactccaaaaatatttttgtgtagtcgtcaggcttctcttcgtcgcttctatacctccgccagcttccgcgcccaagtacagcaattctgtcagccttgatgattgcttcaggaaggccaatgaagaattggtcctcgggtttggaagtgttgaaaaacaaaagaactctcttctcaatttgcggtccttgcggatcatcgaccgtggccatggctagttcacggtgccctccgtgccgccgacggcagcaggccgggacaaggacgtcctcatgtgtttgatcgttgattcggatcacggaggccggggagcgaggtgcttcctcctcgtcctcgttctccatggccat

SEQ ID NO: 72874 - DNA, 790 bp, Oryza sativa
  Clone ID: PAT_MRT4530_7320C.1
atggactccccagcgacccccatgggcttatctccgccacttctcagtctggtgctccgcaatgaatcatactatacaaaaggaaaaggaggattattgcgtcagcggctagggtttgcggtggaccgggtgcacggcagcggttcacgggaacggacggctgagatccatccacccaaaacggacggccgagatccatcggtccatgaccgggccacgacagacggtcccgatgacgtcagcggtgacgtcacctccggcggcggctcgggagcgcaagctcgccggcgaacgacggcacggcgacgcgaacggagggcaccagcacgtagagcgcgacgcggcgaactcaccggtgaccaaagaagcggcggaggagcaacagacggcgccggcgacgaggaagaagcggcgacggtcttcgggtcgacggtgacggcggtgctccggcggtctttagcgacgacgaaggggtggacggggacggcgacgacttggcgatcccgacggtggccttcccgagtgacgacgacgaccgttgcgacggcggcgcacggctggacgaacggcggcgacggcggcgcaaaagctcacggggctagggcgctacacacggcggcggtcgaaggcgagagtggctgtcggtagaggagagctcggggatccttttataggggcaaagaggcgaagacgacgaccccgacaggcgggacccacctgtcagcgagagagaaaaaggagagcggcggctcggcggactgggccgactgggccggggagggagagagaa

SEQ ID NO: 72875 - DNA, 1380 bp, Oryza sativa
  Clone ID: PAT_MRT4530_73210C.1
atggtggcggataagagccctatcgacaaggctgtcctccatggcaaacacgagcaagatgatctacgggacgataaggtggtttacgacgtggagtagaagcaactcctccttcccacatgtcggcggtgccgtacgcgctatcgcagggcgggtggctcagcctggtgctcttcaccatggtcggtgccaactgcttctggctcgttctgcatgactggcgcttccttcaggagaagctgcctcaacctcagcaacgtgatctgcagcatcgggatgctctacgtgtcgtacgtgctatcgcagggcaggtggcccagcctagtgctcttcaccatggtcggcgccatctgtttccacaccggcaacctcaacgaccgctgcatgtgctgatcgcggcgtacggagatactccttcggcggctatggccggacggccatcggcctcgtcatgtacgttgagctctacctcgttgccatcagctttctcatcctcgaggccgacaacctcaacaagctccttccggcacggtggtggagatcctagtgtactaggtgcacgggaagcaattgttcgtactcgcgacggccactatcatcctcccgacgacgtggctcaagaacctcagcatgctcgcctatgtctagcggctgggctcgtctcgtcggtggcgctgacagtgtcgctgctctgggccggcgtggtcgacaagggcttccacgtggctcttgagtctgagcgggttgcccactgccctcagcctctacttcctctgcttcgcaggccatggtttcttcccaaccgtctaattctcgatgaagtccaagaaagattttcctaaggttttggtgatctcttcagtgctgtgcagtctcaactacgcagtgacaacaatgttgggttatctgatctatggtgaagttgtgcaggcgccggtgacactgaacttacccacggggaagctgtacaccaggatcgccatcctgacgacgctgatcaccccgctagcgaagtacgtgctcgtgatctagcccatcacaacagtgaatgaggagaaattgtcgacgacaacggtggcggcagcggacgtcgagcacaacgggcttaccagggtgctcaccagcacagccgtcgttgtcagcacggtggtgctggcgtgcacggtacccttcttcagctacctcatgccgttcaacgtatcttcgctgaacttcaccattgtcgtgttgttcccatgcctgagctacctcaagatctacatgcctcgatttggagttggccgcttcgaggtggcggcgatcgtcggaatactagtcatcggagtatgcatcgccttcgttggcacctacacctcccttcaccagattatatgcacagtt

SEQ ID NO: 72876 - DNA, 1840 bp, Oryza sativa
  Clone ID: PAT_MRT4530_73211C.1
ccatggatgcgaccaagaagcgtgtggccatcgtcggcgccggcgccagcggcctgacggcgtgcaagcacgcgctggcgaagggcttccggccggtggtcttcgaggccgccggcgacggcgtcggcggcgtgtggaggcgcacgctggcgtcgacgaggctgcagacgccggcgttcgcctaccggttctccgacttcccgtggccggcggacgtgtcgggcgccgaggtgttcccgcggcacgaccaggtggtcgaatacctcgccgcctacgcgcggcgccacggcgtgacggagtgcgtccggttcggctgcaaggtgctcgccgccgagtacgccggggtgcccgatgaggaggcggcggcgtgggagcggtggtcggggaatggcgaggccttcggcgacggctccggcgagtggcttctcacggtgcagcaccctggatccgaagctacccagatacacagggtcgatttcctgatactctgcactgggagattcagtggagttgcccacaccccaacatttccacccaaccgaggccccgaagtgttccacggccaagtgcttcactccatggactactccaacatgggccacgccgccgccgacgagctgatcagaggcaagcgcgtcgccgtcgtcggctccggcaagtcggccttcgacacggtggcggagtgcgccgctgcaaacggtggcaggtatccgtgcgccatgatctgccggagcgggcggtggatggtgaacggcgggttcgtgtggggcgtcagccttggacacctcttctgcaaccggctggccgagctcaccgttcacaagcccggcgaggggcttgcattggccctcctcgcaattctgctcacccctttgagatggctgctgtcgaagctggcagagacctacttcaagatgcagatcccgatggagaagcacgggatggtgccggaggagagcttcgcgggatcaatgtcgggctgccggctcggagtcctccccgacaagttctacgacagggtggaggaaggcagcatcctgatcaagagggcaagatctttcagcttctgcacggacggcttggtgctcgacgacgacgacaccggcgagcgcgtcgacgccgacgtcgtcgtgctcgccaccggcttccgtggcgaccagaagctcacggacatgttcgtctcggcgacgttcaagcagcagatagtagcagctcctctgtacaggcagtgcgtgcacccgcggatcccgcagatggcggtgatcgggtacaccgagaacctgacgagcatctacaccttcgagatgatggccaagtgggtggcgcacctcctcgccggcgcgttccggctgccgagcgtcgtgcggatggaggcgagcgcggcggagtgggacgaacacctggcgatgaggaggcacggcgagggcggcggcggcaagccgtgcctcggcggcgttagcacgtggtacaacgacgagatgtgccgggacatggggtacgagccgaggaggaagaaagggattcttgcagctacgctggtatcctctgaagtctgaactcaagtgaaactgatcagtgatcgatcgatcactgatgtgttgatcacgagtatacgataaaaaagaacatgaactttggaattgttgggctttcagaaaggggaaaataagttgggctgcgatatgaagaggaaaataagtcgaggaaataagcgttgttccaaaactttgttgcatcgcccatcgttcttctgcaaaacattgttcgtgtatatctatttccgtctggctaaaatctaacagagagcacgataccttttcgagataagaaaaaaaaaaaa

SEQ ID NO: 72877 - DNA, 530 bp, Oryza sativa
  Clone ID: PAT_MRT4530_73212C.1
gcacggaggagaacaaccaaccacaaaatcgctaatccgggtgggtcagattgcggtttatttcggcccacctccgcttcctaccgtcgatctcctcatcgcgagttcgcccgccgcctccgccgccgatctccattccgcgagcagcggccgccggcgtcctgctgttcccgccgcatcctcgccggccgcttcgaaatggcgatacatatacaacagaaaagaagtacagcatcaggtcgttgtcatggcaaaccaatttccgagaaacgaaggcccagtgttaaattggaagaccttccagaggatgtgctatgcataatcgtatcaaagttgcctctaaaggaggtttcaagtactagtgttttgtcaagtagttggagatatatctggtctatttgccgtcccaaattaagtttcagtggtttttgtgggttttacgatgatcctcatgaaagagaacaatactctcagaaattcgctgaaaaagttaatgcagttttgcggaagtatgatggcaagttgatcga

SEQ ID NO: 72878 - DNA, 952 bp, Oryza sativa
  Clone ID: PAT_MRT4530_73213C.1
ctagttctagaccgctcgcgatctagaactagatcgcgggcggccgctcgcgatgccctttttttttttttttttgataagagggtaaaaccattgcattccaaatttatgacaaacgcgagggactctaccacaaccattacgctatccgccacgagcaagcgagcgagagcgaggcaaagcaagaaggcgacctcaccaaataatcccccaccaccacaagaagcaggggcgcgccatggcgagagccgctaccgtggcggcggcgtcgtccgcgctgctgctggcgctgctcctggcgctggcgtggggagccgcggcgggggcgggggaggtgccgctcggctgggagctcggggtcggcggcggcggcggcagcggcgacgaggacggcttcgggttctccggggcggcggctgacggcgccgcggtggtgaggcgggtgctgcaggggcggggctacatcagctacggcgcgctgcggcgcgacacgacgccctgctccgtccgcggcgcctcctactacaactgccgccccggcggccaggccaacccctactcccgcggctgctccgccatcacccgctgccgcggctgaccggcctccaccaccaccaacccgctgttcgaactggattcaaagttcgttcgttgctcctctccgtctactcgctagttcgtcttcttcatttttttctccccttccttactctttttttttctccgccctgttttaaccgtgaaagaagaagcacaattggtctggatcggtgcccaggaatcgaatcgagtgaataagatttgtgtcactccagtcctgtatgtggattctaataatattaataatcaagttgtgtataaaaaaaaaaaaaaaaaaaaaaaaaaaaaaaaaaaacaaaaacagaagacactgatggattagatttgtcctttcgttcaaggatgatatgct

SEQ ID NO: 72879 - DNA, 180 bp, Oryza sativa
  Clone ID: PAT_MRT4530_73214C.1
cttgacgtggacggcagcgacagtgtgcttgacggcggcggttgtcgttgcaccggtgcttgtgggcgatcccggcaaggtcgtggcccggcggtggcgtttcccatcactgttgtgacgggggcccaccagccattgggctgggcgcccccgatcagggcgcggtcaaggcctccttga

SEQ ID NO: 72880 - DNA, 330 bp, Oryza sativa
  unsure (1)..(330): unsure at all n locations
  Clone ID: PAT_MRT4530_73215C.1
ncgacncnnccaccatngtcgagangncgattctgctntagcgctagcgcnncggntgagcatctcaatcctattgcanaggtggtngaggccatgcgtccgccttcagtgtntccgtcagccnncgatgtgggcgacccggnttanaanngtgntnngntgagnacagtgatcgncnntatggcancannatgtccntgtatantngtncgtttgnttcccataccgtgcngcaagggaannacgtnctgcgacatgnttatgttgatatgtcgacgtgatngggttcagcanntccgtgatacatgagatantntgatagttngttgc

SEQ ID NO: 72881 - DNA, 335 bp, Oryza sativa
  Clone ID: PAT_MRT4530_73216C.1
ccttgaactctctacttttacctataggggatatggctgtatggcaagaaaatggtcccaccaagaccttgcgggtccgctaagctgctggtgtggagaacctgaccttactgacctgtgagcaaactccatggagtagcgggaatttggattacactactctgaaccatacatcctcatcaagtgggtcctctgacctgctgaacaatagacgatagatactaaagaactgctagaaggtcggtgacgaagggtgacaaagatgatctgcaccaccatatagatgaagtggaggaaggctctgaactagtctgcctgaaaaattattctgctga

SEQ ID NO: 72882 - DNA, 1960 bp, Oryza sativa
  Clone ID: PAT_MRT4530_73217C.1
atggcttcaaaggcaatgcctcgagcgccccctgcagctcccaacttacagtcactgaaactgtgttctcagaatgattcttctttggagacaaccagtccgagtaaacgaagtgcattggtgccaggaaggtcagctgaatcaagcaaaccgaatcccgaagtggtgcaaaaggagcagaaatcaactcagcatcaaaatgagtccattgatcttacgggtagcaatgatcctgcagaagtaaaggctgagggtaacctggttccaaagcgtcttgcagatgaggaaaagggtgttgtggaggatggaattgcgaacggaagcttgaaatcatcttcagctttaggaaaggagcatggtatagcaagtgcaagtggaagtgccaggttggttgggagatctgagactggagaaagaggtttcagtagcagcagatgcaggccaagcacaagcagtgatgtcagtgatgaaagcgcttgcagcagcattagtagcgtcaccaagcctcacaaggcgaatgattcacgatgggaggcaatccagatgatcaggactagggatggaatccttggcctgagtcattttaagctattgaagaagctaggttgtggtgatatcggcagtgtgtacctttcagaactgagtggaacgaagagctattttgcgatgaaggttatggacaaggcatcacttgcaagccgcaagaaattgcttcgagcccagactgagaaggaaatcttgcagtgcctggatcatccttttcttccaacgttatatacccattttgagactgataagttctcatgcctggttatggagttttgccctggtggagacctgcatactcttcgacaaaggcagcgtggcaagtattttccagaacaagctgtcaaattctatgtggcagaaatactccttgctatggagtacttgcacatgcttggtatcatatatcgtgatctgaagccggaaaatgtccttgtccgtgaggatggacacatcatgctatctgactttgacctctccctgcgctgtgcagtgagcccaacactgatcagatcatctaaccctgatgcagaagcacttcggaagaacaaccaggcctattgtgttcaacctgcttgtgtggagccatcctgcatgattcagccatcgtgtgccactcccacaacatgctttggtccccgatttttctccaagtcaaagaaggatcgaaaaccaaagcctgaagttgtcaatcaggtcagcccatggcctgagctcatagcggaacctagtgatgcacgctcaatgtcatttgttggtacacatgagtacttggcccctgagattatcaaaggcgagggtcatggtagtgccgttgactggtggacctttggcatattcttgtatgagcttctgtttggaaaaacacctttcaaagggtcaggaaaccgtgcaacactgttcaacgtcattggccagccgctgcgcttccctgaatacccggttgtgagcttctcggcaagagatctaattaggggcctgctcgtcaaggagccccaacaaagattgggttgtaagcgtggtgccactgagataaaacagcatccattttttgagggtgtgaactgggcattgatacgctgcgcaagccctccagaggttcccaggcctgttgagattgagaggcctccaaagcaacctgtttcaacatcggagcctgctgctgccccttctgatgctgcccagaaaagcagtgatagctatctagaattcgatttcttttaggactcaataattttttttccatttgtttgcatcatcttgagtagggttttcacatgtagtgtcttgcagattaatatgtagattttttggtttctgtcaacctgtcctgtttttcttgaagtaaacttattgggattcagatttatatttctcagcaaagatctgaaatggttaatcttcaagtgagtca

SEQ ID NO: 72883 - DNA, 2601 bp, Oryza sativa
  Clone ID: PAT_MRT4530_73218C.1
atggaccatcggcccgacctgtccctcgccctccacccgccgccgccgcccgagggctcgtccgccgccgccgccgaggaggtgggggaggaggaggccgaaggcggcgaggggcggttctccctcatgggccagccgctcttcctcaagcggccgcggccgcggcccccgcgcccgccccgcgcgcgcggggtgggggacgacgtcgacgtcgacgtcgacgacgactcatccccgtgctgctcctcctcctgcctctcgcccgcggcgaagcggcgggcggcggcgggaggactcgaggcgcgccgcgcggccgtgcgcgcgtggggatgccagccgctcacggaggcggacccggacgtgcacgagctgatggagcgggagcggcgccggcaggcgggcggggtcgagctcatcgcctccgagaactacgcctgccgcgcggtgctcgacgcgctcggcagccacctcaccaacaagtactccgagggcctccccggcgcgcgctactactgcggcaaccagcacatcgacgccatcgagcgcctctgctgcgaccgcgcgctcgccgccttcggcctcgacccgtcgcgctggggcgtcaacgtgcagccctactcctgcacctccgccaacttcgccgtctacacggggctcctcctccccaacgacaggatcatgggcctcgactcgccgtccggcggccacgtcagccacgggtactacacgcccagcggcaagaaggtctccggcgcctccatcttcttcgagaacctctcctacagggtgaacccgcacaccgggtacatcgattacgataaggtagaggagaaggccgtggatttccaccccaagattctcatctgcggcgcgagctcgtatccaagggattgggactatgcacggatgcggcttgttgctgataagtgcggcgcagtactcatgtgtgacatggcacaaatcagtggtcttgtggcagcgaaggaatgtcgaaatccctttgactactgcgatattgttacttcaaccacacacaagagcttgaggggtcctagaggtggtataatatttttcaggaaagggaaaaatctaaggaaacgggtcggatctttaactcaagtggttgaaaatgatcagtatgattttgaggaccgtataaattttgctgttttcccttcaatgcaaggtggaccccacaataaccatattgctgctctggctatagctctaaaacaagtagccatgccagaattcaaagcatacattcaacaagtcaagaaaaatgcccaagctttggcgatggccttgctcaggaggaaatgcagactggttactggtggcacagataatcatttgatgctctgggacctaagaacatttggcttgacaggaactcctgccatgacaactagaggttgcttggagagtgactttgagataatggcagaattccttttgagggcagcacatatagcaagtattgttttgaaggagcatggaaggcttcagaaggattttctgaaaggtctggagaacaataatgacattattgaactccggaatcaggtggagacatttgccttacaatttgccatgccgggatttgatccggcgcgggcggcggcgggagcgctgggcggccagatgaacggggcggcggcgggcagagcggagcgcggcggacggagtggcggggcggggcgggtagagcagcggcgcgaagccgaaggggcaccagcctcatcgtcgtcgtcttcctgcacgcccttctcggagttcttgggcaccgcgaggacggcgaggatatgccaccgtccgtcgtccgtcgtgtacatcgcgctaggcagcgaggtgccactgcgcgtggataaggtccacgagctcgcgctcgggctggacgtcgccgggacgcgcttcctgtgggctctgaggaagcccactggcgtctccgacaccgacctcctccccgctggcttcgaggagcgctcgtgcggccgcggcgtcgtggagacgagatgggttcctcagatgagcatactggcgcacgccgagaaggcgtcgcggcagcgattcgtgcagtcgcggtggaggcaagatatcaagatcatgggctttttcatctccaagcggcgagggcggggacacggcggctcgttcaggttccacacgacggtggaggcggcgcagcaggccatcgccaccgggcacgtggaggccgagagcgcggcgaacggcgtaggcctcaccaagctcatgggccggagcgccggccaccggggagaagagcggcagacagctaggcgagcggcgcaagagagagatggccgccgctgccccacgcgcctcgcgcgccatcgcccgccgccagccatgcgctgtccgtcgtcgcgccgcccgccgccgccgcgcggtccgccgtcgcccgccgtgctggacgccacccggcgagaggagggagcagagagatggggagagccggagaggaagaagaagatgattggatttggttatctgagaatgacatgtgtggcccacgtgggccacaccactgtagctgacatgtgggacccaccatttttaaattattttttctatggctga

SEQ ID NO: 72884 - DNA, 1789 bp, Oryza sativa
  unsure (1)..(1789): unsure at all n locations
  Clone ID: PAT_MRT4530_73219C.1
atggctcaagccgctgttcaatcttctctgaatggtgacttgttgattgggagggccgcgggagttccgaggatgaagaggaagaccccctctgaactcagaggagagcaattgaagcggcgtgcttctgacaagcctgctaatgaccaatcactccattctgcggcatttgatagggcaagcaatgggtttcggaacccagagcaatcaaaaatatcgaaatacatcagtactcgtgttacagaggtgttcccagtaaaaaaatctagaaaccttggaaaggaaaacttcaagaataatgagaaggctcccaagtctgctgatgctgtgacaacttctgattttgcatcaccttcactcccatgtggttatggtgactctgctaagttggactctgctgttccatcacatactgaggcagctaaaccaagttttaggaaagttgagaaatgcagtgaaaatgctttgcggagtgtatctgagctccatattggtgatgagcagcagtctggcactaataaatttgatatggaaaaagtactcaaaggttttggagctcgtgatgcttttgtggcctctaagctcactgacccaaacatacaagttggtgttgtaccctcgaaatctttggatttgtgcccttctgagatcgctgttccaggaaaaagagctcctttggatctcaccctgaagactactttgcaatttgtttcatcatcttctgtaaagtggtgtcacaagataagtacaagttttggtaggagcagcattgtaggacccattgcccaaagttatcatcatgggtgtcaaaattcaggatgctcaaggcctgagagaaacaaggaattcttgttctcaaaggcactacaatcatgggtatatccacaatccttgttgcctgcttccatcatatctgcaatggtatcatcaactgtacgaggagtttatacgccacaatttgttgctctcttcatcggtggaaattgtttggacaagaagcagacctgtaatgcgtacctatcacaatcaacacgtgggatacgatcattgctgcgaagacatggtgtttgtttttctatgcctctttgcaacactgaagtggagcaggttacagaggatgacctgattgaactttcagaaatccaaaagcgcaatctaggccaggtcattcttaaattctctatctgccacagatatcccggtgttatattccccggtgccgtttcaaaatggctgcctccatattccagaggtgaaatgcaaggagatgaggaaggcagatataggcctggtttcaggatggcaacagagccttcgtcgatgggcttaaacgctgccttgagctgcgtaagctcaaattcccagtccaaggcacattcctctgaaggctgtgaatcattgggcatccctgaggccacattggttccctccttgcgatctgcatcttctctgcggcgcctcagctacaaggatggcgagtacatcgcatacacaacggtgtgagctacaacgcaacacctcgaagccatagctgggaagcaagacaagtactcctattccagtnaagtgcagccacttttgatgttctacgactaccaatgggggttctatctggttgagctcctcccgtcaagaagcctcaatgcctcgtccatgagacaagcnaggcaggcaggcagagaagctgtaactgctgctggtttgtggtttttttgcaaggaatgtgtccagtatctggaatcatctactgttttnggtgacctgtagattatctacagncaatgactgc

SEQ ID NO: 72885 - DNA, 600 bp, Oryza sativa
  Clone ID: PAT_MRT4530_7321C.1
atggacctccaagcgaacacggtgaggaagctcgccactgagcggtggaaccgtcgtctactctggcgcgttgggggtttgcggtggaccgggtgcacggcgacggttcacgggaacggacggccgagatcaaccctatccaaaacggaaggccgagatcaaacggtccacgaccggctcacggggaacggcaacgatgacgtcagcaccggcggcggctcgggagcgcaagctcgccggcgaacgacggcgcgacaacgagaacggagggcaccaggacgtagagcgcggcgcggcgaacttaccggtgaccaaagaagcggcggaggaacaacggacggcgacggcgacgaggaagaagcggcggcggagatcgggtcgacggcggcgacggtgctccggcgatcttcggcgacggcgaagcggcggacggggacggcgacgacttggcgatcccgacggtggccttcccgagtgacgacgacgaccgtagcgacggcggcgcacggctggacgaacggcggcgacggcggcgcaaaagctcacgaggctagggcgctacacacgacggcgggcgaaggcgagagaggcggcgggtag

SEQ ID NO: 72886 - DNA, 559 bp, Oryza sativa
  Clone ID: PAT_MRT4530_73220C.1
ccggtggtagtagcatttttttttttctttttttccttggtaaccttggtgggctttgttttttttaaatggttgggcccttatcccaccttgaaccttggaggtgcaataaggggggtttaccccaaaattcttttcttggccccccccctttttttttccccccttacatttcacataaaaccctttttttggtttgtcctatccagggctcctttatcaacaggaccagaaaggagcttttgtcaacacagcccgcccacaaatccttctttgccatgctaaaccctccattttttttttaacaaaaaaatctcctgtttaacccagcgcaagacagttttaccccccccccaagaaagaaagaaaaatggtgaaaacacgacaagaaaaagacggtcccccatgttaaaaaaaatgagggggccccggccgggcggggggcatctatggggggccaacgggggtcctggcccctttttgtggcgcgcaaaacacttggaagctagccctattgggctctttttctactgggcggaggaccatggggcggagggga

SEQ ID NO: 72887 - DNA, 921 bp, Oryza sativa
  Clone ID: PAT_MRT4530_73221C.1
atgaccgccggaggcgcgttcccgccgtcgcccttctctttcctccgtgccggccgcctccagccgcctctccctcctcgcccgagcgccgcccggccgtgccgtcaccttccccggcgtcgcagccgcctcctcttcgccggcgctgcctccggttcgtggggaaatcgccggagacgcgtccccgccggcaaccagtggcattggggccactgtactccctccagccggctgctgtccctcgtcagagcgtcggccgacgtcgccgtctccttcgtcgacaccacggcatcgcctccttccccggcatcacctcctcctcgcccgaagctcgcccgagtggcctcctcgtcgggcgtccagtacctccccggtctcccggtcggctcctgtacgtcgccgaacgccgtcgcccgcgccggcctctccttcctcctcgtcgacgtcgccttcggcagcctcctccgccgtgcccgtgcgccggccgacgtcgccatcttcccctccggcatcgcagcggcaagcggcgcgttccacggcatcctcgcctccgtgcagccactgccggctgccctcgtcgtctcctcgccggccccggtcgtcgtcgtcgtcgtcctcccgtcgttcccggtcgtcgtggcgttcgtccctccgccaagccgatcgcgttcgccgcccgtggttcgtcaagcgagctgctgcagccccgtcgtcgtcttcgtcctcgcttccgcgtcgtcaagcctcgtgccggccatgtctcgccttcgttcaaggatcgccgccgaagtcgttccctcgccgtccgcctccgccgcgcccctttcgtcgttccggaggttcccgaagcgtggttcgtggtcgtcgccgaaggttcggaaggccgttctctctgagcaaggcaagtcacatcatccttga

SEQ ID NO: 72888 - DNA, 360 bp, Oryza sativa
  unsure (1)..(360): unsure at all n locations
  Clone ID: PAT_MRT4530_73222C.1
gcggccgcaccttttttntttttttttttttataaatttcggacttggaaagcggaactcatatttttgagaaaattaacataaatgagcttgaagcacattaatggacggttggactaataaatgaagctaactggcgctgtgcaaatgacaaccatcagattccgtgttaacgcataacaccatagcattcttgctcaaacttgcagacatgctcccgatctccatatggttatcaaaagcctcgctgtggtcgctcaggttccacattcactcgaagtggggggccattcatttgctgttcatcaagggctgaattagattgatggagctcctgcttggaggccatggaaacaaaac

SEQ ID NO: 72889 - DNA, 1017 bp, Oryza sativa
  Clone ID: PAT_MRT4530_73223C.1
atggcgcccccaatcgcccggaacggccgcgccattcccggccgccttccatggccgccggccgtgtttcccgtcgccgttccgccctctcccatgcccggctccctcccctcacctataaaatggaaccccctccgtgcgttctcttgttttagccccttcccgagctcccccgtggccgcaccacctctccccgccttctccttttctctctccggcgccggtcggcctccagccgcctctccctcctcgcccgagcgccgtccggtcgcgccgtcgccgccctcggcctcgcagctgcctcctctcccccgccgcccctgccgcaccgctcaggtgcgggccggctgcgccgtctcctccctcggcgtcgccgcgtcgacctccaccccggcctacccttggtttcgccggaacgccgtcgcccgcgtcggtctcgccctccgcctcgccggagttccttcggcaaccccttccgtcgtgcccgtgcgccggccaacgtcgccatctcctcctccggcatcgcagtggcaaggtcgcccttggcctcgcctccccttcgaccgaaccccgccggtgttcgtcgtcgtcgtcatcgttcctcctcgccggctcgtcgtctcgcggcgccgcctccatcgtcggattcgcagcggtgtgttccatgccgtcctcgtctccgtgcagctgctactagctgtccctcgtcgcctcctcgccggccccggtcgtcgtcgtcgtcgtcgtcgtcctcccgtcgttcctggtcgtcgtggcgttcgtccctccgtcaagccgttctcgtccgtcgtccgcgtccgtcaagtgtgccgctgcagccccgtcgtcgtcttcgtcctcgcctccgcgtcgtcaagccttgtgccggccgcgtctcgccttcgtccaaggatcgccgccgaagtcgtcccctcgcctttcgtctccgtcgttcccggccgtctccgccgcgcccgttcgtcgttgtcgttccctcgcctcatcgcatggtggtaa

SEQ ID NO: 72890 - DNA, 1284 bp, Oryza sativa
  Clone ID: PAT_MRT4530_73224C.1
atggcgctcccaatcgcccggaacggccgcgccattcccggccgccttccatggccgccggccgtgtttcccgtcaccgttccgccctctcccatgcccggctccctcccctcacctataaaatggaaccccctccgtgcgttctatcgttttagccccttcccgagctcccccgtggccgcaccacctctccccgcctcctccttctcttccctcggcgccggccaccctccagccgcctgtgccgcctcgcccgtgcggcggctgacgtcgccaccaccttcctcggcctcgcaggtgtcccctctacgccggcctgccctccgtttcgcacggggaccatcggagacgcgtcctcgctggtgtacagtggcgttgccgccactgtaccacctccagccgcctgtgccgcattgccggagcgtcggctttcgtcgtcgctgcctctcccggcaccggaacgccgtcctcttccccggccaggccacggcgtcgcccgtatttcgccggaacaccgtcgtgccgcgccgacctctccatcctcctcgccggaatttccccggtcgatcgcgtcgtcatctcctccggcctcgcagcggcaaggtctccctcggcctcgcctcccctccatccgaacccctccgctgtccgtcgtcgtcgtctccgttcgtcctcaacgtcgacgtcccgtcggtcgcccggcacgtcgtctcgctgcgccgccaccctcgtcctcatcgcagcagcgcgttccacgccgtcctcgtctccgtgcagccgctgccggctgcccttgtcgcctcctcgccgattccggtcgtcgtcctctcgtcgttcccggtcgtcgtggcgttcgtccctccgtcaagccgttctcgtccgttgtccgcgtccgtcaagtgtgccgctgcagccccgtcgtcgtcttcgtcctcgcctccgcatcgccaagcgttacgccggccgcgtctcgccttcgtccaaggatcaccgccgaagtcgtcccctcgcctttcgtctccgtcgttcccggccgtctctgccgcgctcgttcgtcgttgtcgttccctcgcctcgtcgcgtggtggtaaggatctctcctctcgctgccccgtcctcgtcctttcggtgtcgccccgtacccgttgtgcggttgtcgacgccggtacccgtgtactggtgttgcttctatcgttccggaggttcccgaagcatggttcgtggtcgtcgccgaaggttcggaaggccgttgtctctgagcaaggaaagtcacatcatccttga

SEQ ID NO: 72891 - DNA, 1665 bp, Oryza sativa
  Clone ID: PAT_MRT4530_73225C.1
aaaataatcctccttcctcctttgggccaagtctggcccaaggtttctcccctctccctctcggcccgcggccgaagtccctctctcctccctctctttctctccctctccttctctccctccttctcttgggcctccctccttccccggcccactccctcctcctccctctctcccccgggcccccctcccctcctctcctcctgggccggccgcccggcccacgccgcgcccctgcccgagccgtccttctcccgcgcacgtgcgttgcacacgtgctgaccgcgcgcccgcgtggggcccacgcgccaggacgtcgtcttcctcccccagccggcctcctccctctcccgtgaaccctagcgccgttcctccctcaaatccgctgattcatttggcgccgggaacgcccgcgtcttccccggccgctttccatggccgccggccgtgtttcccgtcgccgttccgccctctcccgtgcccggctccctctcctctcctataaaatggaaccccctcgatccgttctccagttttagccccctcccgcattctcccgtggtccctagccacctccccgccgtcgcccttctctttcctccgcgccgggcgcctccaccgcctctccctcctcgaccgtgcgccggccggccgtgccgtcgccttccccggtgttgcagccgcctcctctcccccggcctgtgtaacaaccgtcgtgctctggccgccgccgccattcctttctttctccttctacgacagcctgccctccgtttcgcgcggtgactgccggaggcgcgttcccgccgtcgtccagtggcgttgccgccactgtactgcctccagccgcccctgccgcgccgctcaggtgtgggccggccgcgccgtctcctccctcggcgtcgccgcgtcgacctccaccccggccagcattgcgccggcctctccatcctcgtcgtcgccggcgtcccttcggccgccccttcctcctccccggctcgtcggctcgctgcgccaccaccacctccggcatcatagcggcaaggtcgccctcggcctcgcctcccctccacccgaacaccgccggtgttcgtcgtcgtcgtcatcattcgtcctcgccggctcgtcgtctcgcggcgccgcctccgtcgtcggattcgcagcggcgcgttccccgtcgtccccgtctccatgcagctgccgccggctgccctcgtcgtctcctcgccggccccggtcgtcgtcgtcgtcgtcctctcgtcgtcctcatcgtcgtggcgttcgtccctccgtcaagccgatcgcgttcgccgcccgcgtttcgtcaagtgtgcagcagccccatcgtcgtcttcgtcctcggctccgcgtcgtcaagcctcgtgccggccgcgtctcgcctttgtccaaggatcgccaccgaagtcgtcccctcgccgttcgtctccgtcgttcccggccgcctccgccgcgcccgttcgtcgttgtcgttccctcgcctcgtcgtgtggtggtaaggatccgtcctctcgctgccccgtccttgtcctttcgttgtcgccccgtacccgttgtgcggttgtcgaccccggtacccgtgtaccggtgtcggtagtcgttcatcggtctaccgcggtcctttaggttgacatgtggggtccgcat

SEQ ID NO: 72892 - DNA, 4206 bp, Oryza sativa
  Clone ID: PAT_MRT4530_73226C.1
ctaaaataatggaatgcaggtcaatacaacttctgggatatgttgcctcagattgttgcattgctcctctagctctgggctgtacccttgcagctgccggtaggacacctcgagcctcttgagggaacgaagagaacgcaatgatgaggggagagactgcaacctgttgcacccataaaagatgagctcttggagtgaggtgagcagcttgagcgcagtttcctgctcctccgtgaagtgctgcaccattgtgtcattccggaaggttaatctgtgcagtgaggctgagaggcgttggcagattggagcagcaagaacgcctgagatgctgccaatgtccaactcctccagctccttagagccagccaccactgttcgtgccatccttgtcatcagccgatcttcttccaggtcataaatgtcgtaaccgtaagccctcaacgccttgaggttgttcatcaggggaaggtcgtcatgaacagcctgcattgctgcacaagagaggacgcaccctccaagttgcaaccaatggagggacatgagcttcttgagcacttcatccttcacattcatggtcaggtgatccctggagaagatacctaatctgcttaacgagctggtaaactgagatgggaattgcaacatgccatcaatatcattgtcatcgtcgtccatttcatggctgctctgttgcatgcacagtcctgttatgcccttgcagtcttccatttccaaatgggaaagacaaggacagcaagcaagaatctccgatagctccttccctgtgatgtagcagttcctgagcataagatgcttgattggtatctggatggcatcactctctcctcttccagatgataggctgatgcaatcctctatagccaatgtttcaagcgaggttagcttctgcagggtagctaatggcacagacgagcataccttgatggtcacacgaactaaccattccatgtcatggaatgccaacacattgtccaggttacccaagttcaacaaaatgttgtccactcctctgatttccaacatgtgtatatcgtaaagaagtttatatggacgacttgccactttcgccaactctaacttagtcgtataaggcataagaggtagagacaactgtggacagtcccggacaacaagctcacgcagatttgtcttcaaagtcatgcatttgtgttctacaggagaagcctgagatgtcctccaaccaatgacccgaagaatctgcaagtcaggtcggaaaatgtgcctctcttgtgcatctggagtttgcaacagcttcaagtcatgagagaacggcagttctttaagaactgggcaatttgaaacttttacttgctcgagctgagaaaacaagtgccaagtgtttccacttacccattctaccatgctcagcataccattgaattcaatactcttcagagtctctaagctttcataccttacttcgaacttttctattgcaatattctccagcttaagtttctggaggtaaggaatttgtccaaaagggggaagtgtgttccaggacacaccatgtaagtggagaacctctatcctttttaaggagatggtgctgtcaaaccaagaaggacaactgttacccttatgattcttaatgcacaactccctgagatttgctggtggttggagaccctctatgctatttgcttcttcctcagtttgttccctaccagtctcatcccagactagttttaatctgactagattccttttcagcgtgagctttgctttctcagcttctgtccttgttttgactttatgtagattggagatggtgagtgctcctccaagatctctcaattcccccaactgttgaagctcaaatccagcacgctcttccctattaacttggaacttgctcaactcctgtaataattttagcattcctatcttggcaacactggattggagttctttgctagcaagaaactggcgcaaatatatgagatgactgatttgcatgtgtttaggcactgtagtcatgcccgtccaatcctgcaggtctaagaatctcaagtgataatattcagggaggctagagggtaaggatgtcagatgatcattagtggcaggagtttgaatttcacccatcataagtcggaatttatcccattttcgtgtgacagatctattcaattttaactgtgtgttcattgtttttttagatgcttggattcttaagtaacgaaggtggataagtttggatggtagaaattcaagcgttgtttggaaaaggcggaggacacgaacatgtttgacatcctgaagtatttctttaaaagcttcagagaacctttcatcatattccccaataaacatcacagtgtgcaggtttgcaacacttatttgctccttcaggtttctaatttcttccttaaaattctggtaatggtctaagcctacagtatcacttgtacagctagtcctgatggataagtgtcggatggatggtggggtatatgcaaacctaggattggagcagtcaatgctgaggcattcacgtgatgagacaatccgtgctagttcatgaagcaaaccatgcatgacatagtatgtgtgctttacttctctcccctttttatgtgagaattttaccccatcaactttctgaaaaatcccattatttaccaatccgttaatgtatttcagccctatatcttggattctatcatcctgaccactgcagtttataacaccaagtgccgaccacaggtgagtcaactctgaatcttggtactggtaatcgtcagggaaaagggcgcagtatgtgaagcatttttgtagatgaaatgggagacagtcatagctaagtttcagagctggcataatatcgttgacgctatctgcatgctcccattctttgctgtcaagaactctactccagtgtcgcctagtaagattcttcttcagtaaccgacccactgtttttgcagcgagtggggagaacttgagcttcttcacaatctcccttcctaaatcaagcaattccttgtggtgctctgctctctcatcaccaagtgcgcatgctaagaagaaggcccagatcggccgactgtcaaggccacctagacgtatgagcaagttggtttcagatttaaccatgtctgcagtttcttcagatcgagttgttactatgaccgtgctacccttggcacttgtcttcctgaacggggccaagaacttgtcccacttgtactcgctgtcacatggccacatatcatccaagatgagcaagaacctcctggattgcagccttcgctccaccagcgtctggagttgttcaaggttgtgtggctccctttcattgccccatcttcgtctccagctcacctcactggcgaccatgttgttgaagatctccttggtgaggcgaagcacgtcgaaacggagagaaacatgtacccagatcctaacgtggaagtgcttcttcaccctttggtcgtggaacaggtgctgggtgaaggttgtcttgccgatcccccctggccctactaccgggagaacggcgaggccgtcgcggtcaccggttatctcattgatggcggcatagaactcggcgtacctcccgtagagctttgcctctaggctggttgaggtggttgtggtgacacgctcactgaaagcagctgcggctgtggtgttggctgcagtggtgcgggggtccatgagctctagcttaaggaagtcggagatcttggcgcacagaggctgcatctgcgccatgagcgacttgattctctcggacacgatggatctattgaagaactccacatcaaccgcggcacggccacggcaggacagcgaagaggccagagagcgacggcatttaccgacggcgtggcgggcgtggaggatggaacgacggacgaggcgcccgtcgacgacctggtcgtcgtcgaccgcctcgtgggtgcgtttgacgtggtcgcggatgcggtagtagtcgaccttgtcgaggacgttgtcggcgtcctcggcgaggtggctgagctgccgcaggagctccgccagcgccgggctgtgggcgacgttccggccctgcgccttgatggcgctcgcgttgccgcccaggttgtagctctcgtctagcgccttgagcagctcggcggacagcaggtccaccagcttgcccaccacccaccccgcggtgcccagcgccacctccat

SEQ ID NO: 72893 - DNA, 1513 bp, Oryza sativa
  Clone ID: PAT_MRT4530_73227C.1
ttgtatgaggttgacgccaaagatatgaactatgagaagttctggaactgaagtcccatcttcaagtgccgcaacccagtcaaagtcagctatcttcttgctaggctcctcgaatctcagggacgagattcctgtaaggggggtggatttgtcacgtccctctccttccctttgggccaagtctggcccaaggtttctcccctctccctctcggcccccggctgaagtccctctctcctccctctctttctctccctctccttctcttgggcctcctcttcccctcccggcccactccctcctctcctcctcccgccagggcctgccccggcccaagccgagtggccgcctccctccagcgcaccgcacgcgccccgcacatgcgccctcccgcggcctcacgcgcgttgcacgcgcgttgaccgcgcgcctcccgcgtgggtcccgcctgttaggcgcgtccctgacctccagcctccagcctccttcctctctctcctgtgaaccctagcgccgttcaatggagcctcctccctccgttctatcgttttagcctcctcgcgtgctcccccgtggcctcaccgcctctccctgccgcccttctctctctcccgtgccgctagccaccaccagccgcctctccctcctcgcccgtgcactggcaggtcgtgctgtcgccatcctcggagtcgcagccgcctcctctcccccggcctgccctccgtttcgtgcgatgactgccggaagtgcgccctcctcgacgtccagtggcgttgccgccactgtaccgccctagccgcttgtgccgcctcgccggtgcgtcggctgtcgccgtctcctcctccggcatcgcagcagcaaggtggccctttgcctcgcctccccttcggctgaacaccgccggttttcgtcgtcgtcgtcgtcgtcctctcgtcgttcccggtcatagtggcgttcgttcctccgtcaagtcgatctcgtccaccgtccgcgttccgtcaagtgagccactgcagccccgttgtcgtcctcgtcctcggctccgcgtcgtcaagccctgcaccagccgtgtctcgcctccgtgcaaggatcgccgccgaagtcgttccctcgtcgttcgcctccgtcgtccccgagccgtctccgctgcacccgttactcgtcgtcgtgccgcgcctcgtcgcgtggtggtaagggtccctcctctcgctgccccgtcctcgtcttttcggtgtcaccccgtgcccgttgtgcggttgtcgaccccggtacccgtgtaccggtgtcggtagtcgttcgtgtatgcgtgtggtgaccgtgtttgtgtgcccgctcggtagccgcgtggtttccacgtgtgcagcccgcgtgatgtctagtggagtccgtttgtcggccactcgcctcggttgacacacggggtctgcttccatcgacccgtggaccgtctctgtgaaatcggtcatgttcacactaggaaaacaaaaccccaactagtggctactctattaat

SEQ ID NO: 72894 - DNA, 897 bp, Oryza sativa
  Clone ID: PAT_MRT4530_73228C.1
atgccgcccccaatcgccgggaacgaacacgccaactccggccaccttccatggccgccggccgtgtttcccgtcgccgttccgccctctcccgtgcccggctccctcccccatcctataaaatggaatccccatcctccgttctatcgttttagcctcatcccgagcctccccgtgcgtcgcagccacctcctctccaccggcctgccctccgtttcacgcggtgaccgccggaggcgcgttcccgccgttgtccagtggcattgccaccactgtaccacctccagccgcccctgccgcgccgctcaggtgcgtgccggccgcgccgtctcctccttcggcgtcgccgcgtcgacctccaccccggcctgctctctgattcgtccggagaccgccgtcgccgcgccggcctctccatcctcttcgtcgccggcgtcctttcggccgccccttcctcctccccggctcgtcggctcgctgcgccaccaccacccccggcattgcagcggcaaggtcgccctcggcctcgcctcccctttgtccaaacccctccgcgatccatcgtcgtcgtctccgttcgttctcgtcgtcgacgtcccgtcgatcgcccggctcgtcgtctggctgcgctgccaccgtcgtgggcatcgctgcagcgtgtcccacgccgtcctcacctccgtgcagctgctgccggctgccctcgtcgcctccctgtcggtcgtcgtcttcctccttcctcctcattgtggcgttcgtccctccgtcaagccgatcgcgttcgccgcccgcgtttcgtcaagtgtgcagcagccccgtcatggtcctcgtcctcggctccgcgtcgtcaagccttgtgccagccgcgtctcgccttcgtccaaggatcgccgctga

SEQ ID NO: 72895 - DNA, 1134 bp, Oryza sativa
  Clone ID: PAT_MRT4530_73229C.1
atgggcagggcgccgtgctgcgacaaggcgacggtgaagaagggcccgtgggcgccggaggaggacgccgcgctcaaggcctacgtcgacgcccatggcaccggcggcaactggatcgccctcccccacaagatcgggctgaacaggtgcggcaagagctgccggctgcggtggctcaactacctccggccgaacatccggcacggcggcttcaccgaggacgaggaccgcctcatctgcagcctctacatcgccatcgggagcaggtgggcgaccatcgcggcgcagctgccggggaggacggacaacgacatcaagaactactggaacagcaagctcaagcgccgcctgctcggcggcggccgccggccgcggggcgcgccaccgcggctcgtgctcgccggcccgggccccgctgtaaccgccgccgccacgtcgcgcaacgccatggccgcgtcggcgatcgagcggatgcagctcagcgtgcggctgcgccgcctggaggccgcggcgccgccgccgccgcagcccttcaccttctacggcagcaacaacctcgccgcgccgccgtggcagcagcctatctccccggccgcgggcggcagctcggagatgccacggcggctgcatcaccaccacccctccggcgccgccgctacctcgagctactccggcctgatcagcagctggccgtcgtctcgctcccacatcatccacgacgcctggctcgacgcctcctccaccccgccgctgtcgacgacgagcatgggcgacgccgccacgacgacgacgacggccggcggggagagctcgagctcgacgccgacggtgagcacggccaccacgccgttcatcggcggcagcatcgacatggacgacgagatcgacatgctgctccagcagatcaggtgcttcgatgagaacggcgacgacggcgacgacgacgccgaccagcggctgatcgtcggcgacgaggccgcagccggagcagagaactacctcagggcattgatagacgaggcggcagcgaacggtggcgatgtcggcgttggctcctggagctcttgctctactccaggagtggactccgtgttccatgagtatgctcagctagactacggacagtataattaa

SEQ ID NO: 72896 - DNA, 500 bp, Oryza sativa
  Clone ID: PAT_MRT4530_7322C.1
aaagctatatatcccacagaatgtgacgactgttgagcttgttgcgtgccatacatccaaatgggaattttgggggaacagtagacacagttattctgcagtgtaccaatgaaccagttaaccagtaggaatgatggaaagatttaggaaatatgacgaggttcttgaacctggatggccctgtgccatgggataattggaacctgtgcagctgggctactggtgagcgcaagataaggcatatgcagctatacataccttgcgagaccaagaccaaggtgtgcacagaaggacatgctctgtcagactttgttactatatatcatacgttaaagaaaatggtgatcgttttagagagaaggaatatattcgtgtgtgaatttcagcttttggtagactattttagagacaaacacgtggctcgttcccttgcttgacatgaacaactgactggtgtatgaatgataagcattttcagtcaaaaaaaaaaaaaaaaaaaa

SEQ ID NO: 72897 - DNA, 461 bp, Oryza sativa
  Clone ID: PAT_MRT4530_73230C.1
cgtggcttatttttgcccatccattattactgcgtcttgcattgcggaagaagaccgctaggtaaggggagacgagcaaaaagagaccctaaacggtccgcctacgttgcgaacatgaaaacacgtgcgaggacaactccactcgagcgaaaaacctatctagaagagggaaaccggtccattttttgggagcactttacatctagggctgaacccagcaggcatgctcatatgcggggcgtgctctcaaaaattcatggtgattcttcctaaaccagagcgccgcttgggagtcccgatacatggctgcggactatgtctccatgtacgccgaggacttttgtcacactgcgttcaactgctggaacacgcagatgttgagccgcttcaccttcaccagggacttgagggggccgttgacagtgttcatgtatctgaggctggccatgttatctggtctg

SEQ ID NO: 72898 - DNA, 1122 bp, Oryza sativa
  Clone ID: PAT_MRT4530_73231C.1
atggcgcccccaatcgtcgggaacggccgcgcctttcccggccaccaaccattgccgccggccgtgtttcccgtcgccgttccgtcctctcccatgcccggctccctcccctctcctataaaatggaatccccatccgccgtttagtccccttccgcgttctcccgtggactcaccacccctccccgctattgcccttctctttcccccgcgccggccgcctccagccgcctctccctcctcgcccaagcgccgtccggctgtgccgtcgccttccccggcgtcgcagccgcctcctcttcgccggcgctgcctccgattcgttgggaaattgccggagacgcgcccccgccagcgtccagtggcgtcgccgccactacatcgtctctggccggctgctgttcgtcgccggtacgccgaccgacgtcgccgtctcctccgtcgacgtcgcagcgtcgtcctctcctccggctgctcctcggtttcgccggaacaccgctgccgccgcgccggcctctccttcctcctcgacaacgtcgccttcggcagcctcttccgccgtgcccgtgcgccggccgacgtcgccgtctccaccttcggcatcacagccgcgacgtcgtcctcggcatcgcttccccttcggccgaacaccgccggtgtctgtcatcgtcttcaccgttcatcctcgccggctcgtcgtctcgcggcgccgcctccgtcgtcggcatcgcagcggcgtgttccacgccatcctcgtctccgtgcaaccgctaccggctgtcctcgtcgtcctcccgtcgttcccggtcgtcgtggcgttcgtccctccgtcaagccgatcgcgttcgtcgcccgtggttcgtcaagcgagccgctgcagccccgtcgtcatcttcgtcctcgcctccgcgtcgtcaagcctcatgccggccgtgtctcgccttcgttcaaggatcgccgccgaagtcgttccctcgtcgttcgcctccgtcgtccccgagccgtctccgccgcgcccgttcgtcgttgtcgttccctcgcctcgtcgcagggtgctaagggtccgtcctctcgctgccccgtcctcgtcctttcggtgtcgcccatgcccgttgtgcggtag

SEQ ID NO: 72899 - DNA, 1029 bp, Oryza sativa
  Clone ID: PAT_MRT4530_73232C.1
atggtgcccccaatcgcccggaacggccgcgccattcccggccgccttccatggccgccggccgtgtttcccgtcgccgttctgccctctcccatgcccggctccctcccctcacctataaaatggaaccccctccgtgcgttctctcgctttagccccttcccgagctcccccgtggccgcaccacctctccccgcctcctccttctcttccctcggcgccggccaccctccagccgcctgtgccgcctcgcccgtgcggcggctgacgtcgccaccaccttcctcggcctcgcaggtgtcccctcaacgccggcctgccctccgtttcgcacggggaccatcggagacgcgtcctcgctggtgtacagtagcgttgccgccactgtaccacctccagccgcctgtgccgctttgccggatcgtcggctttcgtcgtcgctgcctctcccagcaccggaacgtcgtcctcttccctggccaggccatggcgtcgcccgtttttcgccggaacaccgtcgtgccgcgccggcctctccatcctcctcgccgaaatttccccagtcgatcgcgtcgtcgtttcctccggcctcgcagcggcaaggtcgcccgcggcctcgcctcccctccatccgaacccctccgctgtccgtcgtcgtcgtctctgttcgtcctcgacgtcgacgtcccgtcggtcgcccggcacgtcgtctcgctgcgctgccaccctcgtcgtcatcgcagcggcgcgttccacgccgtcctcgtctccgtgcagccgctgccggctgcccttgtcgcctcctcgccggttccggtcgtcgtcctctcatcgttcccggtcgtcgtggcccccgtcgtcgtcttcgtcctcggctccgcgtcgtcgagcgttgcgccggccgcgtctcgccttcgtccaaggatcgccgccgaagtcgtcccctcgcctttcgtctccgtcgttcccggccgtctccgccacgcccgttcgtcgttgtcgttcccccacctcgtcgcgtggtggtaa

SEQ ID NO: 72900 - DNA, 798 bp, Oryza sativa
  Clone ID: PAT_MRT4530_73233C.1
atggtggtgcagatcgacaaccaagacaacgttataccattgacttcactgacgctgaagacgcggaacgcgtcgcctccttcgatcaatcaaccaaacatggccggatccatcaagctttccctcacactcgtcctcctaatctcgggtctcgtgatgctggggaagatcgaaagcagtgaagcagcagcagcagcgtgcaacatgctgtgcgcgcgaggaacatacatcacctgctgcaaccgtccaggcgaggcgctctacgggtgcgcctgcaagtgcgcaccgccgggcggcaaggactgcgtcgtccactacgccgacggctccacgagcaagtcaaaccttctcagcctctatatcaacccaggctggtctacacactgcacagcaacacacatggcctccatcaaactctccctcgcatgtgtcctcctaatctcaggcctcgtgatgctggagaggatcgagcacactgaagcggtctgcacactgttctgcgctaaagggacgtacatcacctgcagcaaccatccatacgagcagctctacgggtgcgcctgcagatgcgcgccgccggatggcgtcgactgcgtcgtccatctcgccgacggctccacgcagcagtgctgatcggaaaacgcagggaaaggatggtgtcgtcgtcgctcttccacttgcacgttcttgtgtgtgtcactgtatgtgaattacttcatctgtcctaaaatataaagacttttaattggatgcgatatattccagtactacgaatctgaatatactcgtagtattagg

SEQ ID NO: 72901 - DNA, 1635 bp, Oryza sativa
  Clone ID: PAT_MRT4530_73234C.1
aaaataaccctctccttccctttgggccaagtctggcccaaggttcctctcttctcttggcccgcggccaaagtctccctctcctccctctctttccctcctctcccgggcctctcctcctcctcccggcccactcttcccctccccctctcggcccactccctcctccaccctctccctcccgggctgcctctccctcctatcctcctgggccgcctcggcttcgcccggcccaagccgagccgcgcctccctcccgtgccgcgcacgtgcgcgtgcgtgcgcgccgttgccgcgcgttgaccgcgcgcctcccgcgtgggtcccgcctgtcaggcgcgtccccggcctccagccgccggcctccttcctctctctcccgtgaaccctagcgccgttcctcctccaaatccgctccattcaagccggctctttccaaattgattggggggaattaatccccattgattcctctttgatttcccccgtttttccccttgaatggcgcccccaatcgcccggaacggccgcgccattcccggccgccttccatggctgccggccgtgtttcccgtcgccgttccgccctctcccatgcccggctcgcttccctccgctataaaacggaatcccctcgctccgttctatcgttttagcccactcccgcgatctcccgtggtccctagccctcaccgccgtcacgcgcgccgcctcttcctcggtctcgtcggcacccactccggcagcccctttcggccgtctccacctccggcatcgcagcgtcaaggacgccctcggcctcgcctccccttcgaccgaaccccgccggtgttcgtcgtcgtcgtcaccgttcatcctcgccggctcgtcatctcgcggcgccgcctccgtcgtcgacatcgcagcggcgtgttccacgccatcctcgcctccgtgcagccgctgccggctgccctcgtcgtctcctcgccggccccggtcgtcgtcgtcgtcgtcctcccgtcgttcccggtcgtcgtggcgttcgtccctctgtcgagccgttctcgtccgtcctcggtgtttcgtcaaggtcgctgtagccgtcgtcgtctttgtcctcggctccgcgtcgtcaagcctcatgccggccgcgtctcgccttcgtccaaggatcgccgccgaagtcgttccctcgccgtccgccgcgcccgttcgtcgttgttgttcccacgcctcgtcgcgtggtggtaaggatccgtcctctcgctgccccgtcctcgtcctttcagtgtcaccccgtacccgttgtgcggttgtcgaccccggtacccgtgtaccggtgtcggtagtcgttcgcttgtgcgtgtggtgaccgtgttaatgtgcccgctcggtagcagcgtggtttctacgggtgcagccggtgtggtgtctagtggagtccgtttgttgcccactcgcctcggttgacacacgggatctgcttccgtcgacccgtggaccgtctctgtgtactcggttttctttttatgtgttgttattacttctttataggcttgtagctttgcttgtgtgcttcgcgtagctttcatcgttccggaggttcccgaagcgtggttcgtggtcgtcgccgaaggttcggaaggccgttctc

SEQ ID NO: 72902 - DNA, 323 bp, Oryza sativa
  unsure (1)..(323): unsure at all n locations
  Clone ID: PAT_MRT4530_73235C.1
acgcacaccaccctcttctggtcttctcccctgctctgctccaccaccatggagagcggcggcgccggcggcgaaggcgagacggcggggtggcggttcggcgcggcgaacccggcgctggcggtggcggggtcgcagagcatccgcgcggccgtgacacggatttaccgctgcctcgacgggagcggcgacgcgcggcccgtggcgccactcgccnncacggncgacccctccgcgttcgcgtgcttccgcgccgcgcccgccgccacggacgccgtcgccgccgctgccgccttccggcagtacaactactactccccccc

SEQ ID NO: 72903 - DNA, 302 bp, Oryza sativa
  Clone ID: PAT_MRT4530_73236C.1
gggaaaaaattaactaagggagaaaaaatttctaagccaaaaacccaaacactgggcccttcctataaaaagaccaaaaggaacaggtttaaaaaataaaccccaaactggacgaaaattaacacgcacattaaaaaaattcttccacccttcaaaaacccccccctttttcttcccggggaagataaaaataaactgggggccagccagggtcgccggggggaaaatgttaacaggcggggcgccctctcggggggcccggaaaaaacggggagcaggttgtggccaaaggggccgctgag

SEQ ID NO: 72904 - DNA, 548 bp, Oryza sativa
  Clone ID: PAT_MRT4530_73237C.1
ggcggaggcggcccggccgggagagggatggagcaacaacaacagcttgccggggacaggttccgcggcccacataaagagaagcctcttgtgtcaaccattgggaaatcaaccaatatactgtggcacaattgcccaattggacaatctgagaggcagaacttgttggggcaaaaaggatgtgtcatttggatcacaggactcagcggctcagggaaaagcactcttgcatgtgcactgaatcgggagttgcattgcagcggccaccttacttatgtccttgatggtgacaacctaaggcatggcctaaatcgagatctaagcttcaaggcagaagaccgtgcagaaaatatacgaagagttggagaagtggcaaagctattcgcagatgctggaatcatatgcattgctagtttgatatctccatataggagagaccgtgatgcgtgccgtgtgctgcttccagagtctagatttattgaagtatttatggatttgccactagaaatttgtgaagctcgtgatcctaaaggtctatacaagcttgc

SEQ ID NO: 72905 - DNA, 150 bp, Oryza sativa
  Clone ID: PAT_MRT4530_73238C.1
cccaccaggccgaccctgacattcgtctggttccaggcggagccacttatggcccacctggaaccaaaagctaagcagaactcccaggccgtcgtgtttctcgtcaacaacgtccttaacccgaaagcgagatttggacatgcgctgtag

SEQ ID NO: 72906 - DNA, 210 bp, Oryza sativa
  unsure (1)..(210): unsure at all n locations
  Clone ID: PAT_MRT4530_73239C.1
acatcgtcctaaatcatgaaaggtcgattttgtatttntggcccttttgtccatattgtttagatgaagcttcaaggtagttaatgtgatgttcttggtgctnaanccnttacttgttntggntggcnctttaatgtgctctctncccatcgataaaaatgaaattttcgtaaaaaaaaaaaaaaaaaaaaaaaaaaaaaaaaaaaaaaa

SEQ ID NO: 72907 - DNA, 426 bp, Oryza sativa
  Clone ID: PAT_MRT4530_7323C.1
atgacgtcagcgatgacgtcaccccggcggcggcggctcggcgactcgggctcacatgctcgccggcgaacggcggcgcgacgacgcgaacggagggcaccaatgggtagagggcgacgcggcgaactcaccggtgaccaaaggaacggcggaagaccaacggacggcggcagcgacgaggaggaagcggcgaagctcttcgggtcgacaacggcgacggcgctccggcggtcttcggcggcggcgaagcggcggacggggacggcggcgacttggcgatcccgacggtggccttcccgagtgacgacgacgaccgtagcgacggcggcgcatggctggacgaacggcagcgacggcggcgcaaaagctcccgaggctagggcgctacacacgacggcgggcgaaggcgagggaggcgacgggtag

SEQ ID NO: 72908 - DNA, 216 bp, Oryza sativa
  Clone ID: PAT_MRT4530_73240C.1
atgtcgagagagccggcgtccctgtccaagggaaccaggacgtggctttcacctaaagaaatcaatgggaagattagtgaaaaagcaacaaagcccaaggggaatgtggggtccgcaggcatcgctgttgctggcacgaagctcgtcggcctcgtcatgggcgtgcatgttcctagcaacccaacagagtttagcccgtgcaactgggcactatag

SEQ ID NO: 72909 - DNA, 249 bp, Oryza sativa
  Clone ID: PAT_MRT4530_73241C.1
atgtcgagagagccggcgtccctgtccaagggaaccaggacgtggctttcacctaaagaaatcaatgggaagattagtgaaaaagcaacaagcccaaggggaatgtggggtccgcaggcatcgctgttgctggcacgaaggctctcaccagagaaactttcgtggcgttgtcagctcgtcggcctcgtcatgggcgtgcatgttcctagcaacccaacagagtttagcccgtgcaactgggcactatag

SEQ ID NO: 72910 - DNA, 228 bp, Oryza sativa
  Clone ID: PAT_MRT4530_73242C.1
atggggccgttcgctgtccagattgagacggagcgccgagggtggaaaggctgcggctacgaaggaggccccgttcgcggcggcggcgcgcgtaccaagccgccatggtcgcgcctcggcagctctcgaccgcgaccctacacgatcgggcggcaaaccgaggacggccgggcagcgtgtgcgagcgcagtgggcggcggaccggcgctggcgcgcataccgtcatag

SEQ ID NO: 72911 - DNA, 549 bp, Oryza sativa
  unsure (1)..(549): unsure at all n locations
  Clone ID: PAT_MRT4530_73243C.1
cagtttctgaattctggatggatcatatcanattcntcncagcatcntacaatctntgcaagcattggtacatcnagcgatgggaaaaaaaaanttttctacaatggggggtgggncattcacnaacccggggtnaacttggtggcgttnaanccangcgttnttggcnanggggtcgggnangtngtcnaacaggttctccnaggggcccttgncggttannatngcctngacaaaanaaaccnaacatngannacnttgggaagngggccattcttgatccccttgaccttgaactccgnaaagttanggttttctcnggcaaagcccaatnggttnnaaattttgggccccnggtttaaantttttttttcctcccccancccngggaagcgtntttnatntgtnccccaaaannnnctnntntcnnncctntttnntttnacttttntttccntncntnttttnnnnctntntcnnttttcttnntntattcntcttcccntnggntncntttnttttnnnncncctccttccttttnncnntct

SEQ ID NO: 72912 - DNA, 474 bp, Oryza sativa
  Clone ID: PAT_MRT4530_73244C.1
tccccgggctgcaggctcttttctccagacattgttgtcgaatttgtgctatttactgcttacatatacatgtatgtcctctgcgtattaggcaattgttcaaggtctacgtgagtctggtgtcttcacttcttccattgcagctgcccaatcacttgtgaatgacaaggtctcgttgaaggaaaacaatgttcaaaacaaaaatcatacgaaattagaaaaggtatctagaaaattcatcagagctaattctcaggcatctgccaggaaaatactgcacgctgttgagcctgccagccatgatagtaatgtatctgctgttccacctttgtcaccacctagtttggataatcacctcctggagcttagctagtgaatcaccacttgcaagaattcctcttgattgcaagttacctctggtactgacatgagcatggatgaccaaactgtctctacggttagtggcagctaact

SEQ ID NO: 72913 - DNA, 907 bp, Oryza sativa
  Clone ID: PAT_MRT4530_73245C.1
ctgcatggtgatgctcagaccaaaaacaaaggaccaaagtgaaaatattcaccgccgccgttgttctggctgtgggtgtgcctccggcctccccggaggaggagatgggccgtcgggcggcggaggagcgtcggcggcggagaaccatggcgtcgcggctgccccgtccctgagatcaccggctgaaaggattctttcactggaggcagacctcaaccggcaatctgagaatacactcaaagaaaaagaagagcatgagaaaacgagaactgagcttgaagtaaaggagaagcaacttgaagaagagagacaaaaccacacattgactgtccaaagacatggtgaagaactcgaaaggcagagcagagaattggaaagacagcgcgaagaactagaaagacagggcagagaactcaaaatgaaggacggaaaactcaataggatgaaaaccttgacaatagtttatgagaaattccgtcaatggattgagggtgaagcttcaaactccagtagtggcttcactgagttcagtcactcagaggtagacgattcaatcccaaaggaccaaaaatatcatctcgggaaaggcagttatggcatcgtttacaaggcagaacctcggggcaagactgttgctatgaagattcttgataagagtagctggcaaggagagcgggagttcaagcaagaggtggggatactcaaaaggatcagacacccaaacctggtcattctcctgggagcatgcagtgagaaatttgcactcatgtatgagtttttaccttctggcacccttgaagattgcctcagtaaagaagaacgcaaggaatcattctcatgggaagagagtcagagtggcaaccagcatatgctctgctcttgtattcctccacaataccaagcctaa

SEQ ID NO: 72914 - DNA, 216 bp, Oryza sativa
  unsure (1)..(216): unsure at all n locations
  Clone ID: PAT_MRT4530_73246C.1
gaataragaggaattcctggcstnggggcaatgaactctgacttgttctttgcatcagttatwttggacttggcttctgcgtcaacgggggactaggactacatggccatagccatgcctaggacggagacaaccccgaccgaactacaggcacaggaccaggcctggtggtgcaccgacgaccgaacaactcaggtcaacacaattatagggtgg

SEQ ID NO: 72915 - DNA, 998 bp, Oryza sativa
  Clone ID: PAT_MRT4530_73247C.1
atgccagagtccatagccgagaatcgcagcaacggcttcgtcttcgccgtcgtcgtcgtcgtcgtactcgccgtgctcacgctcatctgcggctcgacgacgtcgccgctgccatgcgccggcagcgccgcggtggtggcggcggcgtcgtgcgtcctcgccgcccggcggatgctcgccgtcctgtcgccgtggttctacgtcggcggcggccccgtgatccgccgcggccacgagtggtcgcccccgttctacatgtacgcgagggcttgcgacgacgatctctccggcgtcgctctgacgttgggagcggcggcgttgctgctggccttggcgctgctgttcttgcggcggcggcgttcggttggtctaaagaaagtcgataaggtggagggaaaatcagagtgaggaagatgtaaaaaaagattattatagcaattaaaagtaatttgtatttaaaacttttatatatttggtcttaacaataataaaacttctatatatttagtcttagcaaaaaaaaaaacataatttaaaactttgggggggggcccggacccaatttcgccttaattggggtggattaccgccccctacctggccgttttttaacactttctaaattggaaaacccttgtgttttcccaatttatttcccttgtttctcttcctctttattccattttttttaatttctcactggtctcttcttttttttccttttctaatcgtttgttattaaattatagtattgttggaccttatcctcggaattgaaattaatttcctcttccgggtgctgtatacttattcgtatgttctgcgctcaacttttatattattcttctcctctttttatttttattgttgcactctatgtttatttttaatcttatagatttatatctttgatataatttattaaatcttgttttgtctttttaatttctattttttttatttcttattgtttatgttttatgtttttgtttttttta

SEQ ID NO: 72916 - DNA, 1254 bp, Oryza sativa
  Clone ID: PAT_MRT4530_73248C.1
tcaacatcccacgtcatgcctctcctccgccggccgccggctgctccccaccgcaccccgatccaccatgacaagcgccttcacctctgccttcgcatccgatacagcagcagcaacccggttcgacacctttgtggcattccgtcgagcaggtgccatgcggctgctgatccggcgccctccaagataccaggaggtggcagcggtgcattggaggctggagttgtaggaatgggaatgacattgacattagatgacctgaaaactgcactattgatgcccaaggagttagcatctgggtttttacttcaatactcggtgatgccactgtcaggatttctcatcagcaagctattaaacttaccatcctattatgctgctggattgatattggtgtcctgttgccctggagattttaaactgagaaaggcaaatactctttgcaggcacagcaagcaacattgttacatatttagcaagttcttaactcctcttctgacatccaaactggcgggacaatatgttgcagtagatccaatgggattgtttgtgtcaacatctcaggttgtcctagcacctgtgctacttggtgctctacttaatcagtactgcaacggtttagttcagttagtttctcccttgatgccattcattgctgtggcaactgtagctgttctttgtggcaatgctatcgcacagaatgcttcagccattctatcatccggtctacaagtggttatgtctgtttgttggttgcatgcatctggctttttctttggttatgttctttctagaacgattggcatcgatatctcttcatcacgaacaatctctattgaggttggcatgcagaattcggtgctgggtgtagttcttggcgagcaagcattttggaaatcctctcacagcagttgccctgtgctgtttctagcgtctgccattcggtgtatggtagccttttagctggaatctggaggtctttgcccccaaatgacaagggccagtaatgcgtccttgaccatgagatgtcaagctgttatggccaccagcagaagccctcttagtctgccatctgctgcaataaacaccatgctttcatgattagcgtccagcttgaaccagataggtgttgtatttatttttcaatctgcttcagtaagcaccatgtcttcatgtttagcgtccagcttgaaccagataggtcttcatttatctcgatcattttgcattcaaatcttgaaaaaaaaaaaaaaa

SEQ ID NO: 72917 - DNA, 540 bp, Oryza sativa
  Clone ID: PAT_MRT4530_73249C.1
atggtggacgcgacctctccaacgatctccatctcaatgcttttgatttcctctctatttggtagtgcaacggttggtccatttgctctcgtcacccgggtctcacctgtggcgtgcctccccatccgcgccgcctggaggagcacgtcaggtaatagaacggtgggaaccagcaggggaatgtcgtgcagcgcgcgctcggcattgaacaacatatccccattcgccctcgtggatctgatcaccgatgcggttgatacgatagatgctggacatgatagactgaatgttcaacaatgtcacgctggggttccccgtcgcgctgtggagatcgccggcgacagggaaggtgcggatatgcttcgggacatcatggatgatgacaaacgaggtgaaatacggttcgacatgctgggcctgtcacgggaagatgtgaaggtgatggtggaggacaacatgcttgtcatccgcggggagcacagtaaggaggagaaggaacggggggctccgacgatgggtggtggaaggagcgcagcatga

SEQ ID NO: 72918 - DNA, 284 bp, Oryza sativa
  unsure (1)..(284): unsure at all n locations
  Clone ID: PAT_MRT4530_7324C.1
ttctttttactngcaaacatgngcaaatttttgagntactgtgcatgcttanccatgagctttccaatcagccattgttgccttgttggagtganactncgaaggagtccccatntgaatgttttgctcctgttattacttgtgcaaactagagggggaatcccatcccaanatatgttgaaagaaagctactgnttcatgatgtntgtgttggctgtaagttggaaatgatgatatcaagtgaaaggaaccaaactgttcaaaaaaaaaaaaaaaanaaaaaa

SEQ ID NO: 72919 - DNA, 654 bp, Oryza sativa
  Clone ID: PAT_MRT4530_73250C.1
atgaccatcgccagccaccaccgcaataggggatttggcctctcacgttggagagatgcctggatcttgccggagaggggggagggagggaggcaccaccaccgttggccaccaccacagggggccgcatttccgttggaggcgaggcaggcgagacgcgccttcgcctccgtattcgccaacagaggtgatgaacagggttactgttttgtagggtctagtcagaccgggctggtgcggccggtcagacccggtcatacaggcgacatgacggcggtcagaccagtgaagaagtggcggtcagaccagcgacggcatcaggcgacttctggagttgatctcggcggttcaattggtgttactacctcggtcagaccgacgacttccaggcggattccctgggtcccgtggcccccaccgacatgttcatcatgctcctcgctgacgcgtagtgcttcgtcgcggcctctggaggaaggggggaggacaccggtttcagctgctgccgctggatccaagcctgtgaattgtgatgagggcgaccatggtcgctgctgggtggaggagaatgggagctcagctcatgctatcatgcaaacaggtaggtgctgtgaggagcagcagcaagatgacctcactctgctgggcccggca

SEQ ID NO: 72920 - DNA, 597 bp, Oryza sativa
  Clone ID: PAT_MRT4530_73251C.1
atgcaccccgcgcgccgcgagagaaacctcggccacctcgaaaacgaccgcgcgcgacgacctcggacccggagacaggcgcagacaatctcccagccgatcggtaggcccgtacctgcgcaacgcaaggccgtccatggggatattgttgagctcggcgcgtggctctggctcacggcgttcggctctcgtctaatttcaagcttggccgcaccgtccctcggcagagacgcgtgtctgctctacaagggacgcggctctacgagctcctcggctaggggaccaggcgaggagctacgctgggtcggccatggccggccactagggaggacgaggagggaggaagcagtggtgcccgggagggcgaggagggaggcagcgacgacggctacttctgcggagggtgaggagggaggcggtggttgcgactactgcggagggcgaggaggcagaggatcaagaagcggcgatcacggcgatgggatcaaagcggcgaagaaaagagaagagaaagggagaagctggtgggtgctcggtgggctaggaatagagaaggaaatacataatcgtggttacgtgggttggggtatctcgtaa

SEQ ID NO: 72921 - DNA, 225 bp, Oryza sativa
  Clone ID: PAT_MRT4530_73252C.1
atggccattcgcgacatcacccgctgcaggagcgcgccggagaggagggagagcgtgtggagggctgcgatggagttggaagttgcagttggaggtagggcggcgtcggagtgcaaattttgtcttattataaagaggttttttactgtccttgaggttgtgcagtaccaaatcctgactgttgatctggcatcatccaacggtggtacagcacctcctcattga

SEQ ID NO: 72922 - DNA, 564 bp, Oryza sativa
  Clone ID: PAT_MRT4530_73253C.1
atggggtcctcctcattactacgcggcaccgtcctcctcgtcgccgccgccgtcgtcctcgcatcggcgcccgtctcgcccggcggcggcggggtggacacggtggcggagtcgtgcaacgccatcagggacttcgtggaggtggcgttctgcgaggcggcgctgcggtcgagcggccctggcgccgccacggccgaccgccacggccacctcctgatcgcggccgacctggccgcggcgcgcggggactcggcgagggacgacgccgtggcggcggcggcggcggcgcgggcgagcggcggcggagagcgggacgggctggaggcgtgcggcatcctgtacgggtcgtcggtggcggcggtgcggctgatgcgcgggtacgcggcggcgcggagctgggaggcggcgaggtcgctgctgtggctgtcggggcaggccgggatggggtgcgcggcggcgctcgactcgccggcgccggggatggacagggccaacgaggatttcagccggctcaccaccatggccaccgcgctgctcaacagcgtcgccgccaccagcggctga

SEQ ID NO: 72923 - DNA, 286 bp, Oryza sativa
  unsure (1)..(286): unsure at all n locations
  Clone ID: PAT_MRT4530_73254C.1
ctagacgtttccgaaatgttttcccctcvnaavcnbattaaaacttgagtctcaccaaacaaggaaagagggttaggtttaggtcgttactacgacgttctgcacaagatctgaagtacgaacctaccaaatacctaggagagtaatctcctctgatgggtgattcgtactctcttaaccaacctttagcgaacggtctcaagtcgtttctcgttagactttaccagttcccacgtaagcbaaaataacctgagttgatgatgcgaagttcgatacgactattact

SEQ ID NO: 72924 - DNA, 363 bp, Oryza sativa
  Clone ID: PAT_MRT4530_73255C.1
atggggagccccgccgctgccgtctttgcagctgcccggctttgccggcggctgctcgggcagcggctaggcggggggaggaggggaaggatggccaaacaggcggcctggcccggcacggcccaggcacagccgtgctcggaccaaaatctgtcgggccgaccaacacaccgggccgtgccatgccggcccatgggctgcacctccggcctaggcacggccaaccagcagtcaggacttgccgtgccgtgccagcccgaaggcacgggcggcggcaagatcgactccagatcgtcgttcctaggcggcgcgcagcgcactggctcgacggttggtccgattcagcgtccaacagggagatag

SEQ ID NO: 72925 - DNA, 575 bp, Oryza sativa
  Clone ID: PAT_MRT4530_73256C.1
tttatttattttttcttttttttttattttttttttttattttttttttttttttttttttttttttttttttttggggggccgccaacacaaaggaaaaggagggaaaaaacgcccagtttaaaaaaaaagggagggaccgggcaaacctttttattttccaggggggacaagcccaaatggaaattacagaccggaaaaaaaaaaggggggcacggacgagcctttagggacaaaaaaaaaaaaaggggggggggaaaatccaggaaaaaattttaaagggaaaggaaagccccgggggggaaaaagcaggcagttaaaaaaaagggggcctaattgggaaaagaaaaaggaaggctaaggcttttggacatggggtgggaaacccttttgaaaggcctggggggggaaaaaaaaccgattttggggcaaagaaggaaaaccagtttttgggcagataggaggaatataaggagcactaattttatgggggggggaaacaaaattttccaaataaaccttataactcaaggtcattttagcaggacagaatgggaaaacaagccttttttgcc

SEQ ID NO: 72926 - DNA, 351 bp, Oryza sativa
  Clone ID: PAT_MRT4530_73257C.1
acggcgggagcaggagctggctgcggcagggggagggggggcggcagcgggaacggccgagggcatggggggcgacatggcgggccccgtggacggcgttccgggggcgctgtacagcggcagggagctgccgggcgagcccccgtagtacgcctgctccgagcctcgtgaaccgcagtccgaagatcgaccgcacctttcgctcgttccgcgcagggcgtggccagtagcatagctggaactactgcgaattcacaacgaacaccgtgaagcacggcaggactatgattctatagttgccagatttgtttcgcgtagaggcagatgcaccccgtgatgaacaggcttcac

SEQ ID NO: 72927 - DNA, 393 bp, Oryza sativa
  Clone ID: PAT_MRT4530_73258C.1
atgctggtgacggtaccgccgctccgactccggtgccacccaccggcacccctgttgcctggccaccgcgccacccacttggcgtttagggctccacagcggcaccccggctacctggcagctcgcagccgcggcgccctgggctgcctctctggcaggcctcgccaccgccgagccgccgtcgccgctcccagctgccccgcgctgcctcgtgctcgggcaagccgagccgccgccgctactccccgccgtcgcgccagatccaggcatagggtggccagatctggcctcgagggcaccggatccgccacctccccacaccgccccgccgtctccgtccgaccgcagtggggggtggacttggtcggcttctccccgcctacatcgcgctga

SEQ ID NO: 72928 - DNA, 1512 bp, Oryza sativa
  Clone ID: PAT_MRT4530_73259C.1
atgagtgtgtgcacacgcaggctgttgatcccgatgagtgtgtgcacacgtgttgggagagtaggcctccgaaaccacgaactgttgcgacgtttgcacggacgggcgggcgatcaggtttttgggagcgcaaggtgcgactactcactgttcgtcaacgtctacttcgtcttcaccaacatgtcaaacaatggagacaacaacaacactggagacaaggagaaggaggcttccgtcaacaacaacagaggcaatactgcctcaaactccagcggaggaccattcttggggtataaccttcttacattatttcaattagaagttttactgttaatgttcatcgcaatgtcaacattgcgttattatgtgattgttgatgcttattctacgttaagcatgctcatgttgattacattcaccactatcactagatcaaatcccattgaattatatttggtgacgatgaaccgccggtttcttcatgtgttggtcaaagacttcaccaatcatccctgcccctacgcactgcacagcatcaacgcttcaggccttttctatccagcagcagtgaggccgaatggatcaggagaaggtacaaaactagaggaagactacctgcctgaccgcactgtgtccttccatcatcccagcggcagtggaggcagcatgcagttcatgtctctcggccagagcaacaacgccattatcggtgttgacaatgagtgccgtaccatcctttacaacaccgagtggcactccatacgcacaatgcccagtatgcacggttgcaaatggtctcctccggtatcacttgcagtgaacaacagcctgtacgtcatggagttgtatcctcggcaagatggccatgtctcctttgaggtgctcgcctacggcagccagcatgcatacggcagccagcccgtctatggcaggatgcccagcaagcccagcagagcgtaccgggaggactggtactggcgctctctcccaccacctccctatgtgcactatcaaggatatgaaaaggacgaggcgccgccgggctacgacatttccgtcgaacacccttgcaagatcacggcgactgcggtggtcggtggcggctccggctcgagcatctggatatcgacagccggtgtcggtactttcgcctttgacacggcgaatgatacatggaccaagcggggcgattgggctctgccgttccgtggcaacgctgagtacgtcgccgagcacggcctctggttcggcctctcaagtcagggtgatgacttgttctgtgcctccgatatcgcagcagcatcagtatcaccaccggtggtgctggacgcgtgggggttggatcatctaggggtgacaacgtcgcgcaagtgctaccatagcaagtcctacctggtgtacctgggcaatggcaggttctgcgtcggcaggttgttccatgttgaggagggtgacacggaaacggagaggtttgtggtgtttgatgggcgtggaggtggaggagcgaagtga

SEQ ID NO: 72929 - DNA, 174 bp, Oryza sativa
  Clone ID: PAT_MRT4530_7325C.1
atgtgtggctgctgttgtggtgccgacggcgaggggcaagttcttgtcgtctccggtgcacgggcacgacaacgaagctcgtgctcctgtgggtgccagaaccgccgagcaaggccggcatgctggcggccggcaccgacgacgctggtggccacgaaggtagatgtcgactga

SEQ ID NO: 72930 - DNA, 894 bp, Oryza sativa
  Clone ID: PAT_MRT4530_73260C.1
atggcgggaatacatgacgtgttccatgtgtcgcagttgaagaaatgtttgcgtgttcctacggaggaagcagatcctgagcgtatagagattcaagaagatttaacttatgttgagaagccagtcagaatttgtgagcgccgccgccacgttgccctagcgccgccgccgccgacgccgttccagccgcgccgcgccgccgctatagccgtcaccgccgccttccgtcgccaccaccgggttcgtgaggaagaggagcaccccgtccgccccttcgcagccgctgaagaccgtcagagcgctgtcgtcgacgttgacccgagccgagccgccgtcggacctcgtcgccggccgtcgttcgtcgtcgtccgtcgtagtttcttgcgccgactgagaagcggcgagaagtccgtgggggtcgctggggagtccattacctctggttttgaaggggagagtacgatccaggaacggtgcactgtgtcgccgccaccggatctgggcgcggggagggcggcgctgctcccagccctgccggccaccgcctcctcccgctcccggcacacgtcgtcggcccgctcccggccgccgccttgccgccggtgtcgtcgcgcgcacgccaattcaggccaccacctcgtcgtcgtcgtcggccgcgtgcacgctgctccgagccgccgcctcgccgtcgtcgtcatcgtcgtcggccgtgtgcacgctgctcccggccgctacctcgccattgtcgtcgtcgtcggccgcgcgcacgctgctcccagccgcctccccacgtccgcccgccgctgccgtgagcccgccgcgagccctctgcgcccgctagccaccgtcgacccctccgccgagagccgcccggaggagaggaggagaaggtga

SEQ ID NO: 72931 - DNA, 445 bp, Oryza sativa
  Clone ID: PAT_MRT4530_73261C.1
ggcacaaaaaaaaagttctttcccgccgagcaaggggggtggaggaccgttttaaaaacccgaaaacaatgggggaattccccgcaggagttcccaaaaaaaaaaagggggaaaaaacctttgggaatcctacccaaaacgggggggttcaaaggatcgggggggggctaagcaggaaaaaactaaaactctcaactcaattacaaacattttttttttttacgggggtaattttacgggttccaaaattattcacgggggaatcaaattcaggagcgggggggaaaaaaacatagggtggggaaatttgctgggacttaaagggggggaaaccgggcgaatcgccccctcttggttaacaaggggaaactggcaggggcttcaagcttgaaaaggcaaacagctccatgaatcttggaagggggctcctcgccttcgcaggggg

SEQ ID NO: 72932 - DNA, 623 bp, Oryza sativa
  Clone ID: PAT_MRT4530_73262C.1
cccacgcgtccggatcgacgacttctctccgcggcgcaccacggattagccaaaaataagcgagagcgagtacgagagagattgagagagagagtcagagagagagagaagaaactgctctcgagatctcaccggcgaggcggggcgagatctggtaagagagaaggagggagggaggccgagagagcgagatgcacgacttctgcttcacgatcccctacggcttcgccgtcctggccggcggcgtgctgggctacgcccgccgcggcagcaccgcctccctggccggcggcgcgggcgccggcgcgctcctcctcctcgcgggcttcgtcagcctcaagaccttcgagaagcgccgcaactcctacctcgccctcgccctcgagacccttctaaatttgttgctagagagatcatctatgcatgttgtcgtatctttattgacaatggaaagcagtaaaatatgtgcactagctttgacttatgttatggggcagagataccttgagacttcaaagataatgccagctggtgtcgttgctggcctcagtgctttgatgtctgcgttctacctgttcaaaattgcaactggtggcaaccatatcccaccgaagaaagagtga

SEQ ID NO: 72933 - DNA, 1586 bp, Oryza sativa
  Clone ID: PAT_MRT4530_73263C.1
atgattaggtgacactatagaagagctatgacgtccccgtgcccgcgtcgccagccggccccctccaccgcggccgcgcaatagaaaaccgcctccctccctccattatccaatttatccactccctacaacacgacgacgacggcgacgacgagtactacgatgatgttctaggtagaccgatcgagctggttgacgacgccattttgtgttcttggatttattggatgagatcgagctgctgcattgtcatggcgggaaggtttcttctcggcggccgggagatcgtcaggacgggggatgatggcccgttggatgatggtcctgccgtggcgccggcggcggggtcgtcggcgccggcgacgtctgcggcggcggcgagggtgacgccggcggtgctgttcatcacggtggtgctggcggtggtgctgctggcgtcggggctgctgcacgtgctgcggcggctgttcctcaagagccaccgcgccaacgccagcgccgaggcggtggagcgccagctgcagcagctcttcagcctccacgaggacggcgccggcggcgcggggccggggctcgatcaggccgccatcgacgcgctgccggcgttcacctacgccgagctgctcgccggcgccgccgcgcccaatggcggcggcgggaacgggaagaggcagttcgactgcgccgtctgcctctgcgagttcgacggcggcgaccgcctccgcctcctcccgctctgcggccacgccttccacgccgcctgcatcgacacctggctccgctccagctccacctgcccgctctgccgcgccgcgctctccgcccgcgccctcgccgccctcgccgccgccgccgcggacacccccgccgccgcgcaacaccgccagcccgacgtcgaggaccagaagctggaccaccaccacccgccgccgccgtccgacgagcccgcgaccagcttcgtgctctccgtcaggctcggccggttcaagaacacgcagcgcagcgacggcgacgccgacgcgagcggcggcggcagccgctgcatcgacgcgcggcggtgctactccatgggctcgtaccagtacgtgctcgccgacgacaacctgctgatctccgtgcactggcgccccggcgatggcattagcgccgccaccgccgccgccgccgcgggcgccaatgtcgccacggcgcgcactggcattaagcagggcggcggcggcggaggcggcaagaaggtgttcggccgaggcgacagcttctcgatgtccaagatctggcagtggcgcggcggcgacaggaggctcccagtcctccactccgacgcctcgccgccggcggacgacggcttgccgtgggcgacggcggcggcggcgagcacgcgaacgaggcaagaaagcgacacctgatagatacagctaccaacacacacacacacacacacacacacacacacacacacacacacacacacacacacacacaaagatgtatgctttcttgtgccttttgttagtggttagcaataagcatttcttgataatagagttttgctgataattaattaatcaaatcacctatgtataatc

SEQ ID NO: 72934 - DNA, 423 bp, Oryza sativa
  Clone ID: PAT_MRT4530_73264C.1
aagctttttttttttggcagagcaacagatagtaaatttatacacaatgctgccatccatggactagtcccaactttttaacaaccctaacagaacaaccatttgctgaggaccaacatacacttcttccaccacacaaaccagtacaagttctaaacagagacaaacaacattgtcagcaattagctagctcttcttcttctctcctttagattcggcgaaccaactcttatgccacaccttccagcacatgggtgaatacaaataaatacacaagtaaaacccccccaaaacaaccaagccccatgtataccttgtataagatgttaaaaaagtttttaactggcccaaatccggtccaatctatccacgctcttccttccacagtcgaagcttaatctgttcttctttggcctctcaaag

SEQ ID NO: 72935 - DNA, 1089 bp, Oryza sativa
  Clone ID: PAT_MRT4530_73265C.1
gcacgaggcctcttcggtccttcctgccgccgccgccgcctctcgccgtcgccggcggcttctacctctcgtttgcccttctggtgcgcccgatctcttgcatagcctacgacaatggccacctccgcctacgcagccaccgtcgccggggaagcagcggcgggggcggcgtcgccgtcccgtcgtgtccttgccggtggccgacctcctccgccctgcatctccttcctctccaaatcgccgtcctggtgcgcctcgatctctctccctccagggccccgccgcgctgccgccgcggccgaggagagggtggaggaggaggagccgacctgggtggagctggagccgatcggcagcgagcagcagctggagcgtgccctcgcggaggcgcagcctcgcggcccccccatcgtccttctctggatggcaagctggtgcaggaagtgtatatatttgaagcctaaactagagaatttggcagcagaatgctatccaagaattcggttccgttctgtcgatgtcaatgctgttcctcaaaagcttgtcaatcgtgcaggagtaacaaagatgccttcaatacagctgtggagtgactctcaaaaacaggctgaggtgattggtggacacaaatcctggctagtaattgacgatgttcggaggatgatcgatcaggaggaatgatccattatgtcctttagtgcaaatgatgatgtgatgatgtccaacaggaagaatctttcagtatagcaaatggagaaatcagaaatcaaaagccagtatgaactcctttcaagagatcgagccatatatttaagtatcgaatcgacgaaattactacctctacagtcaaataggcactactacacaaggcagcatttcaatcgtgttctctccaaatttggggtcgacagaatttcacaacctgtggctgcattcctgtggtgtccttgatgtatccatgtgtcttgtttggaaatctatgcaattaaaggcaaagacttcttgctcatgtactgtcacagtacgggcaagcatttaaattagtcattagatgacaataatatttagtcaatgagccttcagagggcg

SEQ ID NO: 72936 - DNA, 477 bp, Oryza sativa
  Clone ID: PAT_MRT4530_73266C.1
tcgtgatctacccttacccgcgaccagattccccaatcccccggaggaggactaagacgaagccgaccatgaggaggaggcagcggcggccacgatgctgacggttgcggggaggaggctctcgatcgtcctctgatggcgccccgccgtttttgtagcggaggtcgacggggggccgaggtgtgtgccgctcgctgggaagaacgacgactacgacaactacggcaacggtcgggtccagccatggttctccatcgagtccccgttcttcgacgtcggcagatggttcttttcatctgaaacacttgttccaaggaaccataatactgtcttggctgaactacctgcaaccgttgctgctctgaagaatcctaacccacaggtggagttcgatgagtacaaccatgagaggcctgcgcctggggatcccagcaagcgtgcattagcttactttgttctaggagaacggagattcat

SEQ ID NO: 72937 - DNA, 392 bp, Oryza sativa
  Clone ID: PAT_MRT4530_73267C.1
aacaaaaaactttgggtatagactagcataccaaagttttaacccaacaaagttcacaagggttacttcagccaaaacatgaaaaaccttgaacaccttaagctaccctaaataggaacagccaacaggccaacaacaaggggccatcaaaattcaaaaaaaaagctgcagctgggcatggtcattagccattatcagtttcaccgaaaaaagtagcagccgagtaaacagagggcatgggcataccccccatgcctggcaagtaacaacagcgtatgggactatgtacaaatagtgggagtttaatcctcaagggataccggaaaatgtgctttagggtcctaacaagctcccactttttcaacgggagggcaccccgatgattttcttta

SEQ ID NO: 72938 - DNA, 384 bp, Oryza sativa
  Clone ID: PAT_MRT4530_73268C.1
atggcgggtcggcggtggccaacggtcgtagagggcaaggaggaggtgctcagcatcgaggagggcaaggaggcggccgtcgtcgtggagaccgaggagttggcggcagttgtcgttgagggaggggaggaggcgctcgggggcggacaggaggtgctcagcatcggggaggcggccattgtcgtggagaccaaggaggcagccatcgtcgtcgaggccaaggagaaggcggcggtagttgtcgagggcaaggagacgttttcaaccattgcttttggaccattaaaggtagatgttaaggagtgcagacaggagccgatctacaacgggagctatggggtcttgagcccccactaccggccccctcctgttagtcctttctga

SEQ ID NO: 72939 - DNA, 322 bp, Oryza sativa
  Clone ID: PAT_MRT4530_73269C.1
aaaaacggaaacattgggcaccctggctcgctcatttgccaaacttacggggaagcaaaattaccaaccccttgttttcccccagattggttgccttattgcaaaatgggaatcacctatttacaaaacctaactttgggcctatacatgctagagaacatactgaactatggagtatccatagcaggctttgggggtaaaattgagaagcaaaattgaatatagcaaaactgggtgaatttggtgcggagcggtttcgtttccaacagggggaaaaagctgggcaggttaccaccggggccgccgccccaccaccgggggc

SEQ ID NO: 72940 - DNA, 4356 bp, Oryza sativa
  Clone ID: PAT_MRT4530_7326C.1
atggctgatgagtacaaggcgctggtcgacaacggcacttggcgtctcgttcctcgcccccctagggccaacattgtgatgggcaagtggatattcaagcacaagttccactctgacggctctcttgcccgtcacaaggctcgttgggtggtccgtggttactcgcagcagcacggcatcgactacgacgagacatttagcccggttgtcaagtcggccacaatatgggttgttctcagcatcgctgcctcccgtgcttggcccattcatcaactggatgtgaagaacgtctttcttcatggtcacctaaaggagaccgtgtactgtcagcaaccctccaagtttgttgaccctgctgcccctgatgttgtctgtctattgcagaagtccctgtatggtggagatcgtattgcctatcttctgttgtacgtcgacgacatcatcctcactgctttgaccacatcactacttcagcagcttatggcacgcctccactccgagttcgccatgacagaccttggtgacctccacttcttcctcggcatctccgtgacgcgctcctctgccggcctcttcctttcacagcgccagtacgttgtggatcttcttcagcgggctggcatggccgagtgtcactctacctcgacaccagtggacacccgtgccaagctctccgccaccgacggcctgcccgtcgccgacccttcggagtataggagcatcgctggtactctacagtacctcacgttgattcgaccggatttgacatatgccgttcaacaggtctgcctcttcatgcatgacccacgggagccccatctcgccttggtcaagcgtattctccggtacgtgaagggcagtctctccaccagcctccacatcggctccagcatgattcagtccctgacggcatactccgatgcggattgggcgggttgtcctgattctcgtcgttctacgtccggctactgtgtcttccttggtgacaatctggtttcttggtcctccaagcgccagactactgtctcccgttacagtgctgcggcggagtaccgtgccgtagctcatgctgtcgccgagtgctgttggctgcggcaattgctccaggaacttcatgtcccgattacttcggctactattgtctactgtgacaatgtcagtgctgtttatatgacagcgaatcctatgcatcatcgtcggacgaagcatatcaaggttgacatccattttgtccgtgaaaaggtggctttaggacaagtacggtgggggatgggagggtgcaagggggacaccccactgaaggctcagcttctccccttgccggcggcgagaaatccggtggcctcaacaatcaaagcctctaacactccactacccaccccaccaaccgttgccgctgctactcgtcccaccttcaccacccgctgggtcaagaaacgcctgcaaactctaacagccctcccatgccttccaaaagctcccttccctagctctctaccggctaaccttgcgcctctaccactgagtgatgtcattgctcttctggaggatagcctaaacgtcagccatgagctgcctgctaccgaagaagcggtgccggtatctcctcctagtctagttgctgctgatgtcgaccccgtcgtgggccctctcgatgagattgtcgtcgctgctgctgctgtcgatgagattgccgctgctgttgatgtcgctggggacgcctcagttgctatctctaccacttctggagttgctgctgcgcccactccggccatccctgctagcgtggccgtggctgcaatagtggccgcagtggtcgccgccctcgacatctcgtcccgggtgaactccccatctggtcaccccaagctccatcggtatagcacatcgtttccggccaaccaaagaacaaggtgtggtacattgtcggtgctcggccgcttccggaagcgatatgaagacagtaaagccagatttgttcaggatctgacaaaactcaccgagctggacatcacagatttccctccagaacttctgttccctggtagaatcggaacaaccctgattcgtatgggctttcatcaacttggaaaggttttccgtccctacctcttagtccgcttccaagatggaagcgtttgcatcgctaagtttcagcaagccccgggggatccctcgccccttgctggccgcctggcccagcagcgaacatggcatcggcgccaacacaacaaccacggtggtggagaagggtctgacttaagggccagcatacaaagaagcgagcaaagaaaaatgattggcctccatgagatccgtgatctgctgtcatcgctgtttgtcatgctgaaccagaagaagtatatcctgtttcggattgagttcctggtggtactggtcacggtgttgttccttgtgatgttcatcatggacatttttcgtcgccacatccacaatgcgaccatgaaagccatctttaccatcctcgatgctgtctctgactccatagtcatatacctgctgggagctatgaaaactgcacctttcaagaatcaactgtttcccgtctgggcccttgtgcttgtcaattttcggtacagtgtcgacttcatctctggttatggtgttcctgaccgtcgagggcgaaggttcacagagtggaggaatgtggtgaagcttcttggatcagcattcttgaatttgtcgcgtggctccaaatttgggctaccactctggtgtctttgggctctccagatgctgaggagctggtacagattccattcacgtactctggccatcaattccaactggcatggcaggagttcagagctcgtttcagagtacatgcgtgaagctaacaactggaaacctgaggaatgcaacccaaagacaatggaaggcttcaagtacttagtctatggagaaagggtcaagttacagaaacctcggcacctgctatgctcctgtgacaacattcccagccccaacaattcagggaacatcattcaaggcaaggaccaaaaggatctgtccctcgccttcgcattgtccaggctactccgttgcaggcttgaggatgtgaagctgcaaaggggcacctttcgcataaatataaatctagtcaagaggagaatcattgaagagaaggatgccaatcatgcctttgggatcatggagcacttgcttgcatccatggtgacattttgtgttatatgctggctttccattgacatccgtaaggtctataagcccccggagggtgagctggttcatctgaagcagggtgtcaatgtggacatgatcatcacatgggtattcatgttgttcatgctgttcaaggagatctgggagatggttacttacttactgtcagattggacaagattactccttgtgtgcatgtatgcgcgatgggatgatgagcgtaccagaaaccgctgcatggagaacctaatattatccttcttcaaatctaacattattgctaacaggtggcatggacaaatcgatcaatatgtcttcctggagtcatatgacgacagacccagaatttggaatctgattcacaagatatctacaggaatggttccaaagaaggacaatggggcaaaactcagcaaccccattgatattccagaatgtgtcaaacatgccatcctggagaaactcaactctatagaccttacggccggccatctgcccaaggtggttatctcactgcttgatgataaaaggaaaagttaccgatgggcatgctctgagcttcagacatgcacccacactattcttgtgtggcacatagctaccagcatctgtgagattaagcttgctaaaaacgaaggtgttgatttaagcaaaccaggatttttgtgctatctattatcgtgcttcacaaattgcttcagttccagcttgtatcttatggatgaaaagaaattgcccggtaagctgcaggaaagatatatcatcgcgaatagcttgtcgcgatactgtgcatatctactggtttcaaagcctgacctgatccctgacagcttttttgtgcccaatatgatttttcaagaagccgtgacacttgctcacgatgatattcttaaaggctgtgagtctctacaggaaaggtatgataaattgatgcctaaagaaaagaacaatacccaaaatgttggggaagaaaacataaatgaagatgttctgcgacaaggggcaaaattggctgataaactgatgaaagaggagatgaagactgttgggagatcctatctggggtatggacagaattacttatacacctcgcccctagttggaatgcatcagcacataaaaaatgcctcgagtcaggaggggagttcataa

SEQ ID NO: 72941 - DNA, 549 bp, Oryza sativa
  Clone ID: PAT_MRT4530_73270C.1
atggcaactcaccagcagaagatgcagatgccgccgtcgtccaaggacgacgagccggcggcggcaacacgcccgccaccgccgaagcgggaggagcgcgccgagaaggcgccggagatggagaagaaggtggtcgtcaccgtcgtgaacggcgaggaggaggacgacgacagtgggtccacggacaacgggcgccgccgctgcgtctgctccgccgccggccagccggccgggcacttccggtccggcgagatggtgtccccggacttgatccgcaacgttgtgggcatcgttggcaatgccatctcctttggcctcttcctctcgccggtgctcaccttctggcggatcatcaaggagaaggacatgaaatactttaaggcggacccgtacttggccacgctgctcaactgcatgctctgggtcttctatggtctccccatcgtccatcccaacagcatcctcgtcgttaccatcaacggcattggcctcgtcatcgaggccgtctacctcaccatcttcttcctcttctccaacaagaagaactag

SEQ ID NO: 72942 - DNA, 1242 bp, Oryza sativa
  Clone ID: PAT_MRT4530_73271C.1
atgtcgtccgaaaccgccgcttcgccgccgccgccgccgccgaatccaccggccgccgactccacccattccagccccgcctccatgaccgacgagacgcacggcgcaggagcccatcccgacgagtcccaaccgcatcgctcctcatcgtcgtcctcctcccctcccgtggccgtcgacggcgagacgcgcgtcccactcccagtccggtccctgccccaacctagccacccatcgccgcctccttcgggggaggacgaggatgacgtcgtcatcaccggccaaatcgcagtgggtgacgccgcgggggcggcgatggaggagcgggtgaaggggccctggtcctcggatgaggacacgctgctgagcaatctggtggagaaactcgggccgaggaactggacgctgatagcgcgcgggatacccgggcgctccggcaagtcctgccgcctccgctggtgtaaccaactcgacccccaagtcaagcgcaagcccttcactgaggaggaagaccgcattataatggctgctcatgcaatccatggaaacaagtgggcggctattgcaaagcttttggttgggagaaccgataatgcaatcaagaatcactggaactctaccctgaggcgtcggcactgcactggtggccgatgcacacaaggtggtgttatgaagagagctattccggagaggcctaggtcggtttcagaagaaccttggccattgggcaatcttagttccttaaatgttagggaagcaatggaagctcccgcacaaacagtatctgaaagttatgttggggcatggcaaatcggggatcagagttgcaaaactgaagttgttgatccaccttatcttgcccgaccagttgcaaaggttggtgcattcaaaccatacaatgtaggacctgctcaatcatcacaaaaggaaatgctgagctttgccaccaagtttgactcaaaccttcatcctttcaagcctgaaaatggggtctgcaagtttgttgatcctacaagttttgctgctgaggtgccaaataaatgtgggcatggctgctgcagttctcatgggcaacttcgtaagaactcattgctgggtcccgagtttaatgagtttgaagatcatccaccaatttcagatagtagttttgcttcgttggtgtcagaaattagcagcattgcctggatgaaaagtggtttgcaaagcagtgacaccttagcgcggtctgttccaccagcttaa

SEQ ID NO: 72943 - DNA, 1776 bp, Oryza sativa
  Clone ID: PAT_MRT4530_73272C.1
gattttttgctggttaatgaaaaaaatctcaaactgacaaacggaatctggaactaattagcatgggaaaccaaaatacacgataattcatatgcaatctactcagcaaggagtaatgtgaacaagcaatatgccgaaatcaagttttcctctagaggttggcgggagtacagagttcggattctacatttccgcataaatcaatccagtgccctaaagaagtcttcgcactttagtaccaagttatcagagatccagcggaatgactaaggacaaatacatcgtcgtacagcaagagatcttaggtgatgtatctttcctgctgctcctgaaggagacgcgccgacgatttagcatccaagtacagaccactgacttcctcaagatcggccttgctgatcttttctctcccattagcctttgcaactacgctggcaggtgatagcagctgaatagcatgcctcaaagatgtctgttgtccgatctctcctaaaaatgcaagactttcttcatcgatctcaatctcttctacctgtgctctaatagcaagaatctggatcatctcagtgggaccgtatgtttctgttcgaataatcaccaatcgatctagaagatcaactggtataccatgcggacttgtcatatcagttcctcttacattacatattcctctatttgtcgcaagtatcacaattggtgataatgggctctccagagcacgattaagataagagaagcattcaatatctagcatgtggacctcatcaatgaacagaacaccaggtacaagctctgcaattccttcatcaatatatctgttgaccaccttattgatttcttgccgtagcttctcagtgatttcagtcttccgtggcttcatcatctgccccataagggacaaaatatcttggcctccttgtggttgagcatttgcagcgtcaaggtcatgaagcgtaacatcctgcactatttccttcttcttatggacctcccctttggggatcggaacatactcctcagcttcaagatcgtattctgtagcaaaagaatcacatctaccaactcttttcactgcaccactattagcttcaatgtatataacatcacccactgccaccttttcctttattaaagcatcgtaaattgtaggatctaacttcagctgcttagtcccttttacagtcttcagacctatgattacatggctaatgctttttccatatccacttgttgtactctcagcttcttctggcgaaagttcagtaacctctccttcataaacctctttattttcttttatacgcaagcctatagctcgacggaaattttccatcagcacctcagttttcttgacctctgaggaatacacttctgatcccaccataggacagaaggggaccttactacctagctcctgggagatgccgagagcgagggccgtcttgccggtggcgggcgggccggcgaggagcagcgcgcggccggccatcttcttctggcggatcatgtcgaccaccaggccggccgcctcccgcgccgccgcctgccccacgaaccccgaagccagccctatcgccgccccattggcgtcgaggccgaggcccttgatgtgggtgtgggtggcgatgcgctgcttcttcgccgccgactgcacctcctcgatcctcatcgccgccgccgagcacgcgccgccgccgccgctgcttgtctctccgaccctctcccgccgcaacaatttggctcgcgcccggggatccactagtttagacgcccccc

SEQ ID NO: 72944 - DNA, 1310 bp, Oryza sativa
  unsure (1)..(1310): unsure at all n locations
  Clone ID: PAT_MRT4530_73273C.1
ccgtgccggcccccaaggcgcccgcgccggcccccaaggtcgccgcgccggctccggtccccaaggccgccgtcaccccggcgcccacaccggccgccgttcgtgccggctcccgactccgctgtgtctcccagcctcatctatgtctttttgttctcctgttttttttcttttttttttttttatcttttgttttttttttctgtgttttctatattttttcttctttttcctctttgtttcgttttttcttttttattgggtttttgtttatatttctaattttttattgtttttctcagttctttttgctatttttttttatttgtcatttattcttatcctctttgttgttttttttgtacttctacttttatattaccttccgacttgtctcctttttctctgcgtcgttctccttttgcttctcttctcttgtgtgtttgtcttagtagtatggttatttgtgttcattttttgttttcgttatttgtctcttatctctcttcactgtttgtatctcgttgcacatgtctctgctgttttgantttcttggtttctgtcttttgttggattagtgttttacttctattctctgcttttcatattatcgttgttctattctgttttgtatatttactacagcacttatttcgtgcttagtntcactgtctaatcgtgctattgtttgtcatactttttagtatgttttcattttcatgcatgtatgttcgttctattaattgttactttttctctcttttctctctcctgttgctttgtatgtcgtgtttgcgttccttgtgccttgctgattattcctttatgtagtgcgtagttgtctgttgtttttagctgctttcgtctatgtagatttattatatctctccttatattgtttactgtgcttctctatacttcgtgttgctctgtgttttgtatatctctatatgtcttctccctaggtatcattatttcttgttgattcttctctttttgtcttcttgtattctctgatacttcttgttcttttccatctttgcatatcattcttcacgttctttgcttccgttctccagtatcctttgtgttgttttgtttgtgttctggtgtgtttttgcattctattctttgactgtggctatttttatttgtatgtagcgagtgtttgtagttggttctcgttgttccttgcttttttctgtgttcgtctgctatgtagttgtcttctctgtttttcttttgcgattccatttttcattgttggtcgtaggtattgtgtattttgatggtccttctactttatttt

SEQ ID NO: 72945 - DNA, 206 bp, Oryza sativa
  Clone ID: PAT_MRT4530_73274C.1
tacttttttttttcttcggtggtgttgggagtggacaaggtagagtgagtcactattaacccccatgaacagcccagagcacacttctagtaaacatcacaaccctagtcgattcttgcgctgaccccacaattggatataacacaattgagcgtacaaccctcttatacaataacacttgttcatatatacaaccattcaaaaac

SEQ ID NO: 72946 - DNA, 630 bp, Oryza sativa
  Clone ID: PAT_MRT4530_73275C.1
ctgcaggaattcggcacgaggatgctgcaagcatttgcgtgtgctgtgcatgctgcaacccaagggcagggactccccagggtgggatgcccctagcagcaaccacagcagtgggtgccaccccctgtgcagcagcaccctcagggccccatgcagtgcatgtgcattgcagcacacctggctgggagagctgttgcacgtcaagtagcaccacttattggcacatgacggggctcagaagcaatgggcaggccgcctcacatttacaccctgcccatatggcatggcatgcagcgccgctgcgctgtacacctggtgtgctttgtagcaacctgggtggcacccagctagagggtcataaacggggctatgcggccaggcagcagctgctggccgtgtctgtggcgtgggtagtgtgtcggctgcatgtggccccggggctgctgcagctagctgctgtgtggtatgcaggtgcgaggcaggacatgccatgcatgcagtgcatgtcctgcccccttccccatctacctcccagctgtcgctgctggtcggtatcgcgtatggcgcatgtgcatgtgtgcgcatgttgtggcggtgatgaccagtgatgcaacttaataagttgccatt

SEQ ID NO: 72947 - DNA, 353 bp, Oryza sativa
  Clone ID: PAT_MRT4530_73276C.1
caaagaaacagaagcaaacaccaaccgggttgttggaacatagtaagcgcgcttagtgagccttcttctctccgtatttaatctatgaaaatcattctaggttcagatatagatgttcattaatttaattgaatattttagtggatacatggctccggagtatgctatggaaggcattttctcggttaagtctgatgtgtttagctttggagtcttgcttctagagattgtaagtggaattcgaaacgctggatttcaccaacgtgggaactcccttaacctcctttgttatgcatgggaactatggaaagaaggaaggtggtccgagctcgctgatccatccatatataacg

SEQ ID NO: 72948 - DNA, 429 bp, Oryza sativa
  Clone ID: PAT_MRT4530_73277C.1
atgcgacggtcttggcgaggccgtaccccagggcatcctcgtcctggcctcgccgccctcgacctcgattcgccctggatctcgatgccgagtttggatctggagatgcggggtcgcatcctcccgctgtcgctagccgattcgccttcttgccagaccatcaccactcttctcgtgactgcgagagggaaactacgtaagaacatgagaagattatgccagtggtggtggtgccactggaatggcatcctggtcattatcctcgacatgtctgccgtcaacgcacgtcgccagcggccaaacacaaagagcaggggtgacgcagagatgtcgacccaggacgagcacaccacaattgatgaccggcttcggtggcaggcgatgccaaaaatcttcacgactgatgccctctggactgataatttttga

SEQ ID NO: 72949 - DNA, 1044 bp, Oryza sativa
  Clone ID: PAT_MRT4530_73278C.1
atggctctcttcgccgccgctcgccgcgccgccacctccaccctccccctcctccgcgcctccgcctccgccgcggggaccacccgcggcgccgccgccctgctccgccccctggccgccgccgccgcggcgcggccgcagcctcgctcgatgcccttctcgtcggccccctccacgaggcccagctcagatggcgagctcctccgcatcatcgacgccgagatcaagttcgccgaggagagcgacgaccacgaccgggttgaggagattcctgacaacttcccctttaaaattagtgatgaaaagggctttaattcaattactctcacaagaacttaccagggtgagaatattgaggttctagtttccatgcccagtcttgtgactggcgatgaacctgaccgtgagaatgaggctgatgaggacagaaacgaggatgatcaggaggaagaaactcagaaggccccaaaatctagcattcctctaactgtcaccatctcgaagggagaagagggaccaagccttgaattcatctgcactgcctatcctgatgagatcctcatcgatgccttgtctgtgatgccatcagagagtggggaagatgaaatgatcacgtatgagggccctgatttcaatgaccttgatgaaaacctgcaaagggcattccacaagtacctggagatgcgcgggattacgcccatggccacaaacttcctacacgagtacatgatcaacaaggacagccgagaatacctcatctggctgaggcggctgaaggattttgttaggaattaatgattaacacaatcatttccttgccataagattagttttgagggctgtgaaccgctcctttctataagtatacatggaccatgaattgtgaatgtatgcttatttaggcgtttaaggtcgttgtcgtgaccaagttttttggcagtatcataatggctcatgagtcatgaacctggatgttggaaccaatggaaatgcttcagttaggatattctgtgattttcatctacactgatgttgctttgtttc

SEQ ID NO: 72950 - DNA, 381 bp, Oryza sativa
  Clone ID: PAT_MRT4530_73279C.1
atggccgagggggttgccgccttcgccgttgcccacgcccgtcgtcgacgcagtcaccagatccgccgccagccctcgatgttgccgcagttgccaccctccgtcgcggcagtcgcttctgagggtgccgccggcagattcgtgcggggaccgccagatcccacgccccccaccgccggagggtgccccacgcacgaggggtgcggagaatggatgaggctgccgcacgccagcgcccacacccctcggcaccctcgcccgccaccgccgccgtcgccaccaccgcggccagtgctcgtcgtcgagagggaggagaggggagaagaggagccgggagtggaagagtgggtgtggagtgggagagaggagaggagtgggtga

SEQ ID NO: 72951 - DNA, 185 bp, Oryza sativa
  unsure (1)..(185): unsure at all n locations
  Clone ID: PAT_MRT4530_7327C.1
tcagnccatntttaanatcnagttctgaatggaaacncagggcnagtgctagggaacaaattgaatagctgntgtagcaggacaatgtaattgtgcattatagtncagtccgctaacttgatgccttatgtantttaatgagacagctgcacatttgcagncaatttttggtggaatactncatt

SEQ ID NO: 72952 - DNA, 255 bp, Oryza sativa
  Clone ID: PAT_MRT4530_73280C.1
atggctagacaactcgactaccaagctatgggacaaaaacaacggctaggattaagcggcacacggctgcgacacagcggcgcaaagcggcggctcggctcggcagtggcggcggcatggcatagcacggctcggcggcggcgggacgacccgacggtggcggtgcaagcggcggcggttccggtggcaacacccgggatcaacgacaacgctagaaggagacaaaaaggggaaaaacttaggttgctagattga

SEQ ID NO: 72953 - DNA, 538 bp, Oryza sativa
  Clone ID: PAT_MRT4530_73281C.1
aaaacaaggggcctctttctttaaatggaccaaaaaagaagccccccccccacccctaaccttaaaatccccccccggggggggcggggaacgaacatccaaaaaaggggccctgggggcaaagaaaccccaaaaaaacccttattggcccccctcccccggggcttaaggaaaaacccctttttttttttgggggggggccttaagggggaatttggggggccccccaacatcgggcccagaaacttggggaaatctttacccaggattcagggggggggggggcccccccggggggggggggttccgggggtaaccccccccccttggggaagggttttactttcccccgggcaaaaaaaggggggggggctttccgcccgggggcctcagcaatgggccccttttgacccgcaaaaacacccgggaaaactttgggggggaacgggggaacacccccttttaaacccccccggggggggggggggatcccaaaacccaagggggcgaagggcattttttcaaactttctgggggg

SEQ ID NO: 72954 - DNA, 412 bp, Oryza sativa
  Clone ID: PAT_MRT4530_73282C.1
tttttatatttttcctttttttttttttttttttttttgggtgttttttttttttttgggtttcaaaacccctgactcaataacggaaccccggaatggcagaacccggtggtcctaattaaaatacagtaaaaccattaaacccttaaacccaatgtggggttttggaacccccttttcttattgggaatagcaaaaacatagcaaaagctgtaacttgaaaaggggggggggccttacagcccaaagaccccaacgaccaaacggggcacactggtgcgggggctgggggtgtgcaactaggtgcctgggggaaaggggaaaaccggcaaaggctccaaagccctacaagttaagatcctgggggtggggaaaccccccaaaagccttaaaacccttgaccacggccctt

SEQ ID NO: 72955 - DNA, 485 bp, Oryza sativa
  Clone ID: PAT_MRT4530_73283C.1
atgtttttgaccggaatgaaaaagttagaaaagcagcaaaacatgatttttggacatattggatgtattgggtgcgttcgaggcaaaaactcaatacgtgattcgcgcggagaacttttgtcaattaaagccattatgggcccacgtgggtacgatattttcgaccgaaatgaaaaagttcaaaaaacaccaaaacatgatttttggacatattggagtgtattgggtgcgttcgaggcaaaagctcacttcgtgattcgcgcggcgaacttttgtcaattaatgccattattggcccacgtgggtacgatattttcgaccaaaatgaaaaagttcaaaaaacaccaaaacatgatttttggacatattggagtgtattggattcggcggtgctcgtcgattattacaaccttactgagccgaagatggaggctcttcgccagaaggctagcagggccgaggcgagcgccgtagaggagtcgcag

SEQ ID NO: 72956 - DNA, 487 bp, Oryza sativa
  Clone ID: PAT_MRT4530_73284C.1
atgtttttgaccggaatgaaaaagttagaaaagcagcaaaacatgatttttggacatattggagttattgggtgcgttcgtggcaaaaactcacttcgtgattcgcgcggcgaacttttgtcaattaatgccattattggcccacgtgggtacgatgtttttgagcggaatgaaaaagttcaaaaagccccaaaacatgatttttgtacatattggagtgtattgggtgcgttcgtggcaaaaactgacttcgtgattcgcgcggcgaacttttgtcaattaatgccattattggcccacaagggtacgatattttcgaccaaagtgaaaaagttcaaaaaacaccaaaacatgatttttggatatattggagtgtattgtccgcgttcgaggaaaaaactcccttcgtgattcgcgcgacgatcttttgtcaattaatgccaataatggcataattggcaaacacggatgcgatgtttctgaccag

SEQ ID NO: 72957 - DNA, 565 bp, Oryza sativa
  unsure (1)..(565): unsure at all n locations
  Clone ID: PAT_MRT4530_73285C.1
ctgttctctggacactgccggaggctgctggaggcgaaggtgtgggtcgcatcttctgccctccaagcatccaaacgctaagtacaaacaaggctctgtagtgctggggtcctctcagggagtgcgtcgccnaactgccgtagtacggacagctaccaagatggctatgcagcttgcnaactggactggcgcggctggagccaactgccaccaacngccaatccacccataggcacctagataggcctgtaggaggtaagatggtgtgagcccggacgccatgcttgcagcggccctggctgcggcccttgctgctctgttggatggcatgatgcgggaaccccaccaccacttgtgctgttgttttttggctgctgcctgtggtggctgcatgcaaatgccacattgctgttgcatgccncccggacaccttggacactggtgatgtgatgagtgatggaccccctgccaccgatgcaaccaaatgagaaacgattgcctttccnagccttcctccttaaattaactcngcttctgcttgctccaaaaaaaaaaaaaaaaaaaa

SEQ ID NO: 72958 - DNA, 1891 bp, Oryza sativa
  Clone ID: PAT_MRT4530_73286C.1
gccctcagacttgatcctttaaagcgacagcctttgtttttgcacttcaagaacagcttttttggatttctctagaatatttttagtccaaacaagaatttacatgtacaaaatactacatgtacgactatattaatcacataaatcgactgaacaaatttacaccgacacgtatcaacctcatctaatgaacacatagcaacttgccctcaaaaaaaacacacacacacatacaacttgagtaccagtgagcttacttcaggagcttggattcgatctcctccaatgtaagtcctttagtctctggaacttttaggatgacaaacacaagggagagcaacgatatggctccaaatagaaggaaaatattggctggtccaaggaattcctgcaagggtgaaaaggcaaatgtcaccagtgcatttgagccgaaatttgtaagtactgcaaggctgatcccacgtcctcttgttcggagtgggaagatctcagaaaccattagccaacttattggaccaaacgatacctggtaagaaccgacatacagaagtaaagcaccaacagcgacaaaagggaagctgttcagaatcttgtagtaagctgctaataagaacagtgaaacagctattccaccaatgcctcctataagtagtggacgccttccaagatcgtcaactttaaatactgcaacacctgtcatcaacaacttgaacaacccaatcaaaattgatactttggcagcatcagatgcagctgcaaacccagcagtctgaagaatggaagttgcatagtatagaacacttggctggcctgttatctgctggaagagaaccagtcctcctccaatgatgagtgccttcaagctagctccctcaaacatcttccaaatgttcccttcagattcttgttctgcataagcagccttaatagagagaagggtatcatcaatctcatctgctaagaccctgtcactcctaaagcgccccctcagtgatctcaatgcctgaattgccttctttttgttatcttccactgacgcctttccttgaactgccctgagaagaagccatcttggtgaaggcggtaaattccacataccaatagccattattactgccagtggagcaccaaaaccaaacatataacgccatcctcctaccacatcaatttcaagactccctacaaggtatccagtcaaaccaataccgataccatagaggagacggcctatgatcagaagtacaaaatcaggtgcaaatccagtgaccagagcaccagaaatatataaagctgcagctgtgaccagttctattcttcttcctagaaaatcggcaacgcgatatgcaagaagcgaaccaccaagagcaccatagagtgaaccgcttgccacgagccctagctgtatagatgacaggctgaaccaagtggttccactgagttcagcagacaaagagatggagaggggagctatcttacggaaggatgatggacgaccacgagaactccttcccggccgcgccatctccggcgccaccgctggagggcgcctcgccgccctgcgcatgtgtccgcaccttgccccaggatagaagaagcgacgacggctataattagggcgcggaggattagggtcaggattccgcacgcggagcctggggttggaggtcgccgtcgccgccgccgccgcggcggcggcggcgccggtggtgcggaggagcggctcggcggcctgcgacgacacgtggaaggcgtccatcgccgccgcggatcgacctggagacgccaatccacgagccccgcgtgggcggggagcgttggtcggcgcagccgcgatggcgtgggggctggtggtgagtgacgacgaggggaacaacccaaccttcgccgccat

SEQ ID NO: 72959 - DNA, 387 bp, Oryza sativa
  Clone ID: PAT_MRT4530_73287C.1
atggccgtgtctctctttgtcctcggcttctccctctgtgtgtcatctcctggctccgaattgtgggcggcgacgacgagcgtggcggtggcggcggcgttcatggtgacgttctcgttggggttcggcgtgggaggcgcaccgcgggccacggatgccagcgaggaggctgtggggctgtggcgtcacggactcacggagagggcgcgggaggcggcgggctgcggcgaggagggcgcaccctcgccggtgcatcctccaacctcattcgccccctcctggcggcagctggatgccgtccacctcatccgcctgtcctcttctttggaggccgccggtcaggatctgccgcctcctccttgctcggctctcctgacggcgccatag

SEQ ID NO: 72960 - DNA, 234 bp, Oryza sativa
  unsure (1)..(234): unsure at all n locations
  Clone ID: PAT_MRT4530_73288C.1
tggattctgagggccgagcactttgtttatacaatctgttgtatcattgactggatgcaatgttggcgttgcattgattcccattacttgtttcatcatgtnaaaaaaaaaaaaaaaaaaaaaaaaaaaaaaaaaaaaaaaaaaaaaaaaaaaataaaaaaaaaaaagggaaaaaaattataaaatacgctgcttttttatcattgtttggcgtaaatttaaaattttcttatt

SEQ ID NO: 72961 - DNA, 972 bp, Oryza sativa
  Clone ID: PAT_MRT4530_73289C.1
agaagctagctaggtgtagatagcttcttgtgatatattgcctctgcttgccatggcggtagctcaccttcttatccaactcatctccatggctggcaatggtgttggagcctgcagggtgcagattattccggccattatctttcttcagctcctctttagagctcttggcgcggatggcgcgtcgtcgttcagcttcaccaacagctgccagtatccggtgtgggtgggcgtgctccacggcgccacctcgccggcgctggcgcgctccggcttctacctcgcgccgtcgggcacgtaccacctcgccgcgccgtcgtcggggacatggtccggcacgttctgggcgcgcaccggctgcgccgtcgactcctccaccggccgcttcacctgcgccaccgccgactgcggctccggcgacgtcgcctgcaacggccgcggcccgtcgccgccggtcacgctcgccgagatcaccctcgccgcgccgggctccggcggccaggacttctacgacgtcagcctcgtcgacgggttcaacgtgccggtgcgcctcgcgccgtcgtcctcgggcggcggcggcgactgccacgccgtgtcgtgcgcgggcgacgtgaacgccgcgtgcccctccgacctccgcgtcgtgtccggcggcggcgccgtcgtggcgtgccggagcgcgtgcgacgcgtaccggagcgcgcgctactgctgcaccggcgcctacggctcgccggcggcgtgcgggcccaccgactactcgcaggtgttcaaggccgcgtgcccggcggcgtacagctacgcctacgatgacgccagcagcacgttcacctgcttcggagcatccagctatgacgtcaccttctgtcctctctcctagttacaatgtgattgctgctaattataagttactccctctctctcaaaataagcgtagctatgactgttatgtatccaactttgatcgtccgt

SEQ ID NO: 72962 - DNA, 798 bp, Oryza sativa
  Clone ID: PAT_MRT4530_7328C.1
atggctgacgagtacaaggcgttggtcgacaacggcacttggcgtcttgttcctcgcccccctggggccaacattgttacaggcaagtggatattcacacacaagttccactctgacggctctcttgcccgtcacaaggcccgttgggtggtccgtggttactcgcagcagcatggcatcgactacgacgagacatttagcccggttgtcaagccggccacaatacgggttgttctcagcatcgttgcatcccgtgcttggccaatttatcaactggacgtgaagaacgcatttgttcatgatggagatcgtattacctatcttttgctgtacatcaacgatatcatcctcactgcttcgaccacatcactacttcagcagcttacagcacgcctccactccgagttcgccatgacagaccttggtgaccacttcttcctcggcatctccgtgacgcgctcctctgccggcctcttactctcgcaacgccagtacgttgtggatcttcttcagcggaccggcatggccgagtgccactctacctcgacaccagtcgacactcgtgccaagctctccgccatagacggcatgcccgtcgcccacccttcggagtacaggagcatcgctggtgttctacagtacctcacgttgactcgaccggatttggcatacgtcgttcagcaggtctgcctcttcatgcatgatccgcggaagacttggtcaagcgtatcctccggtacgttaagggaaatctctccactggcctccacatcggctccgacacgattcagaccctga

SEQ ID NO: 72963 - DNA, 3177 bp, Oryza sativa
  Clone ID: PAT_MRT4530_73290C.1
ttaggcggtcctcctacaagacaagggtaagtatatgttaagagatggaaccacatcaatgaataaagtggtcataaaatagaactgcaaggcatgggctggcctgatagtggcattaacataattattttcaagtttagcaggatgcaaataacagaaacagtaggcagtagcttgtgtgtagttctcatcggtgcattccgtgaaatgggtgctcttaattccattgtcatcttcatatttcaaggagaagcataataaatacaatgcattatgcccacagtttagtataggatgccatattagtaactggcgtgctagtcgcaatgcccatatattaggaaagcccattttaagaggatctctgatcttcacttgatgcgcaaatgattcttcagagcatttccaagaagccggccgaaactgaccatgttcagagtcaccactgccctgatgctgcgaggaaattcctgggactaaaatgcacaattccatgtaggacctcaacttgtatgcaagttcctttgtttgctcactccacccttcaaggcgatgatccattagagcacgtgtacggtcacttatctggaaaacatgtggagaacctactatcaactccagcatgacaacaccaacactccacatatcgtaccgagtaggccctgaatcataaagatgcttcaatgtgaaatcatcaaaggcactgccaaaagtcaataagacgccaggtttaatatccctgtgagtgatattacgatcatgacaagctttcagacccatcagcagctgccataagagattttgcatttgcttttgcccagctttcgttgtccttaaccaataccaccactttgatggttgaagaacttgaatatgcctgaccctctcattattgttaccggtaactaactttgtttcttcagctgtatatatcagcttcgataatgagcggccttcattacggtacacaagccatagttccttcaattctgattcaaaagattctataaacctagcaatgtgctttagtggttcttcagtaaatgacatgttattttctgcaaagatatgaggattaagttgactgtccaccgaaaaggctgtggatgactctgcccttgacaaagcttcaagagttcttgaagcatttgaaaatagttccccaaaatatttttcccgcaatccactcaagtaagcagcacgtcctctctccaccattatgcgctttaatatgaataaatcaccatctattgtgtctgaatcatggttttcatcaggcaaagttgtgtttgagcttgtgcaattgtatgagtctggtttaagtatagtgttaaagtgtgaatgatctttatgtacgtctacatcctcagagcagttccaatgaaatgccaaccagacttcaccatatgacccacggtcaaatcttttcttcagcttgtacctaaaatcagatatcttgtagccaaatgaatgtgaactatgcggtttgcttccattatgtgaaacagagtcaagcaatccaaagaaatttgcaaaagcttcaggactatgacaccgtcccatttcaccatcttgatgaccaaggtaccaacaaaaatctctgtccttgtatttatcaagatttccatcagaaaataagacagtttcaactagcgagtgatcgaagtcattgactccttcatgctgataggcttctggtactctaaatatatagtccatatcttcatcaagactctcagataagtagaaacagcccagtctcttcatttttgcttcaaccaagaatcgatggaactttgctgatgaacgcttgtaataatccacgccaataagagctgaactaacaccatcatcagacttctgttggtatggaatggtctgtaatggtgaaatagatgtcttggaattttcttcaagcatataccaatcttctaatgtaactttagagctataatgagatcccaatggaacaatcacagcagctacattgtctgttgtccctttctctaaagcaagatcaactacataatctgccaaattccgttgcgttactgcaaaggatcctaattcttggttaacaccaagtttgacacgcaacatcagatcacaaacatcctgcatagtcattttctcaaatacaccatcagaggaggcaataagaaaggtatcatttgctgacagagattgccactctgtcagttcaggtgtcggtattacaccataccgtttgtaaggcacatcaccaatagctcttgatagtgctagctcaccattaacacgatgcacaccagcccactcaagaacataaccaccagcagcctccacacggcttctctcatcttctctatcaggatgatgatccttggtcaactccttcacattatagaacggtccatcataatttgctaatgcaaagtcatcacgattgttggagtttctctttcttctccgttttccttccttggagaatgtcaaatcaacatcatgaactgctctcaataatgattccttcagaacttccatgtggaatgatcgatctagaatagcaggtaaagcccaacatgaccccttgctatgactggactggtcctccttgtacagattaatgacattattaagaatagtaacttctttatatgtcagctttccagtagattttctgaacatgatggagtatataccatcaagaagaaaataaacatggagcaagaaatactccagcaaaagcttagaagccatctcactagcctcagccccattatgaccatcaaatactgcaaccactccgacgtccacctctttaatcctcatatgctctatgaaggggatgcggatgccgagcgcgcagacggcgcggtcctcctgggaccgccgcctgcctctgtcaaccgccacgtggcaccccctcgggtgcggcggcggcggcggggaggaggaggacgacctccggtccccatccccctctccgccgctgccagcggagggtgcgaggagcgtccagcgcgggcagtgcgcggactggaacaccgcgggcgccccgccctcgcggtacacggcgaggcaggtcgccgactcccccgcgcacctccgcggcggcgcgacgaggacgaggacgacgaggcggaggagcgcggctcggagtaggcggcggcggcggccggagcaacccagccgcat

SEQ ID NO: 72964 - DNA, 219 bp, Oryza sativa
  Clone ID: PAT_MRT4530_73291C.1
ggagctcgccgacgccggcaaggtcttgcaggacatcaaggtgttcgtccagagcaacaggcggcgcgcgccaccgcctgaattgagattcgagagtttgatctgcttcgtaccgtgtcatacccgctttatactgaaagatgttggatcagtctttggagatgttcatacggatagagagtgggtttacaccggtgcagtccttggagatagtaagga

SEQ ID NO: 72965 - DNA, 260 bp, Oryza sativa
  Clone ID: PAT_MRT4530_73292C.1
tcgttgaatgaaaacctatggcctgatcgtagtcgccccaactcgactaggcattggtgaccataggtatggcgtcgatcaagataggccgaggacagcatgggaaaggactttgactacattgagagctgtattatagataaggggggcaccgagggttaagaacaccaccaatagggatgatgacatcatgaacagcaaggataggtaatgaacctcctgctgtgcgcatagcaataggaatttcgagacttgggggt

SEQ ID NO: 72966 - DNA, 547 bp, Oryza sativa
  Clone ID: PAT_MRT4530_73293C.1
ccaggagcaccttacctttcccttgtttcactattgcgctgtgtatgacaacatatattgtatcagccaccagcaaaaaaactgacggctacggagcacgtactagttatgatagcgcttccacattgacatgtccttaggcggggggggagtgcatcctccccaccacagtaaccaaacttggatgctacagaagatagcgcagatgtaaaacatacattaccctatgagcatattttgcttccaatgtccttgccttttgacgagcctgactaccgacaggaacaggctgatgatgacaaccgcctaccctccatgacattgtctgtaacctgctaatctacatcgatgcttatctttcggtgcagggcttggggtgcgcttgacgtgaacaactatccacctggctgtggatttaccaacccctgaggaattatgctgtgaaatcagcgctgcacgcgacgcccgcagaatatgttatctttgacaggattacctttggactgtcggatcgatggctgttcagctgaatccagcggggctcttt

SEQ ID NO: 72967 - DNA, 720 bp, Oryza sativa
  Clone ID: PAT_MRT4530_73294C.1
atggttgaaccattgagtgaggggccctgcatcgctcctagggcgaggggtgacacgggaggcaattcctcctcccctgccaccaccccaccccacctcctcctcccatgcctcgccaccgctcaagcatgcaccgaaaaccatacggctgcaagggcggtggcagcggggccttcccccctctccatggaggcctcggaggtccgagcccacgaccagtaccaagacgatagaggccacaatgggggcaggctagagctagcgcgcctcattgaggtctggccccagcactcccgtgcaattgaaaggatggatgtggctagatgtggcgcctctgtgctagatctggctagagagcggccatgtgggtctgtggggccgtgtgctatggggcagctcggtggagctgccacttttgggtcctgtgacaacgacgcagtggctagtggcatcgacggcgagcaggggcactcacacatagattggtgcctggcgggcggtggttccttgccctatagcgaggctctcgatgtcatggggcataggtggtgctgccatataggtcggaggctggctgcgggggcgttggtattgcaggggttacggcggaggggcatcggcgcaatggcagtaggagtgggaggcccctttggtaccttgaggagggtgagggttggccggcggaatggcactggtgtggtggagttcatgtgttggtga

SEQ ID NO: 72968 - DNA, 237 bp, Oryza sativa
  Clone ID: PAT_MRT4530_73295C.1
atggaggggggtagtgatgcagcacgtgtgcagcgtaggcaggcgctgcccccgttctggcctgcacaacttcgtactgtgatcagttgtactgctggtgctgctttggtcgtgtgcatccccaaggattttctgcggtgtccactgatcagtggtcatggagccatggagatgcttaaggtgacgatgttgttacagctggaagtgaaaagatggatggtggggaagaaaaggtag

SEQ ID NO: 72969 - DNA, 198 bp, Oryza sativa
  Clone ID: PAT_MRT4530_73296C.1
atggcggtggaaagggcggaagccggcggaatcaggatggccggtgtgccggcgctggtgcctgccaactgctacctgcaacctgctactccagctgtgcttgtcattgtttgttcacttgctctcttccctctgcatggggtaaccatcaatcaagcttgcaggttccaaatcactgaaaagggccccaagaggtag

SEQ ID NO: 72970 - DNA, 253 bp, Oryza sativa
  Clone ID: PAT_MRT4530_73297C.1
ggaggcaaatgctgcgcctgtagcagccaggccttccatggcgtcagggcgcgatggatgtgaggggttcaaggatctggttgagtggggaagccgttgcttctccgatggttgtgcccatggcgtcaagcaagaacgtggcgacccaagacgacctccccctccccgtgtatttatggatccccagctcttcatggctgcacggaatggagcttgccagtctcttgagagcctagcttctcctcggccatga

SEQ ID NO: 72971 - DNA, 1218 bp, Oryza sativa
  Clone ID: PAT_MRT4530_73298C.1
atggaaggcggcggcgaggtccttcttcctcttggcagctccctcccggcgcgacgtggacggggcgacgccgatgaggtaccccaccgctgggagaagtggaggcggtggggcggtgtggggtggcggtggatccggcacccccatggccggatctggcgcggcagcgcagcccgcggtggtgcgcggctgggggtggcgacggtggcccggcggcgcaatgcggctgggggcagcggcggcggcccggtggctgggagcagcacctggcaaggcggcggcggctccggaggcgccccgctcggatccggcgtccccgcggccggatccgactcccggatggccagggtcgtgatggccggcgtcgccggcgacaggaggacggcgctggctggcaccggcgatgcttgccgccggacctcatggatgaccaccggtgggggctgctgccagatggatggctgcgttgtgggggacccgactgggacgccggcttgcatggcggcggcggggtcgttgcgcgtcgcccgtgtggcagcgctgcaggtgttggccggtggagatgccgccggatctagggtcgagctcggattcagccgcacagcactgccatcacgaccggcgatgacgaggggacgtgtcacgcccagaaattcccaaatagaattccaagtagaatgtgcattaaaatccccgtccaggaccggccggggtgttgacattcagatccactgggaacaccactccacaggcatcctcgacggcacggacgaagcctactcctcggagaaaccaccatctgacacatactctggcgcacggggtggccggtctaccgtggaccggaaccacgcgggtggtccacagccggtccacgggatcgacggcccagattggcccggggccgatcggacggtgcagcggcgacctggctcggctctgctcggcacaaagccgaccggccagccatggcaagggcggcggcacgcgtgcgtccaccggcgacggcaagcggcggcgcgggcggcggcagcggacggcaccccggcggcggcgacgaccgaaggcgatggcgagcgcgggtggcggaggcgcacggggaaacggggaaggaaaggaaaggggagggagtcctcaccggagggggcggcgacgaccggcgacgaggagcgacggagggaggtcgacaagcggtggacggggtccgggacgacctaa

SEQ ID NO: 72972 - DNA, 748 bp, Oryza sativa
  Clone ID: PAT_MRT4530_73299C.1
agtgacaagcatgacttgccttgctctactactggaagaacctcagcgactatctcgaagtacaccggagcgtcggaagaaccggaatctaagcgacatacaaagcaaacaatacaatggcgccgacaggcggggcccgcatgtcagtggcgcacggggtggccggtctaccgtggaccggaaccacgcgggtggtccacagccggtccacgggatcgacggcccagattggcccggggccgatcggacggtgcagcggcgacctggctcggctctgctcggcacaaagccgaccggccagccatggcaagggcggcggcacgcgtgcgtccaccggcgacggcaagcggcggcgcgggcggcggcagcggacggcaccccggcggcggcgacgaccgaaggcgatggcgagcgcgggtggcggaggcgcacggggaaacggggaaggaaaggaaaggggagggagtcctcaccggagggggcggcgacgaccggcgacgaggagcgacggagggaggtcgacaagcggtggacggggtccgggacgacctcgacggaggaggggtgaacggggtggatctcggccactcgaacccaacgtcggcgacggcgcggtgtggcggcgagcctagcggcggctagaggcggccggagtggcgggaaaggcggcggcgggtggatgcacggtgcgggagcgatggagagctcgggagagttcggcgagatggggaaaaagagagagggggtg

SEQ ID NO: 72973 - DNA, 4311 bp, Oryza sativa
  Clone ID: PAT_MRT4530_7329C.1
atgtcgactgaatcaactcagtcctccacctcctcggcctcgagtggttcttcttcttccagcaccaccagcgaattcctccacccctacgccacggtcgccgtcaaatcccacgtccccatcaccctagaaaacacccacccgaactacaacaaatggagggccttcttcacatctttgtgcggcaagttcgggttgatggctcacatcgacggttccgctcctccacgccccaatgacccggcttgggaacaggccgactgctgcatccgcagctggatcttcgggtcagtcgccgacaacgtccttgacctcgccatggagcccgatcagaccgcgcgggagctctgggtcgccatcgaggacatgttccacgccaacaaagagcctcgagcgatcttcctcagccaccagtttcactccatgattcaaggcgactcctccatcgacgattactgccagaagatggagaccgctgccgacgctcttcgcgacgtcggccacgccgtcaccgaatcccaactcgtgcttaacctcctccgaggcctgaacgagcgcttctccaacaccggagataacatcgccggcgcagccgtcctcccaagcttcacctcagcgcgcaacaccctcctgctgaaggagttgcgcatcgccaacgaagccagggtggcggcagccacggcgctggtggccagcggcggcttcggctccggttcctgccctcccggcggctgcatctcctctggcggtgggggtggcggcagtgggagtggtggcggcgcacgccagaccttcccgggcggtgggactggtggcggcggcttccctgctggccaggcccgcaccggcggcaacacgaaccgccgcaaccgcaagggaaatggtggacgtggcggtggaaatggaggagggaacggcggcggcagtgggggtggtggtggcgctcgccaggccttctctggcggcggtggcggcggcgtttcctctggtggcggcggcttctctgctggagggagttcgaccggctgggtggccaaccctagctggaggctggccgggccttgggtttgttttaacccctggccggcccagcaacaggcctggcgcccctcttcggccggccttcttgggccggctccgacggcccactactcccaggccaataccacatatgctgggccatttgtgtcgcccacatctgctcctacaggccagcccaattgggagcaagctggcctcattgcagcactgaaccagatggccttccaaagcccaaacaactgggttttggacaccggcgcgacatctcatatgtcctccactgatggtatcctcgttacacgcttgcctaactcttacacttttattactgttggaaatggtcaaactattcccgttacttgtcgtggcacctcttttctacccataggaaccaccaaatttgcactcaaaaacatccttgtcgccccttccttagttcgtaatttactttcagttcgtcagtttacccgcgacaataaatgttccattgagtttgatgaatttggtttctctgttaaggaccttcagacccggcgcgtgattcttcgctgcaatagtcacggggaactctacacccttccagctgccactccctccaacaccgcgtcctgctccctcgccacttcttccacgctttggcaccgtcgtctcagtcaccctggtccagccgccatccacagtcttcggaatatgtcctctatttcctgtaataaaatagacacctctttatgtcatggactccctccagcggtggctccctcatcagaggttgagcaaccgcgacctctcacggtggctccctcctcggaggttgagcaaccgcgacgccttacggtggctccctccacggaggttgagcaaccgtacgttcccctcttcggccgacgcttgccgaacgacaccgtccctgcggcacgtgacgcccgctcagctggcacgcccttggtcagtgcctcctcgatcggcgctgccctgtcggtcggtgccacccgagccggcaccatgtcaccattccgccatgtctacacccgtcggcccaccgtgacggtcccgccatcatcttcacccaatgtggttgtcacggctactgctcctcagccgcattccatggtgacgcgctcccagactggctccttacggccggttgacaggctgacctacacggctacccacgccaccgctgcttctcctgttccggccaattatcgcagtgcgttggctgatcccaactggcgcactgccatggctgatgagtacaaggcgttggttgacaacggcacttggcgtctcgttcctcgcccccctggggccaacattgtgacgggcaagtggatattcaagcataagttccactctgatggcactcttgctcgtcacaaggcccgttgggtggtccgtggttactcgcagcagcatggcatcgactacgacgagacatttagcccggttgtcaagccggccaccatacgggttgttctcagcatcgctgcatcccgtgcttggccaattcatcaactggatgtgaagaatgcgtttcttcatggtcacctagaggagaccgtctattgtcagcaaccctccgggtttgttgaccccgctgcccctgatgctgtctgtctattgcagaagtccctgtatggtctcaagcaggctcccctggacactcgtgccaagctctccgccaccgacggcctgcctgttgccgatccttcagagtacaggagcatcgctggcgccctacagtacctcacgttgactcggccggatttggcttacgccgttcagcaggtctgcctcttcatgcatgatccgcgggagcctcatctcgccttggtcaagcgtatcctccggtacgtgaagggcagcctctccaccggcctccacatcggctccggcccgattcagtccctcacggcatactccgatgcggattgggcgggttgtcccgattctcgtcgttccacgtccggctactgtgtcttccttggagacaatctggtttcttggtcctccaagcgccagactactgtctctcgttccagtgctgaggcggagtaccgtgccgttgctcatgccgttgccgagtgctgctggttgcggcaactgctactggaacttcatgtcccgattgcttcggctactattgtctattgtgacaatgtcagtgctgtttacatgacagcgaatcccgtgcatcatcgacggacgaagcatatcgagatcgacatccactttgtccgtgaaaaggtggctttgggacaagtccgggtacttcatgtcccttcatcgcaccagttcgcggacatcatgaccaaaggcttgccggttcagttatttactgattttcggtccagtctgtgcgttcgtgctcctcccgctgcgaccgtgggcgggtataggttcataggttctcattccagaaggcatggtaacatctatagacaatgtgagagggttgaccctggccatatcatcaagtgcatttatcggatcaagctttattatcaagaaaattgggctcaagaaggctggggattctggggttctggaggtttctcatacttgtatgagccattatggtggttggggatgataactatgattctgggcgaggtagcaaactttgcagcatatgcatttgctcccgctgtacttgttactcctctaggagctcttagcattatatttagtgcagtgctcgcacacttcgtcttgaaagaaaaactccatatgtttggtgttgttggctgtatcttgtgtgttgttggctctgttggtatagttttgcatgccccaaaggagagagagattgattcaatagatgaaatatggcatcttgctactgagccaggttttattgtttattcatgtgtggctgtggtgtctgttctatttttgattttctgggttgctgaacgttctggacacaggaagatgcttgtttatattgcaatctgttcaacaatgggatctctcacggttatcagtgtaaaggcagttgccattgccttgaagctgtcatttggtggatcaaatcagttcatctacatccaaacatggttcttcatagtagttgttatagtttgttgtttggtgcagttgaactacttaaataaggcactggactcatttaatacagctgtggtctctcctgtgtactacgtgatgttcaccatacttactatttttgctaacatgattatgtacaaggtatctctgcagataataagatttaggcagttaaggaacttttctcctgcacaagactag

SEQ ID NO: 72974 - DNA, 183 bp, Oryza sativa
  Clone ID: PAT_MRT4530_732C.1
atgccgcacgagcacgtcacgaccagcgcaggcagcttccgagcggtctttgatttaggccttgttcggcagggattgcatcctaccaggagcagcaacagcagttcaacaacagcggccaggattgaatcctaccaggagcagcaacagcagttcaacaacagcagcagcaacgcctcctag

SEQ ID NO: 72975 - DNA, 449 bp, Oryza sativa
  Clone ID: PAT_MRT4530_73300C.1
ttatcaatgaaaaggaggaatggagggggaaattgtcactgcatccagcaatccagattccagcggatagctacgctcttctgagtccattttactttcccctttttctgtcgtcacgggcggccgacacaggcggacagaaagaacaagctggcttcaagaggtcagtcccgtctcatggtgagcgatgggctaatccggaggaggtaggggaagaaagggaggggatggcgtcgtggtggctgtctgcccaccagatctggtacatgtggaggttatcagctaccatcgtccttcccttccctaccatttcccatagtgagaagttggaccctgaatcggagaggcggtcggctcaagcaaacgagcacatggaagagcgcacaagagggtttccatctgaaccatctgctttggccggcgccgcgcgcctctcgcctcctccttag

SEQ ID NO: 72976 - DNA, 726 bp, Oryza sativa
  Clone ID: PAT_MRT4530_73301C.1
atggataaaggaaacactgataaactcaacaccaagcttcttgatgtcctcaaccaggcaaccaatcttggagcgatcccgcccagcgcatgccggatagcacaagcctccgctgtctccggatcggtgatccccatgaaacgagtgttggccgccaaaagacagttgccgtgctcgccgccacaccgcgccgtcgccgccgttgggttcgagtggccgagatccaccccgtccacccctcctccgtcgaggttcgccgccggagcaccattcccgccgtgcgacggtgagagccgccatgtcgtcccggaccccgtccgccgcttgtcgacctccctccgtcgctcctcgtcgccggtcgtcgccgccctctccggtgaggactccctcccctttcctttccttccccgtttccccgtgcgccgccgccacccgcgctcgccgtcgccttcggtcgtcgccgccgtcggggcgtcgtccgctgccgccgcttgccgtcgccggccgatccgagccgtcgatcccgtggaccggcggtggaccacccgcgtggtcccggtccacggtagaccggccaccccgtgcgccactgacatgcgggccccgcctgtcggcgccaccccccttgatgacggcgggccctgcgacggcctctgtcgcttccggattcacctaggcacgagaggggactgcccgtcgcccgctggggacgggggtgaaacctga

SEQ ID NO: 72977 - DNA, 438 bp, Oryza sativa
  Clone ID: PAT_MRT4530_73302C.1
atggcgactctcaccgtcgcacaatgggaatggcgctccggcgacgaacctcgacgaaggaggggtggacggggtggatcttggccacgcgaacccgacagcggcaacggcgcgagaggggaaagtgggcgcgggaggcgtgggtgcgagggcaacgtggacggcgtggcctgggaggcacggacgcgaggcgcggcggcggttgcgggcgcggcggcgagcggctggaggttgggggaggacccgacagggtgtgacacgctctccgtgccgtccgcccatggcgtgccgatctgccggatgtcttgccagtggatggcgacgttctccgtcggcaacgagttcttgacgttgacgacgatggtgtccccctggacggcgtggatggtggggcccaacgtgtggccgttgatggtgacggccagcttgcggacgtag

SEQ ID NO: 72978 - DNA, 1243 bp, Oryza sativa
  Clone ID: PAT_MRT4530_73303C.1
aatagcagaatcatttaaatttggactgcgtgttgcgaatagatactcatttacaaaattaaattaattatcctggagcaaataatatgcatctgctcaggaaacacagctcatgatgctgcgcattgcagatatcgctcatgaataagtaatttttgctattgcaatttggtagggacaaacttctgagcaacatccagccctgactgattctaccttgttatattcatacgcaaacttgcatcttgtaaagcttaagttcctatttttcttcttcgttgcactgaattccctcttacagtcatcattgattacattttttggagaggtaccaaggcaaccatagcgggtatattgctacatatgctaaactaacaacacttgaagtgcacccccaaaagaccatctactgtgcaccacaagttctactaagagaaaagctttgtcacgatcagtatcaaccatcaagcgatattacgaagataaagcactgcccagggaagaaagatcagaagcccagtcacagttgtggataaccatggggatcatgtggtgcccaagatccagtgccatagcggctgcctatggaaggatagccatcatcatagacgccttgcaggcccatccctggagtcgccattggtggtccataagctccatggccgctgaaactgggtgcatttctcttcttaatctcagccctcagcttctcagattcctgagccatagaaacaagatccttctccattgcctgcacctgtgctgtcagatcaggccttgccttcttctcgtactcaagggttcccctacagtgatatagttcctgccgaagagcatcacgttcagctatcatgacaggtattttctggttctcagaattctgatgctcaagctcttttaacaacccctgcacctttgcagtcatctcttgccttattgactgtagtttcccggcctcggaccgtagctgtaaggcatcttgcctgaggggttctaaggaacgtagttcagcttccaacttcagattcctctgagtcagctcccttgactcaagttctttttctgcacgaagcttgggtatagcttgacttgcggcatggagatcttccttcagacgaggcattgcctgcctgagaccaacaatttcatcagctaggcgctgattgtcatcatggattctgcgcatctcagcacggcggctagacagctcctcctccaagcgacgtggagagatgggccttgc

SEQ ID NO: 72979 - DNA, 387 bp, Oryza sativa
  Clone ID: PAT_MRT4530_73304C.1
ggggacgagacgaacgtacggaggactttcattacaaaaaaaaaagggactggaaaaaaaataacaaatttggggggacaaatgccccgggggggagaaaaccaacgacaaaaagcttaaaaggaggtgcatgggcgaacaaaaatcccaaaaggttaatgggaaacagaaatcatggggaaaagggggaccccctccggttaaaaaaaaaaggcattttagcattggccgtattaaaatgggtggtaaaaaatctggatatataaaaatgcccaagggtaaaagggtttacattatgagaggggggaagaacatgtgggaagggcttacaggggatcgatcacaagggactggtgtttttccgggctgaaaggcccgcggaagctg

SEQ ID NO: 72980 - DNA, 456 bp, Oryza sativa
  Clone ID: PAT_MRT4530_73305C.1
atggcaagggtggcggcacgcgcacatccaccggcgacaggaagcggcggcgcgggcggcggtagcggacggcgccccggcggtgacggcgaccgaaggcgacgacgagcgtgggtggcggcggcacacggggaatcggggaaggagaggaaaggggagggagtcctcaccggaggggacgacgacgaccggcgacgaggagcggcggagggaggtcgacaagcggcggacggggaccgggacgacctaaagaacgaaaaggaaaagattagagagggagagaggggccatagaaggcgggaacgccggccgaaggcggcggccatggcgactctcaccgtcgcacaatgggaatggcgctccggcgacgaacctcgacgaaggaggggtggacggggtggatcttggccacgcgaacccgacagcggcaacggcgcggtgcggcggcgagcctag

SEQ ID NO: 72981 - DNA, 735 bp, Oryza sativa
  Clone ID: PAT_MRT4530_73306C.1
atgcggggcccaccggtcagcggctcgggagagagggaaaaggggcgccggcaagcgggccccactcggcagcggcgcacgggtggtcggtctaccgtggaccgggaccacgcgggtggtcccccgccggtccacgggatcgacagcccggatcggcccggggccgattggactgtgcggcggcggcctggctcggctcggctcggcacaaagccgaccggccggccatggcaagggcggcggtacgcgcgcgtccaccggcgacggcaagcggcggcgcgggcggcggcagcggacggcaccccggcggcgacggcgaccaaaggcgacggcgagtgcgggtggtggcggcgcacggggaatcggggaaggaaagggaaaggggagggagtcctcaccggaggggatggcgacgaccggcgacgaggagcgacggagggaggtcgacaagcggcggacggggaccgggacgacctaaagaacgaaaaggaaaagattagagagggagagaggggccatagaaggcgggaacgccggccaaaggcggcggacatggcgactctcaccgtcgcacggtgggaatggtgctccggcggcgaacctcgacgaaggaggggtggacggggtggatctcggccacgcgaacccgacggcggcgacggcgctgtgcggcggctagcggtgaccggagtggcgggaaaggcggcggcaggtagatgcacggtgcgggagtga

SEQ ID NO: 72982 - DNA, 489 bp, Oryza sativa
  Clone ID: PAT_MRT4530_73307C.1
tttttgttttaggttattttttttcttatagtttttggctgattgttttgttttattttgttgtgttagtcattacaagggtttacaggatgtttttttattaactatatacgaccaaaaaaaacaaagaggaaactgacaaaagggaaaagacaacatgccaggcagtaacgaccaaaaatccttaacccaacctgaaaagatcccaactaaaaataacttcttaagcttcttcactcgggatttatcttttgctagtttgagatggtccttgaccaagttggattcaagacagtccatcttcaaccggttgacatcgattgataaactcatatttgcgacctgctggtctggaatgtaaaccttgcccagcttgccatgcactggacccttcgtgacatttaacatattcttagcatgagcaggagtcttcattggttgttacttcaagatttaaactggatacccgtgtcgactaactactaaatc

SEQ ID NO: 72983 - DNA, 729 bp, Oryza sativa
  Clone ID: PAT_MRT4530_73308C.1
cagcggcgcacgggtggtcggtctaacgtggactgggaccacgcgggtggtccaccgccggtccacgggatcgacggcccggatcggcccggggccgatcggacggtgcggtggcggcctggctcggctcggctcggcttggcacaaagccggccggccggccatggcaagggcggcggcgcgcgcgcgttgccggcgacggcaaccggcgacgggagatggcggcgcaaaggtggcggcgcacgaccggggcggcggctcgacccggcgcggctaggagggagagggaggggaatagaggaggagagatgcctcaccgagagtggccggcgcggaggaggacgacggcgaacggcgacttgcgaggggatgcgggctccggcgacggacctcgatggaggaggggcggactgggtggacctcgaccacgcgaacccaacggcggcgacggcacgcgcgggcgagcgggagagagggggaagtgggcgcgggaggcgcgggcgcgaaggcgacgtggacgacgtggcccgggaggcgcgggcgcgaggcgcgacggcggttgcgggtgcggcggcgagcggctggaggttgggggaggacccgacaggtgggccccacctgtcggtgaccccgagagagaggagggggcgcgggctgagttgggccgtggcctccggccggcccagcaaggcgcggggagagaggagggggaatgggccggcggcccac

SEQ ID NO: 72984 - DNA, 2155 bp, Oryza sativa
  Clone ID: PAT_MRT4530_73309C.1
ctaaagcacccaatacatcatttcgctggtgagcttgtacatctcagacctgtgcttcagcatgcggagccctcctccattggcaccaccagcatcgtcgtcgtcatcgcagcgctccacctcgacggcggttaacacagcgaacagctcctcgccatcacgctgatcctcatcggtctgaaagaacctggcaatgcagaacttggcggctcctaggtttacgaggtatgagctgacaagctggagggcgtcgggtggcgtgaactccagaggaaggctgtgaagcaccggcagcttggtgccatcgagatccagagcggagaggaccaagctcctcctcctgtctccagtgctgcatgagaggccaaaccaaaggccgtgctcatggcaatactcggcgagaccaacaaatggcagcttccagccagtggccactgtgctccacacatggctcactgtgtcaaagcagtagatgccactgccgtgcgtggatgacatccagatctccatgtcaccaaccacagcgtacgagtggacatgcaaatcggacttgtgagacagcggcggcggcggcggggggagagcgtggcatcgccaatcctcatttaatccatcctcgtagatgagcccatagaagcagccgcaggggacgtttccaccgccgtcgtcgttgacatggcggcgcgacgtgtcaaggatatagaggtcgtccccaacggtgacggaagtgggaccccgcgtcgctctcgcgcgggcggctcggggggcgaaaaccctagccgcccgcgcctcctccccctctcccccgcctcgccgccgccggagctcgccggcggcaaagccggcagcgagcagggaaggcggcggcaaggtcctttcttcctcttggcagctccctcccggcgcgacgtggacggggcgacgtcgatgaggtaccccaccgccgggagaagtggaggcggcggggcggtgtggggtggcggcggatccggcacccccatggccggatctggcgcggcagcgcggcccggcggtggtgcgcggctgggggcggcgacggtggcccgacggcgcgatgcggctgggcagcggcggcggcccggcggctgggagcggcacggcaaggcggcggcggctccggcggcgccccgcccggatccggcgtccccacggccggatccgactcccggatggccagggtcgttatggccggcgtcgctggcgacgggaggacggcgcgtgcggaaggacggcgcatgcgcgacgggaggacgccggcgtcgaggtcgatgcgtgcggcgccgtgcagcgggctgacgtggcagtggctggcaccggcgatgcttgccgccggacctcatggatgaccaccggtgggggctgctgccagatggatggctgcgttgtgggggacccgactgggacgccggcttgcatggcggcggcggggtcgttgcgcgtcgcccgtgtggcagcgctgcaggtgttggccggtggagatgccgccggatctagggtcgagctcggattcagccgcacagcactgccatcacgaccggcgatgacgaggggacgtgtcacgcccagaaattcccaaatagaattccaagtagaatgtgcattaaaatccccgtccaggaccggccggggtgttgacattcagatccactgggaacaccactccacaggcatcctcgacggcacggacgaagcctactcctcggagaaaccaccatctgacacatactctggcgcacggggtggccggtctaccgtggaccggaaccacgcgggtggtccacagccggtccacgggatcgacggcccagattggcccggggccgatcggacggtgcagcggcgacctggctcggctctgctcggcacaaagccgaccggccagccatggcaagggcggcggcacgcgtgcgtccaccggcgacggcaagcggcggcgcgggcggcggcagcggacggcaccccggcggcggcgacgaccgaaggcgatggcgagcgcgggtggcggaggcgcacggggaaacggggaaggaaaggaaaggggagggagtcctcaccggagggggcggcgacgaccggcgacgaggagcgacggagggaggtcgacaagcggtggacggggtccgggacgacctaa

SEQ ID NO: 72985 - DNA, 228 bp, Oryza sativa
  Clone ID: PAT_MRT4530_7330C.1
acggtcctgtatccatgacgaatttatactcgctaccgttaaagcgtcgggatatgctgcgacatagtgccaggacgggtgcaggtgatgctacacatggatcatgattcagaggtagctctacttaaacaaagaaaaggttacgccctgatagctatggaaacaggatcccctttaatacctggtggcgccttcggacagagctatattgtataagtggcggagacc

SEQ ID NO: 72986 - DNA, 724 bp, Oryza sativa
  Clone ID: PAT_MRT4530_73310C.1
atgcgtcagctagaggaaagctacactacaagcccagctgttgcccacgctggcttgtgggctgacatcatcaagggggggtcggcgccgacaggcgggacccgcatgtcagtggcgcaaggggtggccggtataccgtggaccgggaccacgcgggtggtccaccgccggtccacgggatcgacggcccggatcggcccggggccgatcggacggtgcggcggcggcctggctcggctcggctcggcacaaagctggccggccggccatggcaagggcggcggcgcgcgcgcgtccaccggcgacggcaagcggcggcgcgggcggcggcagcggacggcgccccggcggcggcgacgaccgaaggcgacggcgagcgcgggtggcggcggcgcacggggaaacggggaaggaaaggaaaggggagggagtcctcaccggagggggcggcgatgaccggcgacaaggagcgacagagggaggtcgacaagcggcggacggggaccaggacgacctaaagaacgaaaaggaaaaggttagagagggagaaaggggccatagaaggcgggaacgccggccgaaggcggtggacatggcggctctcaccgtcgcacggtgggaatggcgctccggcggcgaacctcgacggaggaggggtggacggggtggatctcggccacgcgaacccgacggcggtgacggcgcggtgcggcggcgagcctag

SEQ ID NO: 72987 - DNA, 2034 bp, Oryza sativa
  Clone ID: PAT_MRT4530_73311C.1
atgtccgccgcgggataccggtaccaggcgctcaaggaagccctagccgccgccatctccggccacgacctcgcccgccaccacgccgccgccgaccaccgcaggccgcacgcgctcgccgtcgtagcagggctcgcctccaacggctacgtcgcgtccctcctcgtctcccgctacttccgcctcggggacgccggcgccgcccgcaatgtgttcgacgccgcggcgacggcggcggcgccgcagaaggcgctcctctacaatgccatgctccgcgggtacctcgcgggtggcctcccgcggatggcggtggggatcttcggggagatggcggcggcggcgtgccttcccgaccgccacacgtaccacctcgccgtggcggcgtgcgcgcgggcgtcggagttcgaggtcggctggcgtatcggggcggaggccgctgcgaaagggttcgcgtccgacctcctcgtcgcgacggcgctgatcgggatgtatgctgaagctggggatatgggcgccgctcgtaaggtgttcgatggaatgccacagcgggatgctgtggcgtggaatgcggtgattgctggctatgcacgtggaggacatctgcgcgaggtcgtcgagctgtttatgaggatgaggtctgtggatgttgtgctcccgactgaggcgacactggtgaccctagtttctggttatgcaggttttggttcctgggagggccgtggtatgatgcacaccattgtaatcaagcttggcttccagcttaatctctttgtttccaatgctctccttgatctgtatgtcgagtttggctgtttgagagaggctgtgatgttgtttcgtcagatggcggtgaaagattctgtcacttggagtgcaatgattggtgggcttgttcggaatggaagaccggattccgctcttaagctattccgttggatggtgacaaactcgacagttttggtcactaggtctattttgctcaatgtgattatggcctgcgctgagttgggggagtggagagaaggaaaatgggttgaagagaactatgtgtgctgcaatggttttgaattcaagagagatccatctgtggtaacagcgttaatatacatgtatgcaaagtgcggaatgttagattcatcagtcagtcttctatatggggttgcagaagttagagatgatgtatttgcatggaacgctatgatcaaagggtgtggagagcttggactagtggaaaaggcagttggatttgtagtagaaatgcagaagataggcgttgatccagatgctattacatacttggagatcctacctatgatctcatcaattccatcactgaaaacagggatggaagcacacgctcagattgtcagaagaggtttcctgaatgaaagggcaattgctaactcacttgttagcatgtatggtcgatgcgggagccttaggcattcaattgaagtctttagcaggattgtggtcaaggatgtaatctcttggacgtctatgatgcaggtatatgcgtggaatggacatgttaatgaagttgttaaactttatgaggtgatgaagaaaacagaaacagaaccaaaccactacacttttcttgctgtactatctgcatgtaaaaacacaggtcttgttgaggaaggaatggaattgatcaagtacatgcaagagaagtgtggcctaaaaccagaaattgagcatatttcttgtgttgttgatatgctctgccgtgcaggacgtttgactgatgcataccaccttattaaatataataattctgaacacattaacaatacaatattgtgggggacgctgctaagcgcttcccgttcatgtggagatttggtgatcggagaagcagcagccaaacatctcttatctcttgatccagaaaatagggccaactctaagatgcttgctgatatttatgtcttgcttgggagaagggatgacgctgacaatctcctaagagtatcgatgacaagaggattggacataaaaccaggctgcagctggatggaaggtgtctaa

SEQ ID NO: 72988 - DNA, 164 bp, Oryza sativa
  Clone ID: PAT_MRT4530_73312C.1
gagaatataaaccaaggttagttaatgcactgggacatcaaagttacactttaataagatggaacagtgttattaccctcaaatacaagtctataggaagcagataagcgcgtatggtatataatggccagggcttttcatgtatgaagattggctgctgtaaa

SEQ ID NO: 72989 - DNA, 525 bp, Oryza sativa
  Clone ID: PAT_MRT4530_73313C.1
ggttcggccaaagggaaaaaacatttgcccaaaaaaagggggggaaacaagaattgggggggcaccacaaaaaatggtttggtatcaacaaaaaaaagggggcaaacgacgtttccatgacacaaaaaaggggaaaacaggggaggccagggggcccatttttttgggcccccccccttaggagagcttaaaacgggaaccggatttccttgggggccccgagctcaaaaaggggcccaaccattgccttgttcatgggggggggacccccccccaaaatttgaatggccccgggaggggcgggcaaaagagctttaaaaatggcctgggacaaaaacccaacgccaccggtccaaaatttaggggggtggttcaagacaaaggaaatcttaaagggaccaggggaggttttggccatgttgcccaatttttccttaaaaaaaaaggcgccatgcgggacatttgcaaaaaccaaaagaacttttgggaaatcaataggggtctaaaaaattgcccttgcaactt

SEQ ID NO: 72990 - DNA, 176 bp, Oryza sativa
  unsure (1)..(176): unsure at all n locations
  Clone ID: PAT_MRT4530_73314C.1
ccaagaaannnnagatnnnnnngcaaccgcgccganncgagccatggaccaccgtacctacaagggcnncgtcaaggagtactggaagccaccgcgctactacccctcgacnccnnngncagcgccnncgctccccaccgcggactcggaggaccacccccctggnnagcncagga

SEQ ID NO: 72991 - DNA, 742 bp, Oryza sativa
  Clone ID: PAT_MRT4530_73315C.1
gggctgcaggcacaaacaaagtcgtagtagttcatccatgccccatgcctctccacagaagtgcagctatccgcagcgcagtcgatggacatatttgcctagtactaataatgctatttctcatcagtacaaagcttgctgctgatcagcccctcgcggcggctgagccaatcgcccgatcatgccacgactgcggcggtgtacagatcccatacccgttcggcgtcagctcaagcggctgcgccatggcgcctagcttcgaagtcgactgcaacgacacggggaacggcgtctccaagccgttcgttggaaacatcgaggtcgtctccctcggcaatggtcaggcccgggtaatgaatcacgtatcttcttcctgctacaaccgcacgtcccgacagatgaaccctgcggacgtgtggtatctgaacctcacgggcacgccctacaggctctccgacccggcctgcaggttcacggtcatcgtggtgccggacgctggccctacatcttcgacgattacaacgtgtgtgcaagtacatgagcgggtgcgtgtccgtctgcccggcgaggtgacttgagcagcgccatcaacggcagctgcgtcgggataggctgctgccagacaaacatcacgacgggtctaagctattatcaggtcatgttcgactacaccttacacatccggggtctacaagcagaccccctgtagctacgcggtgctcatggaatcgtctagcttcac

SEQ ID NO: 72992 - DNA, 226 bp, Oryza sativa
  Clone ID: PAT_MRT4530_73316C.1
acttaaattggtgggttaaatattataacccattagattaaattgatcttagaagaaactaaatactacaaggtcccacctctccaccttcgatacgcacctacgaccgtggtacctatgcttccctccttttatcattttcccctttcttctttccttcatatatcgcctttctatatatcacccttcatgagacgattatcacaagacccgagtatctgttaca

SEQ ID NO: 72993 - DNA, 178 bp, Oryza sativa
  unsure (1)..(178): unsure at all n locations
  Clone ID: PAT_MRT4530_73317C.1
ggtgtgtttttttgtctctttggcgtcctntttgtttntgttcgtccttgccgttnttaccccgccttcgggtttcgggtggcctcagtcctcttncttttggctgctgccgttttgcttggtgatgagtgattctttcgctctgcccctttgggcggggggggttgatccttgcttt

SEQ ID NO: 72994 - DNA, 169 bp, Oryza sativa
  Clone ID: PAT_MRT4530_73318C.1
taactttcttcctcctcctcgacttcaggactcaattcgtcttctgatagctcagcttgatcggggcggatgacaatgggaggtggcagggccaagcacgacgagagcgaccaggggcttttttttaacatgatgcacggcgctgcccggcgacatgggtatcctcctc

SEQ ID NO: 72995 - DNA, 1501 bp, Oryza sativa
  Clone ID: PAT_MRT4530_73319C.1
gttcttatctatttttgctttcttctgcgtatgctcaattaactgctctttgacagccttcgtgtttgacagtggaaaacatttccttaccgtagcaataatgttgcttgcaggtataattcctaggacaaaactatatactactacctccgtcccaaaatataacaatttttagctatgaatctggacacacagttgtctatatttatagttaaaaatgcttatattttgggacggagggagtatatcatgacaggagaacgaattctaccctacaacttactgatttttcctggtctaatcttctgggccatcatgtcttgaattccgttccaaagatcatactatgaactaagtgcagcttctgtatgagagctgaggtgccactgatcagcagagattgcagaatgatctttctgggcttatgcaactcttttcatctttgttgtcacctcaggaaaacctataattcatactacttcttatgtggccttcaccttgacatactcatcatgatggttattgaagttttcgttatatagcatgcccgttggagaaagaagccgttgtaaagcacttccaaaccgaccccactgaaacaagacaagtatccaccagcatccaggcaaactaccaaatttgttgcgaatgatcattagtagaaaggttccaatgccaaagcatgctcccattgattgactcaaaaacctgagatctcttccagccaataatgttccttcaagactatgcactgaaggtgtcaccaataatgcacagaaatatggaatcagcactttatgcatctgttggacaaccataaaatcattagtaaagagactaggaaaaagccacggaacaagtgttcctactgcccccacagtcgttccagttattgctccaatcatgacaagtgatttcaatagcatccttgccttcatcaaattgcacttagctccatatatcaactctggcatgaatgactgtgcagtttgtgacaggggctcaccccaaacagtgcacatgcataggacattaaccataacctggtgggctgcaagtgttattgctcccatagaagttgcagaatacgtaagtaacgcgtaaaatgctaccttggaggtcattgttatgaaaacaggagctgcaatttcaaaaatctgcagaagctcacttgatgatgggattgtgaatgaaaaagctcgaaatcctctcttatttagattttgcatcatcataaaagctgcaacaatctgtgaaaccatagttgcccaggcagcgccagcaattccatatccacatacagaacagagaagaaggtccccaacaccattgataacactagcagctgccaatgccttcaagggaccccaagaatctttcatgcctagactagcactttgagcaactaagccaaccagaactgcaggccatgcaaagcctctaatctgtgcatatgtattggcagcagaaatgatatcatagttccccgatccagtaaaca

SEQ ID NO: 72996 - DNA, 2373 bp, Oryza sativa
  Clone ID: PAT_MRT4530_7331C.1
atgaacaactccatacgcacccttcttatacaggcctctatgcctccgtcctactgggctgaggctctcgccaccgccacctaccttctcaaccggagaccctcctcctctgttcaccactcactaccttttcagctcctacatcgcaccaccctagactactcccaccttcgcgtctttggctgtctttgttacccaaacttgagtgccacgactccacataagcttgcccctcgctcgacaacttgcttttttcttgggtacccggcctcccacaagggataccgatgtctggatctctccactcgccgcatcatcatttcgcgccacgtcgtgtttgacgaatcacgatttcccttcgcagcaactccccctgctccctcgtcttttgattttttgctgcagggactccctccagcggtcgctccctcatcagaggttgagcaaccgcgacctctcacggtggctccctccttggaggttgagcaaccgcgacctctcacggtggctccctccacagaggttgagcaaccgcgacgccttacggtggctccctccatggaggttgagcaaccgtacgttcccctcttcggccgacgcttgccgaacaacaccgtccctgcggcacgtgacgcccgatcagctggcacgcccttggtcagcgcctcctcgatcggcgctgccccgtcggtcggtgccacccgagccggcaccgtgtcaccattccgccatgtctacacccgtcggcccaccgtgacggtcccgccatcatcttcacccaatgtggttgtcacggctgctgctcctcagccgcattccatggtgacgcgctcccagactagctccttacggccggttgacaggctgacctacacggctacccacgccaccgctgcttctcctgttccggccaattatcgcagtgcgttggctgatcccaactggcgcactgccatggctgatgagtacaaggtgttggttgacaacggcacttggtgtctcgttcctcgcccccctggggacaacattgtgacgggcaagtggatattcaagcataagttccactctgacggcactcttgctcgtcacaaggctcgttgggtggtctgtggttactcgcagcagcatggcatcgactacgacgagacatttagctcggttgtcaagccggccaccatacggtttgttctcagcatcgctgcatcccgtgcttggccaattcatcaactggatgtgaagaatgtgtttcgtcatggtcacctacaggagaccgtctattgtcagcaaccctctgggtttgttgaccccgctgcccctgatgctgtctgtctattgcagaagtccctgtatggtattaagcaggctccccgtgcgtggtaccagcggtttgccacgtacattcgacagatgggatttctgccttcggcgtccgatacatctctctttgtttacaaagatggagatcatattgcctatcttctgttgtacgtcgatgacatcatcctcactgcttcgaccatgacagaccttggtgacctccacttcttcctcggcatctctgtgacgcgctcctccgccggcctcttcctctcacagcgccagtacgctgtggatcttcttcaccgggccagcatggccgagtgccactctacatcgacaccagtggacactcgtgccaagctctccgccaccgacggcctgcccgttgccgatccttcagagtacaggagcatcgctggcgccctacagtacctcacgttgactcggccggatttggcttacgccgttcagcaggtctgcctcttcatgcatgatccgcgggagcctcatctcgccttggtcaagcgtatcctccggtatgtgaagggcagcctctccaccggcctccacatcggctccggcccgattcagtccctcacggcatactccgatgcggattgggcgggttgtcccgattctcctcgttccacgtccggctactgtgtcttccttggagattatctggtttcttggtcctccaagcgccagactactgtctctcgttccagtgctgaggcggagtaccgtgccgttgctcatgccgtcgccgagtgctgctggttgcggcaattgctactagaacttcatgtcccaattgcttcggctactattgtctattgtgacaatgtcagtgctgtttacgtgacagcgaatcccgtgcatcatcgatggacgaagtatatcgagatcgacatccactttgtccgtgaaaaggtggctttgggacaagtccgggtacttcatgtcccttcatcgcaccagttcgcggacatcatgaccaaaggatttgcatacgagaataatagaaagcttagatttgattcaattgtttaa

SEQ ID NO: 72997 - DNA, 455 bp, Oryza sativa
  Clone ID: PAT_MRT4530_73320C.1
agcctgatcagaaaaaaaagtaaataccataaatttaccgacaaatgcaagggaaaatttgcctaccaaaaattttacaggatcacaacacaccacattgcaacatgcctaaaaacgatggaaatggagagaatccttacactacttgcaaataaagctgggctgatatgtgccatttcttacaagaaaaccagcttccaagaaaacagaaaaatacagaacttgaataatcttccggatggcaaaataccattgttccaggacttattaacaggatttaaagcattatgcaattacagaactacagtttccaaaaaaatatagatttttgaaaaaacctgcaatcacggattcaccagttgtgcagcatgcagcttcatgtttttcagatccatgcaggactatactgaattaggaccactcgtacacacaaagcttagtgacatgtttcattt

SEQ ID NO: 72998 - DNA, 250 bp, Oryza sativa
  Clone ID: PAT_MRT4530_73321C.1
cgtgcatcctgcgctgccttcctgctgcacccctacctatctctttctatcctgccgcgcgtcgccatggctgacaccaccaatcgcgtgtacaccatccccaatggccagcaggtcatcctcagccgcgtcgggctcggccggcaaccccagggtgtgggacgcaccgctcgagttccggccgtgagctgtcacctgtcgccgtacccttgcaggcggacgtggcgacgccggcgtggtggcgctcacg

SEQ ID NO: 72999 - DNA, 3748 bp, Oryza sativa
  Clone ID: PAT_MRT4530_73322C.1
ttaccgagccccaccgccgtcactggtaggtgggcccgtgcaccgtgggccccgcgcgtcagcgccgcggaggctgacacgtgtagtacagtcgcctcctacctccctctgcgtcgcgttggcgtctcgctttaaaaactcgcaacgccgtggcctctcgcctcttttggagcaaggccatgtgaagcctctgaccttccgataccttcccctcttccgccgcgtctcgcctccgcctccgcgcgctctcgccgtcgagctcccccgccgcgccgcgtcgcgccgcgcagcgtcgccttgcgggggggaggtggggggagggaagcttcggtttccgtgcgggatgtcgtcgaggccgtcgtcgtcggcgtcgtcgaggcggagcagctcgccgttctcggcggggagcaggcggcctccgacctcgtcgtcgtcctccgccggctcgtacctcacgggccgcctcatgccgcggtcgtactccacggcgtcgtccgtgtcctcatcctcccatttcttcggcggcgggggtgggagcgggggaggctcgaggtccaccaccccggggcggagggggagctcctcctcctccttggtggggccggttccgtcgccgccgtcgcccgtgccgttccccagcgcggaggagctcgtcatcgaggacacctcccgatccggggacagcatatccgtcaccatccgcttccggccgctcagcgagcgggagatccagcgcggcgacgagatctcgtggtatgctgatggggaacggcttgtgcgctgcgagtacaacccggcgacggcttatggttacgatagagtttttggtcctaaaccgaatgatgaggcagtagactttgatcaagaaatatcagagagaaaatatcctctctgaagcaagagcttgatcagctaaggagaggatggattggagggtgctagtcaggaagaaatcatgattttacgccaacagttggaaataatcccattagccatcaaggatgtattcagcttaattcaagatactcctgggagggaatttttgcttcgtgtctcatatctggaaatctataacgaggtgataaatgatctacttgatcctactggccaaaatctgcgtgtgagggaagatgcacagggaacatatgtagaaggcataaaagaagaagttgttttatctccagggcatgctctttcttttattgctgccggtgaagaccattttcaccacaatttgatgattgaaagcagcgctcatggtgacgagtatgatggagtcatgtactcacaacttaatttgattgatctagctgggtcagagagttctaagacagagactacaggactgagaagaagggaaggatcatacattaacaagagtcttttaactctgggaactgttattgggaaactcagtgaagggagagcaacacatataccataccgtgattctaagttgactcgcctgctgcagtcatcattgagtggccatggccatgtttcactgatttgcacaatcacccctgcatcgagtaacatggaggaaacccataatacattgaaatttgcaagcagagcaaaacgtgttgaaatttatgctgctcgtaaccggatgatcgatgagaagtctttgatcaagaaatatcagagagaaatatcctctctgaagcaagagcttgatcagctaaggagaggattgattggaggtgctagtcaggaagaaatcatgattttacgccaacagttggaggagggccaggtaaaaatgcaatctcgcctggaggaggaagaggaagcaaaagctgctctgatgagcagaatacaacgcttgaccaagttaatacttgtttctacaaagaacaatattcctgccttgacagatacgtctagtcatcagcgccataattcggtcaatgaggaagataaagtaagcacatcacaagatagttctatgcttgtccaaaatgatagtgccacgaaagattcgctatcatctgcttcgccagatgctgtggatgagatcaatcaactaagatgtgctagtggagaccattcttcgattgctggttctggacccgatgaaatgcagggagggatcaccgcatcggatcaaatggatctactgattgagcaagtgaagatgcttgctggtgaaattgcttttggtaccagttcgctgaaaagactgattgagcaatctattgaagaccctgaagggacgaagaatcaaatagataatttagagcgtgaaatccgggagaagagaaggcatatgcgagccctggagcaaaaacttatggaaagcggtgaggcatcagttgctaatgcttccatgatggatatgcaacagacgattaccaagctgacagctcagtgcagtgagaaggcttttgaattagagttaagatcagctgataatcgcgtccttcaggagcagctacaacagaagaatgtggaaatcaatgagttacaagaaaaagttctacgccttgagcaacagctgacaacaaatactgaggcatcccctgaacaatgcacagaacatgagcttcatgatttgaaatctaaacttcagttgaaggaagcagaaagtgaaaagcttaaatacgagcacatgaaaatcactgaggaaaatcgtgaattggtcaaccagaacagcacattatgtgaggaagttgcctatgcaaaagaactggcatcttctgctgctgttgaacttaagaatttggctgaagaagttaccaagctatctgtacaaaatgctaagcaggcaaaagagttactaattgctcaggagttggcacactctagggttcctggtagaaaaggccgctcagctggcaggggcagggacgaggttggaacttggagtcttgatttagaggatatgaagatggagctacaggctagaaaacagagggaagctgccctagaagctgctttggctgagaaggagcatcttgaagaggagtacaagaaaaagtttgatgaggcaaagaaaaaggaactatctctggaaaacgatttagcaggaatgtgggtacttgttgctaagctgaagagaggggctttaggcatatctgacttgaatgttgatgatcgatctattaatctagctgacattactaacggtacaaaggaaaacaaagctgacaaaaatgtagctgtagttgagaaacaactttcagataataccgtgaagtcattgactgcagaggaatacagaaatccagaatttgaacctcttcttgttcgtctcaaggctaaaattcaagagatgaaggagaaggaaactgattccttgggtgacaaagatggaaattcccatgtctgcaaagtatgttttgaatctgccactgctgcagttttgcttccttgtcggcatttttgcttgtgcaagccttgctcgcttgcctgttcagaatgccctctatgccgtacaagaatcgcagacaggataattaccttcacctaaagtgcatgttatcttaaaaggtaacttgaagcacccaatctcttcttgtaaaatcatcagtggtatatgattcttttttcccctagcaaagaaggtgcctttttatgttccttctgtgtttgtatcccaattcttttttttttttggtttgctctatagctttcccagttcaacctgttctttgttgtacgagaagttacaagatataacttctctgcaaatatgtatagatatgcgactcgacagtataatacatttgcttttttttttcct

SEQ ID NO: 73000 - DNA, 2135 bp, Oryza sativa
  Clone ID: PAT_MRT4530_73323C.1
tcagctttttgaaagtgccaagaaggcaccaacgtatgccaagatgtttgtgacaacgaagacagaatagttacgcgagtaagtgccggcaaacggatactgccgagcgacacgcctgtgatgtctctcaggcaataaactgctgaacataaacttcacgaagctgatccacgacgccggcttagtcaagatcatgatgctcaagaccaagacatagatcccattgattatgacttcgtatatcacaatattgattgtcctccttctcatgacggcgaccagagccgcccagaaagccacgatcatgccgatcatcgaaacccacatgaagtgcagagctaaaatgaagctcttccatgaaccagatgctttcccatacacaataagtatcactgcgacaacggaagtcgtcatggcgacgctgtcgaagacgatgaagaatttgtaggcggtcttcgcctggaggaccgccttgccatcgtccccgtagcccccgggcacgttgaacgtggcggagaaggcgacggtggcgacgagcacggccacgacagcgaggctgttggacgtcttccttatccaatctgttgtgtcattgcctctccattgattcaggtggtcttgcctctgcgggcaggattgtgccccgtaggcagacagtgtcaccacaaggcttattttagaccaggtatcttctctgcttgttctcatatctctcttcttcctctcctttttcccggattcagtctcaaggagaagatcagaagacatggagaggaagctagacgagttggcagcgagatcaaacggtgtgtacccatcgttgttcatgatgttgactcgtacgttgtctccggcggaaagtagtgcggctagtcccttacaggggacgcggctgcagccaccgcgaggtggagcgccgtgttgccatccttgtcctgcgcgttcatgatgccgcaaagcatcgggttcttgacggcgagcgagatgaccggcgcgtgccctttctcggccgcggcgtggaggaacgtcctgccgcggccgtcgcggagctcggcggcgtcgggccaggcagacatcagctcctcgacgacatggtggtggcccatccgcgcggcgacatggatggccgagaggccgtccgagtccttcaggaacgccgtggacggcggcgcggcgcgcacgatcgcgcttacgatggagcggtcgccgtcggacgacgcgagatggagcgggctgctgcctttgacgtcgcattgtccagacagagctggcttccatttcaataccaggtcgaccatttctgagatctggaagacggcagcgtgcagagcattctgcttgttcggcccaacgggcgatgcatcgctgcacgtggtaatgatcgctttcacggctgtaaccgacttactcatcaccgccaagtacagcggcgacacgccggcggcattcagctcggaggacagctccggcgccgccgccgagacaagggcctctaccgccgcgccatggccgttcctcgccgccaggtgaagggccgtatctccggcctcgttcttgcatcccaggatgctgtccagggccagcagctggacgatggccgtgacggccccggcgtgtccggctctcgccgcgcagtgcagcggcgtgtcctgcgacgagttccggcgagagaggaggctgctctccttgaacctgaggtacacctcccggatcagctcgtcgtgtccttgctccgcagccacgtgaaacacggtgttactctccgcgctcacctctgatatgttgcactggccatgccgctggtcagggggcccctgacttggcggggcccagggcgcttgcactgctcgccctgccccagggccgggcccttccacctctctaccattatgcggtaccatccaagtaccattgacttgatcaagatgtccctgcgcaacaccaccatgccgtggctgaagaaggagcgccatgacctcctcggctcgccctttggaggcagcgagatacagagccgggcacatctccaagccacctgcagaatcacctctcgccgtcaccgccgcctccgagccatggtgctgcgaagaacagcgcgcgagctggatgtcctgcatctgacgatgatgatccat

SEQ ID NO: 73001 - DNA, 519 bp, Oryza sativa
  Clone ID: PAT_MRT4530_73324C.1
cggacgcgtgggcgcgggtccgacgaggcgatgcgacgagcacttgcatgtgcggggctgatcgccctgatttgtatgtgttaactgccgtcgtggctcgtggccggttatggtgggctcaccttcctctcgccgccttttgtctccttttccggttctctcctctgtcgttgggcaaaagctatcaacgattctaactgccaaggaggagtcgcctataagtacctgagcccgggagcaccgctctcttcacaaccaagcaaccatcgattcgatcctagcttaagccgagtgaagtagctagcaggacattgttggtagtgcgatcttctccctgttatgcacaaaggtctaacacagtagtgccctgctcctcctcttctcggccttctgcttcctcgcccggcgagccgccgccgactacagctactggcagagcgcccacgccacgttctacggcggcggcgatgcgtccgcacgatgggccgggcgtgtgggtatgggaacctgacagcaccg

SEQ ID NO: 73002 - DNA, 598 bp, Oryza sativa
  Clone ID: PAT_MRT4530_73325C.1
gtacggcccaattttcaggacaaacataattgctcaagacatgatcgtgtcccttgatccggagctgaacaacttggtgttccaacaagaggagaggctcttccagcacgtcaggaacctggtcctccggctcttcggccctgaaaacctcaggcgagcaatgctccaggagatgcagaaacgggctcaggccagcttgctctcctggcttgatcgtccgagcatcgaagtgaaagaagaagtctcaagtggacgaaaaaatgtcatgaggatgttgagagaattgctcgacgagaggaagaagaagacagcacatcaattggaaagcatcgacttcttcgatgctttgattgatgagctgaagcaggagaagcctgcagtgagtgagaacgtcgcgttggatctgctcttcttgctgttgttcgctagcttcgagaccacctcatccgggatcaccgcgatactcaggtttctaacggacaatccaatggctttggaagaactaacagaggagcatgatcgcatcctgaaacgaaaggccgatccaaactcccaaatcacatgggaggaatacaagtctatgaaattcacatctcat

SEQ ID NO: 73003 - DNA, 391 bp, Oryza sativa
  Clone ID: PAT_MRT4530_73326C.1
cccccccccaatcaacaaaaataaacatttcattcaatttttacaggaacaggggcagaaccaaccacattcaaaggcagggcccttggggggaaaaaaaattaccacttggaatacaaggaaccagggaactcatcatataaacaaaactcgggatgggatatattttcagggggggggtaactcatcctgaaaggggcaggggctttgggggctgacccctattccttgaaggacatgacggtctcaaacgcccctaccaaagccttaaccctgtttttcttttactaaaggagttggtttttggttccctcaatcacatgggggcttttgggttcattttttctccaacccttggccattttcgttctcgccttttcctttttttgaa

SEQ ID NO: 73004 - DNA, 1950 bp, Oryza sativa
  Clone ID: PAT_MRT4530_73327C.1
atggatctcgacaagtccacttccaccggtgcatccctgaagaagctgcaggaggacggcgctctccccagtcacgagaccatggagagagaactaggaggtattgaacccgaacctatcctgggccgcatggttgcggttgaggactatattctttgtggttttcttcctctgccttccgaatttcttcttcttgtcttgaatttctacggtctttcgttgctccatttgaaccccaattccatcgccttcctcagtattttttccgatctttgtgaggcctacattggggtagagccgtttcttgatctctttcatttctactacgagttgcgctggatggaacctaagaagatagagaattcggatcccgtcttcgttgtcccagaggaacaaccagacaagatttcgtcttggaccaccaaacccgccttagccccctcccttcagtccttcatcgatatcatcgatggcctccgaattcgagggttgtcggggtatgaagtcgctgccgacttcattggtttgaacagcgaaaccgtggagcgccgcgtcggtcaagtgatgatcaacggccccacaacggcgagcaacgtccctatccccctttgcgagaaggggacagccgagcgtgaagctgcaatcaacgatcgcattgtgattcatgtagtgcaggctctccctctgactgacgtcatcgggccgctcgtggaccaccaggcggcggcttcgttgaaagagggcgtcacccaggaggtgtccgacgttgctgctgctgctgccgctgccacgaccagtggcagcaacattccaaaaaagggaaggaagttttcctccgtggtttgtaaccgtcggaaggcgcccactccatcggccgtcttgatggcaattacggcaatccttcatagggcggcgcgggcaaaggcggcgcaagacgggtctggagggaactccagtgcgtctcttgcagcggcttcgaccgaggttgtggtcgtgcccaagagtcgtgaggcgacgcccagcggctctgtcggcggccttgtgcccgctcgaggcccgctcgctgacatcctcacctggggggagctccaaatcgagatggagcgcatcctccaggctggtgctcgcaggatagggcgcgagattgaggaggcgaaggcggtggtgtcatcgtcggtgaacgaacgcgccaagctggcgcgtgacctggcggaggtccacgaggacctccagaagatgagggagctggtggtcggcaacgagcagcagcggcaggggctcgagcaacacatgtcggagctcgagaacaacctgtcggagatccgcggctcgctgtggaccacctacaccgggctgaaccagctcgccgtggagtgcggtgttacgaccaccatcccggcgaatcccgacgagttctcgctgatgacttcacttgcgaaactggcgacggcgatggaggagatcccctccaagcatgcggccaggatcggggaggagacgtccaatgggatctacatcggggcgtgccacgtcctctcgtgcgtaaggttggcgcatcctgaactcgacctccagaggatcttggatcagggggctgctaacgacgcgcacctcgagagtgcgctggccgaccgagatcgtcgcatccaatactggaggacgaagttcgaggtggccgaactggagaggactatggtggaagtgaagaaggatcgggctgtggaagcactccgaggtcgcgaggtgtggttcaactcgtacctcaggagctgttgcgcggtcatggctggagtctccagggaactccaggtaccacgcggggatcccgaggagtcggcggccggatatatctcgtggttgaatggggcctgtgcccagctcgaaggtatcgacaagcatatcgacgaggccctgaagcaggagtgccgtcgatcgagccgatatgcttga

SEQ ID NO: 73005 - DNA, 447 bp, Oryza sativa
  Clone ID: PAT_MRT4530_73328C.1
atggcgatgtggcgctgccgcctttgccgttgcatccgctttaccccgcggccactagcgatggatccactagtcccactatcgtcggcgctagatccactcaccggtcagcgcagcgtcttccttgagaagggtggcgcgatgtcgtccgagtcatcggagtcgtctctgtcgccatcgttgtcgtccgtgccacgctcccctcgaagtccaacgacccccgccttcctccactgctacttgcggcagtcgctgtccccgctgatgacccctagctatgccccctcccctgcccttccccgtgccctgccgctcttccctgcttccgttgtccaccccgccgcctacagcagtaggtcctcaccacgagatagcaacagggggcgtcgggatcgatgtctggaggcacgaggagacggcggtcgaagggacagaggaggagaatga

SEQ ID NO: 73006 - DNA, 1339 bp, Oryza sativa
  Clone ID: PAT_MRT4530_73329C.1
gactgaaacgaaataaatttattgccatatctgatcacaaaatgattacaaataacaacaacgacacaactcaaaagatcggacacatattcatatgattccctttaaaaccattttatcgtattattgtgtcgatacagcagacctgctattgaacatgacaaaacctttatccttcctgatctagctcaggaagagtaaagtagggcctcaaatcattgctttggttcagtaatttgaggcccttggcaataactaaagtcccacacgactaaagcacccaatacatcatttcactggtgagcttgtacatctcagacctgtgcttcagcatgcggagccctccaccattggcaccaccaccagcatcatcctcatcgtcatcgcagcgctccacctcgacggcggttaacacagcgaacagctcctcgccatcgcgatgatcctcatcggtgcggaagaacctggcaatgcagaacttggcagagcctaggttcacaaggtatgagctgacaagcttgagggcatcgggtggcgtgaactccagaggaaggctgagaagcactggcagatggctgctatcaaggtccaaagcggagaggaccaagctcctcttcctcctgtctctggtgctgtgtgagaggccaaaccaaaggccgtgctcctggcaatactcggcgagaccaacaaatggcagggtccagccggtggccactgtgctccacacatggctcactgtgttgaagcaatagatgccgccattgtcgtgcgtggatatccagatgtccgtgtcaccaaccaccgcataggagtcgacttggaagtcagacttgtgggacagcagtggcggcggcggcgggagagcgcagcagcaccagtcctcatttaatctatcctcgtaaatgagcccatggaagcaggggacgtttccgacctcaacatggtcaaggatatagaggtcgtccccaacagtgacggaagcagtaggcaattccagttggtagggaagggcgggcaaggtgcggacggcgtgctcgccggggtcatagaggacagtgcggcaagtctggtcggcggcgaccaccatgttatgattgcctccaaggagcaagaattccatctgctgtttcccaggcaacttggagaatggagggtagaaggtcatggctgggcaaggcaggctcgcatactccgccgcgtcggtgcctgacgccacgaatggcaccggggatggacgtggcaggaagaagcgctccatgtctatgttgcgcagtgtgtagttgctgcggcggggagcaaactcctccaacaccagataaacaaaccgacgaatactcat

SEQ ID NO: 73007 - DNA, 416 bp, Oryza sativa
  Clone ID: PAT_MRT4530_7332C.1
ttccactttcccctatttgtgtttgtccgccgacggcgacgccgacaatggtctccagccggtgggaccgaccgaaggtgtacccagctggcaaggctatgggcgacgtccgtagacataatgccgcttgcagactgttacgcaacatcacacgccaaccctcgaagtcatggcaaacaaggtagcggagggcaactggagtgctcaagaaccaagaggagggaaggcgctacgcaaagcgtgggctagaaaactacgtgctcgactggaccagctagatcacgccatgtatcaacaagtactacactagagcaactaaatgagaaaggaatgtaaatggttggtgattgctctgctgtcaggtacgtatagaggttcgcttgaaagcatcacacccattacaagcattacatatg

SEQ ID NO: 73008 - DNA, 240 bp, Oryza sativa
  Clone ID: PAT_MRT4530_73330C.1
atgagcatcttcgaagactgggccgacaaatttattctggagattgacaaagtcaccagagacacctcgttgttgacggcttggatggtgcatcactctgcaatctgcatcagtgcaactgtgccccttcggttacttgaaggcacagtagaaaagaatcgagaaacactagtgcttagcacaagacaccttggacatgttgatgtggaatatcctgctttggcggaaaagcatccgtga

SEQ ID NO: 73009 - DNA, 309 bp, Oryza sativa
  Clone ID: PAT_MRT4530_73331C.1
atgtcaatcgagcttgaccagcctgtgatcggtcacaggcgacaggacgggggtagtgcccccacgttccgccctgtgtcaggcggagtgggggcagggggcggcgctggccccacctggagccaggcgaccatgtcacttccggttgaagcaaaagatagcggtatgattagggccatgtgggcccccgatggaggggtaggtgcaaacggtgcatgtggtatccccttggactataaaaggaggacctcgcccaccgagaaaggggacgactctcaaagaactggagctcggaggaagaacagctag

SEQ ID NO: 73010 - DNA, 1224 bp, Oryza sativa
  Clone ID: PAT_MRT4530_73332C.1
atatgcactgtagttatgatattgcagaaaataagcatgcggttaaaaaagctttaaatcatgttattcgtcgccatgttgttaatgaatatggttggcaagatcgtgatacaactcgcattggttatcggaatgataagcccgtgatggtggtgttactagagcatttccattcaacccattctatttatcacactcattcaacttcaatgattgctgctcgtgaacatttttatttaattggtttggggagcaaagcagttgatgctaatggacaagcagtatttgatgaatttcatttgttagaagatgacaatatgaaagataaattagatcatattcgttctatttataaacaaaacggagcagcagtactgtatatgcctagcgttggaatggatttaagcactatttttgtgagtaatacgcgtctagcaccgatacaagtgattgcattatgccacccagccacaacatattcagaattcattgattatgtgattgctgaagaagattatattggttcagaggcttgttttagtgaaacattataccctttccaaaagatgctttaccttacgtaccatcggggttagcccctaaaaaagtaaaatatctgcaacgcgaaaatcttgaagtggttaatattggtattgctgccactacaatgaagttgaatccatattttctagatgcattaaaagtgattcgtgatcgagctaaagttaaaattcacttccactttgcattagggcaatcgaccggcgttactcatcctcatattgctcgttttattaaatcctatttaggcgattcagcgacagcatatcctcacgcaccttatcatcaatatttaaccgtgttacataattgcgatatgatgcttaatccattcccatttgggaatactaatggcattattgatatggtgactttaggactggtcggcatttgtaaaaccggtgattaagtacatgaacatattgatgaaggactgtttaaacgcttaggtttaccagagtggttaaattgctgatactgtagatgaatatattgaatgtgcgctacgtttagcggaaaaacatacggaaccgtttagcattgcgtcgacatattattgagaataatggtttagctactttatttaccggcgatcctagtcctatgggaagtgtattattagccaagttaaatgaatggcgagaacaacaaaaaacagtcgcg

SEQ ID NO: 73011 - DNA, 619 bp, Oryza sativa
  unsure (1)..(619): unsure at all n locations
  Clone ID: PAT_MRT4530_73333C.1
ttttngatatcaagcttntccgatgncnnnncccaggagctnagcagcgatggtctgatgacctcntctcgacgagtgtttagaggtngtactgcctgtgctaaaaantgantgtttcncnnaccanntattgantcgggccccgntcaaataaagagacagtcngaggatgggcatttgaatngatnccagtaacttnctgancttctanagntctccctcaccanaganaactntcncgacgagagccgtggcgccggnnaaacncccncccnccanggggggcccnntncgctgttctccccncacnnnntngaattccanccccctgggcgncgatttcncagttcattaactgggaanaccatnttcgttacccgangatttcaacattnccgacactccccnttttacgatcctctggcggtngtcntcnaaaanggcctccncccgttcggcccncccgccgntggcngngacctccaaaangggantggccagntggtacnccttngtnttttnttanaanacccnntttcattggngtgcnccccccacggggcctcttnccccaaantnaaggcngttntctcccgnntgnnntgcccccctttcnttn

SEQ ID NO: 73012 - DNA, 329 bp, Oryza sativa
  unsure (1)..(329): unsure at all n locations
  Clone ID: PAT_MRT4530_73334C.1
cctgcaaggttnccctgcccaaatgctaagcncctcgtatggtcacacacgccctggtcatcaatacagtagcncnccaatggcatatgcatggttttcaggctgccattatgccatatgggngtcagtttaagtatactaataaaatgagtccctagacagtgttttgtttaaagtttcanaataaaatccaggctcagtacgtgctcggtgtgttatnagcttntgctctgcaagctttatgtgtcatgtatatgttacanaaataaatgtgagacggctttttgcttaaaaaaaaaaaaaaaaaaaaaaaaaaaaaaaaaaaaaaa

SEQ ID NO: 73013 - DNA, 480 bp, Oryza sativa
  Clone ID: PAT_MRT4530_73335C.1
atgctcactttgcagtgcagtgactgtgaaaaggtggattgtgtgcttcctttggctaacgtcagtggctggctgctggagtgctgggtgccgtggtggactggctgtgtagatgtgtccgcttcgctgtgcgccgtgcccgtgcgtgcatgggcagatcaactcgtgagcatcgtcatcgtcagcagagaaaatggcaaaacaatatcttcggtttttacgtgtgcggtgcggtgcgccgtgtctcgttgtgtgaactgggaattgcagtgtggaatggagaaaaacagagaacagttggagacggcgacggcatgttggctcgggagtcgggacctctcactcccctctagcgtggccgggttgaaggccgtcagcctgaaagtgcggctcggcccaatgtggggcactgttcagtgtgagggggtgtttggtggagaaaatggcgattataccatcgttaaaacaaggcttcgctga

SEQ ID NO: 73014 - DNA, 450 bp, Oryza sativa
  Clone ID: PAT_MRT4530_73336C.1
aggggggtgtgcccatagagcacatgaaaagtctttcagcccacagaggcatgatcacctgtatagaaccaatattctgtcagatacaacctactggcccatttggatggacaagattgcgtaacacaacacatataaggttctagacactgatatacgcctctcactctgaccatctgatttagttcaagctgataaaaaaatgcagcttctgagctactgcagatggggactgggtgtacttgacagtagccttagtgtcaatcgtcatttgctctataatactctggctcccatcgatcctaatatcctgcaggtcgacctactattcaaggcccgggccttttaagccatccggaaaaacctatctagagaaaactcttatctcgagaacctcgtggtgctaggacacccctgtgcgaaattgacttacctatacattctttcata

SEQ ID NO: 73015 - DNA, 1212 bp, Oryza sativa
  Clone ID: PAT_MRT4530_73337C.1
aaacaaggggaaaaaaaaattattttctgatttatctatatagccttcagttcaaagtttgatacttatactggaaaaggggaaatggacccagaacacgaatcaaccggaatttaagttcagttccagcacaattccaggcatccgcccgtttggctgatgtctacgtactgcaaaaatggcgctcatgtctgctagaccactaccaaattaggccaagaaaaaaaaaaccaagcattaagccttgaacattcacaggacaaagtctgcaaatggtccaagcaaactgatgcaaccatgcaaatttcagtcacagttacactgcggaaagaaggcatacatgtcaaggcaacatggcatgccatcatcacgccagttcactgatacagcatccagtcataatggagttgcacagaccatattactacaagggcaaagtcaacttgcagcacattgctgttcgttttgagtagcctcagtcacagcttagccgcctccaacctggcgtttccaggagtcctccacaataagctcgtcaacgccccagtcctcatagcttccgtcaggtaagtaccgcctaattgtgaatgggatcttgcgtgctctcagctctttcatggcaatctcaagaggatcagtttctccctcaagctcaaccataactggagcattcatgcttatctgtaatgcacgtgtacccaggatgcgggcacgctcatactttgtcatatactttgacgttttgcgtgggcgctgagttttttcttgttccttatcttcagcctctgcccctacaacctcatcagggccatcctcgttattctcaggttcctcttcagccccttcctcaatctcaggttctggtggctcatcctcataccccatgtccatgtcgttgtagtcgtcgtccgccatggcttccgccgcctctgattccggccgctacaatcgctagggtttcgccgcacggcggccaagcggtgctcgacagggagaaagggggcaaatgggactctgggagagcgcaacggacggcccaccagcccgggaaaaagaacggggacaatccccggagaatcgtagaaggatctggaccgtatgatccgtatctgcagaaatttcaaaatatggcattcaatgcgccctgcagaatttatcagtctatccgttgttttcagactatgaccattaggaatttaggatcccggccgg

SEQ ID NO: 73016 - DNA, 428 bp, Oryza sativa
  Clone ID: PAT_MRT4530_73338C.1
cccacgcgtccggctcaatccctaaccaagatcgccagatcggccaccgccgcccgcgactcccccgcccatcgccatgtccgactccaaccccggcgcggcgaaccctgccctggggccggacgccgacgcggcggccggcgagggccttgagctggcgcagttcgcggcggggcgcttctggagcgtggagctgacgtaccagcgtctgccgggcgtggcgcgcacggaggtgggctactcgcagggccaccgccacgagccgacgccagcccgagcggtactcgccggaccgtgcgctcgattagccggcgttccattgcacatttgcaggtgtgcatgtttactgtagtaataactaccggcatcgtaaactcgtcaaaggaacctgcaaattctaagtcgcggcgtacgcgattgtgccattg

SEQ ID NO: 73017 - DNA, 1432 bp, Oryza sativa
  Clone ID: PAT_MRT4530_73339C.1
ccgggctgcaggaatcggcacgaaggccaaagacaaagcgatcgatcggagaacgaacgaacgaagcgcgtcgcgtcccactcctcccctcctcctcctccgccgcgagcgcgcgcacgtgcgtgcagcctccgcctcctccctcacgccaccaccaccaccacctcgcgcgcgcgcgcactactgcaccaaaccccccgcactaagtggttgtgttcttgttggcgaggaggagagaggggtggggtttgtggtgtcgtcgtccatggcggcggtgatgcaccggtcgagctcggatggcgggtcgagcagcgggtggtcggaggcggcggcggcgtcggcggccggggacgagagggccgggtgggaggtgcgcccgagcgggatggtcgtgcaggcgcgcgaggagggccccggcggtggcggcggcggaggaggagggatggggatcccgccgaggccgccgccgccggagatcaaggtgcgggtcaagtacggcgccgcgcggcacgaggtcgccgtctcctccattgcctccttcggcgagctgaagaagctgctggcggcgaggaccgggctgccggcggcggaccagcggctgacgtacaggggcaaggagcggggcaacgccgactacctcgacgtctgcggcgtcaagaacaggtccaagctctacctcgccgaggacccgaccagcgtcgagcggcgctacatcgagcgccagaagagcgccaagatcgagaccgccaaccgcgccattggcgccatcgccttggaggtcgacaagctcgccgatcaggtaaggagcatcgagaagtcgatcacccgtgggagcaaggtcgccgaggtgcagatcacgacgctgatcgagctgctgatgcggcttgctgtgaagctggacagcatacacgctgaaggggactcgtcttcccagaagaacattcaggcgaagagggtgcagaaatgcgtggagacgctggatgtgctcaagatctccaacgcgcggttgcagaatgtgatagtgacgaccaaatgggagacgttcgatgctcctgcaacgacgcagtgggagctgttcgactgaaggtgaaaaacaaaagaagcccagaaatgcatagcagtacaaaaaacaatggtgttggttttgtttgcgtttggttggttcgtatcttgagttgttcatgtcagtttttgtggcatgcatgcaaaattggttgtaataatggttggtgagctggtagattaaattaggtggtagaggaaccgaaaaccccactgttaattgtctgtaatcatcgtcgtcatacctctcccgactcgatcgattcatggatggatcagtccaataaaaggaaagcagcagcactgttctttctttcaaaaaaaaaaaaaaaaaaaaaaaaaaaaaaaaaaaagggggggggcctcgtgc

SEQ ID NO: 73018 - DNA, 107 bp, Oryza sativa
  Clone ID: PAT_MRT4530_7333C.1
gtaattagagtaaaatggtgaaggtttcattttctgtttcataccctttgagcaaaagttcctttagaacttcccaacttttaggaataaaagctttctttaccgtt

SEQ ID NO: 73019 - DNA, 305 bp, Oryza sativa
  unsure (1)..(305): unsure at all n locations
  Clone ID: PAT_MRT4530_73340C.1
ctaagggcagggggaagtacatccaaacacacaggaactcgttgttgtgtgtgacatcggaaactaaacgcactagctataaacgaggccaatagtaacacancaccctatataaggcaaatatttttactcctgttgcaacaataactactgaactcccttctataatactatgaaagactattgagtgatgctgatagtagcatcactaaatattatcacaactgcagggtgcatcaaagacacttctactatgctgatgggagtcagagacgaacacacacatctagttacataattgatca

SEQ ID NO: 73020 - DNA, 1174 bp, Oryza sativa
  Clone ID: PAT_MRT4530_73341C.1
ccaagagttaaaagctcttactaaatttccttcaaaatccacatgcatttttccattccataggaatttcataggatttggaaagcttcaatcctttgaatcaaagggccaaataaaaaaattttctataaaatttgaattctatgaaatttctaaaaaaatcctgggattcaaagggccctattttatggctgctaactgactcaacaaccagcggaaaacgtcgatgattagttaatcccacaaaaggaaataacgcgtgcgtcgatgatcaggtaatgaagcaaatacagcataactatactgcaccttgacaagcagtgcgtttattgtaacacagatatatatactcccacagtttcaaactttcaatggcacaatcgcgtacaccgcgacttagaatttgcaggttcctttgacgagtttacgataccggtagttattactacagtaaacatgcacacctgcaaatgtgcaatggaacgccggcaaatcgagcgcacggtccggcgagtgccgctcggggcggcggccctgcgagtagcctcagccgtagcaacggatggggtcgttgcagctcttcttggcggactggccgcccttctcgaggtagcgctggtggtactcctcggcggggtagaacctcgtcgccgggaggatctccgtcacgatcctctccttccactccttctgcttctccgccagcgaatcccgcgccgccttctcctgctccgccgtgtagtagtagatgcccgaccggtactgcgtcccgacgtcgttgccctgtctgttgagcgtggtggggttgtgcttggcccagaagacgtcgaggaggacctcgtaggggcaggccttggggtcgtagtgcacgcgcaccacctcggcgtgccccgtgccgccgccgcagacgtcgcggtaggtcggctcgtggcggtggccctgcgagtagcccacctccgtgcgcgccacgcccgggagacgctggtacgtcagctccacgctccagaagcaccccgccgcgaactgcgccagctcaaggccctcgccggccgccgcgtcggcgtccggccccagggcagggttcgccgcgccggggttggagtcggacatggcgatgggcgggggagtcgcgggcggcggtggccgatctggcgatcttggttaggaaatgagg

SEQ ID NO: 73021 - DNA, 3294 bp, Oryza sativa
  Clone ID: PAT_MRT4530_73342C.1
atggcgacggcgggcgtggtggtggaggaggcggtccggcggtacgcgggcggcaagccggcggcgctcctcccggcgttgttggggctcctgtccaggcagcagccatcatcaggctgggctcgcgctctggcctcacagctccacgccgacgtcgccaagcggcctctctccgccgccgcctccaactccctcctctgctactacctccgctcctcgcgcctcgatctcgcgctccaccacctgcgctgccgctccacgcccagggattctctaacctacaataccctcctcaaccacctccctgcctcctcctcctcctccaccaccttccgcctcttccgcttcgccatgcgccacgcccacgctgccttccaccccaacatcgcttccctcctctccctcctccgcgcctcctcctcctattccgaccacttcctccacatgatccacgcctatcttctcaagacgcccgcctccattcacacgcctgtcgccaactccctgctctccctctacgccactttgggggatttcgcctccgccgcgattctgttcggcgaaatgcccgaccgagacgttgcgtcctggacctccatgatcggggcctgcctgggatccggctacgccgatcaagccctacgcctcttcagggagatgctcgctgacggcgcgctgcagccggacggtgtcgtggccgtcgtggttctgcgcgcgtgcgccatgctggaggatgtcagggccggagcctccgtgcatgccgtcgccacgcgccggggcttgcaaggggatctcttcgtggacaactcgctcgttgacatgtacgccaaatgtctcgatctgcggtccgcgaggaaggtgttcgaccttatcgccgtcaagaacgtggtgtcctggaacaccatgctctcaggcctcgtgcacgctggcagctaccccgaggcgctccatctgctggccttgcagattggggtggtgggcgacgagacgacgcttgcggtgctgctgcagctgtgcaagaagaagaggctagggggtcaggcagccaggtcggtccatggcgcggccatcaggaggcggctcttgtcgatggctctgctgaacgcgttgctggatgcctacggcaagtgcggcctcgtggaggacgtgctgaggctcttccaagggatgcgcgagaggaacgtgataacctggagcacagtcatcgccgcctgcgctcacaacgcccggccacacgccgcgatggcatgcttcgtggcgatgctggtgactggggagcgccccaactcgatcacggtgctgagccttgtggaggcctgcggcagctgcgcggagatgtgggcgtcgagacgcgcccacggcgtggccgtcaggagcggattggggtttgagctggcagtgggcaacgcgctggtccacatgtacgggaagtgcggcgagctgggcgcgtcggcgagggtgttcgacacgatgcccgtcaaggacgtgctcacctggaactccatgatcggggcgctggggatgaacgggcgcgcacgggacgcccttgcgctcctgcacaggatggaagcggaaggtgatgaggtgaggccaaacggcgtcacgatgctggccgctctgtgggcatgcgctcatggagggctggttgaggaggggattgggtgcttggaaagcatggcgcggcagtcgctgcagcctcgggtggagcacgtgtcgtgcgtggtggacatgctggcgcgcgcgggggacctggacggcgcggcggagattgtgaggaggagcagtggcggtggcagcccggcggcgtggagcgcgctgcttagcgcgtgcaggaggcgcggggatggcggcggcggcgaggtggggcgaagcgcggcggcccgcgtgctggagctggagccgggcaagtcggcggggtatctcatgtccatgggtatgggtttaggcaaggggtgggcggcagggatgcggtgggcgatgagggagaagggagtgaaggtggagagcggccacagcgtggtgcagcacgccggcggaagcgagcgtgacttgcgtcccgggggtgtcagaaatgagctaattcttctagctctaccagcagttcttggccaagctattgatccattggcgcaattgatggagactgcatatattggtagattaggggctctggagctagcatcagctggtattggtgtgtcggtttttaatatcgtgtctaagattttcaacattccactgttgagcattgcaacctcatttgtggcagaagacatttccaagaatgctagcaagcattcaagttcaggcaaattggagctgtcatctgtatcttctgcattggtcttagctgctggaatcggtacaattgaagcattggcattgttcctaggatcaggattgtttcttaaactaatgggcgtgtcacctgcctcaccaatgcataaacctgcaaaacttttcctttcattgagagctttgggagcacctgcaaatgtgattatgttagcagttcagggaatatttcgtggattcaaggatactaagactcctgccttgtttataggtttgggaaatctttcagctgtagtgcttcttcctttacttatttacgtctttcggcttggcataactggagctgcaatttctacagttgcatcacaaaaaaggaaagactatcgtagagtagatggtgtaggtacggttactgctagtatattttacagatatgttgatcagcttgtcattgatagagctttcattcatgggccatgcccattctgtccactaatgaatgggctgttcagggaacttctattctccatattgtttcgtggtggcatgctgttaggaagaaccctctcgattttattaacgatgaccatagggacatcaatggctgctcgacaaggcccaacagctatggcagctcatcagatatgcttacaagtatggcttgcggtatctttgcttgcagatgctttagctgtttctgcccaggcaatgatagcaagctcctatgcaatattggactacaagagggtccagaagatagcaatgtttgctttgcagtttgtatgtgccagtcaaccaattaatgctctggcattcatatttgatggtctgcattatggtgtctcagattttgattatgtcgctcaagctacgattgctgttgggataatgtcatcattagttttgttatatgctccatctgtttttggacttgctggagtttgggctggtttgacaacacttatgggattgcgcatggcttcgggcattctcaggtga

SEQ ID NO: 73022 - DNA, 1164 bp, Oryza sativa
  unsure (1)..(1164): unsure at all n locations
  Clone ID: PAT_MRT4530_73343C.1
ccggccggggaagagctagcgatcgagctccagtagtatacgtgcactttgggttgctcatgcactggcttaatttctgaagatgagtaatctgctcaaggctaagagctgggtaccagaggagaaagctgcagcgactgcttctgatgaacagaatgacaagataaagaaagtccgggaactcctgggaagccagatgacagcagagatgccgtcgttcttgtcggacgccaccatccgccgcttcctccgggcaaggaactggagcacggagcaagcaaccaaggctctcaaagagactgtcaaatggaggcgtcagtacaggccggacacaatccgctgggaagacattcctggaagggagcacgaagctaggagaacatatatagccgactactttgataagaatggaaggatcgtcttcatatcgaatccgacaattaagagtaaatcatccatcaaggaccagataaaacagttagtgtataactggggatttttgccatgcactcagaaaacatggaagacgaatgtactgtttggttaactgactttcaaggctgngtgctaacaaatacgccattgcccgttgcttcgtgaatgcactcacataattcaaaaccattatccagggctgatttctgtcgcaatcctcagcaacccaccaaggattttcgaatccttttggaagattgtgtgctatttccattgagccaaagttgnaagaaaaagtgaagttcgtatatactaacaatccagagagccncaagatagttgcgctgcaggttgatttggacaagctggagtctgcatttggggggaggaacacacttccatttgacatggacaagtatgcagagagaatgaaacgaagtgaccaaatgagaggagctcccatgcatgccaatggctactcttgctctacccaaacctgaccacataaaagttcaccttaatttcttttagtttcatataaagtggcataaatatatatacgccggttagatctgaataagtgatgcatgtcactcttaggtaggattttgaggcgggcggacctgagtaaaactccatgacaaattatgtacaaggaagaagctaatcatgtaataacccaaatttcagttgcgttaattatagtggtaaacacgcgcaccagtcttt

SEQ ID NO: 73023 - DNA, 357 bp, Oryza sativa
  Clone ID: PAT_MRT4530_73344C.1
atggtgaagggccatggtttggttgcgttgcaaatccatccattcactcccttgcgccgtcatggtcttcatcgccaccaccacagcggcactggcaccggcgtcatggcgcggccgccgcccgcgtcacactcaacgccatcggagagacgctttgccacagctgaatcaactggaagtgttctaggcccctccccggcagccaccggctcgtcgtcggcaccccgacccagcctcccgcgccaagcccgccgcccccaggagggcgggacaagtcgccaagtgaggtcccaggcgcatgctccacgtagaccaaaagctgagctggcgcgacgaggttacgcgccaactcagtga

SEQ ID NO: 73024 - DNA, 492 bp, Oryza sativa
  Clone ID: PAT_MRT4530_73345C.1
atggtgaagggccatggtttggttgcgttgcaaatccatccattcactcccttgcgccgtcatggtcttcatcgccaccaccacagcggcactggcaccggcgtcatggcgcggccgccgcccgcgtcacactcaacgccatcggagagacgctttgccacagctgaatcaactggaagtgttctaggcccctccccggcagccaccggctcgtcgtcggcaccccgacccagcctcccgcgccaagcccgccgcccccaggagggcggttcggggatttcaccaggcgaaatcgatgtgagggcagagctcggccaggaacgatgcccacagtgcacgcgccttgctttttcggcgccgcgcgcttcctcgcttcgacgaagtttcgcgctccttagcttagggacaagtcgccaagtgaggtcccaggcgcatgctccacgtagaccaaaagctgagctggcgcgacgaggttacgcgccaactcagtga

SEQ ID NO: 73025 - DNA, 1723 bp, Oryza sativa
  Clone ID: PAT_MRT4530_73346C.1
atgggaggaggaccttcgaggttgggcttgccgcggttgttgatggtggtggcgcttgtgcttctgccattgtgtggtttcggtgtccatggaaggaaccatatccacaagaagccgcatggcggcggtggcggaggaggccggcagcacaggggtggcggcacggtggtgtcctcccctgcggtcccaccggcggacgagcagacgcagccgcctggcattgtcccctcggacccggtcatccctgcccagccggagcagtgcgtgttcgacgtcagggcgtttggtgcggtgggcgacggcacgacggacgacaccgaggcgttccgggcggcgtggagggcggcctgcgccgtggagtcggccgtcatctcggtgccgtccgacggcacgttcaccatcaccacgaccacgttcaccgggccgtgcaagcccggcctcgtctttcaagtggatggggtgctgatgccgccggacgggccggactgctggccgccgtcggataaccggcggcagtggctcgtcttctccaacctcgacggcctgacgctgcgcggcgccggcacgatcgagggcaacggcgagggctggtggaatctcccctgcaagcctcacaggggtccgaacgggtcgacgctgcgcggcccgtgcgacagcccgacgttggtgaggttcttcatgagccgaaacctggtggtggagggcctgagggtggagaacagcccggagttccacttccggttcgacggctgcagcgacgtgcgcgtcgacgggctgtccatcaggtcgccggcgaacagccccaacaccgacggcatccacgtcgagaacacccagcgcgttgccatctacaactccatgatcagcaacggtgatgactgcatctcaattgggacggggagctacgacgtcgacattcaaaatgtttcttgcggccctggacacggcataagcatcgggagcttgggcgtgcacaactcgcaggcgtgcgtggcgaacgtgacggtgcggaacgcggtgatccggaactcggacaacgggctgcggatcaagacgtggcagggcgggatggggtcggtgtccgggatcaacttcgacacggtgagcatggagaacgtgcggaactgcatcatcatcgaccagtactactgcctggacaagcggtgcatgaaccagtccaccgccgtgcacgtcaccgacgtctcctacgccaacgtccggggatcctacgacgtccgcgcggccccgatccacttcgcctgcagcgacaccgtcccctgcaccaacatcaccatgtccgaggtcgagctgctccccttcagcggcgagctcgtcgacgacccattctgctggagcgcctacggcctccagcagacgcccaccatcccgcccatctactgcctccaggacggcctgccggactcgctcctcgacaacccggacctcagatgccgatgatctatcgatcgtcgtctaattaatgcttcatacacactagctagctagtgcacactttattgcatgcctcacttaaaagctgatgagtttaattatatagtatgcaaattaatactactagtattagtattactccactatttacgattactaatttttgagttatgtgaagctgtactgtacatgtgcgcatctgctccctcttgatattacttgtgtcgctttaagtcattgctgcttccaattgaattctcacattcacagc

SEQ ID NO: 73026 - DNA, 120 bp, Oryza sativa
  Clone ID: PAT_MRT4530_73347C.1
atggatgagattacctatgaaattgaagaaattgaagacgcggggtatgaattgattacctatggcaagaaggtaaagcgcaagcaacgctcaactatgacggaccatgcggtggaataa

SEQ ID NO: 73027 - DNA, 413 bp, Oryza sativa
  unsure (1)..(413): unsure at all n locations
  Clone ID: PAT_MRT4530_73348C.1
tctcactccacccaccccactcaccgccggatcgacgaccgacggaggaccggcccacccacgattcacgccttgtcttggntgagaatgttggagaactaggattgctcgcgcgcggcgcgcgcgcgcgtctgtcgtcgcacttcacattctgcggtggttataaaaaatcggtgtctctttttcactgttttcccgcttcgttggtctgtaatgttggagtttcgagtcggctatgagaaggaaggaggtgtatgcactgtgcactggtattggtacgggtaacacattcggtgaattcacaatctgtcactggtgactgtaccgagaatttgaagaaccactgggggtancaataagtgcatggaggcaagtactnttttcaatggcaccaaaaaaaaaaaaaaaaaaaa

SEQ ID NO: 73028 - DNA, 442 bp, Oryza sativa
  Clone ID: PAT_MRT4530_73349C.1
tcggagactagctcccacttttcaggctcccgccggcggcggcggtggtcacttcggaccaacttcgacgatcccccggggagcttttgaccatggggacgggggggacggggttggcttcggggggcacccgcttcacccggctggcgggggttgggcttcgggggacgggccggcttcccacgggcgggcggttccagcgcccggtggttggcaccaccgggcttcttaagaacggcgagcttcgggccaaggagcagggcctggcccagacgcttgaataccgggtggttcttggcgaccggggggggcccaagggggcgccgtggcaccacctggccctgggcgcaaggcacggggtggtccacttcggcgtggagaatcccaaggagaggaacgcccagatgggaggcggcaccgacgagtcatttacccccattaa

SEQ ID NO: 73029 - DNA, 532 bp, Oryza sativa
  Clone ID: PAT_MRT4530_7334C.1
gtttcttatctttctttttatgtgtgtagctgcactcccagttcagtacgtccgggctgaaagctacacatctctctctctctctctctctctctttctctctctctctaggcctttagggcagtgataaatcatgtcaatgtgtgagatgaaataataattgaatgactggtttgaggcacgcattaggcgtgatcaaaggcatatcctctgtgtaaagatagttgcctgcctgctataatttatctggaggggttattgacaacagcactggtttcttccttgtgattctctgacgtcctgcgagatggttaccataatttcagagactcgtggatgtactgataagttacttcgaggagaaggtatctgttgtaggcctgactgaagttagctgtagagtgtatggaactggaagtcttaaaattttgggcttgtttttcggtttctagtgctaaagatgatacttacaattatgggtcttgtattgatcagttgaaaactcaagattatacgtatcaataatcagttg

SEQ ID NO: 73030 - DNA, 714 bp, Oryza sativa
  Clone ID: PAT_MRT4530_73350C.1
atgaggaacagctccagatctgagggcgattcgcaaataattttggagatggaagagatatacaccgtagaagactccgagttgaagaagaagaagaagaatgggaaagaaatccagaatacgccgatggctgaggactctggagcactgtctgtaattacattggtgatgttcttttcttctgaaaataaagatgaagatgaagaatacgttttttacataaaacaaggtggtattaacgtaaatatatggacaaaaatcatccgccatgtgaccaaatacacctccggacaatcggacacgattacacggtttggaggccccacgtgtcaatcaaaaccacctaaaattgagtccagccaaagttgcagctcgggacaacccgagaatacaaccgacgacacggacgaggcaaacaccaacaacagcagcagcagtggaaccaacggtctaacacccaacaccacaggcaatactagggaactaggacgaaaccttaatcttcacttcacttcaacttcaccttcagagctggcagaactatatatatatagagcaaggccttggtcacctagcccgtgcggatcaaacacgtctggtgacttggggctttcacgacaaggcatttccaaagccaacacagggttgccatatgccaacgagaggggtcccggaccaacaacagggtcttcacgaatcttcgagaaatccgct

SEQ ID NO: 73031 - DNA, 372 bp, Oryza sativa
  Clone ID: PAT_MRT4530_73351C.1
atgaagagggaggaggcagagaggccgtgggtggccgcgagggtgggcgcgacggcggacggtagtggcagcgggtggcaggcggtggcggctggcggtagtggtgacagcggccagcagcagcttgcggcggcggctaggcgtcagtcgacagaagcggcggggctagctcttcctgcccggatccggcggcggcgaccgtttctcgcccagccccgcacggattcggtgggcggctcggcaatgatcaatggcagcggcaagcagcttggcggggctcctctcgcccggatccggcggcggctgttgtccctcacccggctccaccatgatccggcgggcgacaacgggaggagcccggccccgcgctga

SEQ ID NO: 73032 - DNA, 474 bp, Oryza sativa
  Clone ID: PAT_MRT4530_73352C.1
tttgtttgttaattttttttatttattaattttatatatatcaaatatttttaacatctgtatatgttaaaactttttcacttgcatattctaagttataacctcatttatttaatgttaaaacttgtaatgatattggcataaatccatgttctattccacataattcactacacataccactatataaacctaattttgatgctataacagtttttaaatttattctaccaggtattgcatctatttttaaacctaaaccttgaattgctcagctatgtgcaacatcattagatgtaataaaaaaagaggtttttaaccctactggtatagatacagcatttgttgtaactaataaacgtgtataacttttactttgtttatccatttcatcaattaaaactaaattactaacttgttttaaagctcccattgctgatttaattcataagttccatatcattgattacctat

SEQ ID NO: 73033 - DNA, 552 bp, Oryza sativa
  Clone ID: PAT_MRT4530_73353C.1
atttagtcgaagtcttgtattaagaatttaagattaattttgatgaacatcggcattaattttaatgccactttactggaatgattaaactgatgatactgttagtcttctgttgagcagccaatatttgaaaaggaaactcctatactgcctttgtaagcagatattggcttttgagatgtagtcctttctggggatgattcaacacctcttgttgtgatgactggattaactagtgattttactgcttctatcccctggttgaaacttggatcccttcacgagagtggaaatgggagaagtggagttaagcctaaatcaatgatggagcatgtggaaattagcaaaccctcaaatacagaatcttgcaccaggaaaaaagatgtcacagaattgcatgtttggtagcaattgctgaaacatgttcaactggtgcttgttcctcaaactatttatccttgcagtatgattgtttctactgtgctggatggacagaagatatccatgtgggtttccaattaccttcattagaagtatccacaggctcctttg

SEQ ID NO: 73034 - DNA, 609 bp, Oryza sativa
  Clone ID: PAT_MRT4530_73354C.1
atggtcaaaagtcccgcccgacaaggcacggcccacaagccatcgggccggcacggcctgatcggcacttcgtgccgggccgtgctggcctatgggctgcacctcccgcccaggcacggcacaccagctgtcgggccgtgccgtgccagctcgaaggcacgggagaatcgatccgaggacacacttggtgccttggaggtgcctctggctctgtcctatgctgttcggccacgtcctgctagcaagatgggcctcctcagttttcatccggagaacgtccagcaccctggaaggagtgccctcaaaaaaacacaagcatttatgtgcttccacaatcaccatgctcccaagatgataaatgtgtacataattaatattctggccaaagctggccacagcagtcgtgtcttcaagaacgaaccccgaagctggccgttactaatcaactcaatcatcgaagaagcacggatttgggtcgctgcagggatcgagctgcctccagctgctttgaaagaatacatcacgttcactgagaaggctagaaattcctacattaatcgaagaaaaagagaaaaatatgaaccgttaaatcatgatgtgtctgtttta

SEQ ID NO: 73035 - DNA, 285 bp, Oryza sativa
  Clone ID: PAT_MRT4530_73355C.1
atggaaactgaaggaattgcagtaagcttccaagaactgggcggcgatagagatagaaaactgcagtgcgcgggagagaagccggtcggtcggcgcaagcgcaaccacgaagtactgacgatagctgagtctgagaagaagcacatgcactgcgacgacttccgcaagaaaggagctaggatgctcaccgatgtggtgctccgtcgaccggaactcaacggcgaattgggcttggccggttcgtggagagcaaggttggagcagctcggacccgtcgcaaattaa

SEQ ID NO: 73036 - DNA, 723 bp, Oryza sativa
  Clone ID: PAT_MRT4530_73356C.1
ccatggtcacatcatggatccacaaggctataaatataaacctcaacagccaaatatgggattcaatttcaataatcactatcaacctttttcaccaatgaagcatcggccagaaggatctccttttgttcagttttcacctcaacctatgtataaccagtttgaacagcaattaatataaatgaggtgtgcaacagtagccattggccgatatgattgctgatgtgatgagagaacattttggccttaggcctaaggatagtgggatcatatatcggcatccctatccagaatactttgatagagtacctttgccaaaccgatacaagattcctgattgctccaaattcttagggctagacaatgtttcaacttatgagcatattagccgatttttagcacaatgtgatgaagcatcagctgtggagggcttgagagttaggtttttccccttgtcgttatctgggtcgacttttacttagttttcttctttcccatacaattctatcagaagttgggccgatctagaaaagcagtttgacaagtatttgtttagtggggttcaagagatgaagttgtcggatttgactgcaactcagcaaaaagttaatgaatcggtgccagattatattcagagatacaggaaataggtgctatagcttgaacttaatcgattcacaaatcacaactagctgatttggcttttcagggatcaatagttgc

SEQ ID NO: 73037 - DNA, 932 bp, Oryza sativa
  Clone ID: PAT_MRT4530_73357C.1
atcccccggcaggagcacctccccacaccgcaagcttcgcagcgcagcttcgcggagacaacgtgagaaagaaagaaacgagacgaacgcgaggtggtggaggtggacgccatggccgccgccggcagcagcagcaggttcgccgtcacgtgcggcctcctcagccagtacatgcgggagcgccagcagccgcagccgccggtgacggttcttgaggcggtggcggaggaggaggaggaggaggacgcgcggactatgcagctcttccccccgcgcgccgccgccgccgacggcgtcgcgacgccgtcggcggggacggccccgctgaccatcttctacgacgggaggatggtcgtggtcgacgacgtcccggtcgagaaggccgcggagctcatgaggctggccggctccgcgtgctcgccgccgcagccggcgcacgccgccgcgctcccggagatgccgatcgcgaggaaggcgtcgctgcagcgtttcctccagaagaggaagcacaggatcacgacaacgagcgaaccatacaagaaggcggcggtggcgtcgccggcgccggagaaaagcttcgccgtcgcgccggtgaaagatgagccggcgacatggctcgggctctgaagatttatctgcccggtttagaggaggagaatatcacaaagggagaaaaaaaattaagtactgactaaattgttgttttccatgatttaagttcgtctctgtttgagatttctttggcccaaacccaaagagttctttcactgatttaagtgattatttcctccactagagcatatacagtgttctgaaaaataatggtagatttatccatttttgttgatgtacaagtacaactgtctccatttctatgcatagtatgtaattaataattattactcaaaaaaaaaaaaagactgttgtcatgt

SEQ ID NO: 73038 - DNA, 2256 bp, Oryza sativa
  Clone ID: PAT_MRT4530_73358C.1
atggtggacattaagcaaactgaggttaaccctgagaacatcattccaataacaaaggatcaacttacactagagcaaaaggtagagtatgagcagatgatgaacaacttgcagaatcggtttttacattcatttgtgcaaactcgttcaggtacggttatccaaaggtataaattgaaagtgccatccaatgatgacttagaatcaagcacttccaaagatggcaagcccaaagatgacaaacccaaggatgagaaaccagaagaagaagaacctcaagagttcaggaacctgcaggaccagattgactatgttgttcatcatgcactgatcaaccaatcgggagtgcttgtcaatactctaactaacatgatcaattctgtggttgatgaggataatgatcctgaagtagcagcagccgaatgggcaaggaatatgaaggttgtcatgtgtcagttggtcaagagtttggggaaagatgaaagatatgattttgacatcaccaaggctgataaaatatttgatttattactttgggagaaacagatccaacttcctgctggtcattcaatcccatctgctgatgaattaggaaagagaaaatattgcaagtggcataacactaggtcccatactactaatgattgcaaggttttgaggcagcagattcagtcgactattgaacaaggaaagataaagtttgatgattcaaggaggccgatgaaggttgatgaatatgaagctaatcaggtcgatgtagatgttatggaagaaacttttactaagttggcgttgtcacctgaacaagctatttttgagaaaccagaggggacagagaatcggcatctcgagccattgtatgttaaggggtttgttaaagagtttgattcaatggcaagacggagagcctcaattgttgctttgagggagggcgtcgtggagggttcaaatttctacaccaaggatactgtagatgatctcgatggcaaattaggacagggttttatgtcggccgatgatttagaagaagttgatataggtccaggagatagatcaaggccgactttcatcagcaagaatttatcatctgaatttagaaccaagttaataaagcttttgaaagaatacagagattgctttgcttgggaatattttgagatgccaggacttagccgatcgattgttgaacattggcttcctatcaaaccaggatatcggccatatcaacaaccgcctagaagatgtaaagccgatatgtatgatgctattaaagctgaaattactcatttatattatgttggttttactcggccaagccggtatgctgaatgggtttctaatatagtcttagttatcgacaagaatgataaacttagggtttgcattgattttcggactttaaataaggctacccctaaggatgattactcaatgccggttgccgatcagttggttgatgccgctttggggcacatgattataagttttatggatgtagtaaaatcaaaggaggttgatgatcatatagccgatttgagaaaagtttttgatagaacaaggaagtatggcttaaagatgaattctacaaagtgtgcttttggtgtatcagctgggcagtttttgggttttcttgttcatgagaggggaattgaggtaacacagaggagcattaatgcaatcaagaagattcaacctccggaggacaagaaacagctgcagtcgttgattggcaaggttaattttattaggaggtttatgtctaacttatctggaagcatcggcttggtcataatatcacctagggcggcaagttttgagtttgcttatactattaaaccttatgctactaattatcaagctgagtatgaagcagttctcaagggattgcaactcttaaaggaagttgaagccgatgctgttgaaattatgggagattctttgttgtatttaaaagatccttctcaatcggcttcaagaaaattacgatataaagctttgaaatatgccttgttggatgatgaattgtattatcggacgattgatggtgtgttgcttaaatgtttgagtgccgatcagggaaaggttgtaatgggagaagtacatgaaggcatctgtggtactcatcaatcggctcacaagatgaagtggttgcttcggcgagttggatatttttggccgacgatgttgaagatttcttccgacattataaaggttgtcaagattgccagaaattctgagcaatacaaagagcactag

SEQ ID NO: 73039 - DNA, 1161 bp, Oryza sativa
  unsure (1)..(1161): unsure at all n locations
  Clone ID: PAT_MRT4530_73359C.1
ggatccccgggctgcaggatataggagcatctcttgcttcccatcacaacaaacattacactgtgctgttttttttcccttggaagcaaagagaggttctttgcttatcagtgccccaatctctctcaaactcatcacaacaccccttgtcaattctgaatatgtaatcacattgtattcttaaacttataaactggcatcacatcaaacttgcaaagagatgtggtgctagaaatggatgaattcttggcagggacagtacactgccaattacctgaatgacctgacatgcgcaattatttgcatatctgattggatcctgcacaaggccagagttccattctttttatgtgctgctttctcctcttttcctccctttagctttgcctttttgcttgggccctttgaatcatttcatcctcctcctctcctactacatccgctcgtggcaaggctacaattacaatggtcttaggatcatgtgggctgctacagagtgagtgtgcatgggggtgagtagccactcttttgaggtgcccaaacatgattctgggattgtgttctttttttgccccattcttgcagctttcttgcccatcaaactgttgctgaaatctctttttatcatctgctgtgttttctgtagaaggtttacatatcccccacactctttttgttcttctaccttttccttttgctcttccccatcttgaccactccacattccacaatgccaccacaccaccatttcctcagtggctgagatctcccttttaagtagaagagacagccaaggcattgctcatcttgtaggttcttgtcattttgaggcaaaaacactagttgggctcaggcattgcaataggccattgctgcttcagggaaggaagtaccagtgctaaagccaaggcgtgcaggtgcagcgcagcgcgacgacgaggtgcgataaaatttcgtggaaaatcaaatccaagaaaccgcacgaagcagtcgagcagcgagggccatgagtggcttcgcggggcagaggtcgaggccgtggatgggtgacgcggcggcgtcggaccacgcggcggccgccgccgcggccgcggccgccgccgccgcccggcccgcccgcggcggcggcgccgcgcccggccagtcgtcgtcgtcccacna

SEQ ID NO: 73040 - DNA, 2192 bp, Oryza sativa
  Clone ID: PAT_MRT4530_7335C.1
cttcaacacacactcaagcaagacttgatctctctctcaacgagttgtgtttttcttgggtactcgacctcctacaagggataccgatgtctggatctctccactcgccgcatcatcatttcatgccacgtcgtgtttgacagatcacaatttcccttcgcggcgactccccctgttgccttgtcttttgactttttgctgcagggactccctccagcgctcgctccctcatcagaggttgagcaaccgcgacaccttacggtggctccctccatggaggttgagcaaccgtaccttcccctcttcggccgacgcttgccgaacgacaccgtcaccacggcaagcggcacacgattggctagggcacccttgatcggcgcttcctcaaccggcgctaccccgtcgactagtgccacccgagccggcaccatcgtctcacccttccgccatgtctacacccatcaggccaccatgacggtatcgtcatcatcttcaaccgatgtggttgccacggctgttgctcctcaaccgcattccatggtgacgcgctcccagactggctccctacggccggttgaccgggtgacctacacggctacccacgctactgcctctcctgttcccgtcaactatcgaaatgcgttggctgatcccaactagcgcactgccatggctgacgagtacaaggcgttggtcgacaacggcacttggcgtcttgttcctcgcccccctggggccaacattgttacaggcaagtggatattcacacacaagttccactctgacggctctcttgcccgtcacaaggcccgttgggtggtccgtggttactcgcagcagcatggcatcgactacgacgagacatttagcccggttgtcaagccggccacaatacgggttgttctcagcatcgttgcatcccgtgcttggccaatttatcaactggacgtgaagaacgcatttgttcatggtcacctaaagaagaccgtgtaatgtcagcaatcctccgggtttgttgaccttgctgcccctgatgttgtctgtctattgcagaagtccctatatggactaaagcaggctccccgtgcgtggtaccaacggtttgccacgtacattcgatagatgggatttatgccttgggcgtccgatacatctctctttgtatacaaagatggagatcgtattacctatcttttgctgtacatcaacgatatcatcctcactgcttcgaccacatcactacttcagcagcttacagcacgcctccactccgagttcgccatgacagaccttggtgacctccacttcttcctcggcatctccgtgacgcgctcctctgccggcctcttactctcgcaacgccagtacgttgtggatcttcttcagcggaccggcatggccgagtgccactctacctcgacaccagtcgacactcgtgccaagctctccgccatagacggcatgcccgtcgcccacccttcggagtacaggagcatcgctggtgttctacagtacctcacgttgactcgaccggatttggcatacgtcgttcagcaggtctgcctcttcatgcatgatcagcggaagacttggtcaagcgtatcctccggtacgttaagggaaatctctccactggcctccacatcggcttcgacacgattcagaccctgacggcatactccgatgcggattttcagtcctgctacacatcagcgtgtggagttccaaactattgtttattcgctgggaattccattgttcaaagtaaaaaaatcctcatcctctccatccctacactgaatggggatttcgtttacagatctgtgcatgtctgttgttcaagaatgttgtatgttaagaaatcctttcctggagggcgcacctttgatgaagtcatcgccggttgacatcgctgaagcaaaagtgccatataccttactaaagatcagatgtttcaagagaggacaaaacacattgatatcaagtattattatattcacgatatagtcgcgtaaggtaagctaaaggtatgcaagataagtactcgtgataatcctgctgatatgatgacaaagcctgttcctgttgctaagattgagcattgctcaagcttagttagtacaggggtatagcccaagaggctatttggatcgaaagtgttttttgtctttgttgtgttcagggtgaatgat

SEQ ID NO: 73041 - DNA, 358 bp, Oryza sativa
  Clone ID: PAT_MRT4530_73360C.1
caaccatgagtttttttattttataatcatacgggcccagttttttaatagttaggaaaaaaaagcccaaaactttttgggataaagaaacaaactgaaaaattgtttaatgaataacatgctaaaagggagttttgttacttccccacatagggaagaaacacaaacggggagttggtttttattttttaaggctttaaaaatgggtatcaccctaattttttcccgttttttttaaaacaaaaccttccaagggcacctttttggcctggtttggcctaaacctctttaagggctttttcctaatttttttttttttggaaaaacccgagatcatttttgggggactttttttttt

SEQ ID NO: 73042 - DNA, 2097 bp, Oryza sativa
  Clone ID: PAT_MRT4530_73361C.1
atggacggatacaaatacttggtccatggcgagtccaagcagaagatcaaattactgaggcctcgatatgctctctatctcaatgtcaccgatgaaaacttgctggtcacactggacaagatttggcgatctgacgggccggtgctacagtccgccaacagcgttcacggagacgactgcaaggatctgtgcctggccttttccatgtcgaggtttctccggtgcaggctcgaagacgtgaggctggacgcagacagcctctccatgtcgcggaatctgatagtgacaagaatattgcatgtcgaccagaaccctgcgagggtgttcaggataatggagctggagatttcgttcctcaaggactacttctacaccctctatcctatcgtcttctggcaaggccttgcttctctctccttgagtgttcttcagtctctcgcggccttgggactcgccctctggctcgcctcgggcgtcaatagggtcaagaaagatcttccggaccccgtcaatgtcgtgcacggccataatgtggaggtgacaatcacatgggtgttcatgtccttcatgatgttcaaagagatctgggagatgatcacttacttgctatcagactggacaaggcttctccttgtgtgcgagtatacgcggtccagatgcaggtggataagaaacgccacgatggagaagctgttaagttcctttctaacgttaagttcctttttaagtcgtaagatcttttctgacccttggcatggatacatcgaccagtacgacttcttgcagtcatttgattacagcccgtcgctctggaacctgatgtaccgtgctactctaggcgtcatcaaagagagggtaaaagggcaaaagcctggcaccgccatcaagatcccagaatgtgtaaaacctgcaattcttcaggcattgcgctcaatggatctcgctggcttgggcggccgcgagcttccccgagacgtcccatcgttgagcgccgcgagattgcttgaggatttccgatgggcgttgcttgacctgtacacgtgctcccaggtcattctggtttggcacatcgcgacctccatgtgcgagatcaagctcgcccgagacaggggcattgacctgagcaaaccagggctcctgcgctccgccttcacgtacctgaaaatttttctctgcggctgctgctgcactcctcagccgtacctcgttgctgaaaatattctcggtgatgatcaactccggactagctacattgttgcaaacagcttgtcacgatactgcgcgcacttggtgtatgacaagctcaatgggttgttctcacccgaagctgctgaactgaaaaaactgaacgggaccatcgtagagaaaggcgcggtactgggaaggcaattgcttgaaacaattccagacgatcagcagcggtggcaaatcctggcgggtgtatgggctgatttgctcgtgcacattgcgcccagctggaacgctgaggcacacaagatttgcctcgagtacggaggggagctcatcaccttcatctggggattgctctggtactgcggcatcgagaagagcagcctgtggcgagatcaggacgatgcgcctggagatgccaacgtccagcctcagcctcagcctgcagcagaagaacctcagggtggccacaatgtcgaagatgatgcgatggtggaagatgcccaaaacggaattgaagctcgtgaagcaggcgtgcagaatcaaccagcggagcaggtgctgcagcaagctgctgaagcagatgtggagattgcagatgaagcacgagaagacgagcctgagcctggcaacgacatccacgctcagtctgctgctgacatggagattacagatgaagctcaagaaggggagtctgagcctggcagcaatgtccaaacttctgctgctggtgtggagattatagatgaagctcaagaagaggagtctgagcctggcaacaacgtccacactcccttcagtgctgacgtggagatcgcagatcaggctcaagaagaggagtctgagtctagtaacaaggcccagtccgctgctggcgtgcagattgcagatgaagctcaccaatag

SEQ ID NO: 73043 - DNA, 2372 bp, Oryza sativa
  Clone ID: PAT_MRT4530_73362C.1
cgatagcgactgtgggccacgccgcttctcacaacaatggtctcgtggatacaaagcgtgataccgcgcgtgctctcgctgtttcaaagagcgagaccgctttgttgcggggcccaccacctcggtctgggtttgcgtcagatgaccggcggtatcgcatcgcgggggactacaaaagttttaagaaaacagtagcacgcttggaagaggcagcagtttcatgccgtggaggcgaaagagttgaactgttaagacgttggttgggagcgttacaagacatagaggctgaacttagcggatcagatttgaaggatccagaagatcgtgatccttctagtgaaacagatatttcaaaagcaccattggctttgttttatgatgctgacattgaaggagggcctatgaacttccgtgatgtattcctatacagtcaagcactggaggggattacactgtccatggttcttgaagctccttctgaggaagaagtttctcttcttttggaaatttttgggctgtgtcttactggagggaaagaagtcaacaagaaaatcatggacactgtacaagacttggccaaggcgctttcaaattacaaagatgaagtcctggtgaagcgtgaagagctacttgaatatactcagagtgtcatttcagggctaaagaggaatgctgacattatgaggatagatgctgaaaccctcgagttgtggaaaaagctagatgagaaggagaaatcacgagcccagataactgaagatcaagataaatcgtcagggaatatttctgttgaaaacattgaggatcaattcagcaggcttttagaaaacaccaatagaagtttaattatgagaaagtttgtaattgataaattaaagatcttggcagattcccttgcgaattcatcctccaaggcagagcagcgtattttggagaacaggcgccagaaagaagatgctctgaacttccgtgttaagaaggagaatgaagtgagcacagttgagaaggaggtgcttgatgagattgctgaattggagaagcagagagatgaacttgaggctcagctgaaaaaggtttctctcaatatggaaattgctatacaagacctggcatatcctattggtgacagagacacaaaatctcttagtatgatcaaaatggtcaatatatcactaaatgctgctgctggacgcctcaagaaaaccagggaagagagggaccaatttgatgaagcaaacaatcaaattatatttaaattaaaaacaaaggaggacgacctctcaaaatctatcgcgtcatgtaatgtggaagccaatgtagtcaagacctggatcaatttcctcgaggatacctggcagctccagtcaacatataatgaacagaaggaaaagaaaacatgtgatgagttggagagatgtgtgagtagttttctgaagttgaccaaacatcacctttcagtcttcaaggaggtcctaagcccgtcaattgagagtatccgaacatatgtggataacttggtggtcttgaactcaagggaagagacaaaacaagatgaagatgatgaagcatccgagaagacaaacccacgaataagccttgaagaggaatatttggaaactgaaaagaagatcataattgctttaagcattgctgatcacataaagaagttattttactctgagcaatgggctaattctaggagagatgatccagaggtcaagaacctaattgccgagatcgagaaattgaggggagaatttgaatctatagaaaggccaatgctaagcatagaagctaataaatcaaagccactacctgaggagagatctgaattgagcccttcaccaatccaggcacccgctacgcctaaggctgcacacgtcgactctccaaaatctcccatgaagcccgagcagcatctgaatcctgacaatgagctcgcaaacctgggagcagaacttggatcggaggacagagatttttcaggtgaggagattaacgggtgggagttcgatgagctcgaagaggacctgaaaaactgacatagctgggatcaaagcaacaaaaatagcaacatgttcatgtacgccccccagttctgtttgatgtacatatgacaacttcgttcatttgtattgtcgatatttcaggacatgcagattgaactttctaagtcttttaaccttggcaaggcatttgctatttgtttgtcttgccatgagatgttgcatcattacatgtacacttgaatacagattttactgaatactgttgtaacatttgcaaagacagacaataaatgttttcaccgacggtcgatcagtttgcaaaaaaaaaaaaaaaaaaaaaaagggccggccgcccgcggatcc

SEQ ID NO: 73044 - DNA, 522 bp, Oryza sativa
  Clone ID: PAT_MRT4530_73363C.1
atcatcctctacaatattgtcaacaccatctggaatcttgtttatactactattgtagaatcactaatggcagcatacgccactcatatctttggcctgtctgccttaattgctcttactgcaaatgacaatactgtgatcaacactatgcagtatttcccaccaacattacacatgcgaaccatggatccgagtagacacaacatgatgcgaacggtgtcacatgtgtacctccacagtcatgtacagtgtctcatgcaatgttgctcctgaaccaacaatgttgcatgcagctacgaagtatgatgactacgcgtcaatcgtagccacctactgtcatatgatgtatatcatgcatcatagttatttgtgctggactcacacagccacatatgatgaatatgctgatgcatatgccatacatgtgcaacatgcaccctgacaacttccgactctcttcctgaggctgatgctgatcaaacagtgtgtacatgtactcatacaccaatgcgtagcatacta

SEQ ID NO: 73045 - DNA, 378 bp, Oryza sativa
  unsure (1)..(378): unsure at all n locations
  Clone ID: PAT_MRT4530_73364C.1
aagcataacaatttccttccattttgtacaagcaatgcaacaagaccgttacaaacttacaatttacaacataccatacgtaccacggtacgaggagtacaaaacggtatataaatgcttacagcttacagttactacgacacatgtgcacgcacgcagatgtttgtgatgccacgatggtgccatcccgggcacaacttttaccgtgtgtattattgtgtttttgcatgtgtttactgctgcaccggaccgaacacgtagtccgaccttggngccctgaacacggtggtttccttctccttcattgcctttaccaccttcgccgccgtgtgcacgtacaccacccagtcgccgtcgccgcgcgcgcttggtatttgg

SEQ ID NO: 73046 - DNA, 342 bp, Oryza sativa
  Clone ID: PAT_MRT4530_73365C.1
atggcggcgcccagagcgaaactcgctgaacgcctcgccgagcgcgcagaccacaatggcgcgccgacgccggtccagcaaagcaagcagaccgtccacccgagccggagcaccacgccgctgctcgcatcgccggaccacaggaacgcgccatctccaactctgacaccggcggcgtgcagggactccgggatgtccacctgggtgctctggccgacgagcagcgccaacaaccatcacgtccgatggcctggtagcctcctccatgttgatgtcatccaatcagtagctagcacgagtaacaagatccacatcgacaacattgccaaagtctccatctga

SEQ ID NO: 73047 - DNA, 294 bp, Oryza sativa
  Clone ID: PAT_MRT4530_73366C.1
caatggggtggacccccaacccattgcccaagggggagaggaaactgcacaattattgcacaggtcgcccaatgccaattcgatgtgatccgctaaatgcttgacccgcatatcgagggacaagcaccgaagcacttgaagaataaattaggggagaagagctcaggtcgcacattcactcctagattatcaacactacaagacactacaccaggcttctccaatgagtcggagaatgagcctcacgagtgatggtactaaggcaatagtataggtggtatccaaaaaaaaaaa

SEQ ID NO: 73048 - DNA, 270 bp, Oryza sativa
  Clone ID: PAT_MRT4530_73367C.1
atggcgggaaagcgcacaatttcaaggcgggtggcggccggtgtgaagaggggcgagaggtcgagccaccgagacggcggcgacctcatcagaggtcagaggaccttacagaaggaggcggtgaacatgaggccgacggcgaccatgacgatggccagcattgggtacccagtccaccgacttggaaggagatatataaatccagatccatatataggcaatggccagtgccagaaggctagagattatatctggtttagcatagtttag

SEQ ID NO: 73049 - DNA, 1269 bp, Oryza sativa
  Clone ID: PAT_MRT4530_73368C.1
atgcggatccgcagggccgcttcccgtctgctcggctcggcgtccgccgccttctccgcccaggcggaagcgccgcctgtgattgcgactgcgactgcgagcgagctcccgccgccgcccgcgcctgctgcggcggacgccgccgccgccgtcgacgtcggcctcgccggaccagaggggccctgcgagcagagcctttcgccctgggatctgccatgcgagctcctcgatgactccaccgattcccagaacttgcaggaggccccgttcgacaaatacttggtgcgcatcccccgaagggcaagcttcgtgctcaacagcgagctggagctggaagatgatacgatggaatcgaaggacaagatctggaatcacgacgatgaggaggaggaggtcaagaatcagaaacctgctgcccacagcctgaagaaagatggtgcggtgaggaagagatcgagaaaggggaacgacgagcccatcttgcaggaggaggagttggacatggtgatgaaaaccgaagagagcgaggacaaggaggcaaccatctggttctgcaagaagaacgacggcaagaaatggcactgccgaagcatcgtcgaccggcccaacgccctgtgcgactaccacttggcaaggagccgctcatcctacactcccagcagtgagaacggtgcatcggcgacagcagcggcaacctgcagctccggtccaacaaaggcggacgccattggcaagatcaaagctcctcctgcgaagtcatccggtgccaaacgaaattcaccgggaggagcagcagcatcaagctcgaaagcagcagctgcgactgcgactgcaccaagcagctccaaagcatcatcgtcctcatcagtgtcagtaacggtaccaacaagctcgatctcccagcgacgcaagaggaggaagaagtcgactaatggctcaggtggtgattactacttctatgatcttttcggcccgttccgcggaaaggatcgtcgcaaccatggagtagtttcagctagtgaagaagatcacaagggactcctaaaagcaaaagaaaagatggaatacatcgatgtcgataacctgtccaacaattcatcgatcaccggtggcggcgacaaggaaaacgatgaggactacgtcgttggtggtgccggcaaggcccgtgcggagaagaggaaagggaagattgcagtggagaagatgccatttccgaagatggtgaagaagcgtactgtcaaagagcggtcgctcaagtcgctgctctag

SEQ ID NO: 73050 - DNA, 2832 bp, Oryza sativa
  Clone ID: PAT_MRT4530_73369C.1
ctagacatagaaacgcttaagggaagcagcgttccaggaatggttgaactcttcgccttccagcgtcgctaggtgaaaggagcctgtcctggacctgtacttgatgaggtatggcccttcccacttcaattcaagcttcccgaccgccaccgggttcgccttcttccttaggacgagatgaccaggcaatagctctgtcggtcgaacttttttgttataagttgccgaagtgcttgtggcgtatttgcgcatgtgttccagtgcttcgactctcaccctttcaaggagttcgagtgacacctcgcgcccatcttcacctccagagaatattacccttggggagttagcccctagctcagttggggtcattgcttcatcgccatagagaagcatgaacgggctgaacttggttggccttgtgggggtcgtttgaagggcacagagaacagatagcatttcgtctggccgtttacccttcgccgccccctcaagccttttctttagcgcctcaaggattttgccatctgagcgtttggacgccccatttgactgtgggtgtgcgaccgaagcgaacctgatttccagatttagcccttcgcacatttctctgaacttatcagagtcgaattgcttgccgttgtcagcgatgaattcttttggcactccgaaacggcaaacaatgttcttccacacgaacttctgtacagctaccgaaatgatcgcactgagtggttcggcttcgatacaacgggagaagtattcgatggccataattgcgaacttgtacccatttcgcgccactggggatgggccgatgatgtctaacccccatttcttggcttgctcgacacaaactttcagcacggtgggccaatacactccctggcagaacactttggaggcaaccgttcttgcggcttgatgtgcaccgcacagcccctggtgtatctctttcgccatttcctctgcttcggcgaaggagatgcagtgaagtaagggttggagcaccctggagcgatacagctggctggagaccagcttgtattttgtggctctgagctgtaagcgcttcgcttctgcttcatcctccgggagccagccgttcttgaggtacttgacaaacggtgttcgccaatcctctggatcttcgcccagttctgcctggtcgattgccatgatgtccaggctttctgtgggcacacttggtgcgtacaagacttcaaaaaagatgcttggtgaatgcgggcctccacaggcggcagatttcgccagggtatctgcttcctcattctgacctctaggtaagtgttcgaccgttataccggcgaagcacttttccatagatcgaacagcctctagataccttttcattccttcttcttttgtctcaaaggatttgtcaacatgacttgccaccagtttggagtctgttcggataagcaagcgccgaacccccaactctttcgcctttcttaggcccaacagtacagcttcgtattcgatcgtgttgttggtcgtgtcgaactgcagccttgcagcataccaaatcggcacgccccttggcaaagtgagtaccgccgcggcgcccgcccccttgtgtgaccacgagccgtcagagtacattacccaaggctgttcaacgggctcgggttcaggggagaatgcaggtgtccattcggccacgaagtcaactaggacttgagacttgatggcattctcagggtttagtttcacaccggccgcgcgcaagttgtcgaaggtctcctgtaaatcggacgcatggtcgaaagccttgcggcttttcacgacgatatcgtggacataggcctccacatttcgccccaactgcttgtaaaggaccttgtacaccagcctagtgaatgttgctccggcgttcctcagatcgaaaggcatcctgaggtggcagaaagtgctgaacggcgtgatgaaggctgtcttggggatgtcggccggattcatatgaatctgatgatagctggagtatgcatccaaaaagctcatgagttcgcagccagccgtcgaatcaacaagctggtcgatccgcggtaggggaaagttgtctttagggcagaccttgtttaggtctgtgaaatcaacacacatgcgccatttgccgttcaactttctcaccaaaaccgggttcgccaaccactctgggtggtcgatctcctggatcaccccagccttgagcagcttctgtacttcggcctttgctgcctcttggcgatcggccgacatcttgcgtagcttctgtttgcttggcttggcctccggcttgaccgccaaatgatgcatgatgaggtccgtagaaacacctcccacttcgtcggggctccaggcgaagatgtcaatgtttttcttgagaacctctaggatgttttcagcttccctttcgcccatgtcacccccaagtgaaacgaatcttgtgggatcggcatcatcgaccttcaccttgatcaccttgccgtgcggggtgggcttcggcgtgtgccttgcacggtcatgcggtttggcctcaacattgtgaattgctcccttgaccacgatcatgcctgtcagactaggcatcttgagcttgaggtagttgtggtgggagacggcttcgaacttgttcaaggttgcacagccgaagatggcgttgtagctgtaagggatgtcgacgacatcgaacagtatttgcttttcgcgcctgttctcttccatgccgaaagctaccatcagctgtacttggcctaggactagaactgcttcgccgccaaaaccacgaagcgaggctggcgcttgggtgagggctagggttggcaaccccat

SEQ ID NO: 73051 - DNA, 1617 bp, Oryza sativa
  Clone ID: PAT_MRT4530_7336C.1
tcagtggaacaccttggagacgttgtcaagcgcgtcgtctcgctgtcgactgaagctgctctgcccggacgtcaggcggcgtgcggtaggtatgccctgtcccatcaagatgatgggagacacagcagccggaacgtcattcccgcgcatccaagcctccattccacaaccattaaatgaagaatgacagggacccccctccatgttggcttgcgtcagccggcgtgatttgatggcctcgctcgacagctgatgctcagacgatttccaagtgaacttgttattcccggtccggattgaatctaagcgtaatcgaacaatgcctcggatcgcaaatcccctcacgcgcaatcgcgcaatctccgctgcttccctcccatcgctccttctcatcggcatcggcatcgccatcgctattctccgagtatcttctccttaccttggcggcataaaagaaggaaaatctgtctcctccgctccttgcgccgccaagacgagtcgcagctgaacaaaacaagggaggagaggcgcctttctgattcatctttctctcccatcgggactacttttgtctggataattcttgcgttcgttcgttaaccctagcttctcttctagatctggaagagactcttcttttaatttcagaatacaagtaacagtttgggggttctcaagttggatccgcccctgctcccatggtgacatccgatgaagatgctaagaaggcgtatgctgatttcgagaagaaggtcaagaggacgatctatattgatcatctttcccctcaagtcacgagctcagtaattaaagcagctcttgcccaatgtccaaatgttgtcgatgtggagttcattgttaattacacagtcccgtatgacattccttctgctgcattggtggaattggatgacgaaatacaagctaaggctgcactagacttgatgaatgatttccctttcataattggcgggatgccaaggcctgtaagagctatatgtgcaaagcccgagatgtttcgggagcgccctcctcaccctggcatcaggaaagagttccggtgggtaaaacaagaagatggaacagagtatcaaggaatgaagaaattgaggatcctagcaaaaaggcaagaagtagaaaatatggcactcataaagaatcaattggaagaggagaaggagctggcaaagcagcaacaggaattactcgatggaaattacaataagtacgacatgctggagaatgtcgtacagaacggaaacatgaagagcctagctcagcattatggagtcagcctggccgatgagttttgacaatccaatccatgagctgctcgctcactcataagtccggtctagttcccgccttcccggtgcagcaacatgcctaataaccttttttttttctctctccctctccctctccctccccacctctctctctcggcctttagggcagtgataaatcatgtcaatgtgtgagatgaagtaataatccaatgactggtttgaggcacgcattaggcgtgatcaaaggcatatcctttgtgtaaagatagttgcctgcctgctataatttatctggaggggctattgacaacaaaaaaaaaaaaaaaaa

SEQ ID NO: 73052 - DNA, 141 bp, Oryza sativa
  Clone ID: PAT_MRT4530_73370C.1
cgaagaggaagctagaatgctataccaagatcttgactccattccacaagaaactgctgctgctgatcattcagcagtgtgcaggacgatctttgataaggttgtagcgatagcaatttcatctgttgatggatatgacac

SEQ ID NO: 73053 - DNA, 137 bp, Oryza sativa
  Clone ID: PAT_MRT4530_73371C.1
agacaagatagttgtaactttctggaatttactaaaacaaaatcatgggttctcggttattctattgctcaggtaatgggaacagcatatgtaccctttgggcatggctaacttgaaccaaaattcccaaatggatt

SEQ ID NO: 73054 - DNA, 490 bp, Oryza sativa
  Clone ID: PAT_MRT4530_73372C.1
ttttcttggaggaccacttgtagatctatccacctgcagaggctcaaagctaattcggcgcaaagaacgcaggctttcgcgagtggtaaacgtcgaggtcccaaaacgatcgtacttccggaagggtcgttggagattgggtgaactacagtcacgcactgagatggccgagagcctggataagtttctcgccgacaagtttcgtgggtctgttttactttcgcagagtgatcgatatttgtttgcgatttcattgcattgctgctgctgtttactccttggcgctgaaacacggaataagtcccacgtttgtgttgcgatcgaacggtgacaaatgcatgttgtcacttgtcagtggtgtgaactgtgaagtgtgtgtgtgcctgaatgtgctgttggttgatggagtctcgcagcgtggggtccacttttactgtttgtaagctcttccattttgttcaaggaaataccagaaaattgctccaccaaa

SEQ ID NO: 73055 - DNA, 187 bp, Oryza sativa
  Clone ID: PAT_MRT4530_73373C.1
cgcggctccgtgtaccgcgcgaggaaagaaaaggtgggtgtgttccacttggtctgcaagggaggcagccgattggcagccaaaaggcgccacatgcgaccacagctgcacccacacacccaccttgctctttctcgcaagtgctggatcctctacaaccaccaccagaatgtgcagcaaccccagg

SEQ ID NO: 73056 - DNA, 762 bp, Oryza sativa
  Clone ID: PAT_MRT4530_73374C.1
atgggggtcgcgtggtcgtcgcgagcggcggccaagctggacgtgcgggtcgccgtcatcggcgaccatggcaccggcaagtccagcctcgtcgccaccatcgccaccgggaggttccccgatcaggacgacggcgtcgcccgcgtcttgccacccgcccgcctccccgtcgactacttccccgcccgcgtccccgtcaccatcgtcgacacctcctccaggccgaacacgttggagcggatcaccacattctggctccccaagatccggcgcctcctgcagtcgaaggtgccggtgattctcgcggggtgtaaggtcgacctaagtgacaagcagcagcaggccggccttgaaaatgtgctggacttcatcatgtgtacatttagagaggttgagatctatctggagtgctcggcgcttcaccggataaaggtggatgaggtcttctactgtgcccaaatggcagtgcttcgcccaacaactcctctatttgataaagcaacgcgatctataaagccacggtgcatgatggcttttcaacagatattttctctttatgaccgtgacaaggatggtgcagttagtgatgcggagatgaatgcatttctggttagatgcttcaaggtctctctccaacctgctgaaattgcagatatgaagagggtggttcaacaacatatgattggatgcgtgaatgataatggccttattaccttcattggattcctttaccttcatgttgtttttattgcgaaaggatga

SEQ ID NO: 73057 - DNA, 762 bp, Oryza sativa
  Clone ID: PAT_MRT4530_73375C.1
gttggctggcagggcatatctaaccattctggacgggatgtgtggtacattgaacaggatcagtagcttcagttgagaatgcaggtctgttggccttgacgcgagtcggaagcagaagggttataaagatctcaaccctggttcatgatcttcttctcgctgttcgggaaatttggggcaatcattgcatcaatcccattgccaatcttctctgcactgtactgcgttctcttcgcttattcagctgctgcagggctctgcttcctccagtactgcaacctcaacacactgagaaccaagttcatcctcagcatctccctgttcttgggcctgtccatcccacagtacttcagggagtacgaggtgttctacgtcttcgggccagttcacacccactcacccgctttcaatgtcatcgtcaacgtgatcttctcctcgcctgcgacggtggccgccatcctcgcctacctcctggactgcacgcacacctactgggacggcccggtgtggaaggacaggggcttccattggtgggagaagttcaagtcttacaggcatgacccgaggagcgaggagttctactctctgccgtatggcctcagcaagtacttcccttcgttctaggccaaaggatggcgagaggtagaagacgatgcaatcatctggagcctttagcttcactgctgtggctgttgcatgcaaagcattttggatatgagatgttgtggatctaatgaaatgaaacttagaattttggatggt

SEQ ID NO: 73058 - DNA, 692 bp, Oryza sativa
  Clone ID: PAT_MRT4530_73376C.1
ttttttttttttttttttgcctgtcaaggtaaattggtgatgtgcagcggtgagaagaacaacacattgcctcaaacttctctacatctcggagggttcagacagtacatatactgtattttcatcatttacagcttaggcatatgcaaacagaaaacataactcccaaaagaatcacgctgtgtgaatttttatctgcatcctctccaagtccaggaaaaaaaaggcatgagggttaaagaccagaaagaaagaaaaaaaaatcggttattcatctgttaagtctaggcctcctgcaaaacactagttaggcagatataccctggttatatgcagttctacttgtcgggagccacctctggaacggctgagcccttgtgctttggcgtcaattccactaaagatggagcactccgtggccgtgaacgaaatgattcactcaaggaccgcttccacctccttgtgccatttcgcttgctgcttgcgctaataggaagagcagaagaagagcgtgcagtgtcaggagagtctaagtcgatctttgatagggtacgcaaattaacttgacgctttctcaatgtgctgtgcttctgtccgttgccatcaaatacggtgtgaacaacaccatcgtcggtcaaaaaaccattctccatgcacatcacgcatggccaggtcatcatattcctcaaaag

SEQ ID NO: 73059 - DNA, 1919 bp, Oryza sativa
  Clone ID: PAT_MRT4530_73377C.1
cgctgttcgggaaatttggggcaatcattgcatcaatcccattgccaatcttctgtgcgctgtgctgcgttcttttcgcttattccggccggggaagcatgtgtggtggagagaagaggcgaaacagcccctttcctctcttcctcatccgctctctctctctctcgtcgtcgaccgccgccgtctgtcgccggagtgggggccatggcccctgtgaaggctgaggagctggtggcgttcgtccccaaggagcagtacgacggcgtcgactactgcatcaccagcccgccgccatggctgacggcggtgctgttggcgttccagcactacctcgtcatgctcggcaccaccgtcatcgtcgccaccatcctcgtgcccctcatgggcggcggccatgtggagaaggcgatcgtggtgcagaccatcctgttcctcgccgggatcaacacgctgctgcaggtgcacctcgggacgcggctccccgccgtcatgggcgcctcctacgcctacatctacccggccgtcgccatcatcctaagccctcgcttcgccatcgtcgtcgaccccttcgagaggttcgtgtacacgatgaggtcgctgcagggcgcgctgatcatcgccggcgtcgtccaggccatcatcgggttcttcggaatctggaggatcttcataaggttcctgagcccactcgcggcggttccgttcgtgacgctgtccgcgctcggcctcttctacttcgccttccccggagtcgccaagtgcatcgaggtcggcctcccggcgctcatcctgctcctgctcttcaccgagtacgcggcgcatttcttcgcgagggggagcttcctgttcgggcggtaagccgtgctggcgacggtgctcgtcgtgtggatctacgccgagatcctcacggcggccggcgcctacaacgagaggtccctcgtgacgcagttcagctgccgcgccgaccgatcggggctcatccatggcgcaccctgcattgcatcgatcgtgttcgttcttcttcttcgacgaggcagggtcaggttcccttacccgttccagtgggggtaccccatcttcttcgccgacgattgcttcgtcatgatcgctgcctctttcgtctcactgatcgagtctacgggcacgttgatggcggtgacgagatatgcaggggcaacgttctgcccgccttcagttttcgctcgtggagttggctggcagacttacacttggtttctgcatgagacagctgctgcagggctctgcttcctccagtactgcaacctcaacacactgagaaccaagttcatcctcagcatctccctgttcttgggcctgtccatcccacagtacttcagggagtacgaggtgttctacgtcttcgggccagttcacacccactcacccgctttcaatgtcatcgtcaacgtgatcttctcctcgcctgcgacggtggccgccatcctcgcctacctcctggactgcacgcacacctactgggacggcccggtgtggaaggacaggggcttccattggtgggagaagttcaagtcttacaggcatgacccgaggagcgaggagttctactctctgccgtatggcctcagcaagtacttcccttcgttctaggccaaaggatggcgagaggtagaagacgatgcaatcatctggagcctttagcttcactgctgtggctgttgcatgcaaagcattttggatatgagatgttgtggatctaatgaaatgaaacttagaattttggatggtattacctctgtcaacttgggggggggggattcaggggcctggatgatcctgccattgattttgatttggtttttgatctctgatccaatttgaacagcagaagaatagtaaacctgccaatgaccaaaaaaaaaaaaaaaaaacccgcggcc

SEQ ID NO: 73060 - DNA, 1542 bp, Oryza sativa
  Clone ID: PAT_MRT4530_73378C.1
atggtgtggagggaggggaaaaattggaaccaccatgggaaccggaactgggggagcagcggagggggtttcagggagcaggaggaggaagacttctatcatggtgctggtagaagtgaaggtgggaggctagggtttcaacctggctcgggtataggcgctcagcgggattttggaaacctgcaacaggagtatgggagatttcgtcagggcattcggcctagagggtcccgaagctttggtgctcggcgtggggggtttggtgggagaccaggtcgtagcggttttgggggcggcgcttgcttcagccagggaggcgacggcccagcaggaacaaacagaaacaatagaggagaggttggaggattgagtgggaaagaagggcacaattcgaaggtaactcgtgaaggtgcagggaaggagttggtagggggagcaagatcaagcaatggcagcggcgccattcacaacgacatcggatcggaggatacaaaaggcaagaagaaggtagtcatggtggaggattctggcattatagggctgggatatgatcccactctgtttgaggatcagaagtgtgttgtagatgatgtaaggtctgtggcgaaggttataggttgctcaaagtgtgctcaaaaaggtcatgtagtggctgattgcactattgaggtctgttgtgatatttgcaacagtgatagtcatgtgaatcatagatgcccaattcttaagatacctaaaccttcggtgcaagcagttggttatgccgtggagggcttaggtttcaaccatataccgcacacgccgctgcaaagaagcaagaaggggacaaagatggcgctggtaaagaaagaagaaggttgtttgttgcccaaagtctggataagagtgtttggcctgagaaagagacttagggagtatcttactttgtgggttgttggttcccttgttggagccacgcaattggtagacatgaagaccacaaggaaaagtgactttggaagaatttttgtggctgtcctagatcctacaattattccccggaagttagatgtggtgataggagatcactattttgagctaaagttcgaggtggagaagaaaggttttgacgagaatggggaagaggttgagtttatgcaggaaggggggggggatggagatggatcaaaagacaatgagaaggatatgagggatgaggaggaggaggaggaggggaggagcccgaaaagggcaaggaatgacgatatggtagtagaagggaaagagggaggaaatggagatagcgaggaggcgatgtcgaatgggagaggagagagggagtatgaggaggtatttttgggagggatagctgatgaggttattgatgtggcaatggagaaggtgttaggtgagatttttgataatatagaagtggaaggggatggaagagaggacgggcagaaaagaaagagaagggaggaagagggagctgggaaggaggagaaggtggtgcagctagcaagtgttaaggaagtgttgttgacaccaaagcgtgctagttag

SEQ ID NO: 73061 - DNA, 847 bp, Oryza sativa
  unsure (1)..(847): unsure at all n locations
  Clone ID: PAT_MRT4530_73379C.1
gaaagtaaaaacaaatacataaaccgtacgtacacgtacacgtaaaacacaatggcacgtacctcaacacatgcgttgagaccgtgcgtacccaaaatataatgtacactaattaaccagcaacagagtcatcacatgcataanaattcaaactcaagtatgaaattaaatcaacacactcacacaaacattgagaaatttcacatgaaaaatctctcagtttacctactggcgccggcaaccgccgccgccgccgccgtggacgtacacggcgagttcgccgcgctgcctacgccgatggaggcggcgcctggaacggcatgggcacgttcacggtcgggatggacggcatcggcggcagcgtcaccgccggcacggcggggatgccggcgggcatcggcggcagcgtcaccgccggcacggcgggcatcggtggcaacgacaccttcggcaccgccgggatggccgggacagcgggcatcggcggcagcgccgccgcgttagggacgaccgcgggcacggtgggcacggcgggcatcggcggcagcgccgcctgtggcacggccgggatggccggcatgggcggcagagtggtgggcagcgccggcacggcggggaggacagggagggcggcgggaggcgcggccgccgccgccgccgtcgccggcgtgtcggccaacatgcgggcggcgtagcacgttctgctgctgctggcggcgagcagaacgcacgccatcgccatggccgtggccatgaagctcacactagaagccattgcagcaagactagcttgtgtgtgtgtgtgtgtgtttttttttccctcgtgccgaattcctgcagcccgggg

SEQ ID NO: 73062 - DNA, 480 bp, Oryza sativa
  Clone ID: PAT_MRT4530_7337C.1
ggcggagcacacgccgtcgacggcgtacgttgcgcttcttatctctctctgtctcgcaggcggaggcgggcgacggagtcccgcacgtacgcctcgccgaacgcccgcgcgcgctcgcggatcggagaggtataagttcataggttctcattccagaaagcatggtaacatctatagacaatgtgagagggttgaacctggccatatcatcaagtgcatttatcggatcaagctttattatcaagaaaatagggctcaagaaagctggggatactggggttctggaggtttctcatacttgtatgagccattatggtggttggggatgataactatgattctgggcgaggtagcaaactttgcagcatatgcatttgctcctgctgtacttgttactcctctaggagctcttagcattatatttagtgcagtgctcgcacacttcgtcttgaaagaaaaactccatatgtttggtgttgt

SEQ ID NO: 73063 - DNA, 208 bp, Oryza sativa
  Clone ID: PAT_MRT4530_73380C.1
gcacgccccgactatctaaggcagtgggggaatggatcatgcttttgccatgcattgggtgtgtatgctactacctgatggaactctgctgcgatgctgtttcaaggatcggattgtgagacatccggatcaccagtcacaaagacgggacagcggatgctgtttggtgtatatagggggcattccaattctgcaaatgaggtcgcaa

SEQ ID NO: 73064 - DNA, 848 bp, Oryza sativa
  unsure (1)..(848): unsure at all n locations
  Clone ID: PAT_MRT4530_73381C.1
tttttaccggaccggttcctaccaacctcaagaacctaaccaagcttgcagaattccatctagcaaacagcaatcttactggtccattgccagacctaactggaatgagctcactcagctttgtggacatgagcaacaacagcttcagtgcatctgatgcgccctcctggataaccactttgccatcgtcattgacttcactgtacctagaaaatctgcgcatcagtggggaggtaccgcaaagtctctttagtctcccttcaattcaaacactgaggcttcggggcaaccgtctgaatggcaccctaaatatagcagacttcagcagtcagctccaactagtcgatttgcgggacaactttatcacagcactaactgtaggaacacaatacaagaagactctcatgctctcaagaaaccatattgcgaccaagtgaacgacgacgtgcactgaaagccaccggacaatcgaacccggcattgccaccatacaagactacctccaactngcctggcctggctcccacatgcctctcaacccagcagctgagcccaacctgcatttgctctgtgccatacagaggcacactcttcttcagatcaccaggtttttcagacctgggcaacagctcatacttcattcagctggaggggacaatgaaagccaagttcttgaacctcagtctcccggtcgattcaattgcgatccacgacccgtttgtcgacaccaacaacaacttggagatgagcttggaggtgtaccccagtggcaaggatcagtttagtgagcaagacatttctggcattggtttcatcctgagtaaccagacatataagcctccttctaa

SEQ ID NO: 73065 - DNA, 742 bp, Oryza sativa
  Clone ID: PAT_MRT4530_73382C.1
atctcaatcaaatacacttcccacggattttttttttttttctttgaccactgtcaaaactgtaatttctcattgctgctgcagaaccttgttacagcaaagtaatgcagtaaacaacatatcaagaacaggggaacagttgaaaccaagattaggcaaggacaaacattttactgtaaataaactactggttaccagctttctagatataactcgcgaaacaggagaaaatgctaatcagatagagagtacaaatggggtacaagagcaaagttttggctacgctaactccggacttcattttgatttccgtggtctaagaagattccagtcaagcttttcacgcttgtttgacttgtgagacccgcggccattgctttgcgaagatgaatcaccatcgatactcttacctgtggtcttgggctgcctatgtgatggtggtgtttccatttcaagctcaggctgtttcctctttagttcattcagagatatgctttctgaactatcaatgttgaagtcactaaatcttgttcttgatacttcatccgttctgctggtcctcggtccatccggtcgcgtgttacttcgtgacgcccactggctttgctggccgcccgttgcctcttgtgccactttagcactggttcggtggttttgcgcgaatgacattcgaccctttgcagctccagggtgtggattaccctccatgataacacttccgagtgactttaacccctcgtgc

SEQ ID NO: 73066 - DNA, 2802 bp, Oryza sativa
  Clone ID: PAT_MRT4530_73383C.1
atggagagcatgaacgccttcctcttcaagatcgccgatgccaacgaagacaacgacccccaggtccgcgcctggctgaatcaggtcagggacgtggccgtgagatctgagttcttcgtcgaccggtacgtgtactgcctcgacggcacccacgacgcaggttgttgcgggcctttgaggcatttcgctcggttgctggccactatcctggcccgccaccggctcgctacccatatccgggacctcacggcccgggcacgagacgtgggcgagcggcggatgaggtatggcgttatcgacatgtggatgtggcgccctggccctgctcggcagatgatcattccaatcagccagcccgaacgacgtccggagcaggagctggacgccatccccgaccagcatcgcccacgagccattgacagccgaccatttggagagctggatcagcctgaggccgccatccccggcgagcctgtgcctgcacgcgagcagcagcatcagcgtgccgcatccgagcatgaagacctcgagaggcggcgcatattggccgacgacgactccgacctattaacggaagtatcgaaggagctcctcgaccggattccgttgatggaccaatatgtccatttcctccaacaccgagagccgaatgtcatctccatcctagggctacgtggtacggggaagaccattcttgcacggaaagtgcatgatatgtacggacagtacgatcccgattgcagccgcacggcctactggatctctcttggcgacgaccagtctagcaaaaaggtgctcgagtccatactggtgagcatcgctcctaatgttcctggggttgagaacgtcagcagctgggaacaaggctcaatcctgggcatgatcataaggcgtctcaacgatacgaggttcttgctcgtctttgatgatgttcgttccgagtcactcatgagcgacataggagatattgtccgctgtaactgttacgctggtagtgccatattgttggtcacaagtatacctcaagtggcggccacctcctgcaacccgcagaatattttcgatttcaatgacttccctgagcagcataaagaatctctgatcaacttcttcttggagagagcagtttccctggttgccaacagccagcaaaatgatctgctggaggtcctaaagtccatcctaactaggtgcgccccatctatctttaccatgaagatgctccttcgttgtctgtttgtcaaccctaacaggaacatcgaagagctgagggacctgaacaacagtttgcaaccttcttcggcgctgaatgctaattcaatgctcaacttctgctaccgtagcttgcccagtcattacaggcattgcttggcatatcttgctatttcccctagaaatcacacctttcgaaggacaagtttaacaacaagatggcttgccgagggtctaatcagtagaacagatgtaacgtctgcttcagaagaaccatcagatgttgccaaccgctgcttcgatgcactttgcaaccacagatttcttcttccggctggggacttcactggtactagtttctggggcagattcaagagctgtacagtacatggcatagtccgtgacttcctttccacgataatggaagatgaaggtgtagtggacgaagatttgttccctgacatggccaaacgtatttccattcaaaatgaattcctgcatgcatgcagagatcgtagcctggtcgaatcactggccacgcaccctggtcttcatctaattaatgtgcttgatctagagggttgcagcggttttcaagctaaagacctgaaggtcatttgcaccagggcgcgtcatctcacatatttgagcctccgggacactggtatttatcatctgcccaagcaaatccaagaactccacaatctgcagacgctggacatacgccaaaccaacgtgagggtgttaaacgttgtgttccctaggcttaagtatctgctggctggaaaagaggcaccatccggtgaatcattttccacggtaaaaatgcctgatatcagttttatgacagatatggaagtgctataccatgttgagatctccagccaagatgacgggctcattgatcttggccgactcaggaggttgaggaagctgggtgtggttttcaatagaggaagggtcgatctgatgaagtttttgcttagccagattcagatgctagaaagctgtctgcgctcgttgtcaatcaggataatagaaggcgcgacagggagtgaggccgagaacagtggcagtgggtacagtttgattgattcacatatgctgtcacctccgaggttgcttcaaaccttaaacataagaggtgccagaggtgggcttcctcgttggatgacagaactccatcaactcgccaagatcaccctgcgtgagacttacctaacagaagacgctctgcgcatgctgggtagcctacgtggcctgcagtgtctcagattcctgcgaaaagcgttgacggaggggacaattatattccgtgacagcgaattcaagaaactagttgatctttcatttgaaggcagctacctcagcacagtcatatttgataatggcacagctcctaagctcgagagggttgctttcaaagtcccaagggtggcttctcttcatggaatccagcacctcccaagcctgaaagagctcgagtttattgggaatctatgtgaggagcacattgtgaagaaagcaattgcagagcattccaaccatccccattacacttatttggacattgatatcaagggaagctga

SEQ ID NO: 73067 - DNA, 681 bp, Oryza sativa
  Clone ID: PAT_MRT4530_73384C.1
atggcggcagtagtggaggacggtgctacggcagtgctcggcaacagcagcagcagcggagcgaggcggaggcggcagcgacggcgctcggcgacggcgacagcggtggcggaggcagagacggctgcactcggtgacggtaacagcgcgaggggggaggcggaggcgcccaaagacggcgacgtgatggcggcggcggaggaggtggaggcggcgcgagggggagaggcggaggtggccggcgacggggacggctggaagcggaggtggcagcgcgatgggtcggcggcgacagcgctcggcagcggcggcgggggtcgaggcggtggcacgagggggagccgagacggtggcgcgggggggagccgagacggtggcgcgaggtggcagcgcgggagagggagcgggcagagggagagggagcgggcggcggcgggcatggtagaggttaggcaccggcggagggggaagcacaggcagggtggaggtcaggcggtggcgaagaagcgcgggtgggtggagagcaagcgccggcggagaggcgcagacgccggcgaagaggagcgaacggggtggagtgcgcggccgacggtttgttcaggagaaggattaggagtcgacgacggggtgcaagcgctaatccatgtgttaatccaactcacgatgtggatcgttggatga

SEQ ID NO: 73068 - DNA, 1809 bp, Oryza sativa
  Clone ID: PAT_MRT4530_73385C.1
atggggccaccaacagctcgacccccaaactttgtcaccgccaactccgtcgtcgtcgactctgtctcctccttctacgcggccggccgggcccccttcctccctcccgagctccgcccgcccgcccgccgccgccgccgtcgagttcgccgcacctctcgcacggcccccaccccgcgcttccttcctcgtcggaccgcccgcgaccgcgagcctgcctcccgtccaagttgacgggaaccctcgccgcggaagaccgcggagaggtggggggccgcgtcccgaccccggcggtggtcgatcggttccggacgagaggagcgatgcagggcggcgtgtccggattccagaacgcgccggtgacgcgggccgtcgtcctcgccagcggcctcctctccgtcgtcttcagcgcccagcgccgcgcccgcgccctcgtcctctcccaccaggggattgtcaaaaacttccgtctatggaagttgtttgcatctgggtttgcctttcagtcaacaccggagctattgtttggagtctacctgctctattacttccgtgttttcgagaggcagataggctctaacaaatactcggtttttagtttattcactatctcagtatcattgcttcttgagatcctatctttggttctcctgaaagacaccaactacctcagcactcttgcatgtggaccttatggccttatatttgcctcattcattccattctttcttgacattcctgtcacatcacgatttcgtatttttggtgttaacttcagtgataaatcattcatatacctagctggcctgcagctgcttttatcttctgggaagcgttctcttattcctggtatttgtggtctgattgctggttctctctatcgtctgaacgtgcttggcatccgcaggatgaaggccctccaggagtctggtcggaaacatgagttctcgtacaagccgtgctgtgcagaacaatcagccatctggattcgctcctgtcgtggagcccccagaatcttcaatcgctatgctggtttcgatgggggccgccgccgccgccgccgccgccgccctccccgccggcagccaggaccacatgaacgcgctccgctccaccgcactccgccgctccaccctgcactgggacgccgccgcggccttcttcgccccgcccttccgctcccgaagctgccgccgccgccgcgtgcctgctcctgccgccgccgccgagacgaggcccaccaggtccccctctagggctagggccagggcgcgggcgaagctactggcggacgccgatacgagggacccctggctggcctccctctcgctgctcccggtcgacgacggcgaggccgccgccgccgccgccgcggcctccaccggctgggcgattggggtggatcccgatacgggcggcgcaatcgccgtcctctcgcccgacgggtcctcgcaggtgtttgataacccgttcgtgcacatagtggtctcggagttcatccggaagcgcttggacaccaaatccatcatcgagctgctccgtggcctcgatgcgcctcctgcaatcagcacaagggacatggccattatgattactcattatggaactacggcatatattgagaagtcaagcccatttccaactgatggaaagctggactatagcaggcaagctgcttcaatcttgttcccggacaaggccctgtccctgaataggaagaaacatcatgggcgagcagaggcccttttgttagcggcctacggaaaaggtcttgtgctgccatcaggggagttcagcaaaacattatga

SEQ ID NO: 73069 - DNA, 606 bp, Oryza sativa
  Clone ID: PAT_MRT4530_73386C.1
tctatttcttaacatctaaaatttggcttcaaccaatagcacagtaaatactattgaaattgtcaaatattggtaagtctaatttagccctcaaaccaaccagtccattatactcgctcgggtcaaaagaggctataggccagggtagagtgtcatttggaccttgaacattttaaagaacaaaacattcaagttaatattttactcctgatgagagagttgctgttacagagtgtgaaaaaccttaggattcctgaacatattttactccctgatgggtaaaaagaacagagtgattaattaatgtctgatgctgggcccatccaagaccaatcatggtggagctgcagtaactgttactccaatattgaccaaatgtttgtgtgtacgtactgtagtagtagaatgtatgaccagcctacgcctagtcagattccaaagaaagatagtacctagtagtaaaaataactgaaaacaggcgtactatagtagtaatacctagtactactgagtgaaagcccgggggtgtactcttgtacgtgtttcacgtgctatatgtaagcacccaggtacaatacacaaattataaataaaaaaaaaaaaaaa

SEQ ID NO: 73070 - DNA, 363 bp, Oryza sativa
  Clone ID: PAT_MRT4530_73387C.1
tcaaaaacgtgaagggaagtgggagtatttaggacccttcccagcaatctcacccatccctccccttcccctgcttcggcagctgctggtgtggtgatacactcgcctagctttggccaccactaatctctgctctgctttttctcctctgctccactgatcatccaattcttctcttcctgattggccattctgattggctggtgacatgtcgaaggtgagcctttcttgctcttggattctgatcctgattagctcgtgtagaatcaggatcatcatcttttcttcttcagatcccaacaaccttttttcttgcttgtcttcctgaattgtatcatgttcaggtgtttgtgattcacacat

SEQ ID NO: 73071 - DNA, 2362 bp, Oryza sativa
  Clone ID: PAT_MRT4530_73388C.1
tggatcccggggctgcaggaatcccggtgttcgctcggatctgtagcaaagagcgaagagcgaagctgcagcctgcagctacgcttgttcgcttgagacctagggtacgagcaacaataatagagagtgactgagtgagcgagcactgagtagcaagggcccggcacaaacaggacgcagccggcaacgtgtacgtcgaaccaaacagagaacagctagctaatcgatcggtcgccatgaccaaggacgacgccgtcccggtggccgtggcgccggcgaagcgcccgcccatcaacaagtacgccttcggctgcgctctcctcgcctccatgaactccgtcctcctcggctatgatatctcggtgatgagcggcgcgcagatattcatgaaggaggatttgaagatcaccgacacgcagatcgagatcctcgccggcgtcatcaacatctactcgctgttcggctcgctggcggcgggcatgacgtccgactggctgggccggcggtacaccatggtgctcgccgccgccatcttcttcacgggcgcgctcctcatgggcctcgccccgaactacgcgttcctcatggccggccgcttcgtggccggcatcggcgtcggctacgcgctcatgatcgcgcccgtgtacaccgccgaggtggcgccgacgtcggcgcgcggcttcctcacctcgttcccggaggtgttcaacaacagcggcatcctcctcggctacgtctccaacttcgccttcgcgcgcctccccgtccacctgagctggcgcgccatgttcctcgtcggcgccgtgccgcccatcttcctcggcatcgccgtcctcgccatgccggagtcgccccggtggctcgtcatgcggggccgcatcgaggacgcgcgccgcgtgctcctcaagacctccgactcgcccgacgaggccgaggaccggctcctcgacatcaagaaagccgtcggcatccccgaggacgcgtccgatggcgaggacgtggtcgccatcgtccgcgcgaacaaggcctcacagggagagggggtgtggaaggagctgccgcccaacccgacgtggcccgtccgccgcatgctcgtcgccggccttggcctaatgtccatccagcaggccaccggcgcccgactgcctcagtgcatgcacagcccgcgggcctcctagcgcgccggtattacgtcgaagacctacctcgccgggggcgcccactgcggtgggcgcttgcaagaccttcttcatcccgatcgcgacgctcctcctcgaccgcgtcggacggaggccgctcctcctcgccagcggcggcggcatggccatcttcctcttcaccctggccacgtccctgctcatgatggaccggcggccggagggcgaggcgaaggcgctaggcgccataagcatcgccgcgatgctgtcgttcgtggcgtcgttcgcctcggggctgggccccgtcgcgtgggtgtacacgtcggagatctacccggtgcggctgcgtgcgcaggcggcggccatcgggacggggctgaaccggctgatgagcggtgccaccaccatgtccttcctctcgctctccaacgccatcaccatcgccgggagcttctacctgtacgcgtccatcgccgccgcagggtgggtgttcatgtacttcttcctgccggagaccaagggcaagagcctggaggacaccgtgaagctcttcggcaaggacacagacgacgacgatgacgtcgacactagccgccatgagcgcaagaggtccactgagctgagcgctcagcactgaacagaacacgtccgtcccgagtccgagtgtggtcgaagcctattcgttctccgatagaaaaaagcttcgacatcgtgtgttgctttgtgaatcttcagattctggccacttaggttagattgctagacttttggatctcgtgcacatcagcttgttggccttagccaacatgtagggacattgagctgctttacgggggaaaagatcgtgtgatattccacactgcagggacgagtccacgtaaaaaggtcgcagtcaccgttgcggttacgcagcttggcacggatctgtgggtctttttcaccctgtacaacaattcaaccggccaatccttcgacgacagcattgagatccagggagccagggtctacctggctatgttttcttgttcagatattaccgtggcagtgtaattgtatacgagtctataatgtatatagctttttatgtatatgactcgatcacttttgtgtccctgtgtgactgtcgcttaatataaaggagatttccttttatttgtaaaaaaaaaaaaatgatggaacacaaaatttcattcacccaaaaaaaa

SEQ ID NO: 73072 - DNA, 274 bp, Oryza sativa
  Clone ID: PAT_MRT4530_73389C.1
atggagatccaatatgagtttaattcggatagggattcaaataggagtcctatgggccttggaggcccgaatcatggatcctatatattcgtgaggggtgtgatcggcggaggtattgcatcatcgtgggagtacggcgaggagaacgcacgaggaggagaaggtcaagccggtgcgatcgactacttcctctacatcaacgcgcgctacttcgcgaaagttccttcgacttcttagcgctttcttccgctacgcagcgtgtcgagtggtaacg

SEQ ID NO: 73073 - DNA, 2038 bp, Oryza sativa
  unsure (1)..(2038): unsure at all n locations
  Clone ID: PAT_MRT4530_7338C.1
accgctcgtccaaaatccaatcttgtcgccgcttcgggctttcgtctccaccgccttgatgccgccccgggagcaggagtagcggctcatcgccaactacccttctccgtcggagcgtgcgtcgtcgtcaccggcgatccccacccacctcctcactgcgccgcctcgccgtccgccccttctccaccttgccctcaacccgccacagatccctctccctcccttcctcgtccccggccttcctcactgcaaacactgccccctcttctccgctttccttcctcctctccacctcagccgccggccacgatctcagccgtggtgagcctctttctgattcatctctctctctgtctctcccgtcggaactacttttgtctggatgttgcttgcgttcgttcgttcgttaaccctagcttctcttctagatctggaagaggctcttcttttaatttcagagccttaaccttaatacaagtaacagtttggggggttcaactgaacccccatgtcccaagttggatccgcccctgctcccatggtgacatcccatgaagatgctaagaaggcgtatgctgatttcgagaagaaggtcaagaggaccatctatattgatcatctttcccctcaagtcacgagctcagtacttaaagcagcccttgcccaatgtgcaaatgttgtcgatgtggagttcattgttaattacacaatcccgtatgacattccttctgctgcattggtggaattggatgacgaaatacaagctaaggctgcactagacttgatgaatgatttccctttcataattggcgggatgccaaggcctgtaagagctacatgtgcaaagcccgacatgtttcgggaacgccctccttgccctgacatcaagaaagagttccggtgggtaaaacaagaagatggaacagagtatgaaggaatgaagaaattgaggatcctagcaaaaaggcaagaagcagaaaatatggcactcataaagaatcaattggaagaggagaaggagctggcaaagcagcagcaggaattactcgatggaaattacaagaagtacgacatgctggagaatgtcgtacagaacggaaacatgaagagcctagctcagcattatggagtcagcctggccgatgagttttgacaattcaatcccataagctgctcggctcactaaataagcccgggtctagttcccgggtgcagcaacatgcctaataccctttctctctctctctctctctntctttctctctctctctaggcntttaggccagtgataaatcatgtcaatgtgtnagatgaaaataataattgaatgactggtttgaggcacgcattaggcgtgatcaaaggcatatcctctgtgtaaagatagttgcctgcctgctataatttatctggaggggttattgacaacagcactggtttcttccttgtgattctctgacgtcctgcgagatggttaccataagtatgtcttaatttatatggtgaagcctgcttaattaccaagcattgaactgtgctgtcgtatactagagctgatgcatttcttgcttagtttcagagactcgtggatgtactgataagttacttcgaggagaaggtatctgttgtaggcctgactgaagttagctgtagagtgtatggaactggaagtcttaaaattttgggcttgtttttcggtttctagtgctaaagatgatacttacaattatgggtcttgtattgatcagttgaaaactcaagattatacgtatcaataatcagttgaaaactcaagattgtactgcactgatatgaaaaaagttaatttgcatgagcataaggattaaaatattgcagatgcaactcatcaaattttaataagcctgactacatagcactgattgttcattgtgagcatgacttcattgtagcagattacttacagcttacctagaaaatgattagagaaagatagagagtggaatttgccacacatatacctctgatgaactcaatatagcagctctgagtccttttt

SEQ ID NO: 73074 - DNA, 627 bp, Oryza sativa
  Clone ID: PAT_MRT4530_73390C.1
aactcgagcaacaggtcgtatccatgacgaacggggatctgtttcgggagtacatcatggcgaagttcaccggagtccgcttctccgacgtgcccatcaacctaaacctcagcttcaacttcatcctctccttcggcatcgactacacgagcccggacggtggagccacggcgatgtcgaccaacggggagtacacgacgaactgggacacgtgccaagctgaccccggacgaggacgacgccgtaaaggaggtgcaccccaacggcagggcaatgtgaggcctggtgggggacagggtgtgggacacggacaagggcttcatctccccgacctccgtggactcgagggtggccaacgacgacgactccgtgtacgatatcatcgaggcctactggctggagggtgtggacgacgagtaatagtagttcacgagaactgcgccgccggagtctacacgttcgcggagtgaatcatgagtgtccgcaccgagattcaaggcgaggtagccgaacatcgctacctccgtcgcggcgatccaggacgccatgatgatgcgtgtactaccagaaggtgatgcggtattactgccgagtgatagagctctgcaacttccagctctacgggta

SEQ ID NO: 73075 - DNA, 627 bp, Oryza sativa
  Clone ID: PAT_MRT4530_73391C.1
atggcaactcctcgttgtggccgattagaccacgccccccgactagtcgcacgcggggctgcgctgctcacgcacgctgaccaggcgagcttcgggttccgctccgtcgccttcctcctcgcgcatagccacgcccacaaggtcgctgcctacctcttcacagtgctcgtcatcgagccgacaaagccgctggcgtgtgacccggcgagcttgcccaagctcccgctgagcaaggagtacaacgccaagctccgcggtaaggaggccatcaggcaaaacacgacagccatcggaggcaagggctccatgttcatcaaaccggggaggaacaagccgtcgaaggcggcgccagcacaggacgccattggaggaggagctcaccggcgcgcgcctggtgcacccgaagagcgcgagccaccactacagctcgctgtgccgttgactctctgtcgtgcctggagagaggagagagagatgaagaaaggggagatggcggagaggaggaggaagaagaagaggggtgaaaatgacatgtggggcccacattggctccaccagtttttattaatttgtgtgaaactgacatgtgggtcccatgaggtttatcaggatcgaataggcacgtaa

SEQ ID NO: 73076 - DNA, 493 bp, Oryza sativa
  Clone ID: PAT_MRT4530_73392C.1
aggaatcggcacgagggtcagcgtcggcggctgagggcggcgtgcctgccgcgccccgggtgcttcacggtgtccgccgccgacgaggggccgtcgggctccggcggcggaggaggggggagtaggccggcgccgacgcatctggtcgtgacggtcaatgggatcgtcggcagtgcagaaaattggcgttacgcagcaaaacatttcattaaaaaacatcctgaggatgtggttgttcactgcagtggatgcaacggggcagttcgaactttcgatggagttgatgtgatgggaacaagattagcagaggaggtgctctcacttgttcagcgtagaccagagcttcaaaagatctcctttgttgcccattcattgggtggattaattgcaagatatgctattgcattgctatataagagtgctacagaaatagattctcatgaagagcatgagaagcaaatcactgatgtttccagcaaccaacttattgatc

SEQ ID NO: 73077 - DNA, 448 bp, Oryza sativa
  unsure (1)..(448): unsure at all n locations
  Clone ID: PAT_MRT4530_73393C.1
cccatatttcattcncattggatggcattntgggcaggaaaactttacagcgatggtatgttgtatctagcacttcaattatgcatntgaaaaaactttcagagagcgatgtcatattgaatttacaaattgtttgcatgcagtttcagaagcaaaactaagtatgaagatgtgctgcctgctgcaattgatcttttcaaggngcgccactgcagtagcaagactgatttttactgatgcatcaaagttgtttattttgctatggtccgtgtcatgtacatgagcttgttgtggtcacttagtagtcggtgaatctgattctatgtatgttactgggtttgtgtttttttattgagngaatcccttatatgccactccaaaaaaaaaaaaaaaaaaaaaaaaaaaaaaaaaaaaaaaaaaaaaaaaaaaaaaaaaaaaaaaaaaaaaa

SEQ ID NO: 73078 - DNA, 204 bp, Oryza sativa
  Clone ID: PAT_MRT4530_73394C.1
atggccacatccgaggagtcgtcgtgcaacgatggactcgactcgacggtaatggccggggccgttctccacgtcgcgcgcgcggcgcaggggcgttcggatcccctccctgtggttcacctgcgccgggtgcaccacgcccttcctcgagccccgagatggaaagccgctcatcgcgagagccacgggccgggcgccggctga

SEQ ID NO: 73079 - DNA, 264 bp, Oryza sativa
  Clone ID: PAT_MRT4530_73395C.1
tccgccctacccgcccgcaggtgactaccccttcttctccatcgcccacgagggagagtttggaagctagctggggtttcatccacagccgccgacatggctcgtggccgccgcctaggaggcgagcatgtacgcactgcagcatggcgcgaacccccatcctgccgatgacgctcatgaacgccatccggctgggcctgtgacagacgatctagtccaccgccgccccctgaggaggggggaaggcagcccatgtgaccccga

SEQ ID NO: 73080 - DNA, 764 bp, Oryza sativa
  Clone ID: PAT_MRT4530_73396C.1
gcccccacgcgtccgcccacgcgtccgcccacgcgtccgagcaacgaagcgtatcccctcctaccgtcgtctcctcctccgttcgccgtctcctcccccaactcgcgcgccggcggcgagcaagcgaagcggagtccccgtgtagctcccggtttggatcgaccccggcggcggcggcagggatggcgctgaggggcgtttggcagctgcagaagctcgtggtgaactactgcgattggggagggagcagcagggggatcagggcttttatggaggcgcatcttccagcttttaaggaaaagaacccccacttagaggtggtgacagagttagtccgtggacagcatcctaacctgaagggcatttacaaaaatcataatgagcgagttgtttgtgtccgaaatttagcgcccgaggacatactattgcaagctaccaggctaaggaattctctgggcaggaaagtggtgaagctgagaaccagacacgtaacaaagcgccccagtgttcagggaacatggacgacagaactgaagatgtgatcatgtgagttgaccagttgggttctcagacaagctgctgatgttctttgatgtcgtgattgcagaactgttttcatatgcgtgtcaagaattagtcagtgcagctattcgactcacctttttttagtgattacagttcaactttgtctttttgtttcgtccggtatctgataataacatgcaaacttgggtgttccttgttgtaaaaaaaaaaaaaaaaaa

SEQ ID NO: 73081 - DNA, 1355 bp, Oryza sativa
  Clone ID: PAT_MRT4530_73397C.1
ttttttttttttttttttttcatcaatgagacagtgccgcctattaattatttatctttcagcaacgccaataaattacaagtgttttcagcgtttcatgttgcacttgcacacaaatcaatcgatcgatcgaatcccctataagtttcaatttttttttcaggttaattttcagcggagcggcgcatgaattggccactcgtacgccatcaaccaatccaaccaacaaatcttatagctactaccgccatgctgcatgatcgttctatctgcatctgaattctgaagaagattagaagatgtcgaggatttcttggtttgcatctgaattctgaagaagatgattagaagatgtcgaggatttcttggatgaaaccgttgcagagagggcagttgccgcggctgacccagagctcgcgggagcagaggcggcagaaggtgtggccgcacgggatgaaggcggcgcccttgtggcgcaccatgcacacgcagcacacgtgcaccatctcctcctcccgcccctcgccgtcgtcctcgtcgtcgtcgccgtcgccgttcttgcgcgcgccgccgccgccgccgccgccgccgttgcccccgccgccgccgccaccgccgtggccttggtcgtcctcgtcctccgagtcccactggctgtccgattgctccagtagcgccatcagcgacatctgcgccgcgggcgcgtcgtccttgccttgctcctcttcgtcgtcgtcgtcgtcgtcgtcggtgtggtcctcgtcgtcgtcctcattggcgtggccgccgccgtcgaccgcggcgcgcctggagccgctggagaaggctgtggctccgaggcgggtggaggtggcgcgcgagaaggtcggcgtcgggcggagcgaccgcgtgcgggagaaggtgcgcgagaacgccgccgcggcctcgccgggggagtagttgtacttgttgctgtggttgctgccgctgttgctgctgctcagcgtcgcgccgccgccgcctccgccgccgctgttcgacgcggcgggcttgggcgacgcggacatccacgcgctcgcggcgcggcgtagccggagccggtcacgcagcggcttccagttgatcatgccaccgacgccaccgccgccaccggaggcgcccgcggcggcggggatcctccctccctcgccgtcgccgccgccgaggccgtcgtgtgggatcttgaggaagtcgcggatggcctggtcgggcgcggacagctgctccgagagcgtcatcgtccgccgcagctccggccgccgctccatctctcagccttgtcgcgctactcttccgccgccgcgccggaagcctcgccgtctgcgtgcgaggcggcg

SEQ ID NO: 73082 - DNA, 3274 bp, Oryza sativa
  Clone ID: PAT_MRT4530_73398C.1
gtccttcgggcacgccttgttgaggtctgtgaaatcgacacacatgcgccatttgccattcgatttccgcaccagtaccggattcgccagccactcggggtggtcgatctcctggatcaccccagccttgagcagcttttggacttcagctttcgctgcttcttggcgatcagtggatatcttgcgtagcttctgttttcttggcttggcattcggcttgaccgccaggtgatgcatgataaggtctgtcgaaacacctcccacctcatcggggccccaggcgaagatgccaatgtttttcttgagcacctctaggatgttctcaacttctcttttgcccatgtcgccccccagcaatacaagccttgtgggattggcatcgtcgatctacatcttgattaccctgccgtgaggggcgggcttcggcgcgtgcttcgcccggtcatgcggttcggcctcaacattgcacactgctccgttgattacggccaaatcgcccttcgatgtagccgaaggttgaagccccttgaccatgatcattcctgcagggccaggcatcttgagcttgagataattgtggtgggagatggcttcaaacttgtttaaggtcgcacggccgaagatggcattgtagttgtacgggatgttgacaacgtcgaacagtatttgctcttcgcatctgttttcgcttgtgtcgaaggctaccatcaattgcgcttggcctaggatttgaactgcttctccgccgaaacctcgaagcgaggcctgtgctggggtaagggctagggtaggcaaccccatcttggcgtatgcttcggcgaagatgacatcggccaaactccctccgtcgactaagattcgccggacttcgaagccagctatttcggccaagatcaccagggggtcttgatgtgggaacatcactccttggtcatcttctggtccgaaggagatctgctggttcaaatacttcttgcgaacgggctgctgatggctgcttgcctgctgggcgttgaactccttgcggagagcttgaacttcttcgacaaccatcacagccttgcctgcatggtcagttctgaattttctccaagtcatgggggcttggccttgccttggcggttgaccttggttcgccggctgaggctggcgaacagtgagaggagccggttcgacgacttgggcttgtacttgggcttgagcagcggcgacagaggctttatcatactcagcctggattgcctgccatcgcttgaaatcctcttcgccccttgcgtacccgtcaatgatgcgaagtaggtgctcaagcgtttgcggctctttgttggcgatttttcttgtgagtttgccctcgagcagcccggccgaagcggcgttgatgacggacgcctcagttatgtcctgcacttgacatcgggcttgcgagaagcgacgcatgtactcccttatcaattccccaggcctcttgcgaataccgagtagatgctgctgcgtcttcggctcctcgtaggtgcctcgaaagttaaggacaaagacatcgcgcaattgcttctatgagtaaatgctgttagctggtaaattgaagtacaaagaacgggcgatgccgtctagagcgagatgtattaccttcgccttggtattttcgtctccatgagcggcttcgatcgcggactcgtagatggacaagaactcttttagatccgtttcgcccgaatagcgtgggacgggtgggaacttgaactggggtgggattggacggatcttgattcccccactcagtggtagccccttttcgccccccgccctgttcgcggcaccttgctgtggatatggcgtggcgaagggcgaggtcatggcttgcgcatgcggctgggccacagtgttcggctgcctagccctgatcggtgatgcttggtgggccgccatggatgggtcgaacgtcggctgggtccatgccatggtgacctagtttggttcttggtttgctccaaagcctagtgttggtgcctatggccgaacggttggtgcttgagcagcgttggtgaagtcgaattgtggtccttaactccaaggcgaagcccccggaccaggctgattcgacggcaaccaattgggtgcaccttgactcgtgttcctctccggctgggccgagggggctgttcctgaaatgctgtggggttggctgagatgctgaaggaaagcttgaagctgtgcctgcaaggccgaagccccttctgccattgcttgtgacatttggccaagtggtggaggatgtacttgggcagcgaccggctgagcttgcggctgcacatgaggggccggttgcattgctgtggttggaggctgcccagtgaagtatactggcatttgcatggcttgtggcggatggggctggattggtgcttgcgggtagacttggggtgggatgtagcccgccgaatactggaggattggagccgaagcgaccttggcctgcctcgccgtcttatacgcctgctgctgttcttgcatctgacgaaccatgtcttggagtcgcgtcatgttccggcgcatggcctccatgtcggcttcgacatgtgcttagaggtcggggttgacttgtgcggcggcgagcgcggtcgaaaccgttgccggctatgacgaagcggcttggggcaccagcagctggcctgtcgaaagggtctccgccctggtctggagcgcgctagccgctgcggctgccttcgccgcgtcgaccgtgttcggtacctgccccgacgaggcagcaggagctgaagacggtggttgtggcgcgggtgctgaagccgatggggctcccctatcttcggcgattggcgccgaaggctctgctccatcttcggcggccatctcccctcctacttcgctcgcctttcgcctggtaaccttctctttcacgaccctctttggtagcattcgctctcagtggtttcgctcggaggtccctacggtcggcgctagctgttgtcgaaacgacaaatggttacccttatgatagggacattatggagggcaaatagctcggcccatctatctggcgaaatcccccgagggcgtaatggcccaccaagcctcccgtcaacggggtttggtgctatggcgaagcccgtgcctgtgtgccgaggctttcgccacatcatcttcgcccgtgccgccttctggcgagaactccactcggcgaaggtggtgttaccccagtcacggctttcgcccgtatggcttcactcttgtccttcgccgcccaccttcggcgtga

SEQ ID NO: 73083 - DNA, 374 bp, Oryza sativa
  Clone ID: PAT_MRT4530_73399C.1
gaatcctccgagtttgttttttgtttacataaccaaggaggaggaaagcatggacaccattctactcccattcagggccctctcatgttagtcctcccagcacaaatggttttcccttagttattatacactcagtcccccagtttcatgacaatgattttctgtgttgctctgagctgccaatcatgtagaaacccagagacgggtatactaggaataattggagagtgttgtcgaactccaatgtgtgctcaactatttctcataaagaaatatttgatcctttcacaagtcaatttcgtcttaacatggtggctaaagtaattcatttggaacgtaccaaaccttataaagaaatgataggttagtttccc

SEQ ID NO: 73084 - DNA, 279 bp, Oryza sativa
  Clone ID: PAT_MRT4530_7339C.1
tcagttcgtcaatttacccgcgacaataaatgttccattgagtttgatgaatttggtttctctgttaaggaccttcagacccggcgcgtgattcttcgctgcaatagtcacggggaactctacacccttccagctgccactccctccaacaccgcgtcctgctccctcgccacttcttccacgctttggcaccgtcgtctcggtcagcctggtccagccgccatccacagtcttcggaatatgtcctctatttctttcgctccctttgagcttgtccat

SEQ ID NO: 73085 - DNA, 378 bp, Oryza sativa
  Clone ID: PAT_MRT4530_733C.1
atgggatcccatgctcaacagaatcacggcagacgaggcacatgccctgctcgagtccatcaatgcggcaatggcttccgcgacaatttcgatgccctcgatgtcgtgcctatcaaccatgacgtccaatacatcggcaacagtggcatcggcgacaaccagatgcagatgacaccggtgacagatggcatcaactgcgagtgttcttcgaccgccatcaccacagatactcaacttgtgtcgcggctcaacacgcgggacccgcccgatgccacgctcctcgagcacctccttggcgacctcagggagttgcacctcaagcctgatgtgcccctgttgtccgacctcatctccgcctatgcttggccgtgctcctag

SEQ ID NO: 73086 - DNA, 1377 bp, Oryza sativa
  Clone ID: PAT_MRT4530_73400C.1
ttagcccaaaggatactgtgatggcactgtaactttgtgggcttgaaagtagtgtttaagctcgcgcgaagccatcactagggcgtaagcaagcttctccatttcaatgtatcgtatcttcgccccttgcaaggcttcggagacaaaatacactggtttctggcctgactctgtttcttggacgagggccgcactgaccgccaccggcgaggctgctaggtagagtagcagttcgcttcctagtgctgggctgaccaaagcaggtggactctgcagatattgcttcaactcgtcgaacgctgcttggcattcgggtgtccaggtaaacttttccgcgccccggagagtcttgaagaaacgcaagcctctttcggccgcttttgagaggaatcgactgagtgccgcaattcggcccgcgagcttttgtatttcgcgtacgctcgacgggggcttcatttgctgaatggcatcaattttctcggggttcgcctcgatatccctttcagaaacgagaaaacccaacaaattgcccatgcgaacaccaaaaacacacttctcaggatttagtttcatacccgccgcgcgtaagttgtcgaaggtcccctgtaagtcggacgcatggtcgaaagccttgtggcttttcgcaacgatgtcatcaacataagccttgtacactagcctagcgaaggttgcctcggcgttcctcaggccgaaaggcatcctgaggtagcaaaaggtgtcgaatggtgtgatgaaggctgtcttagagatgtcggctggattcatgtggatctggtggtagccggagtacgcatccaaaaagctcatgagttcgcagcacctcgtcggggccccaggcgcagatatcaatgtttttcttgagcacctccaggatgttctcaacttctctttcgcccatgtcgcccccagcgatacaagtcttgtgggattggcatcatcgacctgcaccttgatcaccctgccatgaggggcgcgcttcggcgtgtgcttcgcccggtcatgcggttcggcctcatcattgtggactgctctgttgattacggccaaatcgccctttgatgtagccgaaggttgaagcccattgaccacgatcactcttgcagggccaggcatcttgagcttgagataattgtggcgggagatggcttcgaacttgttcaaggttgcgcgactgaagatggcattatagttgtatgggatgtcgacaacgtcaaacagtatttgctctttgcgcctcttttcacttgtgccgaaggctaccaccaattgtacttggcctaggacttgaactgcttctccgtcaaaaccgcgaagcgaggccggtgcttgggtgagggctagggttggcatccccat

SEQ ID NO: 73087 - DNA, 3384 bp, Oryza sativa
  Clone ID: PAT_MRT4530_73401C.1
ctacacatagaaacgcttaagggaagccgcgttccaggaatggtcgaactcttcgccttccagcatcgctaggcgaaaggagcatgtcctggacatgtgcttgatgaggtacggcccttcccgcttcgattcaagcttcccgaccaccaccgggttctccttccttaggacgagatggccaggcaatagctccttcgctgccccctcaagccttttcttaagcgcctcaaggattttaccatttgtgcgttcggccaccccatttaactgtgggtgcgcgaccgaagcgaacctgatttccaggtttagcccctcgcacatctctctgaacttgtcagaatcgaattgcttgtcgttgtcagtgatgatctcctttggcactccgaaacggcaaataatgtttttccatacgaacttttgtactgctaccgaagtgatcgcgccgagtggttcggcctcgatccattgggagaagtattcgatggctacaatcgcgaacttgtacccgtttcgtgccatagggaatgggccaatgatgtctagcccccatctggagaaaggccagattggtgcgataggctgcagctcatattggggtgcagtttggcttcggctatgccgctgacagcttttgcacttcttagcttgctcaacacaaactttcagcacgatgggccgatacacaccctgtcgaaacactttggaggcaactgtccttgcggcctggtgtgcgccgcagagccccagcttgtattttgcggctctgagctgtaggcgcttcgcttctgcttcatcctccgggagccagccgttcttgaggtactttacgaacgaggttcgccagtcttctgggtcttcacccagctctgtctggtcgattgccatgatgtccaggctctctatgggcacacttggtgcgtacaggacctcaaaaaagatgcctggcgaatgcgggcctccacaagcagcagatttcactagggcgtctgcttcctcgttctggcctctaggtaagtgttcgaccgttatgccggcgaaacacttttccatagatcgaacagcctccagatacctctttatcccttcttcttttgcctcaaaggatttgtcaacatgacttgccaccaatttggagtcagttcggatgagcaagcgccgaacccccaaagctttcgtcttttttaggcccaacaatatagcttcatattctgccgtgttgttggttgtgtcgaactgcagccttgcagcataccggatcggcatgccccctggcgaagtgagcactgccgcagcacccgcccctttgtgcgaccacgagctgtcggagtacatcacccaaggttgttcgacaggctcgggttcaagggcgaatgccagtgtccattcggccacgaagttagctaggacttgagacttgatggcagtgcgagcgacgaaatgcaggtcgaaggaagataactccgccgcccacttgttgagcctgccagtaatttcctggccccggagcacttcgcccaaaggatactgcgatggcaccgtgactttgtgggcctgaaagtagtgtttaagcttgcgcgaagccatcactagggcgtaagcaagcttttccatttcaatacactggtttctggcctgactctgtttcttggacgagggctgcaccgccgcgcgtaagttgtcgaaggtttcctgcaggtcagacgcatggtcgaaatccttgcggctttttatgacgatatcgtcgacataagccggattcgccagccactcggggtggtcgatctcctggatcaccccagccttgagcagcttttgcacttcggctttcgctgcttcttggcgatcaacggacatcttgcgcagcttctgtttccttggcttggcatccggcttgaccgccagatgatgcatgatgatgtctgtcgaaacacctcccacctcgtcggggcccaccaattgtgcttggcctaggacttgaactgcctctccgccaaaaccatgaagcgaggccggtgcttgggtgagggctagggtaggcaaccccatctcggcatatgcttcggcaaagatgacgtcggccgaattttctccgtcgactatgattcgccgaacttcgaagccagctacctcggccgagatcaccagggggtcttgatgtgggaacaacactccttcggcatcttctggcccaaaagagatctgctggttcaaatatcgcggggccccttcacttgccaaagtgatgttgtgcaccattggcagctgcatcttcttttgcccttttgacagttgattcggcgggtcagtccttgtaatcacttggattactctgcactgcacaccttggtgctgttcggccgggggtgcttgttcttgaatagcttcgcgagatgcttcggcagctgctccatgctgcggccttggatcttgcgcgttgccacgatgccgaatgtttcggcattgctcggtggtgtgcacagagcgtccatggaaggcgcagtaaagatcttttctgaccttcttgcgaacgggctgttgatggctgcttgccttcgtcttggtattttcatcaccatgagaggcttcaatcgtggactcgtatatggacaggaactcttttgggtctgtttcgcccgaatagcgtgggacgggtgggaacttgaactgggatgggattggacggatcttgattctcccgctcaatggtagcctcttttcaccacccgccttgttcgcggcaccttgctgcggcaggctggctcgacggcaaccaactgggtgcactttggccggccaggtggtggcgggtgtacttggatagtgaccggctgagcctgcggctgcacataaggggtcgggtgtattgttgcggccgaaggctgcccggcgaagtacactggcgcttgcatggcttgtggcggaaggggctggattgatgcttgtgggtggacttggggtggaatgtagcccgccgaatactagaggattgggaccgaagcgaccttggcttgccgcgctgcctcgtatgcctactgctgttcttgcatttgtcaaagcatgtcttggagttgcgtcatgttttgtcgcatggcctccatgtcggcttcgccttgtgcttcgaggttggggttgacttgtgcagcggcgagcgcggtcgaagccgttgccggctgtgatgaagcggcttggggcaccagcagctggcttgtcgaaaggatctccgccctggtctggagcgcccttgccgccgcggctgccttcgccgtgtcgaccgtgtttggcctcttcttcgccatatagtcttcgcccaaaatgtcttccaccttgtgggataccagcgtgattcttcgcccttcgccatctttgcttcatagtcttcgccat

SEQ ID NO: 73088 - DNA, 188 bp, Oryza sativa
  Clone ID: PAT_MRT4530_73402C.1
aaaaaatcattcttttgttcacataagttagattctttttttttcttttcgagaaaagaagatagatggttacacttgctgagcaactgaaatcctcagtccccttgaacgaagcagcattatttcccaagtcaagcaaattgaaaatgtcaaccattgcgctggtcttggaatagtctccgatcagt

SEQ ID NO: 73089 - DNA, 3870 bp, Oryza sativa
  Clone ID: PAT_MRT4530_73403C.1
atgaaaccgagccgccgccccttccacctcctccagccgcctgccatcgccactctagccgctgccgcaccgcgccgatgccgccttcgggttcgccgcgttgtgccacgccccggccgccactccacccgtccattccgtcgcccgaggactgcttccaccgtcgacccgagctccaccaccgccgttgtcgcctcaaaccactgctcctcgccgcctcagccatcgccacacaaatccgccgccaccctcggcttcgccgcgctgccccgcacaccggccgccactccaaatccccaaaccatcaccggagccccgtttccgccgccaacccgagccaccaccacctctaccgcctccagcggcctcttctcgccgctccggtcacctatttctctccctaaccgctccaatattttccctaggtcttgccggccctcggccgtggctccgccgtggtcgggcgtcgtcggaacgccgttcccgtcgcctcccgtgccggtcgccgccatattttccgccgccggccgcctccccgtggtcgtctcgccgtcgccgtcctcgggtgccgcgaacaaggctgggggcgaaaagaggctaccactgagtgggggaatcaatattcgtccaatcccaccacagttcaagttcccacccgtcctgcggtactcgggcgaaacggacccaaaggagttcctgtccatctacgagtccgcgattgaagccgctcatggcgacgaaaataccaaggcgaagcaactgcgcgatgtctttgtccttaactttcgaggcacctacgaggagccgaagacgcagcaatatctactcggcattcgccagaggccgggggagtcgataagggagtacatgcgtcgcttctcgggcgaagaggattccaagcggcggcaagcgatccaagccgagtatgataaggcctcagtcgccgctgctcaagcccaagtacaagcacaggtcgccgaaccagctcctctcgccgttcaccaatctcagccggcgatccaaggacaaccgccaaggccaagtcaagctcccatgacttggaggaaatttagaactgaccgtgcaggcaaggctgtgatggctgtcgaagaaattcaagcccttcgtaaggagttcgacgcccaacaaacaagcagctatcagcagcccgttcgcaagaaggttagaaaagacctttactgcgccttccacggacgctcttcgcacaccaccgagcaataccgaaacattcggcagcgtggcaatgtacaagatccaaggctgcaacaagcatataacaagatgggcttgccagcgctagccctcacccaagcaccggcctcgcttcgcggttttggcggagaagcagttcaagtacaaggccaagtacagctggtggtagccttcggcacaggtgacaacaggcgcgaagagcaaatattgttcgacgttgtcgacatcccatacaactataatgccatcttcggccgtgcaaccttgaacaagttcgaagacatctcccaccacaactatctcaagctcaagatgcctggccctgcaggagtgatcgtgggcgatttggccgtgatcaacagagcagtgcacaatgttgaggccgaaccgcatgatcgggcgaagcacgcgccgaagcccgcaggtcgacgacgccgatcccgcaaggcttgtatcgctgggggcgacataggtgaaagagaagttgagaacatcatggaggtgcttaagaaaaacattgatatcctcacctggggccccgacgagaaatcgaacggcaaatggcgcatgtgtgtcgatttcacaggcctcaacaaagcgtacccgaacgacgatttccccttgccacggatcgaccaactcgtggattcgacagttggctgcaaactcatgagctttttggatgcgtactccggctaccaccagatccacatgaatccggccgacatccccaagacagccttcatcacactattcggcacctattgccacctcaggatgccctttggcctgaggaacgccggggcaaccttcgccaggctggtgtacaagatcctttacaagcagttggggcgaaatgtggaggcttatgtcgacgatatcgtcgtaaaaagccgcaaggctttcgaccatgcgtccgacttgcaggagaccttcgacaacttacgcactgcggcgtacgcgaagtacaaaaagctcgcaggccaaattgcggcactcagtcaattcctctcaaaagcggtcgaaagaggcttgcctttcttcaagaccctccggggagcggaaaagttcacctggacacccgaatgccaagcagtgttcgacgagctgaagcaatatctgcagagcacacctgctttgatcagcccagcaccaggaagcgaattgctactgtatctagcagcttcgccggtggcggtcagtgcagcactcgtccaagaaacagagtcaggccagaaaccagtgtatttcatctccgaagcattgcaaggggcgaagataagatacattgaaatggagaagcttgcttacgccctagtgatggcttcgcgcaagcttaaacactactttcaggcccacaaagtcacgcttagcaagtgggtggcggaattatctcccttcgacttgcattttgtcgcccgcactgccatcaagtcccaagtactagctgatttcgtagccgaatggacatcggcattcgcccttgaacctgagcctgtcgaacaaccttgggtgatgtactccgacggctcgtggtcgcacaagggggcgggcgctgcggcagtgctcacttcgccagggggcgtaccgattcgatacgccgcaaggctgcagttcaacacaaccaacaacgcggcagagtacgaagctatactgcggggcctaaaaaaggcgaaagcattgggggttcggcgcttactcatccggactgactccaaatttgtggcaagtcatgttgacaaatcctttgaggcaaaagaagaaggaatgaagaggtatctggaggctgtctggtctatggaaaagtgcttcaccggcataacggtcgaacacttacctagaggccagaacgaggaagcagatgccctcgcgaaatctgctgcttgtggaggcccgcattcgccaggcatcttttttgagccctcagaagatgaagcagaagcgaagcgccttcagctcagagccgcaaagtacaagcttgtctcgggccagctatatcactccggggtgctccaacctttgcttcgctacatctcctttgccgaaggtgaggaaatggcgaaggaaatacaccaggggctctgcggcgcacaccaggccacaagaacaattgcctcaaaagtgtttcgacagggtgtatactggcccaccatgctgaaagtctatgtcgagcaagtcaagaggtgcgaaagctatcagtgccatggccaaagccaaaccgcgccccaatacgagctgcagcctatcgcaccaatctggcctttcgccagatgggggctagacatcatcggcccgttccctgtggcgcaaaacgggtacaagttcgcaattgtagccattgaatacttctccctatggatcgaggccgaaccactcggggcgatcactttggcagcagtacagaagttcgtatggaagaacattgtttgctgtttcggaataccaaaagaattcatcaccgacaatggcaagcaattcgactctaacaaattcagagaaatgtgcgaagggctaaatctggaaatcaagttcgcttcgatcgcgcacccgcagtcaaatggggcggcagatcgcacgaatggcaagattctcgaggcgctcaaaaaaaggcttgagggggcggcgaagggtaaatga

SEQ ID NO: 73090 - DNA, 402 bp, Oryza sativa
  Clone ID: PAT_MRT4530_73404C.1
atgggtaacgccgccttgtccgcactccatggcgacgccgagctcggcctcggcaacggggacgcgaacgcggctgccgaaatggtggaggcgggacaagacgtcgcggagcttcggcgcgcgctgttcgccggcggcgtcgggaaagccgcggcggcgctgtacctggcgctgttcaggccgccggccggcctgttcctccggagcaatcccctgttctactcctactacgtcgtgctcgtcgccgtcgtcctcttcggggtggccgaggcatgggtgggcctctgggcttctcgcgacggccgccggcgagcggctggggtgacaatgctctggctgtcagttatcccagctctcttcctcgtgggcacaggaggatctgcgatactggaactgaagtga

SEQ ID NO: 73091 - DNA, 398 bp, Oryza sativa
  unsure (1)..(398): unsure at all n locations
  Clone ID: PAT_MRT4530_73405C.1
tgtaattgtgatgctcagagggagatctgtactctgtctgtgcacgctgtctacccctcttgccgcgaatatggcctgaagatggaagagggaatactgcctgtctgatgcccagtgatatgcccaccctgagagtgtggagtggatgaaatgtaaatgaatggaggacgcccgcaggataatgtgtgcccaatgtgtctgtcgtggcgtnttgagtgccgtgagagtaatgttcgtggcttgtgaagtgttgtgggttgtggtttatgtcgcctttgctatgggtcgtgattgcagtggttaaagttgatgcatgtnttggcttgcatcaatggggtggaataaagagaggccaagtctgaatgtgttctgctaaccaaaaaaaaaaaaaaaaaaaa

SEQ ID NO: 73092 - DNA, 2271 bp, Oryza sativa
  Clone ID: PAT_MRT4530_73406C.1
ctacacatagaaacgcttaagggaggaagcgttccaggaatggtcgaactcttcgccttccagtgtcgctaggcgaaaggagcctgttctggacttgtgcttgatgaggtacggcccttcccacttcgattcaagcttgccgaccaccactgggttcgccttcttccttaggacgagatggccaggcaacagctccgtcggtcgatcttttttgttgtaagttgccgaagtgcctgtggcgtacttgcgcatgtgttctagtgcttcgactctcaccccctccaagagttcgagcgacacctcgcgcccctcttcgcccccagagaacatcacccttggtgaattattagcccctagctctgttggggtcattgcttcgtcgccatagagaagcatgaacgggctgaacttggttggccttgtgggggtcattagaagagcccagagaacagatagcatttcgtctggccatttacccttcgccgccccctcaagcctttttttgagcgcctcaagaatcttgccattcgtgcgttttgctgccctattcgactgcgggtgcgcgactgaagcgaacctgatttccagatttagcccttcgcacatttctctgaatctgttagagtcgaattgcttgccgttgtcagtgatgaattcttttggtactccgaaacgacaaataatgttgttccatacgaacctctgtactgccgttgaagtgatcgacccaagtggtttggcctcgatccatcgggagaagtattcaatggccacaattgcgaacttgtacccgtttcgcgccacagggaatgggccgatgatgtccagcccccatcttcggcaaaggagatgcagcgaagcaagggttggagcaccccgatatagctgtcccgagacccgcttgtattttgcggccctgagctgtaggcgcttttcttctgctttgtcctccaggagccagcctttcttgaggtactttacgaacggggttcgccagtcctctgggtcttcgcccagctctgtctggtcgattgccatgatgtccaggctctctatgggcacacttggtgtgtataggacctcaaagaagatgccaggcgaatgtggcccacaagcagcagatttcgccagggcgtctgcttcctcgttctggcctctaggtaagtgtttgaccgttatgctggcgaagcatttttccatagatcgaacagcctccagatacctcttcattccttcttcttttgcctccaaggatttgtcaacatgacttgccaccaatttggagtcagttcggatgagcaagcgtcgaacccccaatgctttcgcccagagttgttcgacaggctcgggctcgagggcgaatgccggtgtccattcggccacgaagtcagctaggacttgggacttgatggtagtgcgggcgacaaaatgtaagtcgaagggagatagctccgccgcccacttgctgagccggctagtaacttccttgccccggagtatttcgcccaaagggtactgtgatggcaccgtgactttgtgggcctgaaagtaatgtttaagcttgcgcgaagccatcaccagggcgtaagcaagcttctccatttcaatgtatcttatctttgctccatgcaaggcttcggagacgaaataaactggtttcttgcctgactctgtctcttggacgagggctgcattcagttcgtcgaacactgcttggcattcaggtgtccaggtaaactttcccgcgccccggagggtcttgaagaagggcaagcctcttttggctgcctttgagaggaatcgattgagtgccgcaattctgcttgcgagctttcgtacttcgcgtacgctcgacgggggcttcatttgctgaaaggcatcgattttcttggggttcgcctcgatacccctttcggaaacaaggaaacccaacaatttgcccacgtgaacaccaaaaacacacttcttaggatttagtttcatacccgccgcgcgtaagttgtcgaaggtctcctgcaagtcggacgcatggtcgaaagccttgtggctttttacggtgatatcgtcgacataagcctccacatttcgccccaactgtttgtaaaggaccttgtacaccagcctggcgaaggttgccccggtgttcctcaggccgaatggcatcctgaggtggcaaaaggtgccgaatggtgtgatgaaggctgtcttgaggatgttggccggattcatgtggatctgatggtagccggagtaggcatccaaaaagctcat

SEQ ID NO: 73093 - DNA, 4551 bp, Oryza sativa
  Clone ID: PAT_MRT4530_73407C.1
gccaagtacaccctttacaacctggccaaatgtcacaagtaatggcagaaggggctttggctttgcaggcacagcttcaagctttccttcagcagtcatgccaaccccacaacatttcaggtacagccccttcggcccagctagaggagaacacgagtcaagtttgacttcgtcaacgctgctcaagcaccaaccattcggccacaggcaccaacaccaggcttcggagcaaaccaagcaccaagccaggtcgccatggcatggacctagccgacctttgacccatccatggcagcccaccaagcatcaccaatcggagccgggcagccgaacaccatggcccaacctcacgcgcaaccactgagtgggggaatcaagatccgtccaatcccagcctacaaggtgaaggcacctacgaggagccgaagacgcagcatcatctactcggcattcgccagaggccgggggaattgataagggagtacatgcgtcgcttctcgcaagcccgatgtcaagtgcaggacataactgaggcgtccgtcatcaatgccgcttcggccgggttgctcgagggcaaactcacaagaaaaatcgccaacaaagagccgcagacgcttgagcacctgcttcgcattattgacgggtacgcaaggggcgaagaggattccaagcgacggcaagcaatccaggctgagtatgataaagcctccattgccgctgctcaagcccaagtacaagctcaggtcgccgaaccacctcccctcgctattcgccagcctcagccggcgaaccaaggacaaccgccaaggcaaggccaagctcccatgactcggaggaaattcagaaccgaccgtgcgggcaaggctgtgatggctgtcgaagaagttcaagccctctgcaaggagttcgacgcccagcaagtaagcaacaatcagcagcccgttcgcaagaaggtcagaaaagacctttactgcgctttccacggacgctcttcgcacaccaccgagcaatgccgaaacattcggcagcgtggcaacgtgcaagatccaaggccgcaaccgggagcagctgttgaagcacctcgcgaagccgttcaagaacaagcacccccggccgaacagcgccaagatgtgcaaggcatagtaatccaagtgattacaagggctgacccgccgaatcaattgtcaaaacagcaaaagaagatgcaactatgaatggtgcacaacatcacttcagcgggcgaaggggccccgcaatatttgaaccagcagatctctttcgacccaaaagatgccgaaggagtgatgttcccacatcaagaccacctggtgatctcggccgagatagctggtttcgaagtccggcgaatcttagtcgacggaggaagttcggccgatgtcatcttcgccgaagcatacgccaagatggggttgcctaccctagcccttacccgagcaccggcctcgcttcgtggtttcggcggagaagcagttcaagtcctaggccaagcgcaattgctggtagccttcggcacaggcaaaaatagacgcgaagagcaaatactgttcgacattgtgcgaccatgaacaagttcgaagccatctcccatcacaattatgtcaagctcaagatgcctggccccgcaagagtgatcgtgatcaaggggcttcaaccttcggctacaccaaaggacgatttggccgtgatcaacagagcagtgcacaatgtagaggctgaaccgcatgaccgggcgaagcacgcaccgaagcccggccctcacggcagggtaatcaagatgcagattgacgatgccgatcctacaaggcttgtatcgctgggggcgacatgggcgaaagagaagttgagaacatcctagaggtgctcaagaaaaacatcgacatcttcgactggggccccgatgaggtgggaggtgtttcgacagacctcatcatgcatctcttggcggtcaagccggatgccaagccaagaaaatagaagctatgcaagatgtccactgatcgccaagaagcagcgaaagctgaagtccaaaagctgctcaaggctggggtgatccaggagatcgaccaccccgagtagctggcgaatccggtactgatgcggaaatcgaatggcaaatggcgcatgtgtgtcgatttcacagacctcaacaaggcatgcccgaagaacgatttcccttgccacggattgaccaactcgtggattcgacagctggctgtgaactcatgagctttttggatgcgtactccgcctaccaccagatccacatgaatccggccgacatcgccaagacagccttcatcacatcattcggtaccttttgccacctcaggatgccattcggcctgaggaatgctagggcaaccttcgccaggttagtgtacaaggtcctttacaagcagttggggtgaaatgtggaagcttatgtcgacgacacagtcgtaaaaatctgcaaggctatcgaccatgcgtccgacttgcaggagaccttcgacaacttacgcgcgcgggtataaaactaaatccggaaaagtgtggttttggtgttcacgcgggcaagttgctgggttttcttatttcctaaaggggtatcgaggcgaaccccaagaaaatcgatgccattcagcaaatgaagcccccatcgagcgtactcgaagtacaaaaggtcgcaggccgaattgcggcactcagtcgattcctctcaaaggcagccgaaagaggcttgcccttcttcatgaccctccggggcgtgggaaagtttacctggacacccgaatgccaagcagcgttcgacgaattgaagcactatctgcaaagctcaccaggtttgatcagcccagcacctggaagcgaattgctactttacctagcagcttcgccggtggcggtcagtgcagccctcgtctaagagatagagtcaggctagaaactagtctttttcatctccgaagcattgcaaggagcgaagataagatacattgaaatggagaagcttgcttacgctctggtgatggcttcgtgcaagcttaaacattactttcaggcccacaaagtcatggtgccatcatagtaccctttgggcgaaatactccgaggcaaggaagtcactggccggctcagcaagtgggcagcggagctatctcccttcgacttgcattttgtcgcccgcactaccatcaagtccaaagtcctagctgacttcgtggccgaatggacaccgttcgacacaaccaacaacgcagcagaataagaagctattctgctgggcctaaaaaaggcgaaagcgttgggtgttcgacgcttgctcatcctaactgactccaaactggtggcaagtcatgttgacaaatcttttgaggcaaaagaagaaggaatgaagaggtatctggaggctgttcgatctaaggaaaaatgctttgccggcataacggtcgaacacttacctagaggccagaacgagtaagctgacgccctggcgaaatctgctgcttgtgggggcccacattcacctggcatcttctttgaggtcctatacgcaccaagtgtgcccatagaaagcctagacatcatggcaatcggccagacagagctgggcgaagacctagaggactagcgaaccccattcgtaaagtacctcaagaacggctggctcccggaggacgaagcagaagcaaaacgcctacagcttagagccgcaaaatacaagctggtctcgggacagctatatcactccagggtgctccaacccttgctttgctgcatctcctttgcctaaggtgaggaaatggcgaaagaaatacaccaggggctctgtggtgtgcaccaggccgcaagaacagtcgcctccaaagtgtttcgacaaggtgtatactggcccaccatgctaaacgtctgtgtcgagcaagtcaggaagtgcgaaagctgtcagcgccatggccaaagccaaaccgcgccccaatacgagctacagcctatcgcaccaatctggtcgttcgccagatgggggttggagatcatcggcccgttccctgtggcgcgaaacgtgtacaaattcgcaattatggccattgaatacttctcgcgatggatcgaggccgaaccacttggggcgatcagttcagcggcagtacagaagttcgtatggaagaacatagtttgtcgtttcgaagttccaaaagaattaatcactgacaacgacaagcaattcgactctgaatgatccagagaaatgtgcgaagggttaaaccttgaaatcaggttcgcttcggtcgcgcacccacagtcgaatgggtcggcagaatgcaggaacggcaagattctagaggcactcaaaaaaaggctcgagggggcggcaaaatcgcttcgaccgctggagcttttccctctcgttgacggacaggcgaaggaaccgcctcaacccattcgcccttggaaacattcgccttagcggctggtgccgaggcactcccaccctcgtcacatgggaggcgaagcccagcggcgaagtaggcaggaaagacaaccgttcgccca

SEQ ID NO: 73094 - DNA, 727 bp, Oryza sativa
  Clone ID: PAT_MRT4530_73408C.1
tgcacaatgttgaggccgaaccgcatgatcgggcgaagcacgcgccgaagcccgcaggtcgacgacgccgatcccgcaaggcttgtatcgctgggggcgacataggtgaaagagaagttgagaacatcatggaggtgcttaagaaaaacattgatatcctcacctggggccccgacgaggagatcaacaaccccgagtggctggcgaattcggtactggtgcagaaatcgaacggcaaatggcgcatttgctgcaaactcatgagctttttggatgcgtactccggctaccaccagatccacatgaatccggccgacatccccaagacagccttcaacacactattcggcacctattgccacctcaggatgccctttggcctgaggaacgccggggttaccttcgccaggctggtgtacaagatcctttacaagcagttggggcgaaatgtggaggcttatgtcgacgatatcgtcgtaaaaagccgcaaggctttcgaccatgcgtccgacttgcaggagaccttcgacaacttacgcactgcggccgaatggacatcggcattcgcccttgaacctgagcctgtcgaacaaccttgggtgatgtactccgacggctcgtggtcgcacaagggggcgggcgctgcggcagtgctcacttcgccagggggcgtaccgattcgatacgccgcaaggctgcagttcaacacaaccaacaacgcggcaga

SEQ ID NO: 73095 - DNA, 447 bp, Oryza sativa
  Clone ID: PAT_MRT4530_73409C.1
gtgaatggtattttaagataccttaagaaaaatagacccttaaattattattaaataacattatccaatctttagtttgcccttaatctattagacaaattttttgaacaaacaataattttacctttcaataatataagtgcccgtgcatgcgcgcggaccaacttcctagttggttataaacttgggctgttttgcagaaatcggagacagatcaaagaaggctgctcttgggtgccaagctcataagacaagtggcaagtgacatcttcaactccaagtttaggtggcgagctgatgccagaagaataggatagtgaagaaatgatggcgctgaagtttgctgctgctatcttgactgtgtgcgctggcgtttctgctttaggcttttgtgcttgaaagtggtgctcttcttcggcttttgtctatcctagttagacatttgca

SEQ ID NO: 73096 - DNA, 426 bp, Oryza sativa
  Clone ID: PAT_MRT4530_7340C.1
atgggcccgggggtaccatgtctagagggagggggctgccgccgctccaccccggactcgacccccctcgggggtagccacgtgagtttgggggcggcccaaccccaagctggaagggggctgccgtcgcaacaccccgggctcgacccccctcgggggaagccacgtgggtttgggagcggcctcctccatctagctgggagggagctgccgccgctccaccacgggctcgaccccccctcggggggagccacgtgggtttgggggcggcccaaccccaagctgggagggggctgccgccgctccacctcggactcgacccccctcggggggagccacccggcggggccaaagccagctgctacgggagagccagcacagggggcctcgggcgtcgacggcgtccagagctcgacgcaaggctag

SEQ ID NO: 73097 - DNA, 3162 bp, Oryza sativa
  Clone ID: PAT_MRT4530_73410C.1
atggcatggacccagccgtcgttcgacccatccatggcggcacaccaagcatcgccgttcggagccgagcagccgaacactgtggctcaacctcacgcgcaagccatgactttgcccttcgcaacgccatattcgcagcaaggtgctgcgaacaaagcgaggggcgaaaaggggctaccactgagcgggggaatcaagatccatccaatcctacccaagttcaagttccctcccgttccgtgctattcgggcaaaacggacccaaaagagttcctgtccatctacgagtccgcgatcgaagccactcatggcgacgaaaataccaaggcgaagaggccgggggagtcgataagggagtacatgcgtcacttctcgcaagcccgatgccaagttcaggacataactgaggcgtccgtcatcaacgccgcttcggccgggctgctcgagggcgaactcacaagaaaaatcgccaacaaggagccacagacacttgagcacttgcttcgcatcattgacgggtacgcaaggggcgaaaaggattccaagcaacggcaagcaatccaggccgaatatgataaagcctctgtcaccgctgctcaagcccaaatacaagcccaggtcgccgaaccagcccctctcgctgttagccagcctcagccggtgcaccaaggacaaccgccaaggcaaggccaagctcccatgacttggaggaaattcaaaaccgaccgtgcgggcaaggctatgatagctgtcgaagaagttcaagccctccacaaggagttcgacgcccagcaagcaagcagccatgagcaacctgttcgcaagaaggtcagaaaagacttttactgcgccttccacgaacgctcttcgcacaccaccgagcaatgccgaaacattcggcagcgtggcaacgcgcaagatccaagaccgcaacaaggagcagctgctgaagcaccccgcgaagccgttcaagaacaagcacccccggccgaacaacgccaagatgtgcagcgcggagtaatgcaagtgattataagggccgacccgccgaatcaactgtcaaaaaggcaaaagaagatgcagctgcgaatggtgcacaacatcacttcggcgggcgaaggggcctcgcaatatttgaaccaacagatctttttcgggccagaagatgccgaaggagtgatgttcccacatcaagactccctggtgatctcggccgaggtagctggcttcgaagtccggcaaatcttagtcgacggagggagttcggccgatgtcatcttcgccgaagcatacgccaagatagggttgcctaccctagcccttacccaaacactggcctcgcttcatggttttggcgaagaagcagttcaagtcctaggccaagcacagttggtggtagccttcggcacaggtgaaaacatacgcgaagagcaaatactgttcgacgttgtcgacattccatacaactacaatgcaatcttcagccgcgcaaccttgaacaagttcgaagccacctcccaaaacaattatctcaaactcaagatgtctggacctgcaggggtgatcgtggtcaaggggcttcaacttttggctacatcaaagggcgatttggccgcaatcaacagagcggtgcacaatgttgaggccgaaccgcatgaccgggcgaagcacacgccgaagcccgccccccacggcagggtgatcaaggtgctcaagaaaaacattgatatcttcgtctggggccccgacgaggtgggagacctcaacaaggcatgctcaaaggatgatttccccttgccgcggatcgaccagctcatggattcgacagctggttgcgaactcatgagttttttggatgcgtactccggctaccaccaaatccacatgaatccagccgacatccccaagacggccttcatcacaccattcggcaccttttgccacctcaggatgcctttcggcctaaggaatgccggggcaaccttcgccaggctggtgtacaaggtcctttacaagcagctggggcgaaatgtggaggcttatgtcgacgatatcgtcgtaaaaagccgcaaggctttcgaccgtgcgtccgacttacaggagaccttcgacaacttatacgcggcgggtatgaaattaaatcctgagaagtgtgtttttggtgttcgcgcgggcaagttgttgggttttcttgtttctgaaagaggtatcgaggcgaaccccgagaaaattgatgccattcagcaaatgaagcccccgtcaagcgtacgtgaagtacaaaagctcgcatgccgaattgcggcactcagtcgattcctctcaaagggagccgaaagaggcttgcccttcttcaagaccctccggggcacgggaaagtttacttggacacccgaatgccaagcagcgttcgacgagctgaagcaatatctgcagagcccacctgctttggtccacaaagtcacggtgccatcgcagtatcctttgggcgaagtgccccggggcaaggaaattactggccggctcagcaagtgggcggcggagttatctccctttgacttgcattttgtcgcccgtactgccatcaagtcccaagtcctagctgatttcgtggccaaatggacaccagcattcgcccttgaacccaagcctgtcgaacaaccttgggtgatgtactccgacggctcgtggtcgcacaagggggtgggcgctgtggcagtcctcactttgccagggggcgtgccgattcggtacgccacaaggttacagttcgacacaaccaacaacgcggcagaatacgaagctatactgttgggcctaaaaaaggcgaaagctttgggggttcggcgcttactcatccgaactaacttcaaattggtggcaagtcatgttgacaaatcctttgaggcaaaagaagaagggatgaggagatatttggaggctgttcgatctatggaaaagtgcttcgtcggcataacggtcgaacacttacctagaggccagaacgaggaagcagacgccctggcaaaatctgctgcttgtggaggcccgcattcgccaggcatcttttttgaggtcctgtacgcaccaagtgtgcccatagagagcccaaacatcatggcaatcgaccaggcagagctgggtgaagacccagaggattggtga

SEQ ID NO: 73098 - DNA, 1236 bp, Oryza sativa
  Clone ID: PAT_MRT4530_73411C.1
gcgcgtggacagcaactaagcgacggttgggacagaagcaagaccataatagaagttctggttttcagcagctatggggatatgaacatatcacaattcacttagatgtcgctttccatggtgactcaatgtttaactctgtcctgttagtttagtgggggaggttatggggctgtgaatgcgggaaatgaaagtaattgacaggttgttgacgttaagtagaaatgttacgggaatagaaagtgagcgaaggaaattctaaactagtactttttaatttcaatcgtatctcgttaaaatctttttagcctttatgggtaatgtctggaaggaagcccaagactcattgtttacaactatggtgatattaatagcacaaaataaacctacatggagttttgcaacgttaatgtctatttcaactcgtcaaattgaattggtgattgagttggcatagctctttaacaaagaaagctcaagaaagttgtgaatccccacattatgcaccaagatatcaaagcaagcaatatacttctagataaagatcttacgccgaaaatatctgattttggtttagcaaagcttttgcctccagatgcatcacatgttagcacaagggttgctggaacattctttacttactcagttttacatgacagaggttacttggctccagagtatgccattcgaggacaagtgacacggaagtcagatgtttatagttttggtgttctgttactagaaatagttagtgggagatccaacaccaatacaagattaccctatgaagatcagatacttcttgaaaggttcccagagatcacaaatggggttctcctcttgcagacatgggtgcactatgaagagggtgatttggagaaaatcatagacgcttctttgggtgatgacttggatgttgcacaagcctgtgaaatggatgttgagctggcgaagatcagcaagcccgcaataatcagtgactttatggatcttaaggtcaggagcatgaggaaagaagtggacatagtttcatcctcaacatccacattgctatcttccatcatggcacactcttctcctttgttgtcgcaagagacaacagaagcctccatgacattcaccgcgatatcagatcctagtgaagtggtccatgaatgcatgcaaatgcaagcatgcaacaatggctggtccatcagagaccaacacatgagtgagctggaggtcatcaccaactaa

SEQ ID NO: 73099 - DNA, 386 bp, Oryza sativa
  Clone ID: PAT_MRT4530_73412C.1
ggaattcaacgaattcaattcaattataaaaaaaaaagggaagaggatgggaaaatatttgggatttggaaaaaaattcaaatgaaaaattgggggaaaaatcggaagaatgtcctgatgtaaaaaaaaaaaaaattgaataaccgaaaaaaaaaaaagatttggaaaaaaatttagaaaaaccaaacaaagggggaaaaatgaaatttggttttccctttaaagtgggaaaaatcgccgtcaaaaaaattggtaaaactttcgggaaagaaagaaaggtttttgaaaccgtggtggaaaaaaaatttaaacggaataaaagaacggaaggtttttccgaagggaaaaaaaaaattggggttcttgtttttgccggggggggggga

SEQ ID NO: 73100 - DNA, 2151 bp, Oryza sativa
  Clone ID: PAT_MRT4530_73413C.1
atggggttgcctaccctagcccttacccaagcaccggcctcgcttcgtggttttggcggagaagcagttcaagtcctaggccaagcacaattggtggtagccttcggcacaggtgaaaacagacgcgaagagcaaatactgttcgacgacgtcgacatcccatacaactataatgccatcttcggccgcgcaaccttgaacaagttcgaagccatctcccaccacaattatcttaagctcaagatgcctggccctgcaggagtgatcgtggtcaaggggcttcaaccttcggctacatcaaagggcgatttggccgctatcaacagagcggtgcacgatgttgaggccgaaccgcatgaccgagcgaagcacgcgccgaagcctgccccccacggcagggtgatcaaggagcaggtcaacgatgccgattccacaagatttgtatcgctggggggcgacatgggcgaaagagaagttgagaacatcctggaggtgctcaagaaaaacattgacatcttcacctggggccccgacgaagtgggaggtgtttcgacagacctcatcatgcatcatctggcggtcaagccggatgccaggctaaggaaacagaagctgcgcaagatgtccgctgatcgccaagaagcagcgaaagccgaagtgcaaaagcagctcaaggctggggtgatccaggagatcgaccaccccgagtggctagcgaatccggtactggtgaggaaatcgaacggcaaatggcgcatgtgtgtcgatttcacagacctcaacaaggcgtacccgaaggacgatttccccttgccgtggatcgaccagctcgtggattcgacagctggctgcgaactcatgagttttttggatgcgatgcctttcggcctaaggaacaccggggcaaccttcgccaggcaggtgtacaaggtcctttataagcagctggggcgaaatgtggaggcttatgtcgacaatatcgtcataaaaagccgcatggctttcgaccatgcgtccgacttacaggagaccttcgacaacttacgtgtagtggcgttcgacgagctaaagcgatatctgcagagcccacccgctttggtcagcccagcaccaggaagcgaactgctactctacctagcagcttcgccagtgtcgatcagtgcagccctcgtccaagaaacagagtcaggccagaaaccagagtatttcgtctccgaagctttgcaaggggagaagatacgatacatcgaaatggaaaagcttgcctacgccctagtgatggcttcgtgcaagctcaaacactactttcaggcccacaaagtcacggtgctttcccagtatcctttgggcgaagtgctccggggcaaagaaattactggctggctcagcaagggcaggcgcacggcagtgctcactttgccagggggcgtgccgatccgctatgccgcaaggctacagttcgacacaaccaacaactcatcggagtacgaagctatactgttgggcctaaaaaaggcgaaagcattgggggttcggtgcttgctcatccgaaccgactctaaactagtggcaagtcatgttgacaaatcctttgaagcaaaagaggaaggaatgaagagatatctggaggctgttcaatctatggaaaagtgcttcgccggcataacggtcgaacacttacctagagaccaaaatgaggaagcatatgccttgacgaaatctgctggttgtggaggcccgcattcgccaagcatcttttttgaggtcctgtacgcatcaagtgtgcccatagagagcccgaatatcatggcaatcgaccaggccgagctggatgaagacccagaggactggcgaaccctgttcctaaagtacctctcgaacggctggctcccggaggatgaagcagaagcgaagcgcctacagctcagagctgcaaaattgttggtatttcttaacgactttactagaaatataattccaagcaatggcgcagaaacacttctggaggcgaggtacataaaagttgatacaaatcaaagtttaacaagtagaagcataaatagtacttattacacgggcaacccaaaggcccagctcatagagaaatatgaagaaacacggaagactagggcgaacacgacaggtgtttga

SEQ ID NO: 73101 - DNA, 431 bp, Oryza sativa
  unsure (1)..(431): unsure at all n locations
  Clone ID: PAT_MRT4530_73414C.1
gnggggggccgaaatttttttgccaagctaaaatagacgggcccctttttaggccttggaaaacataaacattttttgttgcttgctttttttccccccttgccggataaatacccttgttaaaagcttcggttttttttttttggggtttgcgtccaccttgttttttggaacgggacaacaacccttttgggccgattttgcgaagccaaccctaatttttgccctaattgaacacggtttggtgggcccccatgaaaaccttcccccggatccaaagggggccccggggggggggggtgtccatgggtgtgaatccactggtgcactggggagaagtttctttaccaacctttaaaattttcttttttgggtttagggcaaactttttgcctccaagggggaatgaaatttcaggcatggtttcaagg

SEQ ID NO: 73102 - DNA, 816 bp, Oryza sativa
  unsure (1)..(816): unsure at all n locations
  Clone ID: PAT_MRT4530_73415C.1
ttggggggttgncaggggactttcctggcaccgaaagcttaaccccccgcccgccccgcccggcccgaaanggaaaagggggcntagaaaagaaaaacccnggccggaaaaaattaaaaaaaacccatcccttgggcgttcccgaagaacgaattngaaanattccccccggaagggggggttgaacngggtgccaangttcccccccccccaaaaggtttgttttaaccggtgggaaagggccccccccccgggggaaanctttaaccccgccaaacttttnnaanccaccctccaaaccctccnaactttcccaancttncttgggaanggggcgggnccgccaaanccttgccaanggttggaacacccctttgttttcgnggaaccccgccccncacccaatgggggccgcccattcccgcacccgcccattcttccccnccgttcccngaaaacctntttttttnttggcgttccccccaanggggnttacccgctttccnaanaattnnnnctttcccttctttacncctccactttccccccnttccnaacgccctccccntncncccaaacttcccnaanancccgcccnttncnaaaaatttnnggaaaatttccttttgggggcgaaaaaaanaaaaggtttaanggaaaaggtttntaaaattncctcccaaaggggggttttaaccnttccttttccnggttcccggaanaaaaggttntaaaanggaacnaaaaatttctttcccttncccaaccggggggnnccaaanatttccnaanntttccnttcttctttccccttcc

SEQ ID NO: 73103 - DNA, 252 bp, Oryza sativa
  Clone ID: PAT_MRT4530_73416C.1
atgtctttcgtgattagtttcacacttctcaccataataaaagatgctataactggtaataatttgattcgctcttggtttggaatggtatattcctggttttgagatagaactgtgcagccgggatggttgttcagaatggttgggcctatgcaacaggatatgttgtatagcgttggattaatattttttaattactacttaactattttattaaattctgaaatgtttattaaatgctatttatgcaaa

SEQ ID NO: 73104 - DNA, 1844 bp, Oryza sativa
  Clone ID: PAT_MRT4530_73417C.1
atgtcttccgacccggtgttccccgtgctccgccatggcgattacttcaccaagccgtcgatcgatgagctggtggagagggaggcggctgaccctggctactgcagcagggtcccggatttcgtcgtcgggagggtcgggtatgggcgaattcacttccccggtgacactgatgtgagggggatggacctgaatgggatcgttaagttcggtaggcactctgtggaggtttacaaggatgaggctagcaagccgcctttagggcaaggtcttaataagccagcagaagtgacgttgatgctgaatttgagcgtgcttccagagcctagcgctcttggggagttgcttaagtgtcaaacgagaaagcaaggcgctaggttcgtttcgttcaaccactcgagcggcaggtggaagttcgaggttgatcattttagtcgattccgtcttgtggacgaggaagaagaggatgttgtgatggatgaagtggttgttcggcagcctattgcggaagtaagagacccacctgcaaatggtcatgagctggagctttcacgttcgttgcctgctcatcttgggcttgaccctgcaaagatgcatgaaatgcggatgacgatgttctccaatgaggaaggtgatgaagatatggaggatggattcccatctgatcagagatacttcagcagtgagaagatgaatgtggattcaccgaactcaagtgctaaaggtttgaggctaaggtctctctctcctttgcatggttcttctctgaaagtcagcaggagacctggtgtaattggtaggagagaaccacaggctctgctggaatacagtgtaaattcttcagaacatggcccatcttctcatggtattcttatgtctgggcaaaacaagggatttccagtgagaatgaccaaggtgatggctttaagttgccatctgatcaggaaactcctgtggctgggaacgtcatttcgtgttggttggggaccaaatggcatccttgtacattctggcagtcttgtcaatagacccggaactggtctatcttctgttattcacatagagaaagttgcaggcgacaaagttgtacgtgatgagaagaacaaaattaaggaggagctgactgatctgtgcttctcagacccgctggatctccataggaggcttcatcatgaatatctggagactgagtctgacttgtttaaattgaagcttcagaaggttgtggcaagtcgctttgtgttgccagatatttgcagatcttatattgacatcattgaaaggcagcttgaagtcagtgatttatctatgtcttctcgtgtgctgttaatgcaccaggttacagtttgggagcttattcgggtcttgttctcagaaagagcaactggtaaccagttagagcctactggtgatgaggaccaggaggggatgattttagataagaaagaaggtactgttgccatagaccttgaagcactccctttggttagaagagcagactttagcaattggttacaggacagtgtttgtcatcgggttcaaggagaggcgggctccttaaatgatgccaggtatctggaacatattattctgcttttgactggtcggcaattagacacagccacagaagttgctgcctttaggggtgatgttcgactggcaattttgctaagccaggcaggtgggtcaatgctaaatcgttctgacctttctcagcaactggatctatggaaaacaaatggtctggattttgattatattcaggaagacaggttaaagatatatgagttgctttctggtaatgtacaaggcgcgttggtagattcatcaattgactggaaacg

SEQ ID NO: 73105 - DNA, 321 bp, Oryza sativa
  Clone ID: PAT_MRT4530_73418C.1
atggagccagatctagaacaatacgtccggctcaaatgccaagggttgtccttcctcggcacaaccagcgacggtcgtgccatcgtctttggcaacatcgtgccaccaacatggaccatgggagataccttccaaggcaatggccaattacatattacagtacagccagtacacaattacaaatttgttggtgttgtcgacgataacctcgtggcacttgccggtgatggggtggatggcaagcgcgttgactatgcagccggttcgctggggaatgtcttgggcatccttgagcagctgctcatagtcctctttgaatga

SEQ ID NO: 73106 - DNA, 312 bp, Oryza sativa
  Clone ID: PAT_MRT4530_73419C.1
atggccaactacctcccgcgccaaggacaaagatggctaggatgtacaaggggagaagaagatggccccgatcccactgccgccgcggctcgatccgtcgttgccgcctcgatctgccaccgccaccgctcgatctgcaccggggagagaggcggcgccgctagggaggggagcaccggggagagagggccggggaggggagaggcggcgctgtcagggaagggagagccggagagagaggaggcgtgggaagagattgggaggggagatatggtgatgagaggaggggttgatgtttatatatgtttgtga

SEQ ID NO: 73107 - DNA, 417 bp, Oryza sativa
  Clone ID: PAT_MRT4530_7341C.1
ctgatggtcgttagcgatcagtttcgcccgtcaatactacctaaataaaggagaactagttatgcttgcaatgcataattatgtcaaaataataaatatttcactagcactaggattactaacctcttgcagagaatgaacacaaactggagaagaatcgacataaaaacaaacgatcattcaattagacgatgtcgagaatcagacttatcaatgaatggatcaagaacgcagaaatgacacgaccaattgggccaaaattcacaagtctgaagtgagcaacagaagaggaggccgctagccaaaaatgggtcggattggaccggcccctggttcgggcaaaccaggggttcagctgaacccatcctggcgccgttagatggacggtgtggattagcccccaatgacggttggagg

SEQ ID NO: 73108 - DNA, 2279 bp, Oryza sativa
  Clone ID: PAT_MRT4530_73420C.1
gcacgagggagagagatagggagagggatttcgattttttttttctccacggcgaaatccgccgaggtcgtcatgtcctcgtctccgtctccgcctccgcctcgcgccgccgcacgccgccaccgccgcgagaggagctatcggaagcgccgccccggaggaggaggaagagaggcgagagagcggaggacggagagggatccggcaagatgggagtcctggcgttctaccggtggctggcggaccggtacccgcagacggtgtcggacgcggtggaggaggagcccgtggagctcgagcctggcgccttcgtccccgtcgacctccgccgccccaaccccaacggcctcaagttcgacaacctctacctcgacatgaacggcatcatccacccctgcttccaccccgagggccacgcacgatcctattcccccatcccctctgtcttctcgtcttctaatcaacccattctgtgttcgatctcaccatggatttggactccctctcctgcagccggcaccgaccacttacgacgaggtgcggctctgaaggggaatttcgtcgaacaagatgaatgcgttgccaggaacttcaagcaggcggccaaactgctgggcctggactccaagctggagaagaacttgctcatcccattcagggagatcaaggaatttgatattttaggccaccgactgggtcttcgacaccacagaggaccgcgcctgccaagcttggatgaatctgatgtaacatattctgagtgcttgggtacattatcagtggaacttttactttttaaccgttgtactctagataagatggccaccaatgatcggttcagtgatttgttatggatgcctcattgtcagcataaagttaccaaaatatgggatagtcctactaattgcattaacatacggcttcatcgtgtcggcattccttaccactcattatgtcagacagctttagagaatcttgggttctttcagattgcacggatgaaggaaatcaataatgataaatatttgatatcagcactggtggagcgctggcgacctaaaaccaacacttttcacttaccagtgggtgagatgacaattacgctacaagatgtaagttgcttatggggtttacctatccatggtagaccaattactggccaagctgatggctcatgggttgatatgattgaacggttgcttggaattcctatggaagaacaacacatgaagcagaaaaaaaggaaaaaagaggatgatatgactatggtgagttactcgcggtactccatcagcttaagcaagttgcgtgaccgctttcgtgtaatgccaaagaacgcaacagaacgtgagattaactggtatactcgagcacttgttcttgatattattgggtccatggtttttactgatacatctggagatggtgtacctgcaatgtacctccaatttatgatgaacttaagtgaacaaacagagtacaattggggggctgctgcactttccatgttatatagacagttaagcatagcatctgagaaggagagagctgaaatatctagacctttattgttactgcagttgtggtcttggtcacgtttgccacttggtcgacctgttaaggcaatgaaaatcacgaaagaaagggaagaagaagatgaacaggaggaattggactattgccttgtatttggagcaaagtggtgtctctcacatgaatttcgtgccccacataatgcgggtactatttctattttgattatatcatatgtcccaattatggttttttttcttggtgtacttgtctacttatcctatagtaatgttatgcagtgcttgggaggtcttgaaaacccaatcccatatccccgggacatatttgaatggacaggctacatgcccagtggtccaccactagcacgaattagcttacatgtgataaagaatgctgcttgggggatcaaatgtgcaattactaatagctgtaagaagttaggcaagtcaatactcaagacatgcttgggtaatttgagagatctaaacctagagcctaggttgcaaaatatgctcactgatgctgggttgccaatcaatattgaagatattccgtctgatgatgatctctcagctcatgttcaccacccaagtcctccgaaagactctaattctgatatatttgatgaatgggtgtactcaggaagaggttttgaaagatatctccatgcaggtgggatagctgcaacacaagacctaggccaagtgacacggatagatgagtag

SEQ ID NO: 73109 - DNA, 121 bp, Oryza sativa
  Clone ID: PAT_MRT4530_73421C.1
aaggaactcataagcgggtgcgggggccaaattgatagctagccgactagaggaagtccgtattttttgcagttcggttgcaccaaatggtgctagctcgctagaatctcttcaagacgat

SEQ ID NO: 73110 - DNA, 355 bp, Oryza sativa
  Clone ID: PAT_MRT4530_73422C.1
ttcattacacctgggttagaatacacagaagaacagatacttttgactcttctcatcacacacgcactgtccttgcaattgcggcggagcctggtgtgatccagccgtacccgtaggcgcacatggagctgcatgatgggaggcctggaccagccaagagatcggctgagatataaccgccatatgcaaggaggaacgtgggagctcgctcactaaggagctgccatctgcaccaggatgttggctaaactcgcgctcaacagcagcggctcgctctgggcgtagaacagcgttgttaataccgcttacgctacttcacaggtggtcactgcgaacgctctattgaagacaaaga

SEQ ID NO: 73111 - DNA, 360 bp, Oryza sativa
  Clone ID: PAT_MRT4530_73423C.1
atggggaaatctctgctccccaccctcatctttcttgttgctctccttcctcccccctccccctccctctctctctctctctttgatctagagacggcgatagatccagagccactggatctgttgatcttggcggcggcgatgtggcaccaatctcagacatttcgtgtcatcggtgttgctggcttgagctcaatgccttgcaggttctcactatcatgtatttctgaatttgtgcagataaataactggcaagatattggaatgcctaagaatggtacaaaactaagagcaagaactttcggtgccaatacaacactgccagcctttggtcatgaaaacattagagaatcaacttag

SEQ ID NO: 73112 - DNA, 396 bp, Oryza sativa
  Clone ID: PAT_MRT4530_73424C.1
ttatggccggctcctgctcgcaccaactccggggagcgtttgatcaccgccggcagtgaccccggagggggtggcatggaccggaggaccggagcactgaacgtcccgttataccgaggtggccctcccttccgcgtagccgactagctggtccttactacggccaaaaccctggccgtcccatgcgccaacgcgattatctacacgggcgaccgcgtccggggcagcggcgaccctgcgatcgagcggatgacggacgccgcctacctggctcggctccttgccagtaagctcaccgggaaggccaacgcgtgggcggtggatgccgactgcttcgctggttcgtatgcagatgaccgagcacacgatccagccgtggacaccgagggcgacccc

SEQ ID NO: 73113 - DNA, 1225 bp, Oryza sativa
  Clone ID: PAT_MRT4530_73425C.1
gcacgaggctagccattaaaaaatgtgccaagaataaactgcaaaacacaatcctatgttgtgtcatggtgagcatgtgcaaaccaacaattgtactcaccgatatcctttgttgataacattcactttccttagatggttggttgagattgtaccttcagcttcagtattgttcgtcttaaggaaactaccgactaaacggggaatcacacagcaccaggcaacattaggtcaatctgggagtccccaatatgtcatttcaaattgttcagctactctatgtgagcagaaatgcaggttgtccgatacagatgaaccatgaaatcctattgattgaattgcacagttgcttgatttgctttgtatatgtactggttatgcattttgttctcatataagtaatgttgagtgccaaccccagtttgtagaaatacaaatataaaatgtatcccagtgatatttccactttgaatcgtttataatttggaccacatgattgttctatacaactttttagttgttatttgttgcatgcttacaatatctaatactggaaagaaaaaatattaaaattgctaaggacaaaagaaattacatacaagttacattcttttcttgtttcttaaattgtagtaccatatcacttatcttaagtaaaaccatgttctgttgccacttattaacattttttttcaaaaagaatccattaacaaaaccatggtatttcttcaccgtttgtaattacatatataaaaaagttaatattttgcatggagctgttgaatgaatatttccttgatgtttaagattcttaaaactatgtagatccgagtggcaattttcactttggaggtatgcaactgatcctctcattctattattttttacattatacaagggtctatccctataaagcttattctacagacttgtctacattatgcttgaatggaaaattcatctagcctgcaactcctacaatatctaccatacagatcttggttatagtcatacacttctgctagacctaaaaactcatgggacaatatgtaatctgtattgcattggaatattggaattatttcttaccgctaacttaattcatacactagctaaatgtaagataattggaattatttcttaccgctttgatctaatagaggaagtatcagcgtaaccatttaagtaaaacaatctttttaccccaaatgataggttgatccca

SEQ ID NO: 73114 - DNA, 417 bp, Oryza sativa
  Clone ID: PAT_MRT4530_73426C.1
atggcgccgaaagagtacatgaagcgattcggtggcatagcacgggtagcacgaggctctagcagcaggggggagggcgactggtcctgcgtctgcacgggcacacctcccagctatgagggaccaatgatgtccgctgtggtatcctggaagtcgaagtcgctgatgtcgaagtgcatggcggaagcccacccgtgctccggcgatgtcccggcagggtccaagagtgcgaggccgacgcagctgactaggacgctaaccgtgacgcctgcgagaagtgagcggcctatgtcgtcccgaatggagcaaagcctacacatggacgacgagacccttgtgagcgcacggagaaccgagtgcatcgagcgtgtacgtcgtcaggtgctcgtctacgggtaccgcaatccccgtgcctaa

SEQ ID NO: 73115 - DNA, 445 bp, Oryza sativa
  Clone ID: PAT_MRT4530_73427C.1
taatcatacaacaccacgccgcctaggggggggggcgcgttgaaacccccatgcggttcccgccgccagcgacaagaggccacagccgcagccagggatgggccacgccggcgccgcccacgcaggcggaggcacgcggagaaggcggagcgccgccgcactggggcgccaacccacccccggggccgcagcagcagcacgggccgaccccgcatcagcataaggcgccgacaccgacgcagatgtggggccaggctcccaccgccgacgcagcccgcgtacggccagccgaacgacggcccagacgggggactacggggcgcggtcgcaggcggacacggccgaacacgcggggcccaccgagagcaggacgctccggaccagagaactccagacctgggcggatgagaacaacacccacgcctgcatagcgcccaccggcgag

SEQ ID NO: 73116 - DNA, 421 bp, Oryza sativa
  Clone ID: PAT_MRT4530_73428C.1
aaaaggtcctttcacccttaacaattatttttcaataaaaataaaagggttttgacctaaaagttggaagcattaaccctaaaaccaaatttttttttttttcacccccccccccactttaaaccaaaacccctttaaacatggtttaatttttaaaaaattcattttttatttgaaaacacatgccgctccccttttttgcttaaaatattgccgctggggaacaaaaacccggatttgtttttccaactaaaacatattttaaaacttgttgcccaaataataaaaatttttttttaaaacaaccaattccataaggcccccttttttttttttgtccttacaaaacttacggaactgttttcaagttaactttattttttgagcaccaaaactgggcctttttctttttaaattaaaa

SEQ ID NO: 73117 - DNA, 1288 bp, Oryza sativa
  Clone ID: PAT_MRT4530_73429C.1
aacaggtagggtgcggtaagcctcgcttctccaagcaaaaaaacaaacaagtccagcgctgccgctgctgcatcccctccggtgccgcggctacccacagtcgtgcgccgttgggcctgtccacactctgcacaagggaccaggcgtactggatgactacggttccgatggccatcgacatctgtgttgagcctcacgcaccttaccgcgtgatgcggcagttcggcttccgttagtcctttcaagtaccgtttccgacgagcgtcccagctgccattcactggtactcgcggaagggtcagcagttagctggcgactggcccgccaagttggggccttttgtcgaggactggttgctcgcaaccgaggaggtcgtggaccatgtgggagtggcacacaccgaggaggcgtaccaggcctacctacactggtaccagccacgcacccgtactagggtcaccttcgctcccatggagcaacaggcccacaccgcgagcactagagacctctacgccaggcaccgcgaccaagactttgctcatgctgtcgttgagtgcaacagggtcgtcgttgacgcttcaacgacgatccaacatttaggcacggggattgcggtacccgtagacgagcacctgacgacgtacacgctcgatgcactcggttctccgtgcgctcacctgtcgtgctaccgacgtcgctcaggcaaacgcaacaccacagcagccacctcgaccgactggtcctcgtccagctgcgcacattcctaggccggctccccctccctacggagggttttgtgcgccattcaccaccccgccttccacaggtacgcctccttttgggccccacataggctttgctccattcgggacgacataggccgctcacttctcgcaggcgtcacggttagcgtcctagtcagctgcgtcggcctcgcactctgcgcagttctggcaggatgccgggacttcgtcacaggcagccagcatgtcacagcagggtccaccaaaccttggaccctgccgggacatcgccggagcacgggtgggcttccgccatgcacttcgacatcagcgacttcgacttccaggataccacagcggacatcattggtccctcatagctgggaggtgtgcccgtgcagacgcaggaccagtcgccctcccccctgctgctagagcctcgtgctacccgtgctatgccaccgaatcgcttcatgtactcctaggatcacgtgcgagcgcatgcccagaggaccaagcggggtcgtggcatggggcagagccag

SEQ ID NO: 73118 - DNA, 3163 bp, Oryza sativa
  Clone ID: PAT_MRT4530_7342C.1
tcatgacactacgctgtgacggccgcgatctctagtgagcgacaccgcctcccttcctctggcgagcagcaccgccgccccttcctccatccggccccttccgcctctgatctggcgtccaaaattgcgctccctaccggctgtgccgagcggctccacgttccaatacttgtttgaagtcttgacagagaggatggcagcggtggaagcaaaggtggagtcattgacggggagggtctcggagctcaccacaagtctcaacgccatcctgggtcgctacaaggggtggagaagtggattccggcgcatgtatcatgttccctttgacacttggtcctccttcgccacactgcattttactggtaatgcagccttgtggttgcagacttatgaggaattgcattgtgttgagagttgggcagagttatgtgttgcagtccatagcaaatttgggaaggatgagtatctagagcatctagaagagttagagaatttgactcagtctggtggtgtagatgactactatagcaagtttgaagagttaatgcatcgagtgttagtgtataacaaagcttatgatgacaccatctttgtaacaaaatttgttggggcgttgaaaactgagattaaagcagctatcaagttgcataagcctcgttctgttgatgctgctctttctttggcaaaaacgcaggaggagttgcttggagagttgaacaagaagacttactcgaagacaacctacaaggaaccttataagccagtgattaaggctccattcccagggaagggaatcttgggtgcagcacctgaagagcagaaaaagcttgaagagaaacccaaggcaagaggtgaatgtttcaagtgtggggagaagtatggaccaggccacaaatgtccaagatctgttcaactgcatgttgtggaggagatttgggatatctttcaattggcagatgacaagcaaaaggaagaaggtctagaaagtgatgatgaggaattagttctttcagagtgtgcagcaactgggacaatgggaaaaaggacaattcgatttttggggttgattcagaagcaacagctgctaatcttagttgactctgggagttcaagtaacttactagcaaatcatgtggttgaaaagcttggactgtggacagaaaaggtggcagcaacccaagtgacaatagcagatggtggtaggatggtgtgtgacaagtttgtccatgctgtggagtggtggtgtcagcgaaaaacattcatcattgacttcaaagtgctgggattaggagggtgtgacaccatagcacagattgttcacctttgtgttgtagaggaaaaggcaacaaatgaacagccagttccttcagaaattcagcaggtgttagcagagtttgagggcaggtttcaggagccaaaaactctgccaccacatagggaaattgatcacagaatacctttgttgcccaatgacaaggcagtgtctaaaaagccttatagatatgcacctcaccaaaagaatgaaattgagaaacaaatagcacaaatgctgaaacaagggattatacaggccagcacaagtccatttgcttcaccagtacttttagtaaaaaagaaggatgggacatggaggttttgtgttgactaccgagggctgaatgacatcactgtaaaaaataagtaccccatgccgatggaagatgagttattggatgaactagctaaagccaagtggttcacaaagttagatctaaggtctgggtatcaccaaatcaggttaatagaagctgatgaagtaaaaacaacttttaaaacccatcaaggacactatgagtttaagcacctggattatctaggacacatgattggtgtaaatggggtagctacagatccagacaaagtcagagcagttcagcaatggctagagcctaagaatgtgaagcagcttagaggatttttagggctggcagggtactacaggaaatttataaaagggtttggagtgttggccaaacctcttatagaattgctgaaaaaggatgttgcttataaatgggagttctcacagcagcagtcttttgattctgtcaaacaggctttagtccaagcaccagttctagcattacctaacttcaatcttcaatttgttgtggaaacagatgcaagtgaaaaggggattggggctggctcagagaaccaagtggccgatgcactctctaggagggataatgaagaaaatctgacaatctccattagtacaccaaggtggatggaaatagtgactgaaggttatctcaatgacccacataccaagcagttgctggcctccctaagtgtaactcctgaaggcattgatgggtaccaattggttaatggaatgacagccacttatcaaagagtcaagagtctgttcgcatggaatggattgaagaaagcagtccaaggttatgtggctcagtgtgatgtttgtcaacaggccaaagtggaacattgcaagactcccaggttattgcaaccactgccagtgccacttcaagcttggaccacagtgtcgttggattttatcgaaggactacctaagtcagggggctatgatgcaattatggtggtagtggataaatttaccaagtttgcaaaatttattccattatcccatccattcactgcttattcagtagcacaggccttcatacaacaaatttatgatgtttttgggatgccacaaatgataatttcagatagagacagttgttttacaagtgcattatggcaggaactctttaaactagctgatgttaaattgaacatgagttcgtcttaccacccacaaactgatggacaaacgaaaagattaaatcagtgtcttgaggcattcattcgttgtacagtacatgcagctcctcataagtggtcacagtggctgtcccaggcacaacactggtataacacctcatatcatagttcactcaacaaaactccttatgaagttctttttgctaggaaacctacacgttttggtattgtggatatgggtagcactactgttccagatgtccaagtgtggttgcaagaacgcgctcaaatgaatgaagttctccatcagcaactccagcgagctcagcaacacatgaagagccaggctgacaagaagcggtcagaatga

SEQ ID NO: 73119 - DNA, 540 bp, Oryza sativa
  Clone ID: PAT_MRT4530_73430C.1
atggagtccgatgaactgaccgagcaattacggcggcggagacggcacgttgactggcgcgtatcttgcggtccactcggccgcggcgccgatgacaagccgtcccctccgccggagcgccgatccacgtctctccccttgccgctccgccgcacgctcgtgctggtccgcgtcggcggtgagcggaggacgagcgggcttgaggcgagaggtggtgaccaccaagtggacggcgagcggatcatccgactaccggagtcaagtcaacggcggaacaccgaactgctcaatggaaggcattcatcgggcagctttagtttaggccattctccccaactcccgttgtccgtcgccgaccgaggcgccgagccactgccgtcatttgccctcccggctgctcaatccacggagcggcagagggtcgaggaaccgccgcgccaaggcaccatggcgaccacgctgccactggctggtcaccgcgaggcaggcgccatcagccgctggcgccgggagcccaagacccctggccagcctgcttaa

SEQ ID NO: 73120 - DNA, 3559 bp, Oryza sativa
  Clone ID: PAT_MRT4530_73431C.1
atggagggcggaaaccacggtgggggagggtacccctacccgccgccgcagcagtatccttacccgtacgggcagtacccataccagtatcctccaccgcagcagcagccgccgccgccctccgcctacctctcgccgtcccgttcgttccacggttacccctccgcgccgccgccgcagccgcagccgcagccgtacgcgcaccattccgccccgctccagccttacccgccgccgccgcagcaccatgcctacccgccgccgcagccgcatccgccctcgccgtacgtctacgacccttaccacgcgcccgccgcggcgtacccttcctacccgagccccaaccccagcccgtccatctccccgagctccagcttccaccaccaccctgaaccgccatcgccatcgccctccgcgccgtcgtacccctccattgcggatgggctcgccaacatgcacgtctccgaccgccacgactacccgccgccgccgtcgccggcggccgtgcccgcggcgtcgtccccctccgtgctcccgccttccgcgtcgttccccggcggcgggagcagccacggcggtggcgggatgcagatggtgccgtacggccctcctgccggagggtcgcagcacggtgggatgcagatggtggcgtacggctcgccggccggagggtcgcagcacggcagcgtgaggccatccctgaaggtggtgctgctccacggcaccctcgacgtctgggtgtacgacgctcggaacctcccgaacaaggatctcttctccaagagggtcggcgacctcctcggtccgcgcctcatcggcgccgtcggcagcaaaatgtccagcgccaacatgaccagcgacccctatgttaccatccaggtctcctatgccaccgtcgcgcgcacctacgtcgttcccaacaatgagaaccccgtttggacgcagaatttccttgtccctgttgggcatgatgccgccgaggtcgagttcgttgtcaaggacaatgatgtcttcggtgctcagctcataggcacagtgtcgattcctgctgagaagctcctttttggagaaaggattaacggcatctacgatgtgcttgagtccaatgggaagccatgcgctcaaggtgctgtgttgcggctgtccatacagtacatcccggtggctcagctcaaaatgtatcaccatggtgtcattgccggcccagatagcctgggagttcctaatacttacttcccgatgcggcgtggcaatagagtgacactgtatcaggacgcacatgtgcctgatggttgtctcccggatttctgtcttgatcacggaatgcgctatcagcacgggcagtgttggcgtgatatctacgatgctatatgccaagcacggcggttgatttacattgtgggatggtcagtgttccacacaatccacctcatcagggaaggagttgagaagatgccatcacttggggaactgttgaagatgaagtcacaggaaggggtgagggtgttgcttcttgtgtgggacgatccaacatcaaggagtattcttggaattaagacggatggtttcatgggcacacgagatgaggagacccgcagatttttcaagcactcttccgttcaagtattgctttgcccacgatctgctgggaaacggcacagctgggtgaaacagcaggaaacaggaaccatttttactcatcatcagaaaacagttattttggatgctgatgctggcaatcataagaggaaaataattgcttttgttggtggcctcgatttatgcggtgggcgatatgatacacctagccatcctctatttaggtctcttcagactgtgcacaaggaggattattacaatccaaattttgctacagttgatgctcgtggcccaagggaaccatggcacgacttgcattccaagattgatggtccagcggcatatgatgttttgcaaaattttcaggagcgttggttaaaggcatccaaacgccatgggattaaaaagttaggaaaatcatatgatgatgccctcctcagtattgaaagaatacctgattttataagcattaatgacgcaatatattttagtgacaatgatccagagacgtggcatgttcaggtgtttcgttctattgattcaaattctgccaaaggatttccaaaggatccacgggaagcaacccgcaagaatcttgtttgtgggaagaatgtactgattgatatgagcatacatactgcatatgtcaatgctattcgtggagcgcagcacttcatttatattgagaaccagtatttcattggatcttcgtttaattgggattcaaacaaagatattggggctaataatttaataccaatcgaaattgctctcaaaattgcaaacaagataaaggcaaaagagagattctctgcatatatagtaattcccatgtggcctgagggtaatccaacaggtgctcctacacaaagaattctttactggcagcacaagacaatgcaaatgatgtacgaaacaatatatagggccctgaaagaagagggtctagatgatctatatgagcctcaggattatctgaacttcttttgtcttggcaatcgtgaagttgctgacagtccaagcacttcaaactcaacaagcactcctcaggaacaagctaggaaacatagaagattcatggtatatgtacattcaaaaggcatgattgtggatgatgaatatgtgataattggatcagctaatatcaatcagaggtccatggaaggtatcagagatactgagattgcgatgggtgcgtatcagccacagtatacatgggcaagtaaggtttctgcaccccgtggacagatttatgggtacagaatgtctctttgggcggagcatattggagtggttgaggaaggcttcaactatccagagaccatggaatgcatgagacgagttcgccaaatcggtgaacagaactgggaacgatttgttgataatgaggtgactgagatgagaggccacctaatgaagtaccctgtaagtgttgaccgtaagggcaaggtgaaacccttgccaggatgtacgtcattcccagacatgggtggtaacatctgtggatcattccgagccatccaagaaaacctcacaatatgaatttcgattatctgtaagtatacaattgctagtgattctgagctattctgcttcctgaggttatagatagcgtgaaaattttgctagcaatataggttgaaaccaagtaggacatgacaagaaaaggttattaccctgcattttttatgcctttcttaagagaattcaacatttccatcttaataggttttctttttatgtatactttttatcaatgtatagaagattaagaatgtttgaaagcccggaaccctctgtttagggaacatggctttggtagcaactttgattgatttaagtatgtagcgacatgtaaagccattaaaataagtttctagtgtaattattttcagccttgatttgctggttccaaaaaaaaaaaaaaaaaaacaaaaaaaaaaaaaaaaaaaaaaaaaaa

SEQ ID NO: 73121 - DNA, 446 bp, Oryza sativa
  unsure (1)..(446): unsure at all n locations
  Clone ID: PAT_MRT4530_73432C.1
aaatagcttcattttgggacggaggaagtatttttgttgtaatcatgaaatagaacctttctgagggccaagcaagccaaatgggactgcaccagtggtaagatgaaagtttttccttattcacatcaactatctgatttgcatttatttttggttcatangagattaaatttgttccaangagtgcaaaatctgtcatgtagcatttatccgttcgacaacatataagttggatccgaatagatgatttagatcttttctttcattactctgctttggagcaaataaatatttttcgtcatcttgtttaggttgtgctatgacgaagtgtattatcttcttgattttcttacttgcagtgtcctattgttgttaagggcgaaaacactcttgcatggatgatggttcaatggaaaaattaggaattgcagcaacgaccaaagttc

SEQ ID NO: 73122 - DNA, 207 bp, Oryza sativa
  Clone ID: PAT_MRT4530_73433C.1
atggactctgggcctgaaatgcattggttgctgctgcatcaaagcctcttcgacttcgaggaagctggtgacaacccaaacttcaatgaagagccgacgaagggggatggggggtgggagggggaggtcactagcaccattgatgccttccaaccagctggcgaggtggggcagcagtaccggaggtggcacggatcgcgctcgcac

SEQ ID NO: 73123 - DNA, 852 bp, Oryza sativa
  unsure (1)..(852): unsure at all n locations
  Clone ID: PAT_MRT4530_73434C.1
tggatccccgggctgcaggaatcggcacgaggatattctgcagtattttgtagttttcttgtgtttagttgctacatctcgtgtgtccattaaattgtcactttgcttttcggacattctgtaatagtattactgagttttcggactagaagtttgatactgtggcataatgggggtgattcatacaatcatgtcatggcatgttcatcagggaaggacagttgatagacatcatggcatggcatactcatttaaggaaacctggagcattgtgttcacagcacgaagcatgcaactatcaattgctgttgaagcatgcaactatcaattgctgttttaacttaattctttcagtactcatagtatccaatcagagagtagctaacatattgacaataaaatagaaatagctgcaaagcccttttgtttttctgtagcagatgatgaatgatcttgagtggcattcgtttggtataagagaagctcgtggatgcagaggaaaggtaagctgctcttcagaggtatgaagtaaaagatagtcaggtttacattgccatgaggcggctgctggaggtactacgtcacttcaacttcaacttgtaacagttcattcaaagctcagacaaaccaatgaaaacaatgttagtgctgagaacgtgttccccatggaatgggaaagtgatgatcaattctttgtttcaaaggatataaaaaaaaaaaattgattgataaattggattgagtttaatacgcaggcctgattaaaaaaaaaaaaaaaaaaaaaaaaaaaaaaaaaaaactcgagggggggcccggtacccaattcgccctatagtgagttgtantacaatt

SEQ ID NO: 73124 - DNA, 2525 bp, Oryza sativa
  Clone ID: PAT_MRT4530_73435C.1
ggcacaccacatccccctcatccacctgtccgtgatgatactcccatagttgagacttgagattgcccttctcctcaatcttgttgatctcttctcccacctcgcgccttcgagctagtcgtgtttaggtttagccccattaatcttggtaagggtggtagtggttgttgctgttgttgttgttgttgccctgaagctttcttcctcaaggaccagaatttgtcttcagctgctaaaggagggcctaccactaaagatttgtgatcaatcccactttgatctattaccattgtggcgctgaatattcagtgataacaacggcaagatcaactccctattaattgttcggaagtgcatcattcctcagcgactccagcatataaataaaatccagaaggttgcaccagagaatatgtcaatgcaggcctctaaccgaccatacagatatccagacaattctcaaataccatactacagccggagttcaatgcatgtggggcaaaatggtacttaccatgtgcaacaaaatcatgaggatctttacgcgtcatctgatgatggttcacagaacggcaattctaaggctcaggggttgcaagcacagtactgcactctagattcatcctcaggcaattttgtgtatccagcacatagctctacatcctcccacataagtgggagccccatttctcagcaagatagccactcagagcacacatctggttcccctgcaagtgcttcatgtgttactgaagttccaggcttgaggtttacaacaattgaggagatagagaatgcaatgtttggacctgaacctgacacagttagctcggactgctccttacttactgattctgctttttaccaagataactggagggagcatctgggaatcaatacaggggacttgaagcaggtaattgcagcatgcggtaaggctgttgatgagaatagttggtatagggacttgctgatatctgagttaaggaacatggtttccatttctggagagccgatgcaacgccttggagcctatatgttggaaggccttgttgccaggctttcttcgactgggcatgccttatataaatccctgaagtgtaaagaacctactagcttcgagctcatgtcttatatgcatctcctctatgagatatgcccgtttttcaagtttggttacatgtctgccaatggagcaattgcagaggctgttaagggcgagaactttgttcacatcatcgacttccaaattgctcaaggtagccagtgggcaactatgatacaggcccttgctgcaaggcctgggggaccaccatacctgaggattactggtatagatgactcgaattctgcccatgcccgaggtggtggactggatatagtcggacggcggttattcaatattgcccagtcatgtggtctgccctttgagttcaatgctgtcccagcagctagtcatgaggttatgcttgaacatcttgatataagatctggggaggttattgttgttaattttgcctaccagctgcatcacactcctgatgagagtgtgggcatagaaaatcaccgggacaggatattgagaatggtcaaggggctctctccaagggtggtaactcttgtagaacaggaagcaaacacaaacactgcacctttcttcaatagatacttggaaactcttgattattacacagctatgtttgaagctatagatgttgcttgcccaagggatgacaagaagcggattagcactgagcaacactgtgttgcaagagatattgttaatttgattgcatgtgaaggtgcagaaagggtggagaggcacgagccttttggaaaatggagggcaaggctttcaatggctggctttaggccgtacccactaagtgcactggtgaacaacactatcaaaaagttgctggatagttaccacagttactacaagctagaggagagagatggtgccctttatcttggatggaagaacagaaagctggttgtatcttctgcatggcggtgaagtgctcaagttaatttggaagaagcttctttaggttctttcgtggcttcttggtggacgcatgaatccaaggtggaacctgatcttcatagagcagagagaactccatagtccagaacaatgtggtcgcttgcttgttggcacccatctctaaaccctcgtatgcttaccatccgtcagatttaatcgccataggcagaatactcttcctgacttcccatagtccagtccagtcgcaatataggtgtacactgtactgttttacctgctcatggtagaatgtccgttttatgtcgatcagtcaagtagagtctggtcaccagaatccccgtcttaatagaacgtctgttttaaaagtcagtcaagaagagagtctggtcaccagagtccgtttcttgatcctgctcgttgtacaatacaatgacgtctcaatgtgaattctggatcctatgctactacaaaaaaaaaaaaatcactgaattctggatcaaaaaaaaaaaaaaaa

SEQ ID NO: 73125 - DNA, 453 bp, Oryza sativa
  Clone ID: PAT_MRT4530_73436C.1
atgacaaattcaaatggaagtgatgaaacaatacaagatctatttttcgtttgtcattttgcaaagttcatatggcacgcgattcaaatagcttttggcctaccaccacctattagtttttctaatattggaatatggttgcaagatgtttcaaaaaggctaaagaatcttattttggttagagcaagtgctatgtgttgggcaatatggataagtcataatgacgtagtttttgagaaaacaaatgatctttcacctatgcagtttttagccaaccccaaatactttatcattgatgcttcacatgacatgatcaatcccgcagtgataaataatggtcaactgcttgtcactttctctgtgtccacaagtggtgaatatggtaaacttgtatcatatatatctgtctttactgtccttagcaatgttttgtccttgactacttctgattaa

SEQ ID NO: 73126 - DNA, 261 bp, Oryza sativa
  Clone ID: PAT_MRT4530_73437C.1
ttatctaactgttgtcgacttagtggtatgaaatgttgactcgtagtcgacaacagggtagccttccttctcgaatccgcatccggcgagatcaaagacagcgctatgtctctcctgacagtatccgtagacatcgtaggggactagccatgcttatctctgaagtcgatatccggcgtcttgtcttggcgcataactctattcatccttccttatgcggaactcctcctatatccgaaggttgttttcgtataaaacatg

SEQ ID NO: 73127 - DNA, 477 bp, Oryza sativa
  Clone ID: PAT_MRT4530_73438C.1
atggcggtggctatgccttcccacttcatcggccgccggcaagtggaaggagactgccgcctcctagagcaagttatcgctgtcgttctcttggtcggagtagcttttgaaatggtgttgactcgacttctcgttggtgttgagttactgggccaatgggatgttagtgatgcattattagagaccccaactacaactggaccaggaagtgcgcctcaacagcacattctcacacctagacgtctcgaattttcaatgatcaacaatgtagctcattatgattttaatggacacactatagtccctttgagctgcataattcaaggatcaacacagaacaataataaaacgatttttgttgcggagaattcagctttatacaagaatgattcagtgaaggctatgtgttcaagagccatggaggacttcttccttctccctctttcagaccaagcttacagtgaataccttcagtaa

SEQ ID NO: 73128 - DNA, 391 bp, Oryza sativa
  Clone ID: PAT_MRT4530_73439C.1
accgccgccgccgccaccaccgccgccgtcaccgccgtcgccgtcgccgccgaacaacatcgtggggatagtggtcgtcccgatcgccgggctgctgttcctcggcctcctcgcggggctgttcctgctggcgcgggcgcggcggcggcggagggcggaggcggcggaggaggagacgatggaggaggtggacgacgtggaggtcgcccaccacgtgcgcgcggaggagcacgtggtggccgggccgtcgggggagatgctcaaggtgctcgacgtcaccgacgaggtcgacgtccacgagcacatcgttcgccacgagcacgagcacgaacgccatgacgttgtcgaaagggaaggatgaccatggatcgatgccatgggctttgatact

SEQ ID NO: 73129 - DNA, 1540 bp, Oryza sativa
  Clone ID: PAT_MRT4530_7343C.1
gcacgaggtcttcttcttcgctttttacacgctcctcgaatcggcccgcgctctctctctcgctctctctctctttcttgcttgccttgtttggatcgattcgattaggatgcgattgaatcgcccgtctcatcttcccagccacacccccaaataatgttgtctttccgcaaatcccctccgatatccgtgtcctgctctttttttgggttatcctctaccgaaaatcccgattttttcgctttgaatccgccttttatccttcctcccataaagctttgaatccccgcgagcgagagcgagattccaggcgccgattcgcttccacttccgcgagcgtttcgtgcattgattccaagaagatccaagcttatcgcggaaaagaacgaaagaaagaaaggaagaggagatgaaatgcttcaagcagcagcagcagcagggcggcggcaatggcggtgggcaggggaagaggctggagaggcggctgtcgctgggggagtacaagaaggcggtgtcgtggtccaagtacctggtggctccgccgggagccaagatccggggtggcggcgaggagctgtggagcgccgacctgtccaagctggagatccggaccaagttcgccaccggcaggcacagccgcgtctactccggccgctacgccgcccgcgacgttgccatcaagatggttagccagcctgaggaagacgccgccctcgccgccgagctcgagcgccagttcgcctccgaggtcgccctcctcctccgcctccgccaccccaacatcatctcgtttgttgcagcatgcaagaaaccaccagtcttctgtatcattactgagtacatggcaggtggctcccttaggaaatatctacatcagcaagaacctcattctgttccaattgaattagtgttgaagttatccttagagattgctcgtggaatgagctacttacactcgcaaggcatacttcacagagacttgaagtcagagaatatacttctcgatggagatatgtcagtaaaggtggcagattttggaatttcgtgcttagaatcgcagtgcggaagtggtaagggttttactggaacgtataggtggatggctccagaaatgatcaaagagaaacaccatacgaggaaggttgatgtatacagctttggaattgtcttgtgggagattttgactgctttggtaccattcagtgagatgacacccgagcaagctgctgttgctgttgccttgaagaatgctaggccaccactgcctccttcatgccctgtggcaataagccatctgataactcagtgctgggcgaccaacccagacagaaggcctcagttcgacgacatcgtcgccatacttgagagctacatagaagctcttgaagaggatccatccttcttgcagtcatatataccgcctccgcatccgctgcaccatcaccatcaccagcatcataatcatcatcatcaacagagccttctccggtgcttccctcgctacagaaccacccgacgatctgcatctctgagagtataa

SEQ ID NO: 73130 - DNA, 417 bp, Oryza sativa
  Clone ID: PAT_MRT4530_73440C.1
atggcactggctcgaggtggtggtccgcggtggaccgggtccacggaccggggaggcggcggcgcaccacgtggcgctgacgtggcgccgacacggcggccactcgtcagccacgcgggcggcgagacggacggccccgatctaccgcccggtagatcggacggcggaggcggctcgcggacgggcgggcccgggcagctcaaaccggcccggcggccatggcacgcggcggcgcagcgcgacgcggcggcggcgcaaggcggcgagcgggcgccggcggagagcggcgacgacgcgacgacgacgcgggtggcgctggcggctgaccggctaggcagcgatgcaacggctaagcggcgcgggggagagagagagaaaagggaggggttcctcaccgacgacgatcgacgacgatga

SEQ ID NO: 73131 - DNA, 669 bp, Oryza sativa
  Clone ID: PAT_MRT4530_73441C.1
attggactggcggaggtcaagtgcctgttagttggtggacagtacgagcagaggattaagatggcgtcatgggcttcagctttttttttttactagcaatagtgcccgtacattgcaacgggaaaaacaccgttcgatagtgggaaaccttgaaaacctttggcccaggtcttcccaaccgggccaaacttgggctggcccatctttggttagttgagtcaattcgacggctcgcaggccaagcagctgacgcagcacacatatgtggggacggtccgatgcactttcgcggcccgttgggcgcagcgtaatcaacggcggcggtggcccgacgctgggcaaatctgagccgtccgatctaatggatggctccgatcgtccccgtgctggatgaagtgacgaccgggagagaggggcaaaacccaagctcccacatccctctctcccgatcctatttctctccagcgacaagcgagcagaacgacgccgaaggtggtgatggcagtttggtgagctggtgcgcgcgtgcggtgacgaccgccaagcggctcctgcttcgccagctagcgggcgcactcgagggcggtgcaaagccgtgctacagcgtcggtgatggcgtcatgggcattagtggcggagctggaaccatgcatattgagcgtgagcgtg

SEQ ID NO: 73132 - DNA, 373 bp, Oryza sativa
  unsure (1)..(373): unsure at all n locations
  Clone ID: PAT_MRT4530_73442C.1
ttttttttttttttttttttttactaattaaatttttattttatttatattttttattttgtttgttttttaaaaaaaaatgggtattttttttaaaattttaattacaaaatnaaacaccttcacctgtatanaaaaaaaaaaaaataatctatcccttgtaatgaaggtccccccaaatgagaaaaataaaacctaccttgctacttaacaataaatcaactactgcgcctcttttctaaccctttcttttactaaccaaaaaagaaaaaaaaaacatatttagcacacttccggtttgtccgcggatggtctggggtctctctatttagtacctttcaaaaaaaaaaaaatataatctatgttttttccc

SEQ ID NO: 73133 - DNA, 987 bp, Oryza sativa
  Clone ID: PAT_MRT4530_73443C.1
aacaaaccaatggagattcatcttcatctccatttcttagcgatccttgtagttgtgccgatgttgggtagccccgccgccggtgggctctgccgcgacagctgcggaggcatcccggtgcgctacccgctgagcatcgacgacgggtgcggcagcccatactaccgcaacatgctgacctgcgccgacaacgccacgctccgcctccgcacgccgtcgggcacgtacccagtcgtcggcgccgactacgcggacccgcacctcgtggtgacggacccttccatgtggacgtgcgaacggcccttcacctccgtccgtgccgcgcccttcagcctggacaccagcacccgcttctcgttgtcgccgaggaacgactacctcttcttcgactgcgacgaggagcgcgtgatcgtggagccgcggccggcggtttgcgaccggtaccctgagcggtgcgactcgacgtgcgacagcgcggggtacctttgccggaacctgccgggttgccggggcgcgctggaggagaacaacatgagctgctgcgcgtaccggccgcgagcggcggagtcgctgcggctgatgctgcggcactgcgagtcgtacacgagcgtatactggcgcgcggtcggggacaagttcccgccctacgaccaggtgccggcgtacggtgtgcgggtggacttcgagatccccgtcacgacgcggtgcctacagtgcgaggaccggcggcgcggtgcggggggcacgtgcggattcgacccggtgacgagggacttcgtctgcatctgcaacgacgctaggaactccaccacggactgtgcaggtgcgctcgccaagttctcccctattcaatcagtatttataggccaaacaagcatctcaatctcagcagccgttggtatcactggacttgtgtggtacattcgcaagatcaaatcgaccaaagtggtgacttgtggggttcaaagcaatgagaatagatttttt

SEQ ID NO: 73134 - DNA, 308 bp, Oryza sativa
  unsure (1)..(308): unsure at all n locations
  Clone ID: PAT_MRT4530_73444C.1
aaaaggaaaagagcgagagcagggggccgaggccaaagcaacacgcncacngaaagggcaccggccaccagcgacacacaagcgcccaggaacaaacaacanggccnggccggacgcgacagcagcagncgagggggacagcacaacccaggccacgagccaggggaccaaggcaacggcaagccggacaaaagagggggcgaacnagccgagcnacncccagacccggacggagagggagaggaagcacancaggacggggccgcacaaccaaggggaaggggggcgggcagggaagaaggggggag

SEQ ID NO: 73135 - DNA, 589 bp, Oryza sativa
  unsure (1)..(589): unsure at all n locations
  Clone ID: PAT_MRT4530_73445C.1
ggctatgttttcttgttcatgagagaggaattgaggtccctcaaaggagtattaatgccatcaagaaaattcaacctccggaggataagatgcaactacaatcgttgatcggcaagattaattttgttcgaaggtttatatctaacttgtctggacggttagaaccttttacacctttgtaaacgttgaaagnccatcaggaattcacttggggggcggagcagcaaaaagctttggacaacattaaggcatatttgagttctcgtccagttttaattcctccacaaaagagagtgcctttcaggttatatctatcagccgatgagaagtcaatcggctcagttttgattcaagaactagagggcaaggagagagctattttctatttaagccataggctattggatacagaaacaagttagtctctagtggaaaaattatgtttgtgtttatacttcttttgcaccaagttaaggcattatttgttatccaatgaatgcattgttgtatgcaaagccgatgtgatcaaatatatgctattagctccaattctcaaaggaagagttggaaagtggatatatgctttgac

SEQ ID NO: 73136 - DNA, 242 bp, Oryza sativa
  Clone ID: PAT_MRT4530_73446C.1
cccacgcgtccgcaattaaggagctcactaattatgatattttcaggaaaaaagtaaaggaaaattttgtcaacggtgaatgtccacttttcatatttgccactaattcttgggactccttgtggattctactcttccatcaagcaccatttccccacattcatcagcctgcactatcactgccctccgggaatcttttgcttcctccctctccacctgcattagccaggaccttttccttg

SEQ ID NO: 73137 - DNA, 205 bp, Oryza sativa
  Clone ID: PAT_MRT4530_73447C.1
gcacgaggattgcaataagctagtggttgcagcatcacctggcgaggcgtagctaggagatgcagaaacagcattttgacatgtgtgggtgttgacatgcaacgaataaaatgaatgaagctgaattgaggtttgtattgtacgagtaaaaaaaaaaaaaaaaaaaaaaaaaaaaaaaaaaaaaaaaaaaaaaaaaaaaaaaaca

SEQ ID NO: 73138 - DNA, 363 bp, Oryza sativa
  Clone ID: PAT_MRT4530_73448C.1
atgcgaggaacttccacagagcagagcagcctcgcatgtcgcacccgcgcgctccgatccagcctcgcatgcgcactacacgaagaacccggcctagctagcatacagcatactatagtactaccaccagctgctacaagaaaggacggcgattacctcagcgagctccgctccggcgcgtcggatctcagcggcggccggcggggaggacgaagggttggggaggcggcgcacgcagccgcggaggaagcaggtggtggtggtggtggtggtagtgaggaggaggtgagctggggaatttttcgggtgggcgcgggtatttctacccggtggcccgtgcgcgtcgtccgcggtttgtcgtga

SEQ ID NO: 73139 - DNA, 516 bp, Oryza sativa
  Clone ID: PAT_MRT4530_73449C.1
gcatgcaactcacatagcccggaacaagatgctttccatcatcactcgtgttttgcctgatgcgatggaaatacccagacaaggtgagcttttgcacgaaaatgacatgaaaaataatatgcctcccttttccttgcttgcactgtacatacctgaagcatatgatgtaccagtacgatgggatagtgaacagtatgccgttctgttttttgccatggaaacatctggatgttttggttttgatgcagatgcacatcatcgaaagagaagttctctttaatttctacacctgcaaagacaaagctatccttgtcaaacaggcaaagttgtagatagatacagtgaatcaatgatgattcaatgttccaaaggtgttcaatcagctagcaaaaatatctgcggttgttttcctttgcaagctgcatgcatttgcatgctgtaaatcttcagaatgaatccaaagtggtagtgattgattactggagaattgaataaaagtcgatgattatcgatctc

SEQ ID NO: 73140 - DNA, 475 bp, Oryza sativa
  Clone ID: PAT_MRT4530_7344C.1
caccttacaatctggaagccactggcccctccccgctgtcgctacttcctctggtttggtcgcagcgaatagatgctaggctactgatcgtcttcgccatcggggccggggctcccccaccctgtccactgtgttctttgcaatcaacatgaacagagtatagatcatatcttggttgattgcccataatcccgctagctctggcggtgggttctcagggtgattaatcagccagattgcctccccttgcatgaggcctccttccattagtggctttgccttagcaggaaaaaagtcgcgaaagatcgtcatcagggatttgataccattgtggcactagtagcttggatgatctggaaggagagaaacaactaggtcttcaacctccaacagtggccatgggtggaagtagtgaaaacaatggctgcggaggcggagttatggcgcctagcaaaggtggtagtaccggcacttg

SEQ ID NO: 73141 - DNA, 1440 bp, Oryza sativa
  Clone ID: PAT_MRT4530_73450C.1
atggtggaggttttagaggaagaggtggaggtgcagacccttactccttccaggagtgaaggtgccagcgggagtcgcaacccgcgtcaccgccgacgcggctcgcggactccgcccctctccgaccccctgcggagggaggcagggggagccctcctgcggcaccccccggtgaacgtggagccggaggcccccgtccaacgatggttggacgacgtcgccaacttggtcaccactgcccagcggcggttggccgtaagtggccgttccaccgccacaggtacatcacgtacctccaccaccctctcctcgtcagcaaggaggagggcccgtcggatagccacagcctcaaggcgatctacggccccaacgtcgtcaggggcctcggaaagtcggaggcgtcacgatagcctatacggggagcaggacgctcgagtcaacattgagcgtcgacgagacgagcgccgcgctacccgcatgggagaaggcgcctcctcgtctggagtgccgcgtttctcctcgcgcggcggcccgcccctcacgtccaccccagggggaactggttacaaggccttcgtggcgagtctccggaacgtccggtggcccccaaagttttgcctcaacctcacagagaaatataatggcagcatcaatccctccgagttcctccagatctataccacaatcattgtggcggcgggaggggatgaccgggtcatggcgaattatttccccatggctcttaaggcccacgcggtcgtttatgcattttggaacggcgtgcggcacaaccgcaagctggagaagatcgcctccaaggagcctaagaccaccgctgagctcttcgagctagcggacaaggtggctcagaaggaggaggcgtgggcttggaactcccccagcaccggtgcggcggcagcggccgcccccgagactgccccccgctccaagcggcgggacagaaggggcaagcggaagccagcccgctctgatgacgagggccacgtccttgcggctgatgggccctcgcgggccccgcgcagggaaagggccaccgacggcaagacgagctataccgccccttctggtaagggtcggtccgcggacaagtggtgctcggtgcacaatacttatcggcacagtcttgccgactgccgctcggtcaagaacttggccgagcggtttcgaaaagccgatgaggagaagcggcagagtcgacgggagggcaaagccctcacgaccccagccaatgatcagcgagaggagtctaagaagaaggcccccgccgacgatggcgatgacagcgagggtctggagttccaggatattttatgcaaagtccttagagataaatgtgggcaaaagtctgtcgcaaagacttgtggtatcttagagtttgttagagataatagtcgtgtccggtatggacatatcttgtaa

SEQ ID NO: 73142 - DNA, 630 bp, Oryza sativa
  Clone ID: PAT_MRT4530_73451C.1
ggaaagctgggacgcccgcgggccccggtccggggttcgaggcacgcgtccggcgaccggtacgcctattagttcattccgccgacaacgagtacgaccttggcggtctcctacacggcgacgccttagacgattacgacgaggacaacctgttgttcaaccagacccatgacctactcgtagatccccagaagacagcccgtcagatctcaatgactgagtaccgacatgagctgacatacacgtcgtctcggctgcttgtttgagtcatggaaagagagtcgagatgtgaatacgagaatgtgcgcgtgacaacttcatacaggcatagtcatctccatgctgtgttgtgcaggatgcggaagctcaaggcgctgagcctggtgttgccaaggcggtgcgcgcccggcggactcgggagaagccccggtactacgagaagcccaccaagtacgccggcagtccgaggagcggtgggctgcccacgtattcaccatgctatctaggcgtgtatggcctagagaggcaacactaaaggatgtggcacaagcattgcgtacatgcgccgcggcgattggatcagcttacttgctcccggctgctgctgctgatgtggactactcaaagtct

SEQ ID NO: 73143 - DNA, 3295 bp, Oryza sativa
  Clone ID: PAT_MRT4530_73452C.1
atggtcgaggttttggaggaagaggtggaggtgcacacccccactccttccgggagtgaggatcccagcgggagtcgcgacccacgtcaccgccgacgcaactctcggactccgcccctccgcgaccccccgcggagggaggatcccgcccgattgggtggttcggccctctccctgcctccggacggggggaggccacggcacgtcagagcgcgccgccgcctgacctatcgcgacggcagctcgccccagggcacacttcaagccgcgggagccctcctgcggcaccctccgcggcagttagccgcgagtggccgttccaccgccacaggtacgtcgcgtacccccactaccctctccttgtcggcgaggaggagggcccatcgatcggccatggcctcaagacggtccacggctccaacatcgtcgggggcctcgggaagccggaggcgtcacgatggcctctacggagagcaggacgctcgaatcaatatcgaacgacgccgggacgagcgccgagctgcccgcatgggggaaggcgcctcctcgtatggagtgccgcattcctcctcgtgaggcggcccgccccccacgttcacccttggagggaccggttgtagggccttcgttgtgagtctccagaacgtccggtggcccccaaagtttcgccctctgagttcctccagatctacaccacgatcatcgtggcggcagggggcgacgaccgggtcctggaggacctgtgccagcagttcatcacgaacttctagggcacatacccccgcccaggagaagaggcggacctgcatgctgtgcagcggaaggacgacgagtccctctgatcgtacatacagcgtttctaccaggtccgcaacactattccatgcattctggcccacgcggttgtttatgcgtttcggaatggcttgcggcataaccgcatgctggagaagaacgcctccaaggagcccaagatcactgccgagctcttcgagttggcggacaaggtggctcggaaggaggaaaggaagtcggcccgctccgatgacgagggccacgtccttgcggccgatgggcccacacgggccccgcgcaagggaaaagccaccggcgacaagctgagctccactgctccatccggcgagggccggttggcagacaagtggtgctcggtgcacaacacttatcggcagtctcgccgactgccgctcgatcaagaatttggctgagcggttccggaaagccgatgaggagaagtggcaaggttgacgagagggcaaggcccccgcaaccccacccgatgaccggcgaggggaggccaagaagaaggcccccgcaaatgacggcgatgacagcgaggatctgtagtttcagatacctcagggaaccgtcgccacgcttgacggcggggggggggggggggggggttgcgcacacacctcccgccgaggcttcaaggccatgaggcgagagcttctggccgtcatcccgacccacgaggcagctcggaaggcgcgctggtcggaggtgaacctcaccttcgaccagagcgaccatccaacagtgctcgctcgtggagggaagttggcccttgtggtctccctgaccattcacaacgtcaggatgaagcgcgtcctggttgattgagggggggcagcctgagcatcatctccccggctgccttcgacgcgctcaaggctccggggatgaagctccagccgtcactgccgatcatcggtgtgactccgggacacacgtggcctctcggccacgttgagctcccggtaaccttcggcgactccaccaactttcgcaccgagcggatcgacttcgatgtggcggatctcaatctgccctacaacacggtcctgggcaggcctgcgttggtgaagttcatggccgccacccactacgcctacctccagatgaagatgccgggccctagtggccccatcaccgtctttggtaatgtcaaggtcgccctcgcctgcacggagcagcgcgtcgacatcctggcggtggccacggagccgcaggccccggaggcctccgcgtcctgcgcctccaagaagtgcctcacctcggctgacgaggtgcccgtcaaggagatcccccttggcaatgatccgtcgaagaccgccaaaattgtacggcgtcaagccccggagcggtaggccttcatccgagaggaggtggcgctgctcctggaggctggcttcatccgcgaggttatccatctagagtggctggcaaacccggtggtcatcccaaaggccaacggcaagctccggaagtgcatcgactacacggacctcaacaaggcatgccctaaggatcccttcccttaaccacgcatagatcagatagtcgactccactgcggggctgggagagagggcgctgcccctattcaaactcctctagcgccccgggccgtttgtgtggacggagcaagctctcagtcagttgaaagcttacctcacctccccccatcttggtagcctcggggccggaggaaccattggtgctctacttggccgtgaccccccatgcggcccagtgcccgaagcccccaacccccgagaggaccccgaggcctccgtgggaggaggggaggctttggcgagtggtcccgaggcctatggtcctgacatggctcgagacccccccctggggcccttgagcaagggcgccccagatcatctgcccctgacaacaaggaccggccccaccgaaaggtgcagcggcccgtctactttcgcctcctggtcctaggcgattcccagttagtcgtgaatcaggtctccaaggagtaccgatgcaccgacccggaaatggatgcatacgtccgtgaagtgcgacgtatggaacgccatttcaacggactcgagctacggcacgtgccccgacgtgacaacgcaatcgctgatgagttgttgcgtatcgcgtcggcacgagccccactccctcctgggaccttcgaggaaaggctcgcgcagccgtcggtataattggcccccccgagggaccccggtgccacgacctccgccccaagccccgacgacccacgggcctcagggcccgagggggtcgaccccgacacccctcacatccttggaccgtacaaagcgactcgaggcaggtatcaacacctgtatgtcgctatcgacaagttcaccaagtggcctgaggcttacccggtcgtcaaaattgacaagcattccgccctcaagttcatcaggggcatcatgtcccggttcggggtgcccaaccgtatcattacggataatggtacc

SEQ ID NO: 73144 - DNA, 5249 bp, Oryza sativa
  Clone ID: PAT_MRT4530_73453C.1
atggtcgaggttttagaggaataggtggaggtgcacacccccactccttccgggagtgagggtgctagcgggagtcgcgacccgcgtcaccgccgacgggactcttggactccgcccctccgcgaacccccgcggagggaggatcccgcccgatcgggtggctcggccctctccccgcctctggacgggaggaggccacggcacatcagagcgcgccgccgcctgacctatcgcgacggcagctcgcccccgggcgcgcttcaggcggtgggagccctcccgcggcaccctccggtgtacacggagccggaggcccccgtccaacgatggttggacgacgtcgccaacttggtcaccactgcccagcggcagttggccgcgagtggctgttccactgcctcaagtacgtcacgtacctccaccgccctctcctcgtcagcaaggaggagggcccgtcggacagccatagcctcaaggcgatctacggccccaacgtcgtcaggggtctcggaaagtcggaggcgtcacgatggcctatacggggagcaggacgctcgagtcaacattgagcgtcgccaagacgagcgccgtgctgcccgcatgggagaaggcgcctcctcgtctggagtgccacgttcctcctcgagcggcggcccgcctttcacgtccaccccagggggaactggttggagggccttcatggcgagtctccggaacgtccggtggcccccgaaatttcgccccaacctcacggagaaatatgatggcagcatcaatccctccgagttcctccagatctataccacgatcatcgttgcggcgggaggggatgaccgggtcatggcgaattatttccccatggctcttaagggtcaagcacgcggatggcttatgacccagccccccgactccatccactcctaggaggacctgtgccaacagtttatcacaaacttccagggcgcatacccccgtccgggggaggaggcggacctacatgctgtgcagcggaaggacgacgagtccctccgctcatacatacaacgcttctaccaggttcgcaacactattccatgcatcccggcccacgcggtcgtttatgcatttctgaacggcgtgcggcacaaccgcatgctggagaagatcgcctccaaggagcctaagaccaccaccgagctcttcgagctagcggacaaggtggctcggaaggaggaggcgtgggcttggaactcccccagcaccggtgcggtggcagcggccgcccccgagactgccccccgctccaagcggcgggacagaaggggcaaacggaagccagcccgctctgatgacgagagccacatccttgaggctgatgggctctcgcgggccccgcgcaaggaaagggccaccgacggcaagccgagctctaccgccccttccggtgagggtcggtcggcggacaagtggtgctcagtgcacaatacttatcggcacagtcttgccgactgccgctcggtcaagaacttggccgagcggtttcggaaagccgatgaggagaagtggcagagtcgacgagagggcaaagcccctgcgacccccgccaatgatcggtgagaggagtctaagaagaaggcccccgccgacgatggcgatgacggaactgtcgccactctcgatgggggggcttgcgctcacacatcccgtcgtggattcaaggccatgaggcgtgagcttctggccgccgtcccgactcatgaggtggcacggaaggcgcgttggtcggaggtgaagctcacctttgatcagagcgaccatccgacagccccggggatgaagctccagccgtctctgccaatcatcggcgtgaccccgggacacacgtggcttctcggccacgttgagctcccggtaaccttcggcgactccaccaacttccgcaccgagcggatcgacttcgacatggcagacctcaatctgccctacaacgtggtcctgggcaggcctgcgttggtgaagttcatggccgccatccactacgcctacctccagatgaagatgccgggccctagtggtctcatcacagtctttggcgatgtcaaggtcgccctcgcctgcgcagagcagcgcgccaacaacctggcagtggccacggagccgcaggccccggaggcctccgcgtcccgtgcctccaagaagcgcctcacctcggttgacgaggaaagcatgctcgtctccttcctgcgggcaaactccgacgtcttcgcatggaagccgtcggacatgcccggggtccccagggaggtgatcgagcaccgccttgccgtgcggccggacgcgcggcccgttcggcagaaagtgcggcgtcaagccccagagcggcaagccttcattcgagaggaggtgacgcggctcctggaggctggcttcatccgcgaggtgatccatccggagtggttggcaaacccggtggtcgtcccgaaggccaacggcaaactccggatgtgcatcgactacacggacctcaataaggcatgccctaaagatcctttccctttaccacgcatagatcagatagtcgactccactgcggggtgcgaccttttgtgttttctacatgcctactctggtatcaccagatccgcatggctagggaagatgaggaaaaaactgctttcatcactcttgtgggcaccttttgttatacaactatgccttctggtttaaagaatacatgccctacttttcagcgtatgactcgtattactttgagtaatcagatagggcgcaatatagaggcatatgttgatgacctggtggtaaagacgcgccaccaggatacgttgttgcaagatttggccgagacttttgatagccttaggtccacgcgcatgaaactgaaccctgacaagtgtgtgttcgtagtcgaacacgacgagagtaaaccaagggccccctcaactggtgatggcccctcgtccccccgaagcccgatgcctaaagcccccaacccctcggagggccccgaggcccccttggaaataggagaggctctggcaggcgcccccgaggcctataatcacgacatggtcctggattcccctggggcccctgagctcgagtgccccgggccagttgcccctgacatcaaggatcggccccaccgaaaggtgtagcggcccgtctactttgtcagtgaggcactccgagacgcgaaaacccgatacccacaggcacagaagatgctttacgcggtcttaatggcctcaaggaaattgcgccattacttccaagcgcatcgggtttccgtcgtaacgtcttaccctcttggccaaatcttgcacaaccgagaaggcaccggtcggttagtgaagtgggccatggagcttgctgaattcgacctgcacttcgaaccacggcacgcgatcaaaagccaggttctggctgacttcatcgcagaatggatgccggtggatgaccctcttccatccgatctcccctccctccccggagacggtggagacctgagcgccgacattcgcgccgggcactgggttatgcacttcgacggctccctcaaccttcatggtgcgggggccggagtcatgctaacttcaccaaccggggattccctcaagtacgtcgttcagcttgatttccgagccacgaacaatatggcggaatatgaaggactcctcgcagggttgagggcagcggccggaatgggcatctgccgcctcctagccttaggcgattcccagttggtcgtgaatcaggtatccaaggagtaccagtgcaccgacccgcaaatggaggcatacgtacgtgaagtgcggcgtatggagcgccacttcgacggactcgagctccggcacgtgccccgacgcgacaacgcaatcgctgatgagttgtcgtgtatcgcgtcggcgcaagccccactccctccggggaccatcgaggaaaggctcgtgcagccgtcggcacaattgggccccctgaaggaccccggcgccacgacctccgccccgagccccgataaccctcgggccttggggcccgagggggttgaccccgacccccctcgtcacgtcgcctggatgactgacatccgggcgtatctcgataataatactcttcctaaggatcgcgcagaagctgagaagcttgcgcgtatctctaagcggtacgtgctcgtagaagggaccctctaccgacgggccgccaacgggatgctcttgaagtgtatctctcgggaacagggcgtcgagctcattgccgacactcatgaggacatccttgggccgttcaaagcggctcgaggcgggtatcagcacctgtatatcgccatcgacaagttcaccaagtggcccgaggcttacccggtcgtcaaaatcgacatgcattccgccctcaagttcatcaggggcatcatgtcccggttcggagtgcccaaccgtatcattacggataatggcacccagttcaccagtgagctgttcggcgactattgcgacgacatgggtatcaagctatgcttcgcctcgcctgcccaccccaagagtaacggccaagtcgagcgagccaacgtagaaatcctcaagtgcctgaagactaagacgtacaaagtcctgaagaaccacggggattcgtggcttgaagagttgcccgccgtgctctgggcaaactggaccactccaagtcgcgccacaggagaaaccccctttttcctggtgtatggcgctgaggcggtccaacaatcggagctttccctgggttcccctcgtgtcacgctgtacaatgaggtcactcaggatgttctccgccgcgacgatcttgactacttggaagagcggaggaggcgcgcggccctgcgggcggcgtgttatcaacaaagcctgcggcgctatcatcagcgccacatccgggcccgttcactacaagttggcgacctcgtcctacgccgcgtgcagtcgcgcttggggctgagcaagctctcaccaatgtgggaagggccatacaaagtgatcggggttccccggccaagctctgttcggttaacctcggaggacggcagggagttgcctaatctctggaatatcgaacacctccgccgcttctatccatagtgttgcaattctttcttactttccaggaactcgggccaacccccgcacagcccttcggcttgtgccggcttggccgggggctaccactgtgcattactttgtatctttttccctttccaagcaataaatttggtggacgccgtt

SEQ ID NO: 73145 - DNA, 2931 bp, Oryza sativa
  Clone ID: PAT_MRT4530_73454C.1
atggggggaggccggggcatgttcgagcgcgccgccagcagctcgcctcagggcgcacttcaggcggcaggagcccttctgcgccatcctccggtggacgcggatccggaggcccccgtccgacgatggttggatgacgtcgccaacatcgtcaccactgcccagcagcagttggccgcgagtggccgttccgccgacacagccgccttcgacgcgctcaaggcctcggggatgaagctccagccgtccttgccgatcatcggcgtgaccccggggcacacgtggcctctcggcatcatcgacctcccggtgaccttcggcaaccccgccaacttccgcaccgagcggatcgatttttatgtggtggatctcaatctgccctacaacgcggtcctagacaggccggcgttggtaaagttcatggctgccacccactacgcctacctccagatgaagatgctgggccctaatggtcccatcacagtctctagcgatgtcaaggttgccctcacctgcgtggagttgcgcgccgacaacctggcggtggccacggggcggcagaccccggaggcctccgtgtcccgcgcttccaagaagcgcctcgccttggctgatgaggaaagcgcgctcgtctccttcctgcgggtaaactccgacgtcttcacatggaagccgtcggacatgcctggggtccccagggaggtgatcgagcaccggcttgctgtgcggccggacgcgcggcctgttcggcagaaagtgtggtgtcaagccccggagcggcaagccttcatccgagaggaggtggcgcggctcctggaggctggcttcatccgccctacctttcagcgtatgactcgtattactttgagtaatcagatagggcacaatgtagaggcatatgttgatgacctagtggtaaagacgctccaccaggatacgttgttgcatgatttggccgagacttttgatagtcttaggtccacgcgcatgaaactgaaccccgataagtgtgtgttcggtgtgccggcgggcaaactcctcggttttctagtctcctcccgaggcatagaagctaatcctgagaaaatacgcgcgatagagaggatgtgcccccccagcaagcttagggatctacagtgcgtcgctggatgcatggccgccctaagtcgattcatatcgaggctggtagccccaggactagaggagccgttgctactctacttggctgcaaccccccatgcggtgagtgccgccctagtagttgaacgcaacgagagtaggccaggggccccctcaactggtgatggcccctcgtccccccaagacccgatgcccgaagcccccaacccctcggagggccccgaggcccccgcaggaagaggagaggctccgacaggcgcccccgaggcctacgatcgcgacatgatccgagatccccctggggttcccgagcacgagtaccccggaccagttgcccctgacatcgcgaaccggccccaccggaagatattgcacaaccgagagggcaccggtcgggtagtgaagtgggccatcgagcttgctgagttcgacctgcacttcaaaccgtggcacgcgattaaaagccaggttctggctgacttcgtcgcagaatggacaccggtggatgaccctctcccatccgatctcccctccctccttggagatggtgaagacccgagcaccaacattcacgctgggcactgggttatgcacttcgatggctccctcaaccttcatggtgcaggggctggagtcatactaacttcgccaactggggatgtccttaagtacgtcgttcggctcgattttcgagccacgaacaatatggcggaatatgaaggactcctcatctccaaggaataccagtgcaccgacccgcaaatggaggtgtacgtacgtgaggcgcggcgtgtggagcgccacttcgacggactcgagctccggcacgtgccccggcgcgacaacgcaatcgctgatgagttgtcgcgtatcgcgtcggcgcgagccccactccctccggggaccttcgaggaaaggctcgcgcggccgtcggcacaattggaccccccgaagggccccggcgctacaacctccaccccgagccccgataacctgcgggcctcggggcccgagggggttgaccccgacccccctcgtcacgtcgcctggatggctcacatccgggcgtacctcgacaataatactcttcccgaggatcgcgcggaagctgagaagcttgcgcgcatttctaagcggtacgtgctcgtagaagggaccctctaccgatgcgccaccaacgggatgctcttgaagtgtatctctcgagaacagggcatcgagctcattgccgacgcccatgagggtgagtgtggggtgcattccgcctcgcgcaccttggtcggtaaggcctttcggcaaggtttttactggccgaccgcgttgcaagacgcacaggagtgggtccagcgatgcaaggcgtgccaattccacgccaagcaaacctaccagccggcccaggctttacaggtcatcccgctctcttggcccttcgcagtctgggggctagacatccttgggccattcaaagcggctcaaggtgggtatcagcacctgtatgtcgccattgacaaattcaccaagtggcccaaggcttacccggtcgtcaaaatcgacaagcattccaccctcaagttcatcaggggcatcacgtcccggttcggggtgcccaaccgtatcattacggataatggcacacagttcaccagtgaactgttcggcgactattgcgacgacatgggtatcaagctatgcttcgcctcgcccgcccaccccaagagcaacggccatgttaagcgagccaacgcagaaatcctcaagggcctcgggccgcttcggtcgctcggactttga

SEQ ID NO: 73146 - DNA, 650 bp, Oryza sativa
  Clone ID: PAT_MRT4530_73455C.1
tcttgtctatcaccttgtacaaatgctgatgtgaccatggctactatggatacaatcgttgctcacatcatggatgaacaagaagatatcaaaatcaagtcctccaagtgctggaatccgattcggcaacctgctacactgctgacttcaaatggccgccaaatctgtatacgacctttgttttcaacccgtgagtacttgatagaaagctctcagagtcctctttccaagggatccagcctcatctccgaattccatatcgtttggctgcaatcatagaaacaagatgttgcgtcacctataatcggcctatgggcctaaaacttcgtttgggaccccggcccaagtggggcccatgtggggtgtgccccaaacaggtggagcacgaccctagagatccctaggtcgtcctcccacctccttaaataattaggaataaggttgatttgcattgggaagatcaacaacccacggagaggtgcatcgatcgctaagacgcaacacaacaactagttatctcaactcaccgaaagatcggacaaaacaacaaccttgagcgtatcgagtgaaactcagggtttatcaggtggttgcaatcatggagaggtctcctggtagtgttattgaaatttagaattatagtaaccgag

SEQ ID NO: 73147 - DNA, 321 bp, Oryza sativa
  Clone ID: PAT_MRT4530_73456C.1
atgaaggttgagggagccatcgaagtgcataacccagtgcccagcgtgaatgttggtgctcgggtcttcaccatctccaaggagggaggggagatcggatgggagagggtcatccaccggtgtccattctgcgacgaagtcagccagaacctggcttttaatcgcgtgccacggtttgaagtgcaggtcgaactcagcaagctcgatggcccacttcactacccgaccggtgccctctcggttgtgcaatatctaaccaagagggcaagacattacaacggaaacccgatgtgcttggaaataatggcgcaattttcttga

SEQ ID NO: 73148 - DNA, 495 bp, Oryza sativa
  unsure (1)..(495): unsure at all n locations
  Clone ID: PAT_MRT4530_73457C.1
ctgtgcaagctcaattatattcaatataatccttacacgtgttgcataacttagaaaatagggcatcatgtaggcaattgtcagaatgacacatgattaagccaatccaaaagaaaaacacaaacactgctgaaagtatatatagcgaatcaaattattagaacatacattattattaagtaacaaaagtaatggatggcaagtttcacctagtttcttcaccatctcctctcagttttgctttctttttcctgttctcccagaggccccaaatgaccagagcgggagaggcccctcctctcccagggattatggcggccaacatttcacccatggcaggagagcaaaaaaactgtggtgggagaacaaaaaaganttcatcttttcttctccccagtactagaaataggacgatactttggacgttgacatcagattactgagtgatgtcattgtcaaactcaaagaatcaccaagggggatgatcctggtggc

SEQ ID NO: 73149 - DNA, 919 bp, Oryza sativa
  Clone ID: PAT_MRT4530_73458C.1
cgggctgcaggcactagctagctagctctgatatcctacaccggccttagcaaatagccatatatacccttaaggataagctccatggcatccaagatcctcgtgtttctcttggccatcaacctcctcttcttcacgacggccaatgcctgcggctgcgcgtgcggcaaatgcccgacgccgccgcccccggccctcccgccgccgccgcctccgactccaactactccgtcctaccataacaagtgccccgtgaacacgctcaagttcggggcctgcgccgacgtgctgggcgccatcagcggcgaggtcggccaggtgcccgcccagccgtgctgcagcctcatcagcggcctcgccgacctcgaggccgccgtctgcctctgcacggccatcaaggccaacgtgctcggcgtcgtcgtcaacatcccggtgaagctgagcctccttgtcaactactgtggcaagtgcgtccccagtggctacacctgcgcttaaacaaacttgatgcatatatatatgcgtggctatctacactcgtagccgccgccgccgccgccgcctgtgcacgcttgcatagttgcatttacgctgcatttatatgtgcatgcatgcatatatagctataccaccgttgatcttctgtcgcaaacgttccaccgcggttctgcagaactagagccgttccagtcgatcgagtgtacacttattggtgtgtatttgtttcataaatttgctacgggtttgatcgttgttctgtttacaaaggttgcaataagttggagtcattatatcgtgtatttgtaatagcacgaatttgaaagttgtgaatcgttaatatattttcttattgtccaaaaaaaaaaaaaaaaaaaaaaaaaaaaaaaaaaaaaaaacaaaaaaagggggggcctcgtgc

SEQ ID NO: 73150 - DNA, 340 bp, Oryza sativa
  Clone ID: PAT_MRT4530_73459C.1
atggccgccaccgcgctcaccaaggtgaggcggctccttgtggtgggcgtcaacgacgcttgtagtgctcgtgctcgtgcggagcggatgcgtgccccgctcgccgacgcccttgccgaggagcactcctcctgggttcctgggttgccccttcccccatccgtcgctgtgccctcctcctctggcgctgattcatccgtcgaggatctcctcgcgctcatctacttcggctcccggccctcttctacgtcaagtgccgcggaacccccacgggagccgctggagccggtggctgtgtccttgcaggccgccgccgtggaggattgccgccccttcttcg

SEQ ID NO: 73151 - DNA, 773 bp, Oryza sativa
  Clone ID: PAT_MRT4530_7345C.1
tttttttttttttttttctgctggagacaacatacgagagattcgagaggccaccccgcgatgcgaggttacaccggcaacacaatcaacaaaccgtagatctttacaaataatgacaagaacataataaagaatgactacataaagaaacaaataataaacatctagctactgaacttttgtcagtattgacctaaaaaaataaacacgggatttaatgtaggattaatacctacttccaccgcaacaaaattagctacctactccaaacctaagctacaaacttatcctacaaacaaaatgttaaaacggtcgcagcgcctctgcagccacggattgaagttcccccaagcaggacagaagctgcacaagcccccacggaagcggtacgtctgggtatccacaaggatgggcacacttcaagtcaaacatgtcaattaacgtgagatcagacccaaagcaagtatcagcatgaagacatggccaccacaattgcttgcaatttcttggtgcatccacaaccatccatgtttccagtagaagccgcgcaagatgaccgggtgtcatggtttttattctctgcaaagttgatacgtctcatctagctaaaaaatccagagtttagaaccaatgtatccgttaaaatgtcaaggaacatggccttcaattcgggaatatctaccataaggaaccctttgcactgcccgtggaaaatctggcttgaagcgcttatcaaaactgggtgccagtgaccttggagaactggaccgttt

SEQ ID NO: 73152 - DNA, 234 bp, Oryza sativa
  Clone ID: PAT_MRT4530_73460C.1
atgaactgttcctcttttatggttttcactgcttcgtttccggtcggtgtttgccgtgctctcgctatctctgatgaggctctgagcaaccgacgtgattcatggaagggaattgaagaaccagagggagtacatgctgataaacctaggactgagaagaaaagggtcagaaccgaaaagttcgagactaatgctgaaaagatcgagactgagaaatttagtcctaagcagtga

SEQ ID NO: 73153 - DNA, 318 bp, Oryza sativa
  Clone ID: PAT_MRT4530_73461C.1
cttggactccatgcttgccaatcggcgctccctatccatgaaggccctgcggcggctacgggagaaggggcgtggtcggcgtggcctggcggctgcggtgggaggagcggcgtcatcggcgtcgtcggcatggcgctgcggctgcgggaggaggagtcggtgggcagggcagcggcaacgttgcggcctgtggcgggccggtggtgcaaggagaagggcaagggcgcgaggcagtgctgcggcggcgcaagagaaggccacggcggcagcctgcgacagcatgcgcaagagaggcgcctcgggccctcggctgactga

SEQ ID NO: 73154 - DNA, 459 bp, Oryza sativa
  Clone ID: PAT_MRT4530_73462C.1
gtggttgcaaccaagttgtgtgtatagcataataatgtttaccagatccaacatacaatctcactggaccgtttgaatgccaaggcttatttcaccagtcgcagtcccaggatacagagacatgcttaagcattgttaacaaatggaggaccaaaatttctaccgaaaaaaacgatgagaaggtacacattttttgactgtttgtattgataatccaccaacaattgcccaataatagacactctacatttggagacactttctaaaagatgtagctgttaccttggggtttggggaggtttgacaacaagcattcatcaaccaaaaaggagatgggactttggatcaaaacagtatgacaagttttaatatatttcccaacatgacccactggagaaatgaactgtgtttgttttttttccaagaacatttgagcctcaaaattgtcggccaaaaaca

SEQ ID NO: 73155 - DNA, 300 bp, Oryza sativa
  Clone ID: PAT_MRT4530_73463C.1
atggcggtgcgggcggcgggtggctgctccacggcggcggcggcgacgctcgccttcttccgcctccgtcccctcggccgcgccgtccgcccggactccgctcgcgccggctggcacttctccctgtacggcggatgccggggacgccaggtccatggcctcgtcgactccgtcctggaggagctccgatcacagaggcgtggtcgggtcgttcgctccaagctgggctgtgtgcacgaaccccccgttcagcccgaccgctgcgccttatccggtaactatcgtcttgagtccaacccg

SEQ ID NO: 73156 - DNA, 374 bp, Oryza sativa
  Clone ID: PAT_MRT4530_73464C.1
gacatgcacctcgcttacgtcagcaaggggcggccggcgtcgacacgctggccccacatgtcagcgagtcaaagggggagggcgcacggtgcacatggtccacacgtggcctcggcacccggcgacgtggaatggtgtcgggcggccggagtacatcggcgcgcacggggacggtgacgcaccccaagaggcggcggtcggcaagaaagggggacgggaaaaaaaagggaagggaggagaggtcctcaccggaagcggcggccggcgcggaggaagatgacggcgacgacgattgcctgatggcggcttgcgaggacggagggcggacggggtcgctcttgaccttcagaaggagaagagggagttagggaggg

SEQ ID NO: 73157 - DNA, 1283 bp, Oryza sativa
  Clone ID: PAT_MRT4530_73465C.1
ccggccgggatctccccatccgccattgttgtgttctcatcctcttcttccatctctctctctgtgcgtgctctccgacgtctctcctctccctctcgcgtgcttggtcgctgtaggagggggttcaattgatttgaggtagccatggctgaggcactgtgcagcggcagcgtcgcgtccccgtgcggggaggtgggtgtggggttcgccgccggccttgtgaggggcgccgcggcggcggcggcgctcgcggagtctgtgccgattggtgggtacagcagcaagagcacgttcccgagtgggagggtggcgctcacggagaggaaggcgaggcccctgccacggaatctcgaagcggcgcatgggcagatgaacctgacgattgggaaggccatgaggtggtgggagaagtgcctgcagcccaacatgagggagatcgagtcggcgcaagacctcgccgactccctcctcaacgccggcgacaagctcgtcgtcgtcgacttcttctccccgggctgcggtggctgccgcgccctacaccccaagattgctcaactagccgagaagaacccggaggtgctgttcttgcaagtgaactacgagaagcacaagtcaatgtgctacagcctccatgttcatgttctgccattcttcaggttctacaggggagctcagggccgtgtcagcagcttcagctgcacaaacgcaactatcaagaagttcaaggatgcacttgccaagcatggtccggacaggtgtggcctcggcccggcgaaggggctcgaggagtcggagctcatggcgttggccataaacagggacctgaacttcacctacacaccaaaccaagaccttgtcccaattgcagacgccctcctgaaggaagctgctgcacctggaggtccatggctgccattgcccgcaacggcgacgcagctgttcattcagggatctgagaattcgctgttgtcatctggaagatagccggtggttcgacggcaagattggcttcaatttgtacatatttttccgcttgttctagcctgatgttatgacatgctgatgcgcaggctcatgatttttgtttatgagcctgctgagtgctggaggcatgaaattccttgcctgacggacctgtatgcgtgatgcacgtctgcatcgaaaattgaacatgctagattcattcatgattgaaaaaaaaaaaaaaaaaaaaaaaaaaaaaaagaaagctttgagttctgaatgagtgtacttggttgtgtcgaaaaaaaaaaaaaaaaaaa

SEQ ID NO: 73158 - DNA, 1716 bp, Oryza sativa
  Clone ID: PAT_MRT4530_73466C.1
atggcggcttgcgaggacggagggcggacggggtcgcccttgaccttcagaaggagaagagggagttcgggaggggaggaccgatgcggggtgaccggtaacgacggccgaccgcgacaatatgagaaggatctcaccgacgaccgaggaaggaggagctccggcggatttccggcaaagaggggcggcgaccgaggtcctcctcgtccttgcggagctgagggaggcaacggcgcgggtcagcgtcgaccgaagcggcggcgcgacgcggctggagtcggcggcggcggcggagagagggcgtgggggaaacggcgcggacgtgggcggcgaccgcgtccacgcatgcgcgggagagggaaccacgcgaggaaggcggcgacgtggggagcacggggtggccatggcggcggttggggcgacgggaggttggggaagaagatgacaggtggggcctcgggtcccacctgtcggggagagagagaagggaaaacgggcgagggagtggtgaaccaagcacagaggttcctaagggggggtctattgatgcctgacatgatggtggtggaagacaagataaagtgttcacaaatattaagagacaaagaattggcttttaagttacagtatgaagattcaactatgatacagctgaatgtttgtgaatcaaagaaatcctcaagtgaagaaggggaggtgcttggtcaggtggacaagatacagtcttctcaggaacagttatttggaggagggcagataaatgatcagatagacagcatatctagaaaagttgcagaggggatcctagaattggagatggatgaggaggataaggagaaagtttctttgaaagacagtgaagattatatggattctcaggaatcagaaggaaaatccaatgtgcatttgattaaagagttggacttggctagaattaacctctttatgaaagagggacaaaactctgattgccattttgatgatgtgtccaatagggagataaatcctgtgatacttgaacttaatgattctaaaaattccggagaggaggttgatgactttgaggaaattgagtttatgctcaagcaaatacaatcttcagctagaaaaatgaaacaaaaaaagggaaaccttgagattttcaaggtcaggggggattctagtgggtgtaaacatatacaagttatcatttgtaaatgttactatggagaattttcatatcaggaaggtatcattactgggcaagccgagcttttgacatacattactcacttttacaatgagctctttggtaatcccaaacagaataacttgtttttaaacctagaggggatcacaaaggtagattttgagaaggcctatgacaaagaggactgggtgtttatatatagaatgcttgaagcaaaaggctttcctgatatgttgtgtgattggatcatgagagtaattaaaggaggaaaagtagcagtgagagtcaatgatgagataggtccttactttaataatcataatgggctgagacagggtgaccctctctcccctctgctattcaatttggcagctgaagcactcactacgttaatacagagagctaaaaacaacaatctgactgaaggtctgactgtcagtggtaatgaaaaggtggccatcttgcaatatgcaaatgacactattttcatgctgtctgataatttgaattatgcaaaaaaaatctaa

SEQ ID NO: 73159 - DNA, 2115 bp, Oryza sativa
  Clone ID: PAT_MRT4530_73467C.1
tcaagatggcgaaccggatgaggcggcgacgacacccccggcaaaacgcagtgctatcattgttttcttcttgaatcttattcccgcctgccaccaaatctgtcttcgcttcagccttggagccggagccggaatctgcaccaccgtcctcctggagctcatggatggattgcttggagtgctccatgagttatttttcctgaaatctctcaatgctgggatccacggattcacccatcgctgaagatactggagaaccccgcgccctccgtgtctacgcgtcgtggcgaagtcctgtcgatgtcgttgctccttgctcggttcgtgacctccgccgctgccattgctagatcgcgacggcctccatgtcctgtgcggcgaagaggaagcggatgcccaggaagtgcgagtaggcgcgcacgaaggcggagaatccgatcccgacgtcttgtcctggccggcgacgacgagcggttgcggaagtcggcgaggtcgaaagggacgcggcagatcgaggcgcgccgcgcgtggggcgagggtgaggtcggaccgcagccgcaagccgtgcgcgagcacgaggcgctcccctccgcgcgggcccaagcacaccacacctcaggtttcaccctcgtccccagcgggcaacgggcagtcccctctcgtgcctaggtgaatccggaagcgacagaggccgtcgcagggcccgccccgctccatcacgcccacccttgcctgggaaaaggacctcgctgacgtcagcaaggggcggccggcgccgacatgcgggccccacacgtcagcgagtcaaagggggagggcgcacggtggacatggtccacacgtggcctcgggtgcgcctccaccacgtggacggcccagatcgacctgagccgatcgggcggccgaggggagcggcagccaggggcacaggcgcggcacgaagccggcccggccgagccaaggcgcggcggcggcggcatgcggccaccggcggcagcagccggcgacgtggaacggcggcgggcggccggaggacagcggcgcgcacggggacggcgacgcaccccaagaggcggagatcggcaagaaagggggacgggaaaaaaaaaggaagggaggagaggtcctcaccggaagcggcggccggtcgtcggaggaagatgacggcgacgacgattgcccgatggcggcttgcgaggacggagggcggacggggtcgcccttgaccttcagaaggagaagagggagttcgggaggggaggaccgatgcgggagaaggatctcaccgacgaccgaggaaggaggagctccggcggatttccggcaaagaggggcggcgaccgaggtcctcctcgtccttgcggagctgagggaggcaacggcgcgggtcagcgtcgaccgaagcggcggcgcgacgcggctggagtcggcggcggcggcggagagaggtggttcgcgtggctacggcgctacggaggtggagaggggaaatggagcggtggccgagcttgcccgggcggcggcaaagctggcggtggcggcggcgcagcgcggagacggcggtggtggctgaggcacgcggctggagaacgctggcgagcggcggcaatggggaccggcgtggggagagcggggaaaagcgcagggagctcgggatggagtgggaaacgaaagaggggagcacgagggtgctttatatagggctcggggatggagatcgtgcccgggagaggcgggatcggctggcgacgtggggtggcgaagtggagctcgggatggcaacggttttcgcagggcgtgggggaaacggcgcggacgtgggcggcgaccgcgtccacgcatgcgcgggagagggaaccacgcgaggaaggcggcgacgtggggagcacggggtggccatggcggcggttggggcgacgggaggttggggaagaagatgacaggtggggcctcgggtcccacctgtcggggagagagagaagggaaaacgggcgagggaggtaaagcagacttgagggagagagagagccgagcgggccgagggaggggaaggaagacttgggccgaaaagggcccaaagagaggaaggaggattttatttgttttctttttatt

SEQ ID NO: 73160 - DNA, 4597 bp, Oryza sativa
  Clone ID: PAT_MRT4530_73468C.1
atgcaggcccgggccgtcgggtggggcaggttccccgtactggtgcgcgtctggtgggtggtctccttcgtgctctgtgttggcatcgcgtacgacgataccaggcacctcatgggcgatgatgatgatgatgaggtggactacgctcacatggttgccaacttcgcgtcggcgccggccctcgggttcctctgcttggttggtgtcatgggttccaccggtgttgaattggagttcaccgacgacgacagcagtgttcatgaaccgctcttgctcggtgggcagcggagagacgccgacgaggagcccgggtgcttgcgggtgacgccgtatggcgatgctgggattgttagccttgcaacattatcatggcttagtccgctgctgtcagttggtgcgcagcgaccacttgagctggctgacatacccttgatggcacacaaagaccgtgccaaatcctgctacaaggcgatgagcagtcactatgaacgccagcggatggagcgccccggcagcgaaccatcactggcatgggcaatattgaagtcgttctggcgtgaggcagcgatcaatggtgctttcgcagcggtgaacacaattgtctcctatgttggcccatacctgatcagctactttgtggactacctcgggggcaaaattgaattcccccatgaaggttacatccttgcctctgtattttttgtagcaaagttacttgagacgctcactgctcggcagtggtacttgggcgtggatgtcatggggatccatgtcaagtctgggctgacggccatggtgtacaggaagggccttaggctgtcgaattcctcgcggcagagccacaccagtggtgagattgtgaattacatggcggttgatgtacagcgtgtgggggactatgcatggtactttcatgacatctggatgcttccactgcagatcatcctcgccctcgccatcctgtacaagaatgttggaatcgccatggtttcaacattggtagctactgtattatcaattgctgcctcagttcctgtggcgaagctgcaggagcactaccaagataagcttatggcctcaaaggatgagcgcatgcgcaagacatcagagtgcctgaagaatatgaggattttgaagctccaagcgtgggaggatcgatacaggctgaagttggaagagatgagaaatgtggaatgcaagtggcttcggtgggctctgtattcacaggccgcagttacatttgttttctggagttcaccaatctttgtcgccgtgataacatttgggacttgtatattgcttggtggcgaactcactgctggaggtgttctttctgctttagcaacatttaggatccttcaagaaccacttaggaatttcccagatcttatctctatgattgctcagacgagggtatctttggaccggttgtctcactttcttcaacaagaagaattgccagatgatgcaactataacggttccacatggtagtacagataaggcaatcaatataaatgatgctacattctcttggaacccatcttctccaacccctacactttctggcatcaaccttagtgtggtgaggggtatgcgagtagcagtgtgtggtgtcattggttctggcaaatcaagcttgttgtcttctatactcggcgagatacccaaattgtgtggtcaagtgaggatcagtggatcagcagcatatgtccctcagactgcctggatacagtccggaaacattgaggagaacattctttttggcagtccaatggacaaacagcgttacaagagagttattgaggcttgctccctgaagaaagatcttcagttgctccaatatggagatcagaccatcatcggtgataggggcattaatttgagtgggggtcagaaacaaagagtacagcttgcaagagcactataccaagatgctgatatttatttgctcgatgatcccttcagtgcggttgatgctcatactgggagtgaattatttagggaatatatattgactgcactagcaagcaagaccgtaatttatgtaacccatcaaattgagtttctaccagctgctgacttgatactggttcttaaggatggtcatatcacccaagctggaaaatatgatgatcttctccaagctggcactgatttcaatgctttggtttgtgctcataaggaagctattgagaccatggaattttccgaagattccgatgaggatactgtctcttctgttcctatcaaaagactgacgccaagtgttagcaatatagataatctgaaaaacaaggtgtccaataatgaaaaaccatctagtacgcgtggaataaaagaaaagaagaagaagcctgaagagcgtaagaagaagcggtctgttcaagaggaggagagggagcgaggaagggttagcttacaggtttacttgtcatacatgggagaagcatacaaaggtacactgatacccctcattatcctggcccaaaccatgtttcaagtacttcagattgcgagtaactggtggatggcatgggcaaacccacaaacagaaggagatgcacctaagacagacagtgtggttctcttggttgtttatatgtcccttgcctttgggagttcattgtttgtgtttgtgagaagtcttcttgtggctacatttggtttagcaactgcacagaagctgtttgtaaagatgctaaggtgtgtttttcgagcgccaatgtcattctttgatactacaccatctggtcgaattttgaaccgagtttctgtagatcaaagtgtcgtggaccttgatatagcattcagacttggtggatttgcatcaacaacaattcaactacttggaattgttgctgtcatgagcaaagtcacatggcaagttttgattcttatagttcctatggctgttgcatgcatgtggatgcagagatattatattgcttcatcaagggaattgactaggatcttaagcgtacagaagtcgccggtgatccatttgtttagtgagtcaattgctggtgctgctacaatcagaggttttggtcaagagaaacgattcatgaaaagaaatctttaccttcttgactgttttgctcggcctctattttccagcctggcagctattgaatggctgtgcctgcgaatggaattgctctcgacctttgtcttcgctttttgcatggcgatactagtgagcttccctcctggcacaattgaaccaagtatggctgggcttgctgtcacttatggacttaatttaaatgctcgcatgtcaaggtggatactgagcttctgtaaattagagaatagaatcatctctgttgaacgcatttatcagtattgcaagcttcccagtgaagcaccactcatcattgagaatagccgtccctcatcctcgtggcctgagaatggaaacattgagctggtcgatctcaaggtacggtacaaagatgacctgcccttagttctacatggaatcagttgtatatttcccggtggaaaaaagattgggattgtggggcgaactggaagtggtaaatctactcttattcaggcccttttccgcttaattgaacctacaggagggaaagttatcatcgatgacgtcgatatttctagaattggcctgcatgatctgcggtcacggttgagcatcattccccaggaccctacgttgtttgagggtactatcagaatgaatcttgatcctcttgaagaatgtactgatcaggaaatttgggaggcactagaaaagtgtcagctcggagaggtcattcggtccaaggatgaaaagctggacagtccagtactggagaatggagataactggagtgtgggacaacgccagcttattgcattgggtagggccctgctgaaacaggcaaaaattttggtgcttgacgaggcaacagcatcagttgacacagctacggacaatcttattcaaaagattattcgcagtgaattcaaggattgcacggtctgcaccattgcacaccgtatcccgacggttattgatagtgacctagtcctggtgcttagtgatggtaaaattgcagagtttgacacaccccagaggctcttggaggacaagtcctccatgttcatgcagctagtatctgaatactcaactcggtcaagctgtatatagagaggcttagcttaaaatcccccacaccaagtaggaacagggaggtaggatagccacatctgccagtggactcacaccatagaagtaccaacatcatagggcaagacacaagccgaggtgtatatgagcggaaacaaaatgttccctgacgtgaataaaccatggaatcgatgagggaacgcagcgggcagcaccacgggaggagttggtgagattacccgaagctctgatgcttctgaatgtataaacaatgcggtactacttctcccttgcatagtggaaaaagggaaggcaatgttcatgggtaataaaggggtaacaagtttcattttggcaccagattggagtgctttggtctactgtatagaactcacctcacctgtgcagtaaaacataaagcatatagtagttaaaaaaaaaaaaaaaaaaaaaaaaaaaa

SEQ ID NO: 73161 - DNA, 392 bp, Oryza sativa
  Clone ID: PAT_MRT4530_73469C.1
gtcaagagcgaccccgtccgccctccgtcctcgcaagccgccatcaggcaatcgtcgtcgccgtcatcttcctccgcgccggccgccgcttccggtgaggacctctcctcccttcccttttttttcccgtccccctttcttgccgaccgccgcctcttggggtgcgtcaccgtccccgtgcgcgccgatgtactccggccgcccgacaccattccacgtcgccgggtgctgccaccggtggccgcatgccggcgccgcgccttggctaggccggaccggctaagtgcccagcctgcgcccctggctgccactccccttggccgcctgatcggctcaggccgatctgggccgtccacgtggcggacacgcacccgaggccacgtgtggaccat

SEQ ID NO: 73162 - DNA, 1476 bp, Oryza sativa
  Clone ID: PAT_MRT4530_7346C.1
ggccggccgggacgtacgtcgttcgtcccgctctcctccgtcgtcctccctgcccaccgtcccccacacccactccccgccgtcacgtccttccagaaccacctccacgactcttccaatcccccgctataagacgcttctccactcaccactgcaaccctcacccagccagctcgagcgagcgaagccagcagcagaagcagtagagagaaagtagagagatggaggggaaggaggaggatgtccggctgggagccaacaagttctcggagaggcagccgatcggcacggcggcgcagggctccgacgacaaggactacaaggagccgccgccggcgccgctgttcgagccaggggagctcaagtcgtggtccttctaccgcgcagggatcgccgagttcatggccaccttcctcttcctttacatcaccgtcctcaccgtcatgggggtcaacaactccacctccaagtgcgccaccgtcggcatccagggcatcgcctggtccttcggcggcatgatcttcgccctcgtctactgcaccgccggcatctccggcggccacatcaacccggccgtcaccttcggcctcttcctcgccaggaagctgtccctcaccagggccctcttctacatggtgatgcagtgcctcggcgccatctgtggcgccggcgtcgtcaagggcttccagaagggcctgtacgagaccaccggcggcggcgccaacgtcgtcgcgcccggctacaccaagggcgacggcctcggcgccgagatcgtcggcaccttcatcctcgtctacaccgtcttctccgccaccgacgccaagaggaacgccagggactcccacgttccgatccttgccccactgccaatcgggtttgcggtgttcttggttcacctggccaccatccccatcaccggcaccggcatcaacccagcgaggagccttggcgctgccatcatctacaacaggggccatgcctgggatgaccattggatcttctgggttggccccttcattggcgctgcccttgctgccatctaccaccaggtggtcatcagggcaattccattcaagagcaggtcgtaacctgcatcagctattatcactgtcaagatgccaatccagagcaagctgtttctgatgggcgcggctgtttcccgctgcctgctttgttagtaattattgtggagtcgacgttcctcttcaagtttgttgtactactgtttttatctgaacacagacttgtaatttcagtactcagttgtgtatccctcttttactatgtgcaaattaagctatcctcctcctattggagttcggttcagctgccatctttctgcaattgccaacacggctatccacaaaaccttaacatcaaaagggataaggcatagtgggtgtcgagaagaataatcattgggttccaaattgagacgaaacctaaaaaaaaaaaaaaaaaaaaaaaaaaaaaaaa

SEQ ID NO: 73163 - DNA, 2853 bp, Oryza sativa
  Clone ID: PAT_MRT4530_73470C.1
atgtcggtaaagaatgcttcatctatatcttttgaggatattgagaaaagtatttccaactggaagattcctaaggttaatattaaggaaatatatcatgtagacacaaatatccataaagttctcactctcaacttacaaacatctagttatgaactagaaccggggagtgaaaacatctccgttacctacagagtttactacaaagccatgacaactttagcaccttgtgccaaacattatacaccaaaaggcctaaccactctccttcaaaccaatcctaataacagatgtactacccccaaaaccctgaaatgggatgagatcaccctgcctgagaaatgggttttatctcaagctgttgaacctaagtctatggatcaatcagaagtcgaatccttgattgaaacaccagacggagatgttgagataacatttgcttcaaaacaaaaagcctttctccagtctagaccttctgtcagtctagattctaggcctaggacaaaatctcaaaatgttgtctatgctacctatgaagacaacttcgacgaaccctcaatctcagacttcaacatcaatgttatcgagcttgatgatgactttgttattgctttagaagaagaagaatttgaaattgacaaagaattgcttaggagagaaataaggctccccaaaaatagaactaaaactaaaagatatcttgaagaggttgacaaatcattcagaatgaagataagagaagtttggcataacgaaatgagagaacagaggaggaatattttcttctttgactggtacgagaatagccagattatatattttgaagaattttttaagacccagaagaaaggaaaaggggatatcagaggaaaaagttgttttccagaaagcacttatgagaaatccatagagaataatttcctcgaatatttagtagaacaacagaaaactcaagatctatcccctgaacaacaagattccaaaacaattcctatagaacccattattctaagaagccatgaagaaccttcttcccactctcaatttgagatctatatccaacccaatccaaataaaacactttgttaccattctcaaaccaaaaactcctttgaaagaaaatctcaaaaccaaatctcggctgaagccttatgcacaaataatgaaatcctagtccataagcgagatctttttggaagcatatttgttatttctgatacaaatcaatttggcacttttaaccctgaggaagaaaggaccaaaagaaaacttaagattaatgacctcttccaagaacaaaattatactaaaaaggaattaaaagacttaaagggtaaaattcgaagtctagaattacaaaataatagttgcatgggccaagatgaagaggttgtcaactccatcaacagttatgttaagcagaaatggtatgcagaatttctcggttataaaattcaatatgatcaagtccaaccagtagcaagagtaatagaatttgcagaaaaatttccagatgagataaaagataaaacacagttgcaaagatttctagggtgtttaaactatgtctccgatttttataaagatcttgcaaaagacagaaagattttaaccgagaggttgaagaaaaagcctctagcttggacagctaaacatactcaagctgttaagaagatcaaaggtaaggtcaaaaccttgccctgtctttatatcctagatcaagatgccttcaaaattatcgaatcagatgcctcagatcatggttatggaggaattcttaaacaaaaaaaggattccagagagcagctggtcagggctatggcacctaaaagggacttatcagcccaagggagaactacagaaagttcaccaaataagcataaatataatgaactaggaaatattattcctagaacccctacagttcaagaaaagtatgggaataattcatcttatatcctcaatatagaggaagtaatcctgccattagaatttggagactctgatctcaatattatcaagattatgggaaagtatttcccacaacaccaatattttatccctgaatatccagggaaagatcaaaattattatgagaccatattatgcgagacaagaagtgcacagatattccatacaaggaatggtgatgaattgggattcacaaaattattgatccaaaaaattataagtatcgatgattgggataaatcatcaaatccttatgtagccaggactatatattctacatcctgtgcaaataaaagatataactattgggattatcagaaggcctgggaaagagtactcctcgtacaaaattcccagatgaagcattcatggtttattcgcttcaaagaaggatgtgaggagataccactgtggtttttcagtaattggtggctgaaagcaggggccattcctgaaatcctaccacgagaaatcatcaaagttattacacaagaatcaaaaaaggatctcaaggaatatccttttatccttatgcaattttgtgccgaaacagggatgccttggatactaaaatgggacctcaatattcaaagaatggagttcccagcaaccttaaagcgaaactattatgcaagatggtgggataagtttacaatcacaccagtaatagaaggaagaaagtttcgagccaaaaacaagaaatctcatgtggctcaattaaaagaagatataacaagagaattattaaaggcaagacccgagttgacaaagggagaattgcaacttcaagtatatgaaactatgtttaaaagattggaagaatccccaaaatctagttctacatgcagaagtctagacgaagatatggtacaatgcagctaa

SEQ ID NO: 73164 - DNA, 537 bp, Oryza sativa
  Clone ID: PAT_MRT4530_73471C.1
ccccggaacaaacccggcccgcccaaccaaaggcccgccgccgcaaaggggaaggcggaaaccgcttgcccggcaccaccggcaacggcgcgggcacggaacgcggaccgcggcggcaccaacccgttcgaacggccaccggcggcggcagcgcgtcccgaggacccccgggaagcggccaacgaaagggaagaaaaaggaaaaggaggggagtgctcaccgagatgcacgacggcaaaggggcggccgacggcaaagaacggtggcgacggggctcctcaggaagacgacgcgacggagctccggcgacgggcgtcgctcgggatggggcggacgggctcggcctcgatcggcgaccgaggaaggaggagctccggcggatttccggcgaagaggggcggcggccgaggtcctcctcgtccttgcggagctgagggaggcaacggcgcgggtcggcgtcgaccgaagcggcggcgcgacgcggctggagtcgggggcggcagcggagagaggtggttcgcgtggctacggcgctac

SEQ ID NO: 73165 - DNA, 1028 bp, Oryza sativa
  Clone ID: PAT_MRT4530_73472C.1
ccactaaagcaaggcccattcagatgaatagtcgactttaagaaatttgcaagcaagaaataaaaaacctgctagataaaagcttaataaggaaacgttcctctcctttgagttgtgcagccttctatgtagaaaatgctgctgaaaaagaacgaggagttcctcggctagttattaattacaaacccctcaataaagttctacaatggataaggtatccaataccttataagcatgacttaatacaaaggattcagggttcaaagatatattctaaatttgatatgaagtctgggttttggcaagtccaaataaaagaagaggatagatataaaactgcttttactactccttttggtcattatgagtggaacgtaatgccgtttggtttaaaaaatgctccttctgagttccaaaaaatcatgaatgagattttccttccctttacatcctttattatagtttatatagatgatgttttaatattttcccaagatgttgaccaacattggaaacaccctaatatattttataaaatcatagttcaaaacggtttagtagtctctgctaagaaaatgaaacttttccaaactaatgttcagtttctcggttataaaattcaatatgatcgagtccaaccagtagcaagagtaatagaatttgcagaaaaatttccagatgagataaaagataaaacacagttgcaaagatttctagggtgtttaaactatgtctccgatttttataaagatcttgcaaaagacagaaagattttaaccgagaggttgaagaaaaagcctccagcttggacagctaaacatactcaagctgttaagaagatcaaaggtaaggtcaaaaccttgcactgtctttatatcctagatcaagatgccttcaaaattatcgaatcagatgcctcagatcatggttatggaggaattcttaaacaaaaaaaggattccagagagcagctggtcaggttcacctcatatagatactgcattcctatcctcatatctggtgactag

SEQ ID NO: 73166 - DNA, 1294 bp, Oryza sativa
  Clone ID: PAT_MRT4530_73473C.1
cgtcatgccaaaagacgtcttcgacaagctcaacttcacggtgtaggcaccgacaccgatgcgcctccaactggtcgactcatcaatccgttacacggcaaggatagcgaaggacgtgggaccgtgggccccacctgtcagctcctcctcctacctctggctggccggctgcaaccgccatggccgcccgagccgcccaacgtcgccgctttccccgcccacctcctccaccctgcaccgctcccgcccgactgtgggacctcgccgcccatgaccccgctcccctcccccactccgtcccacgaaaaaccgccgccaccacccccacgacgccgccccactccccctcgaaatccgccgctccccggccctctcctcgcccccttgagctataaaatcaatcccctaccgagctctccacgccgatccccatcgccgccactcgccggcgatctccagccgcgcgccgccgcagctcccgccgtcgccgcgcctcaccacgtgtgccatcagcttcgccatcccacgccgcacgccggcctccactcggtttccttcaaccgccatcggaaccacctccccaccgtgaacccgagctccaccgccactttgccgactccggcagcgcgccaccgccgccctagccaccaccaagccacgccaccgccaccgtcggcttcgccgcatcgcgtagcaccccggcctctgcttcgttttcccgttccaccgcagcaacaccatctccactgcgaagccgaggacgccagccgcgcctcgttcgctgctcggtcgtcgtcttccgccgctccaacccatcctctaagttcgccggtcaagggcgaccccgtccgccctccgtcctcgcaagccgccatcgggcaatcgtcgtcgccgtcatcttcctccgcgccggccgccgcttccggtgaggacctctcctcccttcccttttttttcccgtccccctttcttgccgaccgccgcctcttgtggtgcgtcgccgtccccgtgcgcgccgctgtcctccggccgcccgccgccgttccacgttgccggctgctgccgccggtggccgcatgccgccgccgcgccttggctcggccgggccggcttcgtgtcgtgcctgtgcccctggctgccgctcccctcggccgcccgatcggctcaggccgatctgggccgtccacgtggtggacgcgcacccgaggccacgtgtggaccatgtccaccgtgcgccctccccctttgactcgctgacgtgtggggcccgcgtgtcggcgccggccgccccttg

SEQ ID NO: 73167 - DNA, 3144 bp, Oryza sativa
  Clone ID: PAT_MRT4530_73474C.1
agaactactacatgtgacttatcactaactattttgatacaacagaaagcctttctccagtccagaccttcggtcagtctagattctaggcctaggacaaaacctcaaaatgttgtctatgctacctatgaagacaactccgacgaaccttcaatctcagacttcgatatcaatgttatcgagcttgatgttggctttgttattgccatagaataagacgagtttgaaattgacaaagaattgcttatgagagaactaagactccccaaaaatagaactaaaactaaaagatatctagaagaggttgacaaatcattcagaatgaagataagagaagtttggcataacgaaatgagagaacagaggaggaatattttcttctttgactagtatgagaatagccagattatatattttgaagaattttttaagacccagaagaaaggaaaaggggtatgcaatgaagagagaaaacaagaacatgacaagtcagtaattaaggtcttttcagattatgggtcaaccagtaaaacttatattacttattctccttttaaacttattcaacaatctcaggatatcagaggaaaaaattgtcttccagaaagcacttatgagaaatccacagagaataatttcctagaatatttagtagaacaacagaaaactcaagatctatcccctgaacaacaagattccaaaacaattcctatggaacccattattctaagaagccatgaagatccttcttcccactctcaatttgaggtatctagacctcaatctgaaacctatcttttgccttattcttatcctattacaactatacttattccaactgccaacaacgaacagcaaaagggcaattttatcaccactcctaaagataaggtagccaaatcctttgatattcccaacaattttcctaatactaatgaccagatgtctaattccttgacaaaaatccaagcgtcatcttacgataaattgacgctccaaaaagaagtttctaccttttataacaaaatcgactcttcggtaaacagagacctcgagagttatattaccagagtcatcaatacctctttctacaacataatcgatgatcctaaaggtattaccagatcaaaatttagattgttccataatgttctcttctccaagatctatatccaacctaatccaaataaaacactttgttaccattctcgaaccaaaaactcctttgaaagaaaatctcagaatcaaatctcggctgaagccttctgcacaaataatgaaatcctagtccataagcaagatctttttggaagcatatttgttatttctgatacaaatcaatttggcacttttaatcctgaggaagaaaggaccaaaagaaaacttaagattaatgacctcttccaagaacaaaattatactaaaaaggaattaagagacctaaagggtaaatttcgaagtctagaattacaaaataatagttgcatgggccaagatgaagaggttgtcaactccatcaacagttatgttaagcagaaatggtatgcagaagtaaggtacaaattcaatgatggattccaattcagctataagactttaattgattcaggagctgatgtgaactgcattcgtgaaggtatccagtttagaatcagagataaaaatgtgaagttaaaattttcttctaaacccgagcaaaccatgttaaactatttaaaggagattatcacacaaaaagagcaatttatcttgcaaaaagacagaaagattttaaccgagaggttaaagaaaaagcctccagcttggacagctaaacatactcaagctgttaagaagatcaaagattgtaaggcagcaaaagatgtcctccaaaaggatgtggagaacttagtctccaaacaaaattttgccagatggcaagcaatattatcatgctttgactttgaaatagaacatatcaagggagaattaaactccctaccagatttcttatctcatgaattttacagggctatggcacctaaaagggacttatcagcccaagggagaactacagaaagttcaccaaataagcataaatataatgaactaggaaatattattcctagaacccctacagttcaagaaaagtatgggaataattcatcttatatcctcaatatagaggaagtaattctgccattagaatttggagactctgatctcaatattatcaagattatgggaaagtatttcccacaacaccaatattttatccctaaatatccagggaaagatcaaaattattatgagaccatattatgcgagacaagaagtgcacagatattccatacaaggaatagtgatgaattgggattcacaaaattattgacccaaaaaattataagtatcgatgattgggataaatcatcaaatccatatgttgccaggactatatattctacatcctgtgcaaataaaagatataactattgggattatcagaaggcctgggaaagagtactccttgtacaaaattcccagatgaagcattcatggtttattcgcttcaaagaaggatgtgaggagataccactgtggtttttcagtaattggtggctgaaagtaggggccattcctgaaatcctaccacaagaaatcatcaaagttattacacaagaatcaaaaaaggatctcaaggaatatccttttatccttatgcaattttgtgccgaaacagggatgccttggatactaaaatgggacctcaatattcaaagaatggagttcccagcaaccttaaagcgaaactattatgcaagatggtgggataagtttgcaatcacaccagtaattgaaggaagaaagtttcgagccaaaaacaagaaatctcatgtggctcaattaaaagaagatataacaagagaattattaaaggcaagacccgagttgacaaagggagaattgcaacttcaagtatatgaaactacgtttaaaagattggaagaatcactaaaatctagttctacatgcaaaagtctagatgaagatatggtacaatgcagccaaattaagccatcttcgccaatacctccttattactcaattaagcaagataatgattcagatgaaggaatatcagatttcaatccaacacacatttag

SEQ ID NO: 73168 - DNA, 1950 bp, Oryza sativa
  Clone ID: PAT_MRT4530_73475C.1
atggccaagcctggagaagagcacgccatctgcagcaactatggcaaaaatcatcacacgctaatgcctagacctgcggaggtaattaaccgggagctttacgaggccccaggaaccaggagaccacattgctcaagaggaccttccatcatcgagaacactccgatgccctttgtgatccaatttgggtcgcaaccaccagcggcgcgcaagcgtgcttctgccaaggctaagaaggagcgacgtgccctcatgcttgaagtccggacccttttgaaggagttcgttgtagctgagatcaagggagacatccaggctgcgcaaaagctgcgcacaaaagcggccaacaggtgttcaagtactgcatccctgcgcgcctctactccgacttttgctccaaagccaccctccccaactgtgcaacatatggaagtggggttgcttgaagctttggaagccgtctctgacaacctacatcgacacatatcccatgctcgacacatggatagtccacatcctctgcgcaactacaggaggaagtaccacaaggtgcagcgtctacatcaactggttagttcgcgcatcgcccagagttctgtcccggaggaagattggtctcttgacacatccatcctcatcggcaaggtgtgcaaatatccgagcatcttggaaccaccctatgacttgttccctgatgaatgggcacatgagccaaccaagatcaaggagaaagtcaggcgcgccatcatgaaggagtattggaagcggcgttatggggagcacattctccttcccggaccaacgatctccttcgactacaacacatacgccccttgccagcagagcacatgggagccatgcctccacttgtccgcggttgacaaagaacagatatcaagtaaacatggcacaagcgagcagataggaaaaggctgtgctgacgtcagcaaagggccggcgccgacaggcgggccctactcgtcagcggcacaaggggcaagcacacggtggactcgatccaccgcggccgaggcggcaccgtggacccggacctcggaagtggtccacgggaccgacggcctggatcggcccaaagccgatccaacggccacgggcggcgcggctggggcaaggcacggctcaaagctggctggccaaacgacggcgcgcggcggcgcggccacccgcggcgacggccggcgacagctcacgcgggcgaaagcggcgcacgcgagagagcagcggcgcggcgcggcaagggggaggcggcaaccggctgcccggcaccaccggcaacggcgcgggcacggagtgcggagcgcggcggcagcgacccggtcggacgaccaccggcggcggcagcacgtcgcgaggacgcccgggaggcggccgacgaaggggaggaaaagggagagggaggggagtgctcaccgagatgcacgacggcgaaggggcggccgacggcaaggaacggtggcgacggggctcctcaggaagacgacgcgacggagctccggcgacgggcgtcgctcgggatggggcggacgggctcggcctcgatcggcgaccgaggaaggaggagctccggcggatttccggcgaagaggggcggcggccgaggtcctcctcgtccttgtggagctgagggaggcaacggcgcgggtcggcgtcgaccgaagcggcggcgcgacgcggctagagtcggcggcggcggcggagagaggtggttcgcgtggctacggcgctacggaggtggagaggggaaatggagcggtagccgagcttgcccgggcggcggcaaagctggcggtggcggcggcgcagtgcgggggcgacggaagcggcgacggaagcggctggagggtcgtcggcgtgcggcggcacacaggagtggcgtggggagctcgagagagcgcgcgggagggggcagtgagttggggaaacggatga

SEQ ID NO: 73169 - DNA, 324 bp, Oryza sativa
  Clone ID: PAT_MRT4530_73476C.1
gcgtcgtaacttggaccttaaacggccgcctttttttttttttttttttttttttttttttttttttaagaaaaagggcttttcatcattagtcgaagatggcagacatacacaaacaatgcttgcaattattttttttttttttatccagccgcctaggggggggggccttaaaactttggagctttgtttggaggggggggaagcccgaatcatttcttttatgttgagccttgggctttttttggtagggattgttttgctgaactttttggggagaggagaggaatttttttgggtggggtggttagggtgggttgggtt

SEQ ID NO: 73170 - DNA, 969 bp, Oryza sativa
  Clone ID: PAT_MRT4530_73477C.1
ggggggcgggcgggggagcccggggccgggagggccgggcgcggagggcgccggcccggggggggagggggcgggggggggggccccgggccgcgaggcccgcagcgggccgccggcgggggggaccgacttggaaggggcaccgcggggggggggagggcggggcgccgggagggcaggggggaagcggggccggcgagcgggggggggggggggcggcgggcggcccggggggagggcgggggggggccgcggcggcgggggggggggcagccggccgcgggaggggccacaccgcaggggggcaggcgcagggcggggcgcacgggagaccagccagcggcaccggcgggcacagccaaggggggggcggccgcaaccggggggagggcggggaaaggcgggggacggcgacggcggctgaggcacgcggcgggagaaggccggcgagcggcggcgatggggaccggcgtggggagagcggggaaaagcgcagggagctcggggtggagtgggaaacgaaagaggggagcacgagggtgcgggatatagggctcggggatggagatcgggcccgggagaggtgggatcggccggcgacgtggggaggcgaagtggagctcgggatggcaacggttttcacggggcatgggggaaacggcgcggacgtgggcggcgaccgcgcccacgcacgcacgggagagggaaccgcgagaggaaggcggcgacgtggggagcacggggcggctatggcggcggttggggcgacgggaggttggggaagaagatgacaggtggggcctcgggtcccacctgtcggggagagagagaggggaaaacgggcgagggaggtaaagcagacttgagggagagagagccaagcgggccgagggaggtggccggcccgagagggagagaaagggggcgcgcgggccgcgggaaagaaaggagggattgggccgaaagggg

SEQ ID NO: 73171 - DNA, 1191 bp, Oryza sativa
  Clone ID: PAT_MRT4530_73478C.1
atggacctcgctgacatcagcaaaggggcggccagcgccgacacgcgggccccacatgtcagcgagtcaaagggggagggcgcacggtggacatggtccacacgtggcctcgggtgcgcgtccaccacgtggatggcccagatcggcctgagccgatcgggcggccgaggggagcggcagccaggggcacaggcgcggcacgaagccggcccggccgagccaaggcgcggcggcggcaagggggaggcggcaaccggctgcccggcaccaccggcaacggcgcgggcacggagcgcggagcgcggcggcagcgacccggtcggacggccaccggcggcggcagcgcgtcgcgaggacgcccgggaagcggccaacgaaggggaggaaaagggagagggaggggagtgctcaccgagatgcacgacggcaaaggggcggccgacggcaaggaacggtggcgacggggctcctcaggaagacgacgcgacggagctccggcgacgggcgtcgctcgggatggggcggacgggctcggcctcgatcggcgaccgaggaaggaggagctccggcggatttccggcgaagaggggcggcggccgagcggagagaggtggttcgcgtggctacggcgctacggaggtggagaggggaaatggagcggtggccgagcttgcccgggcggcggcaaagctggcggtggcggcggagcagggcggcggcgaccctagtgacgggaaacggcggccggagttcgccggagtgtggcggcgcgcgggagcggcgtggggaagagcgagggagagagtgccgggcccgggaaacaaggggaaatggacgaggggagcacgggggtgctttttatgggctcgggaaggcgggatcgaggccggacgtggcggaatcggccggcgaagtggggcgccgacgtggggtggtggagggagttttggtgggatgacggttgataaggtgtgtggtggtgtgaagggcctcgacctagtagggagcgggaaggttggcttggaagagcaaggagcgggtgatgttgttcaaggaacgaagcatgcgctcggccttaccattctgtggggaggcatcctcgacggcacggacgaagcctactcctcggagaacccgccatcggacacatactcgagctctgaggttgggggaaaagtagagcaagactga

SEQ ID NO: 73172 - DNA, 531 bp, Oryza sativa
  Clone ID: PAT_MRT4530_73479C.1
atgggaggtggcagcccgatgatgggcgacgcatgcatcgagtgggtgaccgccgccaacatcggcctgtttggaggagtggcctgtggtggtggagagccgcaggagatggggaagacggcaccacaggggcagcttgccgccaccggcatgaggaaaaggagaggagagggatggctccactcccacaggcagctcaactgggaggacgacgacgcgaactcaccggtgcaagaaactacgacggacgacgatgaacggcgaccggcgacgaggtcccaaggcggcacggctcggctcaacgtcgacggcggcgctccggcggtcttaggcggctgcgaaggggcggccggggttcctctcctccgtgcgcacccgacggcggcgacggacgccaacggcgatggctaccgcggcggcgcgacgcggctggaaggtcgccggcgacggcggcggctagggcaacgtggcggcggcgctacgggcgacgagggagctcaggacttggggcaaacggaagaggacgactag

SEQ ID NO: 73173 - DNA, 1180 bp, Oryza sativa
  Clone ID: PAT_MRT4530_7347C.1
ccgaattcggcacgagagagagcgagcgaagccagcagcagaagcagtagagagaaagtagagagatggaggggaaggaggaggatgtccggctgggagccaacaagttctcggagaggcagccgatcggcacggcggcgcagggctccgacgacaaggactacaaggagccgccgccggcgccgctgttcgagccaggggagctcaagtcgtggtccttctaccgcgcagggatcgccgagttcatggccaccttcctcttcctctacatcaccgtcctcaccgtcatgggggtcaacaactccacctccaagtgcgccaccgtcggcatccagggcatcgcctgggtccttcggcggcatgatcttcgccctcgtctactgcaccgccggcatctccggcggccacatcaacccggccgtcaccttcggcctcttcctcgccaggaacctgtccctcaccagggccctcttctacatggtgatgcagtgcctcggcgccatctgtggcgccggcgtcgtcaagggcttccagaaaggcctgtacgaaaccaccggcggcggcgccaacgtcgtcgcgcccggctacacaaagggcgaccggctcggcgccgaaatcgtcggcaccttcatcctcgtctacaccgtcttctccgccaccgacgccaagaagaacgccagggattcccacgttccgatccttgccccactgccaatcgggtttgcggtgttcttggttcacctggccaccatccccatcaccggcaccggaatcaacccacgaagaacttggggctgccatcatctacaacaagggcatgcctggggccatgccggggaagaccattggattttttgggtcggccccttaatggggggggcccttgttgccatttaccaccagggggttatcagggcaattccattcaagagcaggtggtaacctgcatcagctattatcactgtcaagaagccaatccagagcaagctgtttttgatggggggggctgtttcccgcggccggctttgttagtaattatgggggagtggaagttctttttcaagttggttgaaaaactgtttttatttgaatacagaatggtaatttcagaactcagtggggtatccctattttacaaggggcaaattaagctatcgtcctcctatgggagttgggttcc

SEQ ID NO: 73174 - DNA, 284 bp, Oryza sativa
  Clone ID: PAT_MRT4530_73480C.1
gtttactgttcttttgtaaaattgttttgtggtttgaaatgtacaaatagattttggtataccatattgaaagtagttttccagctctgttgctagctgccacatcatttcttggttcttggatacctttgtatatcagaaacaaaatcgtcacatctacattggagctgtaagaggtgaaatttatctagctaaatccgaaagctagcattaacacttactatttgttctaaatttctggctcctgatttagcccaaggttggtgagaaaaaaaaaaaaaaaa

SEQ ID NO: 73175 - DNA, 1315 bp, Oryza sativa
  Clone ID: PAT_MRT4530_73481C.1
cccacgcgtccgcccacgcgtccgcccacgcgtccgctcctgcaacgtgcaggagtgggaagcttatgacccttaccgttcacggtggatgacactcccaaagatgccacacaatgagtgtttcatgtgctcagacaaggagtcacttgcagtgggcaccgaactcctggttttggcaaggagattctttcccacattgttctgagttacagtattctgacaaactcgtggtcgcctggtgttgatatgaatgcccctagatgcttgtttggatcagctagctttggagagaaagcaattgtagctggtggcatggatgctcaaggtcgggtgctacgctctgctgagctttacaactctgaaactaagagatggataacactcccatgcatgaacaaggctaggcgaatgtgttctggagtctttatgaacggcaaattttacgtaattgggggaatggccagtaacacggaggtgctgactgcggagaagagtatgatttggagaaaggtacctggagggtgatagagaacatgtctgaggggctcaacggtgcaagtggtgcacctccccttgttgctgttgttgaaaatgagttatatgctgcacaatatgccaggaaagctagtaaggaaatataacataaaggataacaccatggacaacactgggagagttaccagagcggccagaagctgtgaatggctggggtattgcattccgaggatgtggagagcggctcttggtgattggtggaccaagagtgatgggaggggggatgattgagctccattcatggatcccgagggaggggccgttgcggtggaacatgatcgggagcaagccttctggtaactttgtttataactgtgctgtcatggggtgctgatttgtgccaccctcttgccgaacatactgtgaacatgaaagattgtgatattggtttcctcaaatgtcataaagcaccgattcgcctgatgggtaatctctgcctttctttttgacatttcagattttacacgtggttcaatagagtagttgtttcagtgcatgcgtcactggtcacccttaggtaaattttccacattcgatttgcagctgggaatttgtaccttgttctaccctctatcggaacaagttcccgatggatgcatttagtcgacaaactgtaattgaggcaccattgcatctgtacaattgtatgaggttctgatttggtgcctgtcgatcccattactcttttgtgcaaatgtttcttgacaggaagaacatgaattataatgttcctctgttcactttaaaaaaaaaaaaaaaa

SEQ ID NO: 73176 - DNA, 229 bp, Oryza sativa
  Clone ID: PAT_MRT4530_73482C.1
acgccatcatccgggaacaccaagagaaccgagccgccggcgccggcgacggcgacggcgacgacaaggaggacttgctcgacgtgctcctgaggatccagagggaaggtgacctgcagttccctctgtccactgaaagaatcaagacaacggttggagacatgtttgcgggaggcagcgagactgcggggacggcgttgcaatggatcatggccgagctcataagaaa

SEQ ID NO: 73177 - DNA, 591 bp, Oryza sativa
  unsure (1)..(591): unsure at all n locations
  Clone ID: PAT_MRT4530_73483C.1
cctaatttgtgttgttttttggtaatttttgttatatattttttttttgtgttttttttcatttttttctttgattattttttatnngacgagagcggagcacactaagattcattcattcatttcatttgatcaaagcaaaagcaaaagcccagaaagaaggaagggaaaccccacgcggaggcggagagcggagtggcggcgggatggactccacctacgccctccacctcgccgtcgccaccctcctcggcgcctccttcgccgccgcctccgcctactatatgcaccgcaagaccctcgaccagctcctccgcttcgcccgctcccttgaccgcgaccaccgccgccgcaaccgccacctcctcgacgccgacgacgacgatgacgacgaccctcccagagaccacgatcgccgcaccacccttcccatcccaccgggccttccgccacttcacaccggccgagaaggaaagccaattatctcaccagcttccaccaaaagagttggacctttggttagacctactacaccaagatcccctgttcctactgtcagtgcatttgaaactattgaagattcagatgacg

SEQ ID NO: 73178 - DNA, 139 bp, Oryza sativa
  Clone ID: PAT_MRT4530_73484C.1
tctgtttacccccaggttaaaccatcgttgcgggggggaatacacattcgcgggtgtgccgaatttaccggacgaaggggcaatagctgaacacgtcgacatactgccgacaaacaactaagcaccaattatattacct

SEQ ID NO: 73179 - DNA, 206 bp, Oryza sativa
  Clone ID: PAT_MRT4530_73485C.1
cccacgcgtccgaccgagtccgctcggctcgcatgggagaccgccgccgccggcttctgttggcgctgcccttcgcggcgacagccacaaggcgcggtggcaatgggagccaaaatcggcgccggcggcattgaaattgattcgatttcccttcttccttccttcttttggggattttcccgtccacggaaaccctaattttttcc

SEQ ID NO: 73180 - DNA, 565 bp, Oryza sativa
  Clone ID: PAT_MRT4530_73486C.1
caaatataaattatttatttttttttttttttttattgtaggagaaaccaaactcaaagttttattaattagaggtatgtattaaggaccagaaatttcctttgggaaggaaacaaaaaggggctgggatttacatgttcatatacactccatacaagatcttggatcatctgccctaccaaagtaccaaccttaagtgcacagttttgttttcactaacttaaaatccgaaaacctggcacttatagaacacctctggatacccatccatcgtccgattcttaaccctaaatcctgaacccgaaaccataaaagcgtcacacccctacataaaaaatgcttctgctatagctgcagattgatcatctcagctcatgagtgattcataactttgctaatcttgaagcataaaaaagagaggaggtgtcttgagctctcaagaaacaaggagatttttgttccttgtggcacacagctgtggtgcagggagctttgagattcgtgcagcggcagggggagggcgcgcgaagctttcacgaggcgtgcatctggtcgaggaggatga

SEQ ID NO: 73181 - DNA, 243 bp, Oryza sativa
  Clone ID: PAT_MRT4530_73487C.1
ggcacgagcacgtagtaaggatctgaagctccctgcagcccaagaggtcagccgccgccatcctcctccctgtatcgttcaagcaagtcacctttggtaaagtggtggctgtgggccctggcgtacgtaacatcagttgcaatctgctccccttttatatcaagaaaggcgtcacccttatactgccttcatatggcagactcgtggtaaagcttcatgctcctaaattgggtaccttctgtt

SEQ ID NO: 73182 - DNA, 243 bp, Oryza sativa
  Clone ID: PAT_MRT4530_73488C.1
atgacctctacctctcactgggctggcgctgggaggacaaggtcactacaaacaaggaagaacgtctcggtgccgttgctcggaggaacagactattccatcaatgttggaggtatgtcacgagggccttcggccagcttgccaaaaccatctaagctatcaaaacatcagccaagtcccttgggcgaaaccattgggcaaagcctaagggcaaagaccaagggattcgccatcaagcattag

SEQ ID NO: 73183 - DNA, 366 bp, Oryza sativa
  Clone ID: PAT_MRT4530_73489C.1
atgacggagcgtggggcccctcaccggaagaccgcgcaggcccccctttgccggttcggccgagggcgctatgtgaggttcttcgccctcgatcagaggaatccggaagtgacctttgacaagcagagcgcacgtctcctgccccgctcgtcagctttcccggaggacgcccatttcaaacttcatttaatggccggcgacttccttgccatacttgcgctgaagcctggaatgaatctgaccgggactgacataccaactccaggagttagcacgccggctccggctagggacgagagccaggaagctctcatcattccgacgggacggggcgaggcgtgtgacaggccgcctgttgccacctaa

SEQ ID NO: 73184 - DNA, 496 bp, Oryza sativa
  Clone ID: PAT_MRT4530_7348C.1
gcacgaggctagtctcggagttttttttttttttttttttttttttttttttttttttttttttttttttttttttttttttttttttttttaacggggacatacgtagaacttatttttcatcacgggaatcccccctaaaacattccaaaaacaaatgcccgtgcgaaaaatcgatcgacacgacacgacgacccttgtacccccaaattaaatgttcgggcccctcaaaaaaaggaaattaaaggaaatccctcgcttccaacggccgaaatgcatgattaaatgggttagctagctagcttgccgggacgggccctccggtctcctgatccttgccggccagcttgaccttcggggaggagggcaacgggttgaccaccttgcaattgaccctgatctggccgcaccgcccgggctgcaccttgatggggcccattttcaccatggggtggggaaaccgttgtttccactcccccttgttcgccgaaaaccg

SEQ ID NO: 73185 - DNA, 1146 bp, Oryza sativa
  Clone ID: PAT_MRT4530_73490C.1
atgaatttatcaggacgtgacatccttggaggcgatcttttcgagcatgcgattgtgccgcacgccccccctgaacgcgtagatcaccgcgtgtgcggggatgcacggtatggtgttgcggacttgacagaaccgctgaatgtacgagcgaagagactcatcgtcccctcgctgtaccgcgtgcaagtccgcttcttcacctgggcgcggatatgtgccctggaagttcatggtgaactgctggcacaaatcctcccaagagtgtaccgacgcgggtggcaagttcatcagccaaccccgcgcctgacctttcagggccatggggaagaaattcgccatgaccctgtcgtcacccccggcggcctcaatcccggtcgtatagatctggagaaactcggcggggttgacgcttccgtcgtatttttcagtgatggtgggccggaaccttgggggccaacggacgttccgaaggctcgccacaaaggctcgacagccggcaccgccaaccggggacatgggaggctggcccccgtgcccggaccgaagtggcgctccggacgaggaagcgccctccgttgcgtggcagcacgacgaccattgcgccggcgctcaatattgaggcgggcatccggccccccacgcacatcttcttgggtcggaggcgttgacgagggaatagcggacgaacggcgggtaacggccgccgctcgccgcgccctccgcctcgacgacacggagccggtgccaacgtcgagctggagtctctggatcggggacgacgggcgggtgacgcaggagcgcgcccgcagcccggagcgcgccctggggcgtgctgccatcgccgtagacgaggaggcgacgctccccatctcgccgtccttctccattacccgtgggtggcgaagtcgcggatctttcgaccccctcgagcgcctcctcccgcccaagacttcggcgagagggggacggtggagtacgagctcggcggcgcgggttctgctccccgtcgtcaccgctagcgctcggagagaggttgtgcgccactgcccgttcggccattgggctgagcgggagaagcttggcgcacacgaaagaggacgagggcttagaaagacacacgcgccccctacctggcgcgccagatga

SEQ ID NO: 73186 - DNA, 630 bp, Oryza sativa
  Clone ID: PAT_MRT4530_73491C.1
atggggaaaatggcatggagctgtgtggagcgtcgtgtcggagtgctcgtagccctggtgccgctggatcccgtccccttgtgtcggttgcgtcagatccgacctgcccgatggatagcggcgttggatctgctgtctccttgcatcaccggcaccctgtttgagggattgtggctacagacccgcaggggacaatatgagagaggagcacctcggtcgggaccgagccccgtgacagggacggcgccaccgacgttgactccggccgcgccatcccgtcgtcgctctctgtccctccccgccacggcccagctcctcgtctgcgcgcgcggatccggagcgctggcgcgggaggacagtggcggcggcgcggatccggagtggagcggcgacggcgtcctcgtgctcgtggtcgtcgtcctcggagcggtcatggcttcggcggtggaggtcctcgaggcgatggctcagatctggacctcggcggcggaggtccccgaggcgagcggcagaccccctccctcctccctctctttctcccgcggcgtgcgggaaagcaggacggcggcgagccgcggagctcctccctcctccctctctctgttccacggggtgggaggaggaggatga

SEQ ID NO: 73187 - DNA, 412 bp, Oryza sativa
  Clone ID: PAT_MRT4530_73492C.1
atgacggagcgtggggctcctcaccgggagactacgcaggcccccctttgccggcctgggcctcctttttatctggtcaggggtcaccacatgggcctctagctacctaagaaaggaaacatgcttttacaatgagggctagtctacagccggaagtgacctctgacaagccgagcgcacgtctcttgctccgctcgcccctcttccggtggacgcccatttcaaccttcatttaatggccagcgacttccttgtcatacttgcgctgaagcctggaatgaatctgaccgggactgacatacccactcctggagttggcacgccggctccggctagggacgagagctaggaagatctcatcattccgacgggacggggcgaggcgtgtgacaggccgcctgttgccacctaa

SEQ ID NO: 73188 - DNA, 1257 bp, Oryza sativa
  Clone ID: PAT_MRT4530_73493C.1
gagcccggaagggacggccgccatatgctgccgccaccaagacgaccggagaagaaaaagaggggcattattggatctggagatggcggcctccccccttgccgcgctaggggatggatctggtggttttgagctcaaaaacgccggatctggtcgtccccagcttgcatcggccagatgaagggaagatgtaaggagatatggcggcggcggcgtcgctggggatagtaaggtggagaaggaggaggcggtggcacttggccggggaggaaaaggggagggacggcggtggaactgggccggggaggattggaggagagggaggtggaggcagtactccgatgcggaggggaagcatgcggcggtccagaagacgaggaggtttcgaccaactcgccgccggcagcaccgccaactgctaaagtcggagggcctggcagccgacaaagatacgaggagcacccctcggtcgacatcctcgccgaggagccggcgtccacaagctgcaggctgcagcgcggacgagcgaaggagccaaggcggcagcggcggcggcggcggcggcgcgtgggaagaggagggagaggcggagataagcctgagcgcgagttcgggccgctgagaagcgtaacaccctactcctatgttctggtggatctgtgcgtgaaggaatacagagagctggagagcgagcccgagttcaggccggaagtgacctctgacaagcagagcacacgcctcctgccccgctcgcccgcttttccggtggacgcccatttcaaccttcatttaatggccagcgacttccttgccatacttgcgctgaaacctggaatggctctgaccgggactgacataccaactctaggagttagcacgccggctccggctagggacgagagccaggaagctctcatcattccgacgggacggggcgaggcgtgtgccgccgcggtggcggcggccaggagcggcgccgcccccgcgacgcggactccggcgatgatggtaggggcaggcatgggagacggcggcggccttccctcacccggatctgccggcggctatcctcccccgccccgatctgccggcggcggccctcccccgcctggatccgccggtggccaccctaccctgccccgattcgccggcggcgctctcccggcggccggcgcctcctcgttggatccgggaaaggagtacgatgtcaacggtggcggcagcggcttgagaatgacggcgacagttggaggataa

SEQ ID NO: 73189 - DNA, 204 bp, Oryza sativa
  Clone ID: PAT_MRT4530_73494C.1
gtactgacgccgttgcacgcgtataaggtgggggtggtagaagcgcacggcggaggcatccataacaatgacgcgccgcggctgtacctgcagtttgcgcgcttcgcagccaaggacttcaccgttatcaagtggtccgacggctggcccatcacgcactgccacaatattgtgcttgagctcgagcggagtgcaagcagctga

SEQ ID NO: 73190 - DNA, 1261 bp, Oryza sativa
  Clone ID: PAT_MRT4530_73495C.1
atggccgacccccaacctgctccggcttcgtcgtcgacgccgcactgccatgaagggatctgggccacctctgcatgcgtcctcgccggctccgcctcaccacagccaatccgtggaccccgcctcggccaaccatcgtcactcggcgtcggacctcgtttcctaccaccaccggcgggtggcccgacctccagatccacgccgccctgcttcccctcctcgatgaagcgccggatccgcgatttctccttcccgtcccgatccgacaaggccttatcggctctgggcgttcccagccgaagttcccttaggttcctcggaggccttgtcaagacggcgtaaagggacagtaggataggtttcaacgctaggtgtcatcgtggtaagggatctctgggtaaaacacttggcgatattgtgtacctgatatcaactttgttggagtagaagtaatgggagtatcgctacaccactggtcgaggaccaggtagtagtcgtaactcaaccacgctggtcgaggaccaggtagtagtctaaactcgaccacttaaagtggaaatagggggagaatcgctacaccgctggtcgaggaccaggtagtagtctaaactcgaccacttaaagtggaaatagtgggagaatcgctacatcgctggtcgaggaccaggtagtagtctaaactcaaccacttaaagtggagatagtgggagaattgctacaccgctggtcgaggactaggtagtagtcgtaactcgaccaccagaaataaggtgagagagatcactacgttctactggtttgagaactaggagtaggagtctcttaatcacctataggggcgctaaagttggtttattacatgtgcatctcatgtggccagcatgaacgtttgcgagaatttatccgttaacaaccttttctcgaatagcccagccatggtcggcgctatgagataggtcgtcggtcttcgttggcaggttaggtgcgataactccacatttgtcgagaatgttctcgataatggggtgtactcgaccacagcttactcgagtgctcaattgttccttgttgcgtactcgttcgacatcatacgttctgacatcttttggtacatcttaaggcttggtcgatctcaagagatcgagttgttgatgatgatggttccgatctcgtcgggagacatactctggtcgggttaaatctccccacagccgaagtcgtcgagtagtttgttttcggagaatccatctcttgaacccat

SEQ ID NO: 73191 - DNA, 569 bp, Oryza sativa
  unsure (1)..(569): unsure at all n locations
  Clone ID: PAT_MRT4530_73496C.1
ttaggtggcaacaggcggcctgtcacacgcctcgccccgtcccgtngaaatgatgacaacctccaggcactcgtccctagccggagccggcgtgctagctcctggagtgggtatgtcagtcccggccagattcataccaggtggtctgacgccggtcatgtcatcggcagacaaccgtgctcccacgttgcatctgcttccggcggagtggaggtaggtatgacccatcccatcggagggtcattcggacagcggccattgcaaatctccacccattaatgaaggaatgacagggctatcccccttccaggcgaaggcgcgagccaagttttggtcaagatccaccagaacacaggagtagggtattacgcttctcagcggcccgaacctatctacatcgcccgtgtcttgtgcatttgctctctcgcgaacattccacagatcgagggtgaagaacctcacttagcgcccccggccgaaccggcaaaggggggcctgcgcggtctcccggtgaggagccccacgctccgtcacacctattacagctccaagtccaactgtaaccaaat

SEQ ID NO: 73192 - DNA, 1413 bp, Oryza sativa
  Clone ID: PAT_MRT4530_73497C.1
atggccaatggtgagtctcacgtgttggccttgcccttcccggcccagggccacgtcatccctctaatggagctcgcccactgcctcgtcgagcatggcgtcaaggtgaccttcgttaacaccgaggtcaaccatggccgcattcttggcgccttggatgatgccagccatggcggcgagcttggaggcgtcgacatggtgtccatatcggatgggctgggccatggcgacgaccggagcgatctcggccggctcaccgagtcgctcttgttggccatgcccagcgagctggagaagctcgtcgggaggatcaacgccagtgcgtcggcggcgggcggaggcgggagggaggtgacatggatggtcgccgacgtgaacatggcgtgggcgtttcccgtggcgaagaagctcggcctccgcgtcgccggcttctgcccttcgtcggcggcgatgttcgtgacgaggattaggatccctgagctggtgagggatggcgttcttgacgagagcggcatgccgcggtggcgcggcgcgttccggcttgctccggcgatgccgcccgtcgacacggcggagttctcgtggaaccgcgccggcgaccccaggggccagccggccatcttccggctgatcctccggaacaacgcggccacgcacctcgccgaggccatcgcctgcaactccttcgaggagctcgagtcgggtgccttcgccgtcgacgtcccgggccgcgtgctccccgtcggcccgctggcctccggcggcaagccggtcggtggcttctggcccgaggacgcctcgtgcgcggcgtggctcgacgcgcagccggcgggctccgtcgtgtacgtcgcgttcggcagcatcgccgccctcggcgccgcgcagctcgccgagctcgccgaggggctcgcgctgacctcccggccgttcctgtgggtggtgaggccgggcaccgcgagcgagcggtgcctcgacgggctccgccgccgcgccgcgccgcgcggccgcgtcgtgggctggtgcccgcagcggcgcgtgctggcgcacgcgtccacggcgtgcttcgtctcccactgcggctggaactccgtcgtggaaggcgtcagcaacggcgtgccgttcctgtgctggccgtacttcgccgaccagttcctcaaccagagctacatctgcgacgtgtggaggacggggctgagaatggccgcgccggcgccggcgacggcgccggccgacgaagcgtcggcacggctcgtggcgaggcaactgatacggcgcaaggtggaggagctgatcggcgaccaggagacgaaggcaagggcgatcgtgctgcgggacgctgccagtctcgccgtcggcgacggcgggtcgtcgcgccggaatctcacacggttcttggatctcattagaagttag

SEQ ID NO: 73193 - DNA, 1441 bp, Oryza sativa
  Clone ID: PAT_MRT4530_73498C.1
ctatctaactgttgtcgacatggcggtctgaaggtctgactcgtagtcgacaacagggtagccttcctcctcgaatccatgtccagcgagatcagagatagcgctttcgtatctcctgacggtatccggagacaccgtaggggaatagccatgcctatccctgaagtcgatatccggcggcgtgtcttggcgtatgtagacttctatgttgtggcttctatgtcgattgtgttgggtgttgatcctgtcgattgtctcgttgtgggtgtccccctgtcctcctaggggggctgctaccaactttattgaagtagaggtagtgggagaaatcggtacatcgctggtcgaggaacaggcagtagccgcaacttgaccactgaaagtggaagtagtcggagaaacgctacatcgctggtcgaggaccaggcaatagccgtaactcgaccacgtaactcgaccactgaaagtggaagtagtcggaggaacactgcatcgctggtcgaggaccaggcagtagccgtaactcgaccacttgaagcaaatgtacgagagatcactacgatcaactggttgagaaccggtgagtaggtgtccctcgatcacttggagtcgtggtaagaggaccgctacgctgctgtagtcgtaccttgaccatcctacatcttgttggccgaagccggtattgctcttattcaccataatcacaccaatacaatatgtgggtagcctatctaactgttgtcgacatggcggtctgaaggtctgactcgtagtcgacaacagggtagccttcctcctcgaatccgtgtccggcgagatcagagatagcgctttcgtatctcctgacggtatccggagataccgtaggggaatagccatgcctatccctgaagtcgatatccggcggtgtgtcttggcgtatgtaggcttgtatgttgattgtgttgggcgttgatgaggtgatcgtcccgatcgtggtgatcgtgttgatcgtctcatggtgggtgtcccccctgtcctcatggtctttcgtctctgaaggatccgacaaggccttatcagctctgggcgtccccagccgaagatcccttaggttcctcggaggcctgctaccaactttgttgaagtagaggtagtgggagaaatcgctacatcgctggtcgaggaccaagcagtagccgtaactcgaccatcgaccgctgaaagtgaaagtagtcggaggaacgctacatcgctggtcgaggatcaggcagtagccgtaactcgaccacttgaagcaaatgtacgagagatcactacgatcaactggttgaggaccggtgagtaggtgtccctcgatcacttggagtcgtggtacgaggaccgctacactgttgtagtcgtaccttgaccatctgaagtaaatactacccaacgctggtaggagaacccgccacgccat

SEQ ID NO: 73194 - DNA, 373 bp, Oryza sativa
  Clone ID: PAT_MRT4530_73499C.1
tggagcgaagctggcacgcgtgcgtgtgccggtccgctatagagcggtcgacctacgcgttcgatgaaagagggacatctagcgggctcttcctaatgatgttctagcacaggcctatccaatctcacgagacgaggctcagaggctcatgcataatagaggagatgagcccggtgccttcactccaagacaatgcacggagctatccacgacgttggataactgctggcatagtcctcttagggcatgctcgcggactcagattctctatttagctagatcgtatgcacctgttctcttgatatgcactgtccattctttcgactcatgatgataaagcctctgtttatccttacaataaaataaaacacgg

SEQ ID NO: 73195 - DNA, 733 bp, Oryza sativa
  Clone ID: PAT_MRT4530_7349C.1
ggtggatttgtctacaaaccaactcacaggtgacctgcctgtctgtcttaatgttaatgtcaataacagggtagttaagtttgatggtaattgcttcagtgacgaccctgaacaccagcatgaaactaagtattgtcaacaacctcacaaggggagaggatcaaacaaggatgttggacttgtggtcactgttgttggggtggtgtttattgtgcttgtgctttctcttatattaatggcttcaaacagaagaagctgtcagagagttttagcagaacaacagttacttcaaaagcaaatgcaagataattcgacgtcaggaatgtcaactgaactgcccgggctggcgaggcgcacgtcgcaagctgtaaaattagggacacaaataatgcccatgtatcgagcattttctttggaagagctcaaggaagcaacaaaaagctttgagaggtcggcatttttaggcgaggggtcaattggaaagctgtacaagggaaaactagagaatggaaccctgattgccataagatgtttggcattgcaccaacgatactcaataaggaatctaaaacttcgattagatctactggcgaagcttcgtcacccaaatttggtttgactcttggggcactgtattgatggcgaagttgatgaatcaagtgtgaaaagggttttccttgtctatgaatatgtacctagtggaacgtttccttcatatctttctggtaaggaa

SEQ ID NO: 73196 - DNA, 270 bp, Oryza sativa
  Clone ID: PAT_MRT4530_734C.1
atgaaggacatgaagccatggagcagtagcaccggcgacagtgggcgagcgaaggaggagcggcaacggcaggcgagcctgggaggagcggtgacagcaagtgagcgcggagggcggagcggcgacgcgcgcacggcgaggacgggcggtgggcgcggacggtcggcgaggatggcacggggacgggcggtcggcgaggacggcgcagacggcgttgacgtcggcgcggagacggaggtagagacggcggaggagcgtggcggcggtgag

SEQ ID NO: 73197 - DNA, 440 bp, Oryza sativa
  Clone ID: PAT_MRT4530_73500C.1
cctcttgttcctttcccagataatcttgacggagcgtggggctcctcaccgggagaccgcgcaggcccccctttgccggcctgggcctcctttttatctggtcaggcgtcaccacatgggcctctagctgcctaagaagggaaacatgctttttacaatcagggctaatctacagccggaaatgacttctgacaagcagagcgcacgtctcctgccccgctcgcccgcttttcccggtggacgcccatttcaaccttcatttaatggccagcgacttccttgccatacttgcgctgaagcctggaacgaatctgaccgggactgacataccaactcctggagttggcacgccggctctggctagggacgagagccaggaagctctcatcattccgacgggacggggcgaggcgtgtgacaggccgcctgttgccacctaa

SEQ ID NO: 73198 - DNA, 414 bp, Oryza sativa
  Clone ID: PAT_MRT4530_73501C.1
atgggtcataccaacctccactccgccggaagcaggtgcaacgtgggagcacggttgtttgctgatgacgtgaccggcgtcagaccacctggtatgaatctagccgggactgacgtgctaactccaggagttcccacgccggctctggctagggacgagtgtctaggggctctcatcattccgacgggacggggcgaggcgtgcgaaaggccgccttcacatgccgcgactggtcacaaaccggataagcatgcgctgcgccgcattgaatgcggcgtgacgcgctcggggtcggggcgccccagccctcggggccgaaacgggagcggcccgacccctcggggaaacagagggaggggtggccatgtcaccgttgggcccgacccccccgagggggtcgggccacgtgagtga

SEQ ID NO: 73199 - DNA, 631 bp, Oryza sativa
  Clone ID: PAT_MRT4530_73502C.1
atggcggcggcgcgtggagaaggaggagagggaggggaaatggaggggatgggtgtgggatggagaagggaagggccggattttataagggcacgggggaggggcgggcggcctatggcgacgcgacgggcggcgtggctagcggtgatggcgacaggtggccggcgcggcgcggggctcggcgcggctcggcacggtgctcggcgcgacgatgacggcgatgcgacgggcgagcggcacggcagtagcgcggggcgtgaggcggcgacacgatgggcgagcggcgcgcggggcgagcgacgtgacggcgggacggggcttgaggcgacggtggctcgcgcggcgcggcagcgggatggcgatggtgacggcgtggcagcggcggcgcgtggctcggagcgacgatgggacgtgacggcgacggcgcgcggcggcacggggcgcgagacgaagggcgcgcggagcgaggtggcgcggcgcagcagcggcgcggcagcggcggtggcgacggcgcgcggcgacgcgacggcgacggcgacggcgcggcggcggcgacgcggggctcgggtcgtggccgggcgcgcggcagaagagggtctagggctaggggaccacgtcgagcacttagagt

SEQ ID NO: 73200 - DNA, 1275 bp, Oryza sativa
  Clone ID: PAT_MRT4530_73503C.1
atggaggaaatcttggaatccgagtactcggccgccgccgccgccggcgacgcggcgtccttcgtgctctcccgcttgccccaccccgacaccacggcctccgccgctgccgccttcgtcgtcgacgtcgccggcgccggcggcggacgaacgacgacgctctcgttcgtcgccctccgccgtgccgcgctctccctcgcctcggggctccggttcgggctcggcctccgccgtggcgacgccgttctggtgctctcgcccaactcgctcctgctcccgcccatagttcttggcgttctggccgccggtggcgtggtggtcgccgccgacccgggctccacggctgaggaggtggccaccgtggcgcgcagctcgggcgcggtggtcgtcgtcgcggcgccggaggtggccgagaaggtcgccggagcaggcgtgccgctgctgctcacgtcacgatcaatggatccccgtgcgctctccgcggaggagctcatggacgacggtgacccgacggcgttggcttctcctgaggcgtcggcggcggcggcgaggccacgaccatcggatgtagctttcgtgttctactcctcggcgaccaccaagacggcggcgaccatgacgcacgccgacctcatcgccgccgtctccggcgcaagcttgccggaggagggccgtgtttgcttggcgtctctccccatctgcagcgtccacggcttgccgctgctcgccctcgcgctcccagccgccggagtgaccacggtgctgctcgccgcctcgccgtcttccgatccaacggcggccatggaggcggcggccgcgcacggcgccaccgacgtcgtggcgacgcctgacgtcgcggcggcgctcgcggctcccctgacgatgctctcctcgctgaggagggtgacggtggtgcctgctctcgcgacgacggaggcgcggcaggcgttccggcggtggctgccgtgggtcgagctgacggagatgtccggctcgccggagaagatgatggcgtcagcttcggagcaagtgcaggtggcgcctgacgctgcaagcgccgcggtgatagcacatatatttgcaagtttgaggtatataaacaatgtattcatcccctcgccgaaaccaatgaacactttctacttctgtaacaccgactacagaaaagtgccactacttaagaagattcagaagactgtcttgggagatattatctcaaaatcaaccgcgaacaagatcttgagggagcacccagaaattatctcaaaactgtag

SEQ ID NO: 73201 - DNA, 568 bp, Oryza sativa
  Clone ID: PAT_MRT4530_73504C.1
ggcgccggtgtttgaccggtcggcgatcctttgagctattgaagtgttactcttcggatgtgacggagcttggggctcctcaccgggagaccgcgcaggcccctctttgccggcctgggcctcctttttatgtggtcaggggtcaccacatgggcctctagctgcctaagaaaggaaacatgctttttacaatgagggctagtctacagccggaagtgacctctgacaagcactgcacacgccttctgctccgctcgtaagctctcccggtggacgcccgtttcaaccttcattcaatggccagcgactttcttgccatgcttgcgctgaagcctagaatggatctgaccgggactgacataccaactccaggagtcagcacgccagctccggctagagacgagagccaggaagctctcatcattccgacgggacggggcgaggcgtgcgacaggccgcctattgccacctaacccgcgatctgaccggtctgtgaccggtcacataccgcgactggggggtcgagcctggggtggcgcggtggctgccccctcccagttagagggag

SEQ ID NO: 73202 - DNA, 507 bp, Oryza sativa
  unsure (1)..(507): unsure at all n locations
  Clone ID: PAT_MRT4530_73505C.1
ttttgtttgtgacaactgaacgaaatttatatctgaatagtatatttgcaagttngaggtatataaacaatgtattcatcccctcgccgaaaccaatgaacactttctacttctgtaacaccgactacagaaaagtatgccatgacgaacacaaaattaataactaatcaattatttctagaatgtgatacaaatgattcggtatatttgtatgatgttatgctcttactattgaatgtctaacttgcctatggaaaatttctaccaggtgccactacttaagaagattcagaagactgtcttgggagatattatctcaaaatcaaccgcgaacaagatcttgagggagcacccagaaattatctcaaaactgtagcagctctgcatgcgtctctctgcttggtagctgcttgtcttggtgttggtggactattcatcatcagagatctctgcacttnctgccacccactttcaaacacccccagatttttgtctttgagcagttgt

SEQ ID NO: 73203 - DNA, 291 bp, Oryza sativa
  Clone ID: PAT_MRT4530_73506C.1
gcacgagggaagagaggagaactagtctcgagtttttttttttttttttttttttttttttttgtggggtttttgcgaccaaaagtgagatcctcttgattcaactctccctccgatccttttacagtgggcaggtttcactttcacctgattagtaattactactactaaacaccctacttgctttcttacaaagttattagtagtaattaagtgcacagtacacactaactactacagcctacagtgaggccgcgagcttgtcgcagcgagccggcgcgaaggagagca

SEQ ID NO: 73204 - DNA, 1291 bp, Oryza sativa
  Clone ID: PAT_MRT4530_73507C.1
gcccccgctcatgatgggttggactccaccgcggtggcggccgctctaaactagtggatcccccgggctgcgcccacacgtcaacaacaacaaaaaccacttctcgtgggtagaagagagagagagcgaggcgatttcgaccaagaagatggccgggatcgtggtggtgttcgacttcgacaagacgatcatcgacgtcgacagcgacaactgggtcgtggacgggctcggcgcgacggaggagttcgagcggctgctgcccaccatgccgtggaacaccctcatggacaccatgatgggcgagctccacgcgagcggcaagtcgctcgccgacgtcgcgggcgtgctcaggtcggcgccgctcgacccgcgcgtcgtcgccgccatcaaggcctgctacggcctgggctgcgacctccggatcctcagcgacgccaaccgcttcttcatcgacaccatcctcgaccaccacggcctcacgggttacttctccgagatcaacaccaacccgagcgccgtcgacgccgccaccggccgcctccgcatcgcgccgtaccacgacttccacgccggcccgcacgggtgcggcctcgggatctgcccgcccaacatgtgcaagggccaggtgctcgaccgcatccgcgcctccgccggcgccgccggcaagagggtcatctacctcggtgacggccgcggcgactactgcccgtcgctccgcctcggccgcgacgacttcatgatgccacgcaggggcttccccgtgtgggagctcatctgcgaggacccgtcgctgctccacgcggaggtgcactcgtgggccgacggcgccgagatggaggagacgctgctgcggctggtcggcagggtgctcctcgaggagaggaacctgccgccgctcgactgcaagctcgagtcgttgccggccgtcgccgtgcaggacggcatgcccatgacgctccggatcaagaactgatcaatggcggcgacgaacgtacgcatgatttcgagcgcgaaacggctagctcgaacaatgtgtgtgtgaggattgcgatacgggtataattttaactattgactgatttttgcgctacgcgtgattgagcctgcgattagtagaggctcattgtatcttgtccgatcaattgaagtaaaacatttggcttggctctctctctatgagatgtaatccatttctattatcttaaaaaaaaaaaagtaaaacattcagaaaaaaagtaaaacattcctgacagtgaattgactagtctgaattttggcctcgtgccgaatt

SEQ ID NO: 73205 - DNA, 285 bp, Oryza sativa
  Clone ID: PAT_MRT4530_73508C.1
atgacgggagtctctcaaccagttctctccaaaaaccccgggaacgccagaactcctttcgctgctgataacgttacgttcagagcacatggggactcaagttcatggaacagccgatgttatggtttgagcctaagtgatgagcaactagccgatctcgccttccaaggattgtcagcagctatcagagagagattcttttgccacgagtttgacaaccatgctcatctaatgcaaatagtatcagctcatgaaagccgattacaagaagcaaaggaatattag

SEQ ID NO: 73206 - DNA, 892 bp, Oryza sativa
  Clone ID: PAT_MRT4530_73509C.1
ccgggctgcaggaatcggcacgaggtattcctcctcctctctggagtctagtctcctctcctcactcctcactcgccccactccgccgcttcactcgcgagctcgtcgttggcgccggcggcaatggcgtccccccgcgcgctctccctcctcctcgtcctcctgggcatggccctcgcgtcgttcccctccgccgcctccgcctcccgcgacctccgcccccgccgcgcgggcttcgtcgtccgcggccgcgtctggtgcgacacctgcctcgccggcttcgagacccccgcctccacctacatcgccggagcgaaggtaaaggttgagtgcagatcgaaatccactggcgccaagacatgcagcttcgagggccagactgaccacactggcacctacaacatccctgtcaacgatgagcatgagcacgagctctgcgagtctgtccttgtgagcagcccggacgcaaagtgtggcaagattgttgctggacgggagagggctcctgtcttcctcaccaacaacaatggtgtgacatctaatgttcggttggcgaacgctctgggcttccagaaggatgctcctcttgctgcgtgcgcacaaatcctcaagatgtacgaggaagtggacgaccgcgtttgaaggatgtgagttatgtatcaatattcgtacgttgttgaaatactctaagaagacttctatataccttttactgagagcaaaactatcagcatcagatgttgcgtgcttgataagttgtgatatagcttagcacttgagtatgttatatgtatgttcgtctgcagctgaactgcaaaactcatcagttactaaatcgacatgttgtgctttctatcagacaaaaaaaaaaaaaaaaaacccgcggccaaaa

SEQ ID NO: 73207 - DNA, 188 bp, Oryza sativa
  Clone ID: PAT_MRT4530_7350C.1
agcaaaggaaacaaaaacggcaagaccggatacgtcggtcgctccccacgtcccgaggacgaccgacgacggcgacgcggcagctgatcaagcgcgcgacccgcggcgaagtgacgcgccaccaccacgcccatgcactggggggtgatcgaattactcaactccactacgagctctgcccactctag

SEQ ID NO: 73208 - DNA, 648 bp, Oryza sativa
  Clone ID: PAT_MRT4530_73510C.1
tcccgttcgacccagctttcggctttctctctcctccctgggggggggggggggggggactggccaatcacctcttccacagctctacaagccaagcccttgcgccatcgtgtttgcctcgacgaggtgaactcatttttccccttttcccctatcttttagccaccacagcaagccaccaccgccactccttttaggggggggggggagctcctgccgtcgccgttccggcctcctccctctccctctccgccagctactgccttccccggatacgcgacgctcgggaacacgcgtggcctccgacgtcgccgccctccagccaccggagcgccgccaccccgctccccttctcctctctcttctctcggctctctctggaacagagaagaggaagacgagaagaaggaagaagaaggagaaaagaaaaagaaaaataagataagatactgacagagtctattttattctggatggcaacctgtagtatttcgagcatcggataatcaggttgcctatcttggatttatttgcgttggagcaagaattattttggagttcttgttgatgatgggagttcaatcacacaagttaattcccttttaacttagtcttcaagtctaggtaatttaaatggtttaagtctat

SEQ ID NO: 73209 - DNA, 1548 bp, Oryza sativa
  Clone ID: PAT_MRT4530_73511C.1
atggaggcggcgcgggagtcaaaggcggcgctcgtcctcgccgccctagacgactgcgcccagacgttcggggagtttcatgtgtcttcatcaccagcgaccagcgaggctggcatgtccctgaaggacgaaagccaggcactgcgttgctttgctttgcatggagagacagaatgtcgcagggctcggatgaaatttaaagttgcactttgcttatctcctggacgtgcgcagcgtgaagcaattgaagtgatcaaggggctgcgtgctaaaaagagggctctgaaaatcagtatgaagtttgggaagctataaaggatttacagtagtagctgagtagctgccataggctgtacacagtgcctgaagtattcaccttatgtttttgaggctattaaagatttggctgaaatggggctttcttcaaaggagttctctttgatattctcacaagcaccaaatcgaggaggcaaggctccaggtgactctttagatgcacagcgttggtggaaccgctatgttgaggcccaatgttgcattgcttcacatgattataaaggtggccttgacatatatctagacttaatgcagcgattcccgaacaatgtgcacatcttgctggaaattgctaaggttgaagccatcataggtaggaatgatgaagctatcatgaactttgaaaaggctcggttaattgatccaaacatcatgacatatatggatgagtatgcaattctccttaagtcaaaatctgactacacaaagcttaacaagttggtacatgatatgctgcatattgaccctgcaagaccagaaacatgtcttgctcttgcagcattgtgggaaagaaaagatgaaagaaaagctttgacatatgctgaaaagagtctccgagttgatgatagacatataactggatatatcatgaagggaaatcttcatcttttgttgaatcgacctgatttggcagtcacagacttcaggggagctcaagaacttagggccgatcttcgctcttatcaaggattggtacgtgcttatctagcgctctctaaatgcaaagatgcattattcactgcacgtgaagcaatgaaggttatgcatcagtctgcaaaagctctcaaattagttggtgatgtgcatgctatcagttccagtgggagagagaaggctaggaagttctatgaatccgccattcgtcttgaacctggatttctgggagctgcattggctttggctgatctgcatgtcgctgaaggacgaaataaggatgcagtattgctgcttgaaagatatctaagacagtggacagatgattctctacacatcaagttggctcaagtttttgcagcaacgaatatgctttctgatgcactttcccactaccaatctgctctaaggataaacccacataatgaggccgcaaagaaaggattggaacgcttagagaagcaaatgaagggagtagacccggacgcgcctgaagaggacgaagagaacgaagctgacgatgtcgacggtgatcaagacgacgctgaactactgtag

SEQ ID NO: 73210 - DNA, 216 bp, Oryza sativa
  Clone ID: PAT_MRT4530_73512C.1
atgaggctagacctcctcgacgccacattcctctccaggctctgcggcgacgtggccgggagggtgtcggtcctcgtccccgacgtccccaccacgaccagcctcgtgaaggcgctggggagttggtccgggccgcgctacgcggaggtgctagtggccgccccggacgccgccgcgcccgacaccgtcgtgtggaaggcctgctcaaggggctag

SEQ ID NO: 73211 - DNA, 487 bp, Oryza sativa
  Clone ID: PAT_MRT4530_73513C.1
gccgccaccgtcggccgatctccttcaccgtagctccacaacccaaaccctcgcgccatcgggcttgcctcgactggttcttatttaagtcctcgcgcaggaggcaaacttatgccgcgaagggcaaatataacatttaccgaggcacagctctctctaaaaacctcgggaacgccagaacttctctcgctgctgataacgttacgttcagagtgcatgaggatgaaagttcatggaacagttgatacagttaaacatgtcggtttccgaatcattagttttgagatccgacagcacactgagcgtaacgaattcatggatgatcaaagaagttgattgggaccaaaccaagaccttcttcaagtccatcgattggattgagtgacgttggcgatctgactacaactatccagggatgttgctccttagcaatcgttacaccaactccaaaggcagtcgtgaattgcatagtcagcctaaccacaag

SEQ ID NO: 73212 - DNA, 221 bp, Oryza sativa
  Clone ID: PAT_MRT4530_73514C.1
atttttgtgttttggattttacaaccaacagcgaagacagagagtgctagataggctttatttggcaggtcccgtcaacgtgataacaaaatctatggactgcttggaacgacaactatttgcaccgccgctgaatatgtacagacagtccataatgagacctcgaatgggaatggtgaaactgccaataagccattaaaaatacgggaaatgaaaacact

SEQ ID NO: 73213 - DNA, 309 bp, Oryza sativa
  Clone ID: PAT_MRT4530_73515C.1
atggcggccttgaccagcggcgagcagcagcggaaggcggtggactctcaaagcacgtcgcagaacaacggcgagtacttgttattggcggtggtgacgagcatcgggatgcgtactcgacggtcacataccggtccaatggcgatcagggcttcttcgcgggcgagccttgctaagacgcttgtgtcgttctacctgctcgctagtcggcttggcatcgacggagctggccacatccaaatcgactacaccggtcatgtacctccagtgtggtggtgtcgtgctcagcctggcaacgcaccacactaa

SEQ ID NO: 73214 - DNA, 285 bp, Oryza sativa
  Clone ID: PAT_MRT4530_73516C.1
ctgtcgagaatcagacttaaagacaaatgggctaagaacaccaaattcagaagatccaacaagcctaaaattcacaagtctacggagaggagcaaacgaggaagccatctgctgaaaatgggacaggttggcccagcccatggttcggccgaaccatgggttcggcctaacctgccgtggcgccatttgatccatggttttgatggacgattgagatgacttcccaatgatggttggagggtattaccgacctttccaaccatcgcaaccatcattctcaagcta

SEQ ID NO: 73215 - DNA, 396 bp, Oryza sativa
  Clone ID: PAT_MRT4530_73517C.1
atggactcatcccttgtctactggaagcttgagattcttccgcgaaaggcattggtcttgcccatcaggaagaacttcgagaggaacgccatagagcatttgttccatatgagcactagcatcctcatttggcttgccacagaaggggctagcctgcgccattctaatgaggctggtcttcaagtcgaagtaaccgtctcccaagtcgatgtgtggcccaatgggcacattgttagcagagggagcggcgaactcacgggaggtcttctcagccatattcttaaagctcggggacgctgggatgactgttggaaatgccagaaacgccctccaaccgtcattgagagtacatctggaacgtccacgtggaaggacgggatgagtggctatggctag

SEQ ID NO: 73216 - DNA, 1158 bp, Oryza sativa
  Clone ID: PAT_MRT4530_73518C.1
atgaccgagctcgcggctggcgccgtgagctcactgctggtggtcatccgcaacgaggctgtgctgcttggcggcgtccgggacgatgtgcagttcatcaaggaggagatggagagcatgaacagcttcctggggcacctagccaggagcgcgccgcagggtggagagcacgacgagcaggtgcgcacctggatgaaccaggtgcgcctgctcgcgcaggactgcaacaactgcatcgacctctacctctacagcgggaacccggagatccaccgtaccaaaggtagactccggcgacacctctggtgggtctactggtccctgcgcaagatggtcgcgcagcaccgagcggccatccaactccgccagctcaaggaccgggcgcgggacgtcggcaagcgacgactgaggtatggcgttgagatcccagccacgacgaaggcggccgcacctgatgcaacaggtggctatgttgctgaggacgatgaagaagaagatgaagatgaccgcgaaggacaatttgctgtggcaacaccaacgttggcccatcattctgctcgatggcccgtctttgagcccccttctctggacgactacgtggaggcgaagttattggagtggattgggggagttcctggaaacgccatcgtgacgttgtccatcgccattgtagcaccagatgcagataataaggaagtccttgctattgcacatgaaactttggttgctccaaactactactaccgtcgcagtatcatggtcaacgtcccggcggtgcaccttgatgttttaccgcttcgacccaaggaggtcctctactacatcttgcgggagctcgagcgggaagaagcggccggatcgcagaagcagcccacagatcaagatgaaaagaccaagaagcttaatgagcaaactggagtagaagaagaaacagcagtcagacaaggcggaggaggagagagggaggaggatgagaaagacgaaagaggagacggagaagaagaggggaaggaggagaggagggacatggagaaaggaggagaagagaggaaggagcagcagcaggaggagcaggagaaagaagggaggaaggaggaacagaacgagggagcacagaacaggctaaaggatattgctatccaccacgagaacctatag

SEQ ID NO: 73217 - DNA, 156 bp, Oryza sativa
  Clone ID: PAT_MRT4530_73519C.1
atggtcgagcgcggcgaggtggtcgtcatcgttgctgacgagggcgtcgacctgtcggggatgcggcggaacgagttggcgacgacggtcccagggatggtgcatgcgcaaagaatcgacgaggaggtcaccggagcggagggaatcgaagattga

SEQ ID NO: 73218 - DNA, 159 bp, Oryza sativa
  Clone ID: PAT_MRT4530_7351C.1
gcacgaggctggagctaagtccaagactgtttttttcttttgggggcactatgagacaagagctgttacttattattacccataatcatcacctgagcttgtctttggcctgtagtttttacatcacaagattattattttttacttctgcctgattcc

SEQ ID NO: 73219 - DNA, 4724 bp, Oryza sativa
  unsure (1)..(4724): unsure at all n locations
  Clone ID: PAT_MRT4530_73520C.1
ttatggtttattatgtttaagatttatgcttttattgtttttaatggcttcttccacatcatttgggactgagtatccattgaactcgagctccttcaacctaggaaggttgttgatgccagagagagaggtgaaagatgaccagacgatcttcttgagcctaggagctgatccagtgatgaagttaatcttggtgatggtagagcaatcaacactaagaagtttgagccatatgaactcttctttttcgaaggtaatctggttctggcttatgtcaaaagagttttccaagagcactaggcagcatatatttagttccctggcgatgattcgtagatcaccttgcttcagcaatgtaccacgaagagtcagcttggctattcgttcaacattgtaaaaacatgatgatagcaaccttccgcagctgctgctgttcaactcaagctcttcgaattttggaagcccatgaactccagaaatagactctatgcaagtggaagataaaaccatcttctcgagctcacaggctgcctcatcctcaaaagtaatattagtcaagtttgagccctcaataagaaggtacttgaggcatttgaaatcatctttcttgaagttgagcacactctcggtgcatgaaatgtgtcggagcctaacacactgtaacatgggcagctgggcaaagaactacagcaagaattattacatcatgcagatcataaagacacgcttggcaacagcagaaagaaataaatcagtcaagcagcgaatgagatgcttggctccactgatgcttagactctcaagaaactcaggatggtgttttaggcgagatgcaatatcttgtaactctgggcttgaaggagtaacctcgagtgtggttgtgggaatagtgattgacagagaacggaggcttgcatgtaggtcactgatcgctttaagcaaactcccaaggtgacttttcttaccatcaataaccacacctagcttcctcaactggcatagcttcccaatatcttccaaattatcatggtgctgggccttgacattagatagtacctctatgtttatcatcttgtctatcctggaaggaatccggacgttagtgacaaaatttcttggagttggatcaatctgactagcaccagcaagtagacgcttcagcttcaagagcaggacatttactgttgcatttgcaggcaccttggtttctcggatatccaatacctctagctcgcggaggcagttgatttcactgggcagctgggtaatatctgttccctttaggctcagatatttgagcagtaacatcttgttgcagatgtccttgaggtaccgctgattcttactagcaaagcactgacaaccttctagatctagcaccttgagtagggatactcgagatgatcgtgagaggccttggaagaacgtgccaattctatcagagctgcggagtcgaagatcattgaaaatggagaagtggcgagccaagtgatgtgataggcgtgtctccacaatatgttgttttctggcaattgcggtaatgaacccatgaactggatcgcctaccacacagctcttgatctttcctgtggcactaatatcatcaggataaacaagccaccgacggatgagggcatcaaaacatcgatttgcctgatacacagagctgggccaatcttccttgaatgtcaacccttctgcaacccaccttgcaatcaaggttgaccgcctaatcttctgtcccttggggaagatagctaggtacagcaagcatgacttgtattctttaggtagatcattgtaagagtacatgaacatcttcttagctatggtgtcgaatgatttttttggagactgcagggtgctgtgtagcttccttaactcttcattgctcctcttgggattagcatacacagcatgagtgaagatcttcatgcagaattcatgcccctcacactcctccaagatgccacgaaaaatctgtgcgttatcgttgtcttcattcttgtgcttgctagtaagcttgagcaccgtataatagtagagaccaacaagagaacagtgatctataggttctcgtggtggatagcaatatcctttagcctgttctgtgctccctgtggtgaagatcaatgcatctgcactcaattctaacaggctcagagcctttctgatctcctcccatcgggatccatccatcatctgatcaaattttaggataatgagggggcactgatcctgtaagtgatgtttaatcttgtccacgatccatttgatcttcagctgctctttaagttcctgcttgatttcttcaatcttctgctctacttcttcaaaataagcctcttcgttttgatccagaacaactgcatgttgacctgttgcttgattcttatcaggtggaacatcaggttcacctgttgcttgattcttatcagtttcgcgtccccgcagctcccttaagacatcttgttttgcttcgttgatcatttgtttgattcgttcctcatccaatgtagtggctgcagtctttgtagcttgctcggccaccaatttatcttgctcctgggccttgctgctggcgttctttgtgaacacttctcgtaggatttgttcatattgatcttcatgaagatgaattggttcttcttcatcatcgtcgtcctcctcctcctcctcctcatcatcatcatcatcattgctgtcttcatcattatcagcatcatggtcttctttttcttcctcctctcctgctacttgttcttttcttccttctgtctcctttcttacctcgttctgttcctccttcctcccttctttctcctgctcctcctgctgctgctccttcctctcttctcctttctccatgtccctcctctcctccttcccctcttcttctccgtctcctctttcgtctttctcatcctccttcctctctcctcctccgccttgtctgactgctgtttcttcttctactccagtttgctcattaagcttcttggtcttttcatctgcttccatatgatccttcagcctcatggctaatttttctatgaggttgtcgttccactctggtaatttatgggtgtctactgctttgttcttcgcttggtcttgctgagactggagcaccaacagctgaaggagtacatgtaggtccacctgatccgcacctttctcttgtagcttaagcagcaacagcttgccgctcttgtgttgtccttctcgaatgtcgctcttgatcttatcaagcttttcgtaaatattcatcttttttatattccttttgattttatcgagcacaccttttttgctacggtaaatgccacattttttgtagtaatcttgccaagggtcaggatcctcctcctcccattcaccttgatctgtgggctgcttctgcgatccggccgcttcttcccgctcgagctcccgcaagatgtagtagaggacctccttgggtcgaagcggtaaaaaatcaaggtgcaccgccgggacgttgaccatgatactgcgacggtagtagtagtctggagcaaccaaagtttcatgtgcaatagcaaggacttccttattatctgcatctggtgctacaatggcgatggacaacgtcacgatggcgtttccaggaactccctcaatccactccaataacttggccttcacgtagtcgtccagagaagggggctcaaagacgggccatcgagcagaatgatgggccaacgttggtgttgccacagcaaattgtccttcgcggtcatcttcatcttcttcttcatcgtccccagcagcatagccacctgttgcatcaggtgcggccgccttcgtcgtggctgggatctcaacgccatacctcagtcgtcgctcgccgacgtcccgcgcccggtccttgagctggcggagctggatggccgctcggtgctgcgcgaccatcttgcgcagggaccagtagacccaccagaggtgtcgccggagtctacctttggcacggtggatctccgggttcccgctgtagaggtagaggtcgatgcagttgttgcagtcctgcgcgagcaggcgcacctggttcatccaggtgcgcacctgctcgtcgtgctctccaccctgcggcgcgctcctggctaggtgccctacgaagctgttcatgctctccatctcctccttgatgaactgcacatcgtcccggacgccgccaagcagcacagcctcgttgcggatgaccaccagcagtgagctcacggcgccagccgcgagctcggtcatcgacgtcccgcgcccggtccttgagctggcggagttggatgnccgctcggtgctgcgcgaccatcttgcgcagggaccagtagacccaccagaggtgtcgccggagtctacctttggtacggtggatctccgggttcccgctgtagaggtagaggtcgatgcagttgttgcagtcctgcgcgagcaggcgcacctggttcatccaggtgcgcacctgctcgtcgtgctctccaccctgcggcgcgctcctggctaggtgccccaggaagctgttcatgctctccatctcctccttgatgaactgcacatcgtcccggacgccgccaagcagcacagcctcgttgcggatgaccaccagcagtgagctcacggcgccagccgcgagctcggtcatggccgctgatggctcccgctccttccgtggtcttcaattaaaattggtcttgctgcctcgcggtcgg

SEQ ID NO: 73220 - DNA, 342 bp, Oryza sativa
  Clone ID: PAT_MRT4530_73521C.1
atggatccggcggtgggcagtgaaggacaggggcggtcatggtggaggaggtgctgtgttcgagcccagatgaaagcattaatatcaaatatattaagattgggtgggggcggatctgtgggcggaagaggtgcgcgcggcgatggtgacggtggatgggatgaatccggcggtgggaaggggagcaggcggtgtatccacggccgagaggggcatgggccagaggggcgcaagcggggggaagggcgcgagctgcaggaagcgactgtgacggtggagtggacggatccggtagcgggagacgaaggagaggggctgtcgcggtggaggcggtggatctag

SEQ ID NO: 73221 - DNA, 486 bp, Oryza sativa
  unsure (1)..(486): unsure at all n locations
  Clone ID: PAT_MRT4530_73522C.1
aggaccacggtgtgtcacaaaccaatgagcccaggaggtggctgccaagtggatatgcagaaggagagaccgggttaccggctgaagcagatggaggttggtaccccaagaggatntcgtgtgcttgagagcgcggaagcaatgctgacacatggattttggctgttgcacacacactggttggcgtggcgcactgctgacgccgagtcgcaaggaaaggtgtgaaaatgttgacaatctgagctgaccactgaggactgtgcaagacctgtgccccatcgcnttgacctgccnccaactgccatgttgatgtngtggtgtgtgtaatccttgaatggcttggccacagcaagctgcctgatgaggactggcttgttgaaaccgtgatgtctgcatgaggacttgttgatgtgagcctgttaagcgactgctaaactttcttcataaaagggtattatcccttattaaaaaaaaaaaaaaaaaaaa

SEQ ID NO: 73222 - DNA, 1135 bp, Oryza sativa
  Clone ID: PAT_MRT4530_73523C.1
atggccgcgccgtgcaggggcagccgcggcgccctcccgctcctcctcatctccctctccgccgcctacctcacctacaccgcgctcctctcctcccgctccctcctccccctccccaccgcctccttccccggcgccaccgcctcccgccgcctcgcctcgggccgcccgacggcggcggcggcgttccacaccgcggtcaccgcgtcgggctccctctacaacacgtggcagtgccgggtcatgtactactggttcaagcgggcgcgtgaggccggcggcggcggaggcgccgagatgggcgggttcaccaggatcctccactccgggaagcccgacgcgttcgtcgacgagatccccaccttcgtcgccgacccgctccccgctggcacggatcagggatacgttgttctcaatagaccttgggcatttgttcagtggcttcaaaaggcagacatacaagaagaatatatcttgatggcagaaccagatcatcttattgtcaaacctataccgaatttatcaagggatggtcgttcagcagctttccctttcttctacattgagcccaaaaaatatgaaaatgtgctgcgtaagttcttccctgaacatgaaggaccaataaccaaaattgatcctattggaaattcccctgtcatcgcaagaaaggaatctcttgcaagaattgctccaacttggatgaatatttcaatagcaatgaagaaagatcctgaaacagataaagcttttggctgggttcttgaaatgtatgcttatgccgtagcatccgctctccatggagtgggtaacatcttacataaggaatttatgattcagccaccatgggacttggaaattggtgatgcatttatcatacattatacttatgggtgtgactatgatatgaagggtaaactcacttatggcaaaattggagaatggagatttgacaaaagatcctatgatagtaaacctcctcctagaaatttgccattgcctccaaatggtgtacctcaaagcgtggtgacacttgtgaaaatggttaatgaagcaacagccaacatacccaactgggattcttatgcagctgcatagctgattcaccttgttacaatctgatggttggttcgtcaat

SEQ ID NO: 73223 - DNA, 1137 bp, Oryza sativa
  Clone ID: PAT_MRT4530_73524C.1
atggcgtggagcttaggtccatccgggtgcatcctcggagtaattttaatttttctaaccgtggcaaacatgattgacggagcgtggggctcctcaccgggagaccgcgcaggcccccctttgccggttcggccgggggcgctaagtgaggttcttcgccctcgatatgaggaatgtcagcgagaaaaagcgcacaagacacgggccacgaaaaccgagagctccagagccagagagctcgagagcgagagagagttcaggctctccgatcaaccggaaatgacctctgacaagcagtacacacgcctcctgctccgctcgtcagctctcccggtggacgcccgtttcatccttcattcaatggccagcgattttcttgccatgcttgcactgaagcctggaatggatctgaccgggactgacataccaactccaggagtcagcatgccagctccggctagagacgagaaccaggaagctctcatcattccgacgggacggggtgaggcatctgggagggaggggagggagcgccgcctccgccaccgtggctccctcctccagccagatcccgcctcgacgacctccccgccggccgtctctcccacgtcgccgctggggaacaactgcctctccacacgcctcagccgcccctgtccggatctgaagaacggctccacgacgacgagcgcccatggcctccaccgcctcccgccgttgctgacgtgctgcgccaagccgccagcagccacggtgttcagtgttcacacatggatggagacatggacattaattctgctccgtcttcgtcgtctagccccgcgcaactttgacttaatcaccgttcaagagctcggctacaacgatttcctcgacaatgccgtgatcgactacgtggccgcccccaccatcgctcccctcctccggccatatccaggagcgtggagggaggaaggggaggaagccgccggtatcggatccggccgcgggaagccaccgccgttgggaggacgccgccggatcttgaggctgagagggagggacggccatcgaggccgatggggagaaggagagggggagggacggccgtcgctgccatctccaccgtaccccgccgtcgccgcgccatgccggtga

SEQ ID NO: 73224 - DNA, 1694 bp, Oryza sativa
  Clone ID: PAT_MRT4530_73525C.1
tctcggcgggtacaccatctcttcattctgtattccttgtcgagatctagcaaccgttctcgagcgatcgagaaggcgtagagtatggtctttcatctctgaaggattcgacaaagccttatccgctctgggcgtccccagccgaagttcccttaggttcctcagaggttttgtcaagacggcgtaaagggacattaggataggtttcaacgctaggtgtcttttgtggtaagggatctctgggtaaaacacttggcaatcttgtgcacctgatatcaactttgttgaagcaggggtaatgggagaatcgctacatcgctggtcgaggaccaggcagtagtcgtaactcgaccacgctggtcgaggaccaggcagtagtcgtgactcgaccacttaaagtggaagtagtgggaggtagtgggagaaacgctacatcgctggtcgaggaccaggcagtagtcgtgactcgaccacttaaagtggaagtagtgggagaatcgttacaccgctggtcgaggacctggtgtagtctaaactcgaccactagaagtaagggtagttggagaaacgctatatcgctggtcgaggaccaggcagtagtcgtaactcgaccacttaaagtggaagtggtgggagaaacgctacatcgctggtcgaggaccaggcagtagtcgtagctcgaccactttaggcgagagagatcactacgctttactggttcgagaacaaccgacggcgtttgcgaggaattatccgttaacaaccttttctcgagtagtccaaccatggccggtgctatgagataggtcgtcgatcttcgttggtaagttgggtgcgacgactccgcatttgtcgagaatgttctcaatagtggggtgtactcgaccacaacctactcgagtgctcaattgttccttattgcgtactcgttcgacatcatatgatctgacatcttttggtatgccgcgtatctagaggcttggatgatctcgatagaccaagttgtcgatgacgacgatggttccgattccgtcgggggacgtactccagtcggggtagtcttcctcatcgactccgtgcccggcgagatcagagatagcgcttttgtttctcctgacagtatccggagacaccgtatgggactagccgtgcttatccctgaagtcgatatccggcgtcttgtcttggcgtatgttggcttgtatgttgatctatgttccgtgtatgttgattgtgatggagataacgttagacttcctttatcagcctcgtgcgggcacctaaagggtttgtctgagtcaatctctgacgtcaaccaagaaagatccgacaaggccttatcggctctgggcgtccccagccgaagtttccttaggttcctcggaggccttgtcaagacggcgtcaagggacagtaggataggtttcaacgctaggtgtcatcgtggtaagggatctctgggtaaaacacttggcgatcttgtgtaccttgttgcgtactcgttcgatgtcatgcgatctgacatcttttggtacgccgcgaagcttgaggcttggatgatctcgatagaccaagttgtcgatgacgataattgttccgatcttagtcggaagatttacttggacaggttggatctctccacggccgaagtcatcgagtagcttgttgttggagaatccatctcttaaacccat

SEQ ID NO: 73225 - DNA, 1069 bp, Oryza sativa
  Clone ID: PAT_MRT4530_73526C.1
tgaagttggaaagctcagtttctgattacacggcttggttaatacgcacggcgagaactcttacacgaccagatcttacatggtcttttgtctctacaggatccgacaagcccttatcggctctgggcgtccccagccaaagttcccttaggttcctcggaggtcttgtcaagacggcgtaaagggacagtaggataggtttcaacgctaggtgtcgtcgtggtaagggatctctgggtaaaacacttggcgatattgtgtacctgctatcaactttgttgaaatagaggtagtaggagagtcgctacaccgctggtcgaggaccaggtagtagtcgtaactcgaccacttaaagtggaaatagtgggagaaacgctacatcgctggtcgagaaccaggcagtagtcgtaactcgaccacctaaagtggaaatagtgggagaaacgctacatcgctggtcgagaaccaggcagtagtcgtaactcgaccacctaaagtggaaatagtgggagaaacgctacatcgctggtcgaggaccaggcaatagtcgtaactcgaccactagaagtggaaatagtgggagaaacgctacaccgctggtcgagaaccaggcagtagtcgtaactcgaccactagaagtggaaatagtaggagaaacgctataccgctggtcgagaaccagtcagtagtcgtaactcgaccacttgaagcaaatgtacgagagatcacataatcacaccaatacaatatgtggggtagcctatctaactgttatcgacatgtcggtctgaagatctgactcgtaatcgacaacagggtagccttcctcctcgaatctgtgcccggcgagatcagagatagcgctttcgtctctcctgacggtatccggagacaccgtaggggaatagccatgcctatccctgaagtcgatatccggcgtcttgtcttggagtatgttggcttgtatgttgtggcttctatgtcgattgtgttgggtgttgattgtctcgtcatggtgggtgttgatcgtgttgatcgtctcatcatggttgtccccctgtcctcctag

SEQ ID NO: 73226 - DNA, 704 bp, Oryza sativa
  Clone ID: PAT_MRT4530_73527C.1
atccccgggctgcaggtttctgtccatgcaggttgtccagcttaccaaatttgactaccgggtttccaatagattggagactaacgtgggaaagcttaggtgcagagtcaattatcctgcactacagttcacagatccaattcttaagatgggcgaaatgcttgtccaaagaatgagagccaaaagtggacgcttcattgcccttcacctaagatttgagcctgacatgctcgccttctctggttgctactttggaggtggggaaattgagagaagagaactcggtgcaatccgtaagagatggaagacactgcatgcaagcaaccctgacagagaacgtaggcacggtaagtgccctctcacaccagaagaggttggcctcatgctccgagcattgggatttgggaaggatgtgcacatatatgttgcatcaggtgaggtgtatggtggagaggagacgctggcacctctgaaagcgctcttcccaaacttccactcaaaggaaactctagctagcaaggaggagttggcgcctttcctctcattttcatctcgcatggcagcgcttgattatattgtgtgtgataagagtgatgtatttgtgacaaataacaacggcaacatggccagaatgttggctggtcgaaggtaatgtttttacccgtttctcagaaatagtttgggtacatctggtcatattctga

SEQ ID NO: 73227 - DNA, 840 bp, Oryza sativa
  Clone ID: PAT_MRT4530_73528C.1
atgctgtcacagacaaaccctttggcttctcaccctcttaaccttgttcacttttatccagaccagataatatatgagccaccgaattactgcaacttcgtggggattaatcgagattttgatgtgcactctagtctatcttggctggccatccaacttgcccttgtcctctacgggttgcaagtggccacgcacagttgcgttggtctacgcaccgtagatcacgccgctggtgtcgacgaatttaacttggttcaagatgtgccatgtgtgccatttctcgggggcgaaaccctagccgcctgcgtcgccaccttccatccaccctcaacgcctcgccgtcgccggagctcgctgctgcaaaggcgagcggccaactgggaaggcggtggtgaggacatcgtgagtcgtgacccagcgaagctcgcccttggcacgagaggacggagcggcgcatggcgttgcaggtccacagcggctagagtcgatcggcaagggcgcaatggatccgacgctctcggaagtggatttggcattcccaatgcaggggcgcagacggcggtggaggttggcagctggagagaaggtggtggcggcagtggcggtggtgccggatctagagctcccagatccagttcgacagtggcgctgtgacaggaggaagcgcacggcgccggccgacacgacgacgtgtggccggcgaagcgcgtggagagtgcgacacctgttgtggggctccagagggaagaccatgatgatggccctggcatgaaggagcacgattagtggaacatggccggcgtggtggcgagcctgcctcttcctctccagcccacccat

SEQ ID NO: 73228 - DNA, 423 bp, Oryza sativa
  Clone ID: PAT_MRT4530_73529C.1
atgagcgtggagatcctcgacggcaagacggtgcggagcttcgtggaggacgagggcgccttcaactcctcggtcgacggccgcttcgccgcgctcgacgccaaccgcgacggcgtgctctcctacgccgagatggccggggagctgatgagcctccgcgtgctggagaagcacttcggcgccgacgaagacgaggccgccatgggcgccgacgagctcgcggcgctgtaccgcgggctgttcgcgcggttcgaccgcgacggcagcggcggcgtcgacctggaggagttccgggcggagatgaaggaggtgttgctcgccgtcgccaacgggctagggttcttgccggtgcagatggtcgtcgaggaaggcagctttctcaaggtggccgtcgacagggagctcgccggagcagctgcctaa

SEQ ID NO: 73229 - DNA, 177 bp, Oryza sativa
  unsure (1)..(177): unsure at all n locations
  Clone ID: PAT_MRT4530_7352C.1
cgtgngggtatgtgtgtgatgtaatgactgagtacgaataatgggcatagtacgtactgatggcggacaagggctgctatgctatgtgagcttagccctgttttcttttcaaatagnaactattataatgccatggagtcatcgcgctcggnggcgatntatatattttcttctctc

SEQ ID NO: 73230 - DNA, 327 bp, Oryza sativa
  Clone ID: PAT_MRT4530_73530C.1
atgggtcatacctacctccactccgccggaagcagatgcaacgtgggagcatggttgtctgccgatgacgtgaccggcgtcagaccagtcacaaaccggtcattcttgtccaccacgcgtcagtttagcatgccgcacgtctgcccttcttcatacaatgacttccttgccatggttgcgatgaagcctggaatgaatctggccgggactgacataccaactccaggagttaacacgccggctccggctagggacgagcgcctggaggctctcatcattccgacgggacggggcgaggcgtgtgacaggccgcctgttgccacctaa

SEQ ID NO: 73231 - DNA, 167 bp, Oryza sativa
  Clone ID: PAT_MRT4530_73531C.1
ctcgtgtcgtgtgttcgccaccattgccactcagagcgcagagaagagatcgatcgatcatgtccatcaatgccgtcccgagccccgtcccgtccgcctccgacgacgccgagagcctcaggaaggcgcttcaggatggagagcggacagggcgccctgcccggatc

SEQ ID NO: 73232 - DNA, 417 bp, Oryza sativa
  Clone ID: PAT_MRT4530_73532C.1
atgagtgtggagatcctcgacggcaagacggtccggagcttcgtggaggacgagggcgccttcaactcctcggtcgacggccgcttcgccgcgctcgacgccaaccgcgacggcctcctctcctacaccgagatggccggggagctgatgagcctccgcgtgctggagaagcacttcggcgtcgacgacgaggccgccatgggcgccgacgagctcgtggagctgtaccgtggcctgttcgcgaggttcgaccgcgacggcaatggcgcggtggacctggaggagttccgggccgagatgaaggagatgctgctcgccgtcgccaatggcctcgggttcctgccggtgcagatggtcgtcgaggaaggcagctttctcaaggtggccgtcgacagggagctggccaaagctgcttaa

SEQ ID NO: 73233 - DNA, 2433 bp, Oryza sativa
  Clone ID: PAT_MRT4530_73533C.1
tctaactgttgtcgacatggcggtatgaagttctgactcatagtcgacaacaaggtagccctcctcctcgaatccgtgtccggcgagattagagatagcgctttcgtctctcctgacagtatccggagataccgtaggggaatagccatgcctatccctgaagttgatatctggcgacttgtcttggagtatgttggcttgtatgttgtgacttgtgttgttccgtatattgtgaactccctcgagactttggaggaactgttatcgagctcacgtgaccgttctcgatctatcttcagtagttatggtggaatttgcttaattcttgtctacttgacctccctgacatatttagctaggagcacaactgagtacagacgtggtgtcaataacttcatagaatttgcttttactcattcagcaaaaggaaataaaatactgtgtccttgcaagaagtgtgttaattgttcatggttggaagcaaacattgtaattgaacacctgatatgtgatggatttaagcatgggtaccggctgtggatttttcatggggaagcatcatcttctgcacattgcactacacatgaacaagttcaagtagaacagagggcagttgatcgtgatgaaattcctgaaatgcttagagatatggcatatggtttagatcaaatgggggaggggggtgctgctgatggcagttcaggggatgccaataatgatgtcgatgatttttatagattagtagatgatgcaagtcaggagctgtaccctggttgcaagaccttctctaaactaaatttcttagtctgtttgctgcatacaaaatttctaggaggatggagtgataaaagctttgacatgctactggacttacttagagaggcatttcctgaaggtgcagaactacctaaaaatttttatgaagcaaagaaggccgttaaatctctaggttttggctacattaacattcatgcttgtgaaaatgattgcatattattttggaaacagtatgaaaattatacttcttgcccaaaatgtaatacttctcgatggaagatggaaagaaagagtcttgatggaaaacgtttccacaaagttcctagaaaagttcttaggtatttcccaattaaggaaagacttcaaagactatacattaacccagagatggccaaaaatatgaggtggcatgatgaaggacgtacaaaagatggattgcttagacatccagcagattctccagcttggaaacacttggacacagtccatcctacctttggtaatgaaagtcgtaatataagattagcgttagctactgatggcttcaatcccttcatatccttgaattctacccatagtacttggcctgttattgcaattccatacaatgtgccaccctggatgtgtatgaaacaacctaatttcatcctatcactgttaattcctggtccaactgcccctggtaatgatatggatgtctacatggaaccattaatagatgatttggaatctctttggcgtgaaggcattaggacttatgatgcttctaagggtgaatttttccaactgcgtgctgcagtattaaccaccatatcagactatcccggcttaggatattttcatggatgcacaacttcaggtgaagttgcttgcactgattgccacatagaaaccggttatacaaggctatcaaagggcagcaagagttcttacatggcacatcgcaggaggagggatcaaaatgttgctgagaacaagcgcaggatacaagttctaaatctagaatctatgctaaagtctataaggactgaaggagctagctcttcacagcaagctaagaaaactagcaagaagagaaaatgcattagctctgtgccaattgaacctcgaaatctacgccccagactagcaagaattgatacaacaaatgagcatgtaggacatagtgatctgcaccctaggctaccaagaaatggaagtactaatggtcctgaaggacaagatgaaggtcctcaacctgtggctgctgaacagaatggggattccaacagagcacaaccaaagaaacgagaaggaagaaaattcactagaaaggataacatatggtttagagaagaagacgagccactgatcaagatggagttcaacgaatttgatcagccagtagggaaagctgctaaagagtttccacatgttgttggtacacttgtaagaactaagggtttccctctcaatcatgatgactggagacatgttgatgaagattcgaagcagttcattatcgatgctttggaggtgtacaccatttcttcattccatattccttgtcgagatccagcaaccgttctcgagcgatcgagaaggcgtagagtctgcgacggagctttgtcgacatttgtcgtactcgtcttagtcgatcttggtgtagaaccatag

SEQ ID NO: 73234 - DNA, 360 bp, Oryza sativa
  Clone ID: PAT_MRT4530_73534C.1
atggccgctgtccgaatgacccctccgatgggatgggtcatacctacctccacttcgccggaagcagatgcaacgtgggagcacggtttgtctgctgatgacgtgaccggcgtcagaccagtcacagaccggtcattcttgtccaccacgtgtcagtttagcatgccgcacgtctgtccttcttcatacaatgacttccttgcaatggttgcgatgaagcctggaatgtatctggccgggactggcgtgctaactccaggagttagcacgccggctccggctagggacaagtgcctggaggctctcatcattccgacgggacggggcgaggcgtgtgacaggccgcctgctgccacctaa

SEQ ID NO: 73235 - DNA, 3761 bp, Oryza sativa
  Clone ID: PAT_MRT4530_73535C.1
agacgcggccgggcgagcgcatgcggcgtgacaccggcggccccgtggtgtcggcgtgcttgcttcgccgccggtgatgaggaggaggagcagccgtcgtcgtcccggcggggctgcggtggacggcggagagcgggtcgagggcgaaggatgtcgacgtttgatgtctcgactacggtatttggatagtatggggatcgctggtgttaggatatacgtgagacagtactatatgtgggtagcctatctaactgttgtcgacatgtcggtctaaaggtctgactcgtagtcgacaacagggtagtcttcctcctcgaatccgtgcccggttgtttccgtataggacatggtatgtggtatccataaccctgacagtagcccccgacatcaatgcaaatgaacgaactcatattctcaaccgcagaccctggagtagctgttatcgagctcacgtgaacgttctcgtcgtacctcgaccatctgaggttgcggtgcgagagattactacgcactggtttgaggaccagcgaacgtgtagaattatctctcggacaccaatggaggttgcggtacgagagattgctacgcactggttcgaggaccagcgagcgagtagaatcatctctcaaacaccaatggaggttgcggtgcgggagattgctacgtactggttcgagaaccagcgagcaagtagaatcatctctcgaacaccaatggaggttgcggtgcgggagattgctacgtactggttcaagaaccagattgctacgtactggttcgagaaccagcgagcgagtagaatcatctctcgaacaccaatggaggttgtggtgcgagagattgctacgtaccggttcgaggaccagcgaacgagtagaatcatctctcgaacaccaatggaggttgcggtgcggaagattgctacatactggttcgagaaccagcgagcgagtagaatcttctctcgaacaccaatggaagttgcggtgcgggagattgctacgcactggttcgagaaccagcgagcgagtagaatcatctctcgaacaccaatggaagttgcggtgcgggagattgctacgtactggttcgagaaccagcgagcgagtagaatcatctctcgaacaccaatggaggttcgggctcctgaattgtcaggttgtttccgtataggacatggatgggaaaagcgggctgttgcgcgcgccctaaaacaacggtacacattacgcaggttttcgagagctttttggaatttagagggaatctcattttcacttgtcagccaggagaacagtgagcacccgttcttcaggaaatctggcaatctccatgggtctcaaacacacatcgaacctgaaaagtgccagttgccaggtaagtgtgccacacatgaagatgaggacagagacaatatgatcttcctcgtgttctatgtgtttgtggtgttactaggagagttctgctcctcttgctcttgtgctcaggtttatgtggtctacatgggcaaaggattgcaaggcagcactgagaatcggcatgacatgctgaggcttcatcaccagatgctgacagctgttcatgacggaagcttgactaattggatgcttggtctcagcatggagaaggcagaggcatcgcatgtctacacttacagcaacggtttccaaggatttgcagcaaagctgaacaaacaacaagccatgaaattagccaatatgcctggtgtcatctcagtgttcccaaacacaaagaggagcctccacaccactcattcatgggatttcatgggcttgtccgtcgatgcagcggctgagctacctgaattgtcaagcaagaaccaggagaatgtcattattggatttattgacacaggaatatggccagaatctcctagtttcagagatcatggaatgcctccggttcctacaagatggagagggcaatgccagcggggagaggcaaactcaccatcaaatttcacctgtaacaggaagataataggaggtaggtattatctcagaggataccaaacagaagagagcggccagagtagaagtgccatcaagttcatatctccaagagatagctcagggcacggcagccacactgcctcaatagcggcaggaaggtttgtgagaaacatgaactacagaggtttgggtacaggaggaggccggggaggagcacccatggcaaggattgctgcctacaagacctgctgggactcgggatgctatgatgctgatattcttgcggcgtttgatgatgccattgctgatggcgtcgacattatctcagtgtctctagggccagactatcctcagggtggttacttcaccgatgccatatccatcggctcgttccatgcaaccagcaatggaatactggttgtttcttctgcagggaatgctgggagaaagggctcagcaactaatcttgcaccatggatactgacagttgctgcaggaacaacggatagatcatttccttcctatatcaggctggcaaacggtaccttgataatgggtgagagcttgagcacataccacatgcacacctcagttaggactatttcagcttccgaagccaatgcaagctctttcactccctaccaatccagcttctgcctggacagctctttaaataggacaaaagcaaggggaaagattctcatttgccaccgtgctaaaggctcatcggactctcgtgtatcaaagagtatggtagtgaaggaagctggtgcccttggaatgattctcattgacgagatggaggatcatgttgctaatcactttgctcttcctgctactgttgttgggaaagcaacgggtgacaaaattctttcctatatcagtagtacaaggttttctgccaaatattgcagttactttcaaaaagggtgtggcagtacgatgatcttaccagcgaagacgattttaggttctagagatgctccccgggtggcggccttctcttcaagaggcccaaattcattgacaccggagattctgaagccagatattgctgctcccgggttgaacatattggcggcatggtctcctgctaaggaggacaagcacttcaacatcctttctggaacttccatggcgtgcccccatgttacaggaatagctgctcttgtcaaaggtgcatatccatcatggtctccttctgcaatcaaatcagcaatcatgacaacagcaactgtattgggcaataaacgcaacgccatagccacagaccctaatggaagaactgcaacccctttcgatttcggatcaggttttgcggatcccatcaaagctcttaatccagggatcatctttgacgcacatcctgaagattacaagtcattcctatgttctataggctatgatgaccactccttacatctaataacacaagataacagcagctgcactgacagagctccatcatcagctgctgctctaaattacccatcaattaccataccaaacctgaagaagagctactcagtcactcgaactatgacgaatgtaggattccgaggaagtgcttaccatgctttcgtgtctgctccactgggtatcaatgtcacggtgactccaaaagttctagtcttcgagaattacggtgcgaagaagactttcacggttaacttccatgtggatgtgcctcaacgggatcatgtatttggttccttgttgtggcatggaaaggatgctcgactgatgatgccattagtagtaaaagttgatactgcagcaaaggcttga

SEQ ID NO: 73236 - DNA, 961 bp, Oryza sativa
  Clone ID: PAT_MRT4530_73536C.1
atgggtcatacctacctccactccgccggaagcagatgcaacgtgggagcacggttgtctgccgatgacgtgaccggcgtcagaccagtcacagaccggtcattcttgtccaccacgcgtcagtttagcatgccgcacgtctgcccttcttcatacaatgacttccttgccatggttgcgatgaagcctggaatgaatctggccgggactgacgtgccaactccaggagttagcacgccggctccggctagggacgagtgcctggaggctctcatcattccgacgggacggggcgaggcgtgtgacaggccgcctgttgccacctaacccgcgatctgactggtctgtgactggtcactcaccgcgaccggtcacggaccggataagcgtgcgctgcgccgcattaaacgcggcgtggcgcgctcgtccaacccgcaataaatgcggttaggtgagccccgctgtgctcacctaacccatacacgtggcgccaaaatcatagggggtcggggcaccccagccctcggggccaaaacgggagcggcccgacccctcggggagacagagggaggggtggcctcgtcaccctcgggcccgacccccccgagggggtcaggccacgtgggtgacagcggctgcccaagcctctagtcatgatacctccggtcccatgtcaccgacaaagacctacagagagcaagaatattattttggaagaaagtagcctaagtacagaaaacatgaattaaagactgagtgcataggcctaaagcctgtcttgagctcgtagaccgaggcaggtttgggttgcaaattccatctttgttatgtgctatcatgagatgcaactccaacaattctgaagaacaaccaacggcccaaatcagacttttcaggcataaatcaaatcgcgcccccgggggggggggtcagaatccaaacaaagcattgctattccatc

SEQ ID NO: 73237 - DNA, 966 bp, Oryza sativa
  unsure (1)..(966): unsure at all n locations
  Clone ID: PAT_MRT4530_73537C.1
atggcggcggcggcgggaggaggggcggcgccgttcgtgtggaagacgtacaggatggtggaggaccccgggacggacggggtgatcgggtgggggaaagggaacaacagcttcgtcgtcgccgaccccttcgtcttctcccagaccctgctccccgcccacttcaagcacaacaacttctccagcttcgtccgccagctcaacacctatgtcagtctcgtcactcccagttctatttcatcgtctcatcatactccccccctctctgcacttcacatcatgctgccatggattctcagtggtacccaactcaaaggtttccgcaaggtggatccggatcggtgggagttcgcccacgcgtcgttcctgcgtggccagacccacctcctgcgcaacatcgtccgccgcggcagcgcggccgccggcgggggaggcggcggcggcggcggcaagcgcagggacgcgtcggcggacggcggcggcggcggcggcgatgaggacatgacgatggtggcgacggaggtggtccggctgaagcaggatcaacgcaccatcgacgacagggtggccgcgatgtggcgccgcgtgcaggagacggagcggaggcccaagcagatgctcgccttcctcctcagggtcgtcggcgaccgcgacaagctgcaccgcctcgtcggcggcggcggctacngcaacggctccgctaccgccgccgccgccgacaacgggttcgcggacgccgcgcgggcggggtgcggcgagaagcgcgcgaggctgctgctcgacggcgacaacaccggcgcgttcggcccggaccgccgtcgacttcgccgggttctacaccggcgccgacatgttccccgacgttgccgtcgatgccgccgccgccgccgccggcgggtcagccggctgctcgttcgctttcggagtggacagcggctactgattctctcgctcctcaccgactga

SEQ ID NO: 73238 - DNA, 1793 bp, Oryza sativa
  Clone ID: PAT_MRT4530_73538C.1
ccaaacaaataagaagcattcattcaggattgacctacaacaaacatccatcactttcttacatgcttattatcagtgccagaacgctgaccacagttcaattaaaatttttcagggcgcaccctgttaagaaggcccagtaactttacaatattaatattccctcaaggccagctaagttcaatcccggatttaaatatttctacgcatcgcttgaactacaaagagctagtagtacaatccagacttgttaccacactgacagccaagctgtgtaacgagccaaaggaatatatgaataaggacgcaccactgtttcatgtgcaagcaaaatgacggagatttaacccaaaaaacaatgtcggacagggaaagggcaaatgaccctggaagacttaaacctaggccacgtacatgaaatctcggaacggtgtttggttgttgcaaatgtttaccgcgcggaatgattagcaccatttgacaatagctgaaccccatgtaagtccagcaccaaaacctgatgctgcaataacatcgcctgccttcaccttgccagctcgaacagcctcatctaatgctaatggaattgaggccgcactggtgtttccgtaattagcaagatttgaaataactttgtcagatgggatatccaacctactggcagcagcatcaataatccgctgattagcttgatgcagcaacaaccaatcaatactggaagcaggtaaaccagcctcttccaatgccttctcaatagattgtggcacacatcgcacagcaaagcgaaaaacctcctttccattcatttcaatgttggagaaggttgcctttttaggtgggaagctagggacaccattggtcttcgacaggatagacccaacatgcgacgagacacaatttaagtgcttttgtccgttgccatcactttgaacgcaaaaacctagcaagccatcttcatcagcactgcatgcctgaaaaactctgtctgtccaatccacaaattgtgaaagagcatcggcaccaattactagaatattccggatgcctccacctttgataaaacgagtagccgtaattaaaccaataataaacccactacatgcagcagtgatatcaaagccaaatgcatttgcgcatcccacctccgccagcaccgggagaccgcgcaggcccccctttgccggttcgggccgctgagaagcgtaataccctactcctgtgttctggtggatctgtgtgtgaaggaatacagctcgagagaaccagagagagctcaggctcctttttatctggtcaggggtcaccacatgggcctctcgctgcctaagaaaggaaacatgctttttacaatgagggctagtctacagccggaagtgacctctgacaagcacagcacacgtcttctgctccgctcgtcagctctcccggtggacgcccgtttcaaccttcattcaatggccagcgactttcttgccatgcttgcgctgaagcctagaatggatctgaccgggactgacataccaactccaggagtcagcacgccagctccagctagagacgagagccaggaagctctcatcattccgacgggacggggcgaggcgtgcgacccggttcgtttcacctggaggcatgatgatggaacaatctaccccgggagggggtcgtgcttctgggccccgcgacgggggcccggggggcagccgccctgccgacgcccgggggaagaggaagcaagagggtacccctcctccatctcctccccgagggggcggggcggtgcgtgccagcag

SEQ ID NO: 73239 - DNA, 412 bp, Oryza sativa
  Clone ID: PAT_MRT4530_73539C.1
atgggccatacctacctccactcggccggaagcaggcgtaacgtgggagcacggttgtctgccgatgacgtgaccggcgtcagaccacctggtatgaatctagccgggactgacgtgctgactccaggagttagcacgtcggctccggctagggacgagtgcctggaggctctcatcattccgacgggacggggcgaggcgtgcgaaaggccgcctgttgccacctaacccgcgatctgaccgggggtcggggcgccccagccctcggggccgaaacgggagcggcccgacccctcggggagacagagggaggggcggccacatcaccctcgggcccgacccccccgagggggtcaggccacgtggaagcgccgtagatcaaaatgtagttgaacgtgtgaaacgtggctag

SEQ ID NO: 73240 - DNA, 601 bp, Oryza sativa
  unsure (1)..(601): unsure at all n locations
  Clone ID: PAT_MRT4530_7353C.1
atcattcgcacgtctccatagcgcttggtaaccaagcgatggcgctcgcgaaacttggcgaccgggagagcctgttgcgtgccgtcgcaactttcaagtgcttgctaccaaaggtgcaattgtccctcggcgatgcccacccttttgttgcgtcggttcacngcgatctgaagagcgcacngcgggaccttggcgagcacgagaactccctttgtgctcctgaacgtggtcaatgagctgaaggttggtgtccgtgagaacgttcatcgaatgccgatcaggccacgaacggtaatgcgcaacggagatggagttagcgcggttgcgcaatcagtgtcatcgtcggggtgcaaaaagtggcgcggcgcgcgaacgcgacgccggaagccgttgcaaactgctcaacactctttaacgtcttagccacgggaaccggcgaagactgccgttacctgctgatcggtcgcagatgccgacgacggcagcgagtcaggaaaaacggcagctgaccaccggatcgttgccagcgggtgctgacaccaaatttccacgtgggtggttgcgttcgtcgcgggcctttcgaattgaaaaaaaaaaaaaa

SEQ ID NO: 73241 - DNA, 108 bp, Oryza sativa
  Clone ID: PAT_MRT4530_73540C.1
gactaataacataaaatttagcgttacatctatcatattacgaatcaccatccctttattcctaaatccttttatttcatagcacaaatagccaacaatttcaccctc

SEQ ID NO: 73242 - DNA, 442 bp, Oryza sativa
  Clone ID: PAT_MRT4530_73541C.1
acggtcgtgggcactcgacttcatattcgggaactcgcaggaggctcttcagaactgcttgctccatccgtaggaagccgaaggacaaccatgtgaacacctaacggctccagaacttcagaggaataggtttgtaggatgaaccaccacacagtgcgcccctgtttgtctatttcctgggcttgagatcataacatgcgggcttacaagatatctggtacctaatcatattgtcccatgtcttacttcatgaactgtacataatgtttcagtgatctgactatgtgacaaactttactggaccttaaacacactggcagttgcacgactgatccatagactcgagagaacacggttcaagactccacatttccaccttcgcctccagaggtggtcgaccccgaggactctttagctgataagaactaatacgagaatcact

SEQ ID NO: 73243 - DNA, 1221 bp, Oryza sativa
  Clone ID: PAT_MRT4530_73542C.1
atgcagattccacggaattttgctattatgggtcgcaaagaggcgaccgacggcggcagatttttctacgactggcagagaggcgaccgacggatggttgttgtgacgagggccacgaagaggaggttaaaggaggaatcctgcgacccggaactgagaaagatgaggagggtggaggaactgaggaggttgaggaggctggaggaggaatccggtgacccgaggctaggagaagacctgataagccgcctcccagacgatgtcctcaggggcatcatcactctccttcctaccaaggatggcaccagcacccagtttcccatggagactgcttgcatgcttgatttcccacacctcaaagcgctcaccctatccaatgtcaacatcatggatagcgctctccatggtcttctttcgcgatgccctgtcttggagagcttggtgttggttgggaacaggtggtgtcgttgtctccatattagctccttgacacttcagagccttggtgtgtcagatggtttttcctcggtagaggggaagctggagaaagtcactattgtggatgccccactcctagaaaggcttattattccacgtgacaaatggcaggatgactttgttgttcgggttactcaggcaccgaaattggaggcattgggctatctaagcgatggaatttctagacttgagattgggaccatggttgtccagaaactggtgcctgttagtctctccaatgtggtgcgcactgtaaagattttggccattaacaccaatttttatccgaatgttgttattgactttataaaatgctttccatgtgtggagaagctatacgtcaaggtgcgctattatgcgtacttcaataatgtacaacaaaatgtttcacttgagtgccttgatctacacctcaagatggtggaatttattaactatcaaggaaatgtggaagatttgaacttcattaggttctttgtgttaaatgctctagtgctagaatgtatgaagcttgtaacccgtcgtaacaaatgcgacgtgaaatggattgaagaacaacatcagaagctacagctttatagtggagcttcacggagagttacatttgatttccaagctgattatgagggagatagtttggtacacatgaagcacatcagtgatttgactacaaatgatccatttgatagatcattctgtagatgccgtgatgaggaaagatga

SEQ ID NO: 73244 - DNA, 1318 bp, Oryza sativa
  Clone ID: PAT_MRT4530_73543C.1
cacgactcacacgcacacagtcctcagtatcacacacacactcacgctcacgctccactacaacgcactgtacacagttgattattagctagttgggtttctggcccggccgccggcgagatgggcaaggacaagcaccaccgcgactggatcctccggcggtgctgcggctccatcgccgcctgcatcctcacgctcgccgtcctcgtcggcttcatcgtgctcgtcatctacctcgcgattcacccctccaagccttctttctacctccaggacgtccagctccgcaacatcgacctctccgaccctgccatctccctcaacctccaggtgacgatcgcgtcgaggaacccgaacgacagggtgggggtgtactacaagacgctgcacgtgttcacgacgtacagggaggagccgatcacggtgccggtggagctgccggcgatctaccaggggcacaaggacgtgtcggtgtggtcgccggtgatgtccggcgagtcggtgcccgtggggcagtacgtggcggacgccatgaggcaggacatcgcggcgggctacgtgctgctgcacgtcaaggtggacggccgcgtcaagtggaaggtcggcagctgggtctccggcggctaccacctcttcgtcacgtgcccggccctgctcgccgccagcggcggcaacgtcggcggcgccttcgccatgagcgccacggcgggcggcggcgccggcggcaacgccaccgtctcgctcaagttcgcgcaggcggcggactgcaccgtcgacgtgtgacgcgaaatcaccgtgcaacccccagtgagcgtgtacgctagcttgtcgcgggagaacgcacgcacggcggcgccatgagagctacagacgcaacggcaccggcccacctcgccgaagtaattagtgtcggattagcaattgggacagtggaggcttatcgagtcaccccgtcttccccccgtcgcctgcgtttgtgtgccgggttttggcctgcgttgttgggggtttcgggctcgtggtcctgtgtgcggcgggttggccttcctcttgttgtgttgcgtgtgttcgtgattagtttacctttatgtggcatctcttttaatctcaaatcttgtattaaacgataatttataaagctaattcttgatttatttgtgtattatttaaacatatgtataatgcgttatccctcatattgatctatttatgctaatatttcgtaatttctttgatttttattgtgtttcaacgttttgttaatatctggaatattaatgacaacatgtgtaatattgtgatattctcataaatgctt

SEQ ID NO: 73245 - DNA, 333 bp, Oryza sativa
  Clone ID: PAT_MRT4530_73544C.1
tttcggagagaagaagggattacagcggagcacgccatttgccatatgctcgatccgcttcttatcgtaaggcattctgttcttacaagcgtctcaccttgatgatgccgacggtggttggtgcgatggctctcactgagtctcaacggaccgctctcactggatctgtctatgaccttctatccttcttacttggcgtcatcgcagaaaacaagaaggtgcatcactacactgactaaaatactcgatcctgttaatgatcgcactgtctggaacacattttatgaaggttactactaataccgatgaagaaatagtagtaattattatgga

SEQ ID NO: 73246 - DNA, 423 bp, Oryza sativa
  Clone ID: PAT_MRT4530_73545C.1
gggggaaaaacaagggtaacaaaccttaatccactaggaattttttcaagagggttgggcgggtggaaaaaatcagggttcccctggataaattggaggaaaggaaattttcctttgggtttcctaaacttcaaccctacaaacgggagggccctcctaggaattaatccttaaaaatcgaaatcctttgtttttcctccaaaacggacgagcccttaagttctactcgcagcctgttttatacaaacagcctggcataggtcctggaaaaagaaaaacgaaaacttttttccccaaaaagaaaaaaagttgcacatcccatacgctaagaagggggctacccacttcagcttccgggcagaaaaatttgcttgcggctttacttggaacaagatgggggccttggggcgaaaagcccccccc

SEQ ID NO: 73247 - DNA, 291 bp, Oryza sativa
  Clone ID: PAT_MRT4530_73546C.1
atgaacaagctctccggccaccggcgttcagcttcaccaccgagtcgatctgcaatacatgcaacagccgccggctcagtcgtcgtcttctccgtctccggccagccggccggtgtccggccggccggaggaaaggatgcatgggttaaggttttcgaagggtttgcctatataccttgcgacctcggcgcgcttggcggcctgctcggagagctcctccttaccgccggcgagaaggtcggaaacgccgccgcggccggcggttgcgtcggcggggctgggaaacgatag

SEQ ID NO: 73248 - DNA, 273 bp, Oryza sativa
  Clone ID: PAT_MRT4530_73547C.1
atgccatccaactacccccatccttcccctcccccgttccccacctgtaccgcttcacggactcgtcaccgacttctcgcgaccaagggcgccgcgcgggaggaacaaacgacgcggtggcggatcaccagcggcggctgcgcaggcctcggcggcggtagcacgcggtggcataggcggcggcgcatgggcggcatagggttgcggcgcacggcggtggaggcacaaggatatggcagcgccaggccccaacacccctcagcaccccacacg

SEQ ID NO: 73249 - DNA, 177 bp, Oryza sativa
  Clone ID: PAT_MRT4530_73548C.1
tttttgtccatatctttgtagtcttgaagccataacaaaaactggtcatgcccaggtatggaccgcgcgcgatctgatacacaggctaaagcgtaaacatagcaacgtgaaaagcctgacagggcgcggctacaaatggcctggttaaaccgatacaaaggctgcactcctgaacaa

SEQ ID NO: 73250 - DNA, 1608 bp, Oryza sativa
  Clone ID: PAT_MRT4530_73549C.1
gccccgggctgcgggtgtgcggcccggggggctcctcccagcatgtcgatctccttcgctttaaattttgtggtagatttttgtctccttcgctctccacgctaccgcctcgccgtgccggagcccgggcgttccccgccgccgagaacctccgcctccgcctccatctcctccgccgccgccgcagatggatcgggaagaagtgacggagttcctcggccaggtgcccctcctgcagtgcctccccagctcctccatccgcaggatcgccgacgccgtcctggtgaagcgctacgaacctggtggttacgttgctcgtgaaggtgaccctgtagatggcctttacatcatattggatgggcaggctgaggtttcagctcctgcaaacacagaagaagaaaaccgccctgactatgtgttaaataagtatgactactttggttatggaaccaatagttctgtgcatcaagtaaatgttattgcagtatcaaagctgacctgcttcgtattgccaaatcaatatggacacttgttgcaaccaaagaccatttggagtgcagaagagacacctgagaaccattctttgctagaacaaattttgcacttagagccattggaggcactagcagcagcatccaagaccgttgactgcctaaaagcggtgcacagtttgcacgcaattttccttatcgcaggagacaagaatttgccaataatatatcaggttcatcgggcgcgcgatggaacaagctttgccaccagaaaagtggaggcaaagcaaaagggccttgtcattttcaccttgattgcttcattccagaaagacgaattagggtttgagcatcaagctgcaatcatgcctgatgttcctcctccagaagagctcctgaatctggaagagatacgggaaagaagacttactgatcctcgcttcccaatgcaatataggaactcagctgccaagaaaaagttcgtaccttggcccatagaaatgaggttttgtgaagattcagcatctcaacataaaccaaggtgtgttgtagcatatgcttcggatctactatattctggtgtcagcctaaatcctcatagggagaagggtctgaagacatactcactcagtcttgatcactcgatttggttccacaagcctgtgaaagctgatgattggcttttatatgtgatcgacagcccatctgcacacggtgggcggggttttgttacagggcgaatgttcaaccgacaaggagagctcgtcatgtcgttgacccaagaggcgctgattaggagggcgaagacgccaggacaaccgtcacaaaccccaaggccaaagctttgagaggtgcagaagagcagtattatcgtttcatttttggcaattcacagttattttccttttcaatggaagtctataacacgtagacgtgaagccgaagtatagcatactgcatatatgtagcaagaaaaaacgatggtaaaactggttctgtaattcacgaacagcttactgacataccacgtatgtattggatcgggaaaaataagcgaagaacttggtatcgctttttttttatctcaaaaaaaaaaaaaaaaaaaaaaaaaaaaaaa

SEQ ID NO: 73251 - DNA, 344 bp, Oryza sativa
  unsure (1)..(344): unsure at all n locations
  Clone ID: PAT_MRT4530_7354C.1
atggcgccggcgcgagaagagaaagtggaggggttagggttttggaggagatgactattcaaatggcatcgacttattactactagtatgntcgatcaatctggaccnttgaaatatcatgggccgcggttcgtttagtgtgtttactggcccganacgaacaattgggccaatacgaagcccgtattaattgcggatggtaaatnctggggaaaagtacaccgaagtccannagcttgtaatcgagttacaaaattgtcccngaccgnaaaaccaaacatccggatcncttaactaatcaaaaccagttcttcgatggttttaactcgggttttattcgacgt

SEQ ID NO: 73252 - DNA, 554 bp, Oryza sativa
  Clone ID: PAT_MRT4530_73550C.1
ttttttttttttttttttttttttcatatgaccatccctgacattttttttatccagggaaatggcagcaattacaagttgagcgacgcaaataactacccaagcaagttaattactgtagtaaatatttacacgtcttttaaattcaaattcaaattctcctcctcctcctcctagctactgctgctgctgctatcctatgatgaagtgaacacgtccgtttaatttctttcctgtccttgcaaatgaaaatgcagagaactcaaactgagccacttgagctccatgtcgtcttccccggcgagctcagcgacgacatcttgctcctcctccggtgatcgatcaggctggccgttgccggcggcgagctcagctcgctttacgccggctcgcgcgggcgcgccgcccagagcgagctgagcgcgcggaggcgctggcagtagtcgccgagcgcgaggagcccggcgccgcctgggcagcgtcaggatcttgtacatgttctggagggtctcctggcgggagatggtcgggcatggtgccgaccggaacgcgaa

SEQ ID NO: 73253 - DNA, 448 bp, Oryza sativa
  Clone ID: PAT_MRT4530_73551C.1
cccacgcgtccgcccacgcgtccgcccacgcgtccgaaatgttattgcagtatcaaagctgacctgcttcgtattgccaaatcaatatggacacttgttgcaaccaaagaccatttggagtgcagaagagacacctgagaaccattctttgctagaacaaattttgcacttagagccattggaggtcgatatcttccgtgggtttactttgccaggagctccgacttttaggcaagtttttggaggacagttgataggacaggcactagcagcagcatccaagaccgttgactgcctaaaagcggtgcacagtttgcacgcaattttccttatcgcaggagacaagaatttgccaataatatatcaggttcatcgggcgcgcgatggaacaagctttgccaccagaaaagtggaggcaaagcaaaagggccttgtcattttcaccttg

SEQ ID NO: 73254 - DNA, 461 bp, Oryza sativa
  Clone ID: PAT_MRT4530_73552C.1
catcaagctgcaatcatgcctgatgttcctcctccagaagagctcctgaatctggaagagatacgggaaagaagacttactgatcctcgcttcccaatgcaatataggaactcagctgccaagaaaaagttcgtaccttggcccatagaaatgaggttttgtgaagattcagcatctcaacataaaccaagcttaaattattggtttagagccagaggaaaactttctgatgatccagcactgcataggtgtgttgtagcatatgcttcggatctactatattctggtgtcagcctaaatcctcatagggagaagggtctgaagacatactcactcagtcttgatcactcgatttggttccacaagcctgtgaaagctgatgattggcttttatatgtgatcgacagcccatctgccacggtggcggggttttgttacagggcgaatgttcaaccgacaag

SEQ ID NO: 73255 - DNA, 150 bp, Oryza sativa
  Clone ID: PAT_MRT4530_73553C.1
aacataagatagtcattaattaagccgagatagttcagagcttgaagatatagatgccaggattttttttatgagcatgatacctatcaagcacaagatcacaactaaagaaaaatactacatgtcccctgacaaaccctattttggggg

SEQ ID NO: 73256 - DNA, 957 bp, Oryza sativa
  Clone ID: PAT_MRT4530_73554C.1
atggcggaggccgccgccgccgcgtccaactccacccccgcctcgcctcctcctccgcccgccgccgccgccgcgctcggcctccccgacctctccgtgccctacgatctggcgacgcgcgggcagtggaagtcgctgctctcccacctcgacgacgcgtcgcacccgcggcaccgcctcctcctctccgcgctctccgccctctcgctcgccaagctccgccgctacgcggacgccgcggcgctcatcgcctcgctccgcccggacccgggctgcccgccgccgcccttcctcctccgcctcctccacgccctgctcccgctcttcctccccgccgaccgccccctcgccctcgaccgcctctacaccctcctctcctccgtccgcgcccgccccgacgcctcccacccggagtgggcgccgccgcgagtccctcgtcacttcgacgtcgccctcgcgctcctcgcgtccgtcgcggcgctggacccgggcaacccggcggtcctctcccgcctcggctacgcccacctccagatcggcaacctcgccgctgccgcggccgcgttccgccacgtggagtcggtggccggcggcgacccggcccacgccagcctcctcgcccgcaaccgcgcgctggagtgcgtggtggccaaggactacgcggcggcggtgcgggagtacgagcggtgcatcgaggcggacgccgcggacgcggtggccgtgaacaacaaggcgctgtgcctcatgtactcgcgcgacctcggcgacgcgatcaaggtgctcgaggcggcgctggagggccacccgacggcggcgttgaacgagacggtggtggtgaacctgtgcagcatgtacgagctcgccttcgtcaaccacgccgacgtcaagcgcagcctcaccgactggatcgccagggtcgcccccgacgacttcgacccctcctgcactcgcatgtag

SEQ ID NO: 73257 - DNA, 651 bp, Oryza sativa
  Clone ID: PAT_MRT4530_73555C.1
gtcttcttcttcttcttcttctgatcctccgattccaacctccgagatcccgatccatccatggcggaggccgccgccgccgcgtccaactccacccccgcctcgcctcctcctccgcccgccgccgccgccgcgctcggcctccccgacctctccgtgccctacgatctggcgacgcgcgggcaggggaagtcgctgctctcccacctcgacgacgcgtcgcacccgcggcaccgcctcctcctctccgcgctctccgccctctcgctcgccaagctccgccgctacgcggacgccgcggcgctcatcgcctcgctccgcccggacccgggctgcccgccgccgcccttcctcctccgcctcctccacgccctgctcccgctcttcctccccgccgaccgccccctcgccctcgaccgcctctacaccctcctctcctccgtccgcgcccgccccgacgcctcccacccggagtggcgccgccgcgagtccctcgtcacgtccctcctcgccgccgaccacctcgcccaccgcgagttcgacgtcgccctcgcgctcctcgcgtccgtcgcggcgctggacccgggcaacccggcggtcctctcccgcctcggctacgcccacctccagatcggcaacctcgccgctgcc

SEQ ID NO: 73258 - DNA, 357 bp, Oryza sativa
  Clone ID: PAT_MRT4530_73556C.1
atggggagagagaagaagaggtcggtgtttgcgttcttgttccggttcaagagcaacggcgtggagcccggacagtaccgggagccgcctcctcctccactgtggatttttgtgatgaccgagattgagatcgtgccgaggcagccaccgtcgacgtgggcggacgacggggcgacggcgcgcgccaggcagcagaggcagccgctgtcggctccgcttcctcccagcccaatcttcggcggaggcgaagaggtggacggggacggcgacgtgacggcgaccacgatggcgacctccccgagcgacggcgacgactggagcgacggcgaagcacggctggagcggcggcgacgataa

SEQ ID NO: 73259 - DNA, 457 bp, Oryza sativa
  Clone ID: PAT_MRT4530_73557C.1
ccggccgggactattagcaggccggtgcgcctgtctactctggcggaccccctggctatcaaggtagcaaccagctctaccaaggtgctcccccaccctcaccatctgcttatcagtgccatatcataccctggagaccagggaggagggccaggttaccattgcggccatccgcctccttacctcggtggaaaccctgactatgcaccatgttaccataggacattgagggaatcctagctaccgtgaaggagaggatcactacaatgccgcggtgacggattatgagaggcacggacaacgcaggaattaccggcagaatactgctagaataagcgatatgtataatctactacgaccgcatgttcatttgcttcctgatgatatcgcatggatactcttatgctgcttctggaactcgtgttctcatgtgacgatgatcacttcaatgtgtctg

SEQ ID NO: 73260 - DNA, 1224 bp, Oryza sativa
  Clone ID: PAT_MRT4530_73558C.1
actccctcctatatccgtaggttgtttccgtataggacattgacggagcgtggggctcctcaccgggagaccgcgcgggcccccctttgccggttcggccgggggcgctgggtgaggttctaagcccttgatctgtggaatggttcgcgagagagcaaatgcgcaagacacgggcgatgtagacaggttcgggccgctgagaagcgtaataccctactcctgtgttctggtggattttgaccaaaacttggctcgtaccttcgcctgacaccgggataaccctgtcctccctcattaatgggcggagatttgcaatggctgctgtccgaatgagcctccgatgggatgggtcataccaacctccactccgccggaagcaggtgcaacgtggaagcacggttgtttgctgatgacgcgaccggcgtcagaccagtcacagaccggtcattcttgtccaccacgtgtcagtttagcatgctacacgtctgcccttcttcatacaatgacttccttgcaatggttgcgatgaagcctggaatgtatctggccggggctgacgtgccaactccaggagttcccacgccggctccggctagggacgagtgcctggaggctctcatcattccgacgggacggggcgaggcacggttaggtgtcgcccgcgagtttccgtcaagattgtggattgacccgggcaagtttgtgaatgtattcctcacctccgcaaggaaacaaggctgtggacctcttctaggatctttgcacaagagaggcaagggtttaattgagacccagctttttgaagctcctcaaaggagatacccggaagttcctgttcttgaactccggaagttccgagctgcctatagctaccaggaagttccggtgctcgacgtggtccctggctctattttccccctcctcagccgcacgcgcctggctgcctcgcgccccgcgccacgccgcccgccgtcgcgtcgccgctgccgcgccgtcgccgtcggccgtcccgtcgccgctcgtccgtctcatcgtcgcctcgcgccccgcgcccacgcgccgctggtccgtcgctccgccgcctcgcgccccgcgccgcgtcgtcatcgcatcgccgtcgccgtcacgccgagccccgtgccgcgccgcgccgagctccgcgccgcgccgtcgcgtcgccgctgtcgccgcctgctgccgcgcgccgttgccatcgccgcctga

SEQ ID NO: 73261 - DNA, 665 bp, Oryza sativa
  Clone ID: PAT_MRT4530_73559C.1
caaatggaaggaatttgccagtcggtccctcgttcgaagccaaaagttgcaaccgaaaacttatcggtgcacggtggtatatcgatgacgatacctctaagcagcatgagcaagaatgaaattctatctcctagggacgtggaaggccacggcacgcacacggcctcgacagccggtggcaacatcgtccacaatgctagcattcttggtctagctactggaacagttcggggtggcgcgccccgtgcacgagtagccatgtacaagatttgttggtccggcagcggctgctccgctgccgtccagttgaaagccttggacgatgctgtctacgatggcgtcgatgtgttatcactttctcttggtagtccattggaagatctaggcaccttgcacgtcgttgccaaaggaatcccagttgtatactctgctgggaacgatggacccgttgctcagacagtggagaactcatcaccatggctgttaacggttgctgcagccaccatggatcgatccttccctgtggttatcaccttgggcgataatcataagtttgtggcacaatcctttgtcctttcacggcaaacgacaagtcagttcagtgagatacaagttttcgagcgtgacgactgcaatgccgacaatatcaacagcacagtgaaggg

SEQ ID NO: 73262 - DNA, 1588 bp, Oryza sativa
  Clone ID: PAT_MRT4530_7355C.1
cggaagcgagcgcatgagctcgagagaaagagaggcggagaagtggtgaggtgaggagaggagaggagggcgagtagtaggcgtctaggtcccatctctagggtagtagtagtagtaggcttgtctcctcttcgtcatctctcctctcctctcctctcttctcttctcttctctccgccacggcgccacccacctacccccgaggtcgatgcggtgtgagagggggaggttttcgttagaagatactctcggtagcatcagacctgcatcttggaagttcagtatgggttcaggaatggtgaagaagaaggtggtgaaggccggttctttcgatttggatgccaaacttgataaaagttggatggaggatatcacttgtccaatctgtctggattttcctcataatgctgtcctattgaggtgcacctcatatgagaagggttgtaggccgttcatatgcgacactgaccaatcccgttcgaactgtcttgagcggttcaaaggtgctcatggactgccgaccaatatgaaagtcccatcttttaatggagcccctcttgatagcattcatatcatttcgtcaaatacaactgaccgcccagcttgcccgttgtgtagaggcgatgttattgggtgggttgttattgacgaggcccgtctgcatcttaaccaaaagaaaagatgctgcgaagaaagctgttgttcatatgtgggcaactttcatgagcttcagaagcacacccagcagaagcatccaaattcacgcccgtcagaaattgatcctgctcggagagttgattgggagaatttccaacagtcttcagatatcatagatgtcttgagcacgatacatgcacaggtgcctaatggtatagttttgggagactatgtcatcgagtacggtgatgatgatgccggagatgactatgaagtttaccacagggttagggggaactggtggacatcctgtattttctgtaagtcattctgcagatcttcaggaggcagaagtagagcaagagcaagggaaaggagaagtagtggaaggaggagcagcaataggtctagccaagaaagctttactattgaggtgccctcgggatctgttgacataagggaaatcagatttgatgaaatagatgatgaatatatagttacaggagcaatgcccggcattgcagcatccaggaggatcgccagtcattacagggatcctagatatggacgcagacgttcatactactaggatgaaccagccagctgaaatgtaatgcagtgcagccacaaccagaatattgtgcctctacccgcctctttttcttgttctctcaaaaatctggaagatgctatcccagcccaaatttggtgtgcatataagatagcagcaaacccttcattgttgttcatttacagcaggtttcaacatcttaggttcctatgtaaatatgtaaccactaccctatagcaatgttgatccaaggtttctctccgggaatccattttatcttaaaaatgtttctctggaaatacaccaaacttttacaggaaaagctcacaaatttgccaagtcaaaaaaaaaaaaaaaaaa

SEQ ID NO: 73263 - DNA, 391 bp, Oryza sativa
  Clone ID: PAT_MRT4530_73560C.1
cgggctgcaggaattcggcacgaggcacacacaagtaagaaacatagctaggtaactagggaaggtagcatcagcagcaggaggcaatggagggaaagaggactaccacttcgatggtgatcatgtgcctggtcatcttgagcctcactgtcgactccgccactgcggcacagtgcggctgctgcatatcctctcgggcaaaagcatgttgtttcggttgtattgctgctggtggctccgactcagtctgcaagaacacttgttgtttcccatgtgtgcgctcacaagcatatttattttctcttgctgcttttgataaggccatagcattgtccaatgtgtcatctgttggtctctgaccttagcaatttattgcaacattattattatt

SEQ ID NO: 73264 - DNA, 393 bp, Oryza sativa
  Clone ID: PAT_MRT4530_73561C.1
atgggtcatacctacctccactccgccggaagcagatgcaacgtgggagcacggttgtctgccgatgacgtgaccggcgtcagaccagtcacagaccggtcattcttgtccaccgcgcgtcagtttagcatgccgcacgtctgcccttcttcatacaatgacttccttgccatggttgcgatgaagcctggaatgaatctggccgggactgacgtgccaactccaggagttaacacgccggctccggctagggacgagtgcctggaggctctcatcattccgacgggacggggcgaggcggagacagagggaggggtggccacgtcaccttcgggcccgactcccccgagggggtcaggccacatgggtgaccgcggctacccaggcctctag

SEQ ID NO: 73265 - DNA, 720 bp, Oryza sativa
  Clone ID: PAT_MRT4530_73563C.1
tcgcgatctagaactagtcggacgcgtgggctaagaaacatagcaagataaccagggaaggtagcatcagcaacaggaggcaatggagggaaagaggactaccacttcgatggtgatcatgtgcctggtcatcttgagcctcactgtcgactccgccaccgcggcacagtgcggctgctgcatatcctctcgggcaaaagcatgttgttttggttgtattgctgctggtggctccgactcagtctgcaagaacacttgttgtttcccatgtattctggccgattctgttgttgctaagatggacgaaatgggagttcttgctaagatggacgaaatgggagttcttgctaagatggaaggacaagcctaaaacaacatgcttgcattgctaccagtcttaatgcctatcataagaatatgttgttttgcttcaagttatggccaagttatgttaatgttatcttcaataaattattgaccatatgggacgatctatagtggatccatctgttggtctcaactctatgtatgtcgtgcatgtgtgctctcacaagcatatttaatttctcttgctgcttttaataaggccatagcactgtccattgtgtcatccgatggtctctgaccttagcaatttattacgacatgattaatattatttgtgtatgcatgttctttacttaatttattcttagcggatttctgaaaaaaaaaaaaaaa

SEQ ID NO: 73266 - DNA, 537 bp, Oryza sativa
  Clone ID: PAT_MRT4530_73564C.1
atgggtcatacctacctccactccgccggaagcagatgcaacgtgggagcacggttgtctgccgatgacgtgaccggcatcagtccagtcacagaccggtcattcttctccaccacgcgtcagtttagcatgccgcacatctgcccttcttcatacagtgacttccttgcaatggttgcgatgaagcctggcatgaatcgagccgggactgacgtgctaactccaggagttaccacgccggctccagctagggacgagtgccaagaggctctcatcattccgacgggacggggcgaggcgtgtgacaggccgcctgctgccacggggtcggggcgccccagccctcggggccgaaacaggagcagcccgacccctcggggagacagaggagggggtgggcacgtctccctcgggcccgaccccccgagggggtcaggccacgtgggtgaccgcggctgcccaaacctggtgacaggtggggccgctctctacaggcgggcaggaacccagcggtcgcaaatcgcgcgcatcggctag

SEQ ID NO: 73267 - DNA, 661 bp, Oryza sativa
  Clone ID: PAT_MRT4530_73565C.1
cacacaactaagaaacatagctaggtaaccagggaaggtagcatcagcagcgggaggcaatggagggaaagaggactaccacttcgatggtgatcatgtgcatggtcatcttgagcctcactgtcgactacgccaccgcagcacagtgcggctgctgcatatcctctcgagcaaaagcatgttgttttggttgtattgctgctggtggctccgactcagtctgcaagaacacttgttgtttcccatgtattctggccgattctgttgttgctaagatggacgaaatgggagttcttgctaagatggacgaaatgggagttcttgctaagatggaaggacaagcctaaaacaacatatttgcattgctaccagtcttaatgcctttcataagaatatgttgttttgcttcaagttatggcctagttatgttaatgtttatctccaataaattgttgaccatatggagcgatctatagtcgatccatctgttggtcccaactatttgtatgtcgtgcatgtgttcgctcacaagcatatttaatttctcttgctgcttttaataaggccatagcactatccaatgtatcatctgttggtctctgaccttagcaatttattgcaacatgattattattaaaaaaaaaaaaaaaaaaaaaaaaaa

SEQ ID NO: 73268 - DNA, 1155 bp, Oryza sativa
  Clone ID: PAT_MRT4530_73566C.1
atgcatgcggccggaggcgagggagatgacggcagctgcggcggacaccggcggcggcgacggcgacggaagccacggagaacgcgggcgaaggtggcggccgcggaggacgagggccacaaacgcgggagagggccggcaaccgcgggagaaggggtgggatgggcgcaggagacggcgacggctgtggtggccggggacggcggccgctgcaggcgcggacgaggtggcaggacgggcgcgttagaggacagcggggcgcgggcgcgcggcggatgtgggcgaggacagcggggcgcggcggatgcgggcaagacgacgggatggacgctggcaacgacggcagccgctaaggatgaggacaacggtcgcggcgtggcggatgcgagcgacgacggcggaaggatgcgggcaaggatggcagccacggcgcagcggatgtgcgcgaggacgacgacagccgctgaggacgaggacggcggctgcagggtggcggatgcggacgaggacagcgaccgcggtgcggcggatgcgggcgacgacggcgggatggacgcgggcgacgaaggccgcccatctgtcggacatattagcaacttgttccgaggagggcaaggtggagtgcccttgagcgagcacgtgggggaggtgtttgtcgatgaggataaggagagggagaggagggagaagagtcactgccgacacgtgaggtccacggctagtctacagccggaagtgacctctgacaagcagagcacacgcctcctgcccccctcgccagctttcccggtggacgcccatttcaaccttcattcaatggccagcgacttccttgccatgcttgcgctgaagcctggaatggatctgaccgggactgacataccaactccaagagttagcacgccggctccggctagggacgagagccaggaagctctcatcattccgacgggacggggcgaggcgtgtgacaggccgcctgttgccacctaacccgcgatctgaccggtctgtgaccggtcacacgccgcgaccgaccgaagtagcactgtagcgtaccaacgtgccaacgcaaaaaaaaaaaaaaaagaagctatccaagatccaccgggccaccaatccaaaaataaagcctgacatcataataataattca

SEQ ID NO: 73269 - DNA, 631 bp, Oryza sativa
  Clone ID: PAT_MRT4530_73567C.1
cctgtgacgggtcctaactcgccctaggctagcggagaccagcacctctgacggccttctagtaacttgcccgtcagaggtgggtgtcaccagtgaccactgatcactgaccatgcgcgaagccgtcaaagatgagggtttgggcccgtcacaggtgaccttggccagtgtagtgtatcctctcgggcaaaagcatgttgttttggttgtattgctgctggtggctccgactcagtctgcaagaacacttgttgtttcccatgtattctggccgattctgttgttgctaagatggacgaaatgggagttcttgctaagatggaaggacaagcctaaaacaacatgcttgcattgctaccagtcttaatgcctatcataagaatatgttgttttgcttcaagttatggccaagttatgttaatgttatcttcaataaattattgaccatatgggacgatctatagtggatccatctgttggtctcaactctatgtatgtcgtgcatgtgtgctctcacaagcatatttaatttctcttgctgcttttaataaggccatagcactgtccattgtgtcatccgatggtctctgaccttagcaatttattacgacatgattaatattatttgtgt

SEQ ID NO: 73270 - DNA, 1865 bp, Oryza sativa
  Clone ID: PAT_MRT4530_73568C.1
atgggtcatacctacctccactccaccggaggcagatgcatcgtgggagcacggttgtctgccgatgacgcgaccggcgtcagaccagtcacagaccggtcattcttgtccaccacgtgtcagtttagcatgctacacgtctgcccttcttcatacaatgacttccttgcaatggttacgatgaagcctggaatgtatctggccggggctgacgtgccaactccaggagttcccacgccggctccggctagggacgagtgcctggaggctctcatcattccgacgggacggggcgaggcgagaaaggttgatcaggcatctaattccagggcacgcctccttcaacagcttgctaacgccaagtctgagctttctagactcctttgtgcactaggcgagctgtctatttctggcattcctgacaagacaaccggtactatcaaggagcaactagaagcaatatcacctttcttggagaaactctgcagggaaaaagataagagggttagagagtttgctggtgtacaacttcaaattcaaactatacgtggtgaaatcgctgggagtctgcaagttggtgaccacatggaaacaccccgtgttaatgaggatgatctttcaacgaagaaattaaatgaatttctttctgaattgcaagctctacaaaaggaaaagagcaatagactgcacaagattcttgacttcgtgagttcagtgcatgatctctgttctgtccttgggatggatttcctgagcactgttactgaagttcatcctagtctcaatgactcggttggtgccgagttcaagagcattagtgacgcaacattatccaagctgtctaagatgactgaacttgaagatatatatgcccaggctcacattacgatagataccagtgctgcaagagatagaatactgactgttattgattctagtatcttcgagccttcggaactactggctgatatggagaaccagatacttaaagcaaaagaagaggcactaagcagaaaggacattctggagaaggttgaaaggtggatgtcagcatgcgaagaagagagctggcttgaagactatagccaggacgacaacagatacagtgcaaccagaggtgcacatctgaacctcaagcgggcagaaaaggctcgtcttttggtcagtaaaattccagtcattgttgatacactgatggcaaagacccgggcatgggaacaagagcatggtatgccgttcagctatgacggtgttcatcttctcgcaatgctggatgagtacaaagtactaaggcagcagaaggaagaagagaagcgacgaatgagggaccagaagaagataaacgaccagctagctgcagagcaggagaagctcttcggctcgaaaccgagcccagcccggccccaatcctcaaggaaggcgcctggcccgcgggccaacggtggcgcagtcaatggcacaccgaaccggaggctctcggcccaccagaacggcggcggcaggtcggtgagccgggacgggcggagggacagtggccggccggctgctccggtgaactacgtcgccatctgcaaggaagagtccagcaacaacaacccggcggcgtcctccccctgacgatcatcctcgccatgattgaccgtacatttcttggtgccagtggtagagagatactccatatctgttcagtagcaggaaaaaaagaaaaactatagctagatactagtaggacaagtgattcgaatgatagtagcagtattttggctgtatttgaatcgatttgttgctgtccatttgctggtagtggatcgaatggatcgagtgggtacacccgtgcaggtgcatcctccatggaagctgagctc

SEQ ID NO: 73271 - DNA, 436 bp, Oryza sativa
  unsure (1)..(436): unsure at all n locations
  Clone ID: PAT_MRT4530_73569C.1
cagcttgattcttcggggagaaatctcactccaagtactttttactactaagtactaacctcatctgcgttgatggcttcgacctgggatgtgggggtcgacgtcgtcgtcgtgttctccggccccgatcgtgatcgacggctccaagcagtaaggaggggaaggacgtaagtgaggaagtaatcaactgtgaggctcattgctgcttcacctttgagctaagagagcatgagctagatcggagggagtagctagctagtgacgaagagagtatgttgggtgaacgctctacagttggaacttggaaagagaaagaacactggaataggccggaatagctagtcggcttgaaaaaacctagtcttgtctttgtcttgtgcaatggtttgatcnattaatgctggcttttagccaccaaaaaaaaaaaaaaaaaaaa

SEQ ID NO: 73272 - DNA, 419 bp, Oryza sativa
  Clone ID: PAT_MRT4530_7356C.1
cgcacgcgtacgtaatacttggccctcctgtagcggcacgcccgggggggggcgggggtgaaagtttttccatgcctttggcgtagaatttatcaaacccagccaacaacgccacgcttacttaacattgagctgaccctgacaacaaggggggtcgccgcgacaccattctgtaacttgacaaaaaaggtgaacccttctggggaagaaggggatgctttttttctcaccaatcattggggcctctgcttcaataacaccaactgccaaaacagatcacccctcacaccaataatagcaggggtgggattctggtaccaaccacactgtaatgatacatattttcatctgtgtggaaaacaactggagccggacgcgtccatcgaacctgtaattgcggaccgggacctgcaaccaca

SEQ ID NO: 73273 - DNA, 466 bp, Oryza sativa
  Clone ID: PAT_MRT4530_73570C.1
ggcccagccgagctgagccggccgccggcctccctctcccggggtcaccgacaggtggggccctcctgtcgggctcgtccccttcctccagccggcgccaccgcgccccgcaaccgccgccgcgccctgctcctgcgcctcccggaccacgtcgcccacgtcgccctcgcgccagcgttccccgcgcccaattccccctctctcccgcccgcgcccgcgctcgagacggccgggattagatttttgaatcacgcctctctctcctctcccacttcccccacatcggccggcgattcccgcctctcccggccacgtccgagctccatctcccctatttaagcatccccactctgccctctctctttttccccatttcgccaaactctcccgtgccctctatcgccctagcgccatcgccttcctctccgccgccgctgccgctccggtcgccgctagctgcctctag

SEQ ID NO: 73274 - DNA, 325 bp, Oryza sativa
  Clone ID: PAT_MRT4530_73571C.1
atggagggaaagaggactaccacttcgatggtaatcatttgcctggtcatcttgagcctcactgtcgactccgccaccgcaggcacagtgcggctgctgcatatcctctcgggcaaaagcatgttgtgttggttgtattgctgctggtggctccaactcagtctgcaagaacacttgtcgtttcccatgtattctggccgattctgttgttgctaagatggacgaaatgggagttcttgctaagatggatgaaatgggagttcttgctaagatggaaggacaagcctacactacaagaatcaatttaatctgtgacgaaatttga

SEQ ID NO: 73275 - DNA, 3124 bp, Oryza sativa
  Clone ID: PAT_MRT4530_73572C.1
gcactgccctgtgcatcgagggcaagaacttcaccaacgcgggcctccccaggaccgcgttgtagggcagactgagttccaccacatcgaagtccacccgctccgtgcggaagttggcggaaccaccgaaggtgaccgggaggtcaatatgacccagcggccaggtgtgccccggcgtcacaccgatgatcggctgggacggccggagcaccatccccggggccttgatggcgtcaaaggccgcgggggaaaggatgttgagggctgcacccccgtctatgaggacacgccccaacttcaccttgcaaacggtgggggaaaccaccatcacgatctgtcctccccgggcaacgcacggcgggtggtcggtctggtcgaaggtgagggcaacctccgaccaccgcgcccgccgcgtcgcctcatgggtaggggccgcggccagaagctctcgcttcatggccttgaggctccggcgagaagcgtgaacgcacgctcccccatcgacggtggcgacggtggcctccggctcctggaaccccaggtcatcgtcgccatcgtcgatgtcctcggcggtggccttctgcttggcctcacctcgccggttgccggcgggagccgcaggggtcttgccctcacggcgctcctgcctcttctcctcctcccacttcctcgtccgctcagccaaacttttgaccgcgcggcagtccgcgaggtcgtggagggaggtgttgtgcacggtacaccacttgccggtcgggcgctccctgctgggagcgccggcctccttctttttgtcgctcgcaggcctcccctttcgggggacccgcgaagcgccctcgacggcgaggacatgaccctcgtcgtcggaacgggccgaccccttcttcctcctactgtctcgtcgccctgaccgagcggcggacccgggggcggccggagctgccacaccagagccggaggagttccaggtccaggcctcctccttgcgagccacacggtccgcgagctcaaaaagctgcgcggtggtctggggctccttggaggcgatcttctcgagcatgcggttgtgccgcacgccccccctgaacgcgtagatcaccgcgtgtgcggggatgcacggtatggtgttgcggacttgacagaaccgctgaatgtacgagcgaagagactcatcgtcccttcgttgtaccgcatgcaagtccgcttcttcgcctgggcgtggatacgtgccctggaagttcgtggtgaactgctggcacaaatcctcccaagagtggaccgacgcgggtggcaagttcattagccaaccccgcgcctgacccttcagggccatggggaagaaattcgccatgaccctgtcgtcacccccggcggcctcgatcccggtcgtgtagatctggagaaactcggcggggttgacgcttccgtcgtatttatcggtgatggtgggccggaaccttgggggccaacggacgttccgaaggctcgccacaaaggctcgacagccggcaccgccaaccggggacatggggggccggcccccgtgcccggaccgaagtggcgctccggacgaggaagcgccctccgttgcgtgggcggcgcgacgatcgtcgcgccggcgctcgatgtcgagctgggcatccagccccccacgcacatcttcttgggtcggaggcgttgacgagggaatggcggatgaacggcgggtagcggccgccgctcgccgcgccctccgcctcgacgacgtggagccggcggcggcagcgccagaggtttcggtggcggaggaccgcctgccggcgcctaggcgctgctgtgccgtcatgaccaaatcggccacgtcatccagccaacgtcgggctggagtctctggatcggggacgacgggcgggtgacgcaggagcgcgcctgcagcctggagcgcgccctggggcgtgccgccatcgccgtagatgaggcggcgacgcgccccgtctcgccgtcctcccccgtcgcccgcgggcggggtcaccacaagggcctccagctgcctaagaagggaaacatgctttttacaatgagggctagtctacagccggaagtgacctctgacaagcagagcacacgcctcctgccccgctcgcctgctttcccggtggacgcccatttcaaccttcatttaatggccagcgacttccttgccatacttgcgctgaagcctggaatggatctgaccgggactgacataccaactccaggagttagcacgccggctccggctagggacgagagccaggaagctctcatcattccgacgggacggggcgaggcgtatcctcgtaccaacggaccccaataccctctatatccggtctacgggtatcccccgtcgacagtggcgcgccaggtagggaaacttggtgctcaaggttctactactatgacttcaagccttctcgacgatagcgtcaaccccggcatcaaccaaggagcttcaacttcaacgatgctggtgtggactcaagtcgacgaaattgtcttcccggtctacaccacgatgccgatctcgactggcccatcaattaccgggagcgagaacggcgtggttacgaccccggtcgactctatgtcgaaagatcctcccgcagaagcagagaacggaacatcgacaacatctgggcctgagaaggatcctaacgcggccaaatcttgtcctcctgataagaagcatgagccaacaaggataacttccgaggcgacaaggacctggtgtcctatccacaagaccagaaggcacaccttgcaagcttgttcggttttcttcgacgtacaagctgaaatccgtgcctgcaaagagcgtggaattcaatgtacttctccaactcgtgatgtctattgtcccattcacaaggcaaagactcacgacctctcaagctgcaaggtccttctcagcgccatgaggacgtcacctcctaaggtccagcagtcacgaatctcttctagagatgcggacaaggaacaaggagcggcgactatttcagatcgactcatcggggcaatcgatatcgatcccctcgagccatatgtcctacatctgctcgaagaccaagcctcatcatcaacaagtacaccacgcgacgtctaa

SEQ ID NO: 73276 - DNA, 827 bp, Oryza sativa
  Clone ID: PAT_MRT4530_73573C.1
ccacgcgtccgattccctcatcccattaaatttgctcaaataattaaatatgacaggcatgggttcttccatcggccgtgccaccattttctactgcgttgctctatccataattgccggcgccgcagcgacacaggtgccccccaccgaagcagagtccgtagaagcggcagagcttgcgtcctctgccttcaaggccgacacgttgccctcagcctcccgcaagctgatggccgttagtgacgtgccgctagcgccggtgtgcccggtgcggttcgacaagatgaaggggcccgccatcgagctgggaaagaagtgcaagacgacaggggtgaaggtgtgctgtgaggcgttcaagacattcgcatgcccgcacaacaagctgatcaatgacgtcaacaacggatgcgcggacgaaatgttctacaccatccacacctacggccaattgctgccgggaaccatcttcaagaaatgcctcgagggaccgcatgggatgaagtgttgaattcgatcgtgctgattcgacttgctcgatcgatatcgctccgttgttgctagcctccggcctgatctatactacctataacgatgaatgtccctttcgtcatcttgcaatgtaactaaacttacttttattacttcgaaatgcaatgaaccacaaaaggtttattacaattttctcctaggatattggttgaacataaaatgttaaccataaacccaacatttaaaagtgtgatgaagagggcgagcgtttaaaagttgcatgtcgtaatcttgaggcaatggttatacaactgtttaccaattttggatggagattc

SEQ ID NO: 73277 - DNA, 2491 bp, Oryza sativa
  Clone ID: PAT_MRT4530_73574C.1
atataaagggtttatctgagtcaatcttacacgaccagatcttacctttttcagaactcttacacgaccagatcttacatggtcttttgtctctacaggatccaacaaggccttatcggctctgcgcgtccccaaccgaagtccccttaggttcctcggaggccttgtcaagacggtgtaaacggacagtaggataggtttcaacgctaggtgtcatcatggtaagggatctctgggtaaaacacttggcgatattgtgtacctgatatcaacttcgttgaagtagaggtaatgggagaatcgctacaccgctggtcgagaaccagttagtagtcgtagctcgaccacactggtcgagaaccaggtagtagtcataactcgaccactagaagtggaaatagtggatgaaatcgctacaccgctggttgaggaccagatagtagtctaaactcgaccacttgaattggaaatagtgggagaatcgctacacctctagtcaagaaccagttagtagtcgtaactcaaccactagaagtaaatttacgagagatcgctacgattgactggttgagaaccagtgaataggtgtgctacgtgctggatcgagaaccaacgagcgagtagagttatctctcggacaccaatggaagttgcggtaagagagatcgctacgtgctggttcgagaaccagcgagcgagtagagttatctctcgaacaccaatggaagttgcggtgcgagagattgctacgtgcttttctcgaatagtccagccacggccagtgctatgagataggtcgtcggtcttcattggtaggttgggcgcgacgactctgcatttgtcgagatcattctcgataatgcggtgtactcgaccacaacctactcgagtgctcaattgttcatattggatcaatctctcgtgctgtcgataccgttggtcttccaccgcgacgaagtcttgaaccttggtcgatctcgccagatcgaatataattgatgacgatgattccgatctcaacgggagacatacttcggtcgggttaaatctccccatagcagaagtcgtcgagtagcttgttgtcggagaatccatctcttgaacccatctcgtcgaaatctgttgtcgacatggcaggctgacgatctgactcgtagtcgacaacagggtagccttcctcctcgaatccgtgcccggcgagatcagagatagcgttttcgtctctcctgacggtatccggagacactgtaggggaatagccatacctatccctgaagtcgatatccggcgtcttgtcttggagtatgttggcttgtatgttgtggcttctatgttgattgtgttgggtgttgattgtctcgtcatggtgggtgttgatcgtgttgatcgtctcatcatggttgtccccactctccctagcccccagccttgtcgtcggagaattcttctcggaggataaggctcttggacccttgacatggtctttcgtctctaaaggatccgacaaggccttatcggctctgggcgtccccagccgaagttcccttaggttcctcggaggccttgtcaagacggcataaagggacagtaggataggtttcaacgccaggtgtcatcgtggtaagggatctctgggtaaaacatttggcgatattgtgcacctgatatcaactttgttgaagcaggagtaatgggagaatcgctacacccttggtcgaggaccaggcagtagtcgtaactcgaccacgctggtcgaggaccaggcagtagtcgtgactcgaccacttgaagtggaagtagtgggagaaacgctacatcactggtcgaggaccaggcagtagtcgtaactcgaccacttaaagtgtaagtagtggaagaaatgctacatcgctggtcgaggaccaggcagtagtcgtaactcgatcacttaaagtggaagtagtgggagaaatgctacatcgctgatcgagaaccaggtgtaggctaaactcgaccatgattcgggaaccagcgagcgagtagaatctctagaacaccaatggaagttgcagtgtgagagattgctacgtactggttcgagaaccagcgagcgagtagaatctctcaaacaccaatggaagttgcggtgtgagagattgctacgtgcttttctcgagtagtccagccatggccggtgctatgagataggtcgtcggtcttcgttggtaagttggacgcgacgactctgcatttgtcaagaatgacctcgataatacggtgtactcgaccacatcctactcgagtgctcaattgttcaatgctgtataaattgaaaaaataggtacgataaattgtgtataaaatattgcgtatctttgtagatacatgccggatgtatctatggaattagtagatcaattataaaaatcaaactactaaatacggattagatctccccacagtcgaagtcatcgagtagcttgttgttggaaaatccatctcttaaacctat

SEQ ID NO: 73278 - DNA, 363 bp, Oryza sativa
  Clone ID: PAT_MRT4530_73575C.1
atgggttcttccatcggccgtgccaccattttctactgcgttgctctatccataattgccggcgccgcagcgacacaggtgccccccaccgaagcagagtccgtagaagcgccggtgtgcccggtgcggttcgacaagatgaaggggcccgccatcgagctgggaaagaagtgcaagacgacaggggtgaaggtgtgctgtgaggcgttcaagacattcgcatgcccgcacaacaagctgatcaatgacgtcaacaacggatgcgcggacgaaatgttctacaccatccacacctacggccaattgctgccgggaaccatcttcaagaaatgcctcgagggaccgcatgggatgaagtgttga

SEQ ID NO: 73279 - DNA, 258 bp, Oryza sativa
  Clone ID: PAT_MRT4530_73576C.1
atggcctggacggtgacgtcggtagccatacgacgaggttgtcgatgtgcgaacggcaatgaagatgacaggggcaacgctgtgacccgaaggggcaacacaggtgcagctcgatgtcgatgcagcagcgagaactccaccggcggtgaggccacgctgaggagggcgcctctcagcattccaacaaccagtagaggtggaccacaggcggcgacactgcagcccgagagggcgacgcagcggcaacccaaagcttga

SEQ ID NO: 73280 - DNA, 2139 bp, Oryza sativa
  Clone ID: PAT_MRT4530_73577C.1
ctaatcctccacaccatcagcatcattgtagaactcttcctggcagacggccacgatgacgtcagcggtgacgtcacctccagcggcggctcgggcgcgcatgctcgccggcgaacgacggcgcgaggacgcgaacggagggcaccagcacgtagagagcgacgcggcgaactcaccgatgaccaaaacagcggcggaagatgaacggacggcggcggcgttgaggaaaaggcggcggagtccttcggcttgacgacgacggcgatgctccggcggtcttcagcgacggcgaaggggcggacgaggacggcgacgcgacggcgaccacgacggcggtctccccgagcgacggcgacgactggagcgacggcggcgcacggcggagaaggaaaggcgcggccgaatttggaaggagacgacggcgcggctcggctagggttcgggcggcggtagccggaggaagacgacgagtccgacaggtgggacccacctgtcagcgacagcgagcgctcgcgtgggcggctgcggactgggccggactgggccgaggagagagagaacggttttgggccgactttcggcccaaagccaaaagagactttttaattgacggagcgtggggctcctcatcaggagaccgcgcaggcccccctttaccggttcggccgggggcgctaagtgaggttcttcgccctcgatctgaggaacgtcagcgagagaagaaatgcgcaagacacgggcgacgtagacaggttcgggccgctgagaagcgtaacaccctactcctgtgttctggtggatcgggactgacataccaactccaggagttagcacgccggctccggcggtatgtgaccggtcacacaccgcgactggtcacggaccggataagcgtgcgctgcgccgcattaaatgcggcgtggcgcgctcgtccaacctgccacacacgtggcgccaaaaccacaaggggtcggggcaccccagccctcggggccgaaacgggagcggcccgacccctcgggttgggaactaggccgaaaccctaaaactcatcgtagccggcttgctcctggaagaactcctcatcagcaggatctgcttcatcttcttcagcaactgggggggggatatttatatagagcaaggtttgttaacctctgcagagggggtacactttacccacacgtcattactaacccgggtcacccagcccgtggggatcagccacgtcgggagacctccaagctttcatgacaaggcatttcgaaagccgatgcaggtttgccatatgccgacgagaggggtcccagaccaacaacagttttacccaagttgttactcagattttaagtttgaaggcgaccgtcgataacaattaacagagggaggatcaaatgcaatcaattagggatcggccgggtggttacaaggggacatggccgagctggcgccgacgtggcgcctacgtggcggccacgtgggctggcaggaggtagacgacgaccggccgcaaatgaacggcgggcgacggcggcgagcggtagagcgggccacggcgataccggcgaaggcgagcacgccgggcggtagtacgggacgagaggagacgagccaacggctcggattcgccggaggttgctcggcggcggcggattgcggcggcggcaaccggcggcgggagaagagggaaacggcgacgaggccacgagaggtcgatctccggcggtgagagcatctacaaggccacgggaactcgatgctagggttggattggacggagctatgccgagctgggctggcgacgtgcggctacttcggagctcgggcggcgacggcagcgagcacatggcgagcaacggcatcggtcggggcggcgccggccaactacgggagtctttagaattgaaacaaggttggcacccggccaacagcttttcaaacggccacccgggccaacaactttcaaacggccacccgggcctagctgatcccatcagctgcagcggcgagaagtccactggtgatgtagccatgctaaggagggcgcctgtcagcactgcaacaaccagtggaggtgtggaccacaggcagcggaactgcggcccgaggggggcgacgcagcggcagcccgaagcttga

SEQ ID NO: 73281 - DNA, 740 bp, Oryza sativa
  Clone ID: PAT_MRT4530_73578C.1
attccctcatcccattaaatttgctcaaataattaaatatgacaggcatgggttcttccatcggccgtgccaccattttctactgcgttgctctatccataattgccggcgccgcagcgacacaggtgccccccaccgaagcagagtccgtagaaggtagtagcacatgcctctcctgcaaaaattactgatcagctaactaatgcgttcattttttttggtacacgtactgatcacggcacgcgcttgtggctgcacgtatgcatatcccagcggcagagcttgcgtcctctgccttcaaggccgacacgttgccctcagcctcccgcaagctgatggccgttagtgacgtgccgctagcgccggtgtgcccggtgcggttcgacaagatgaaggggcccgccatcgagctgggaaagaagtgcaagacgacaggggtgaaggtgtgctgtgaggcgttcaagacattcgcatgcccgcacaacaagctgatcaatgacgtcaacaacggatgcgcggacgaaatgttctacaccatccacacctacggtcaattgctgccgggaaccatcttcaagaaatgcctcgagggaccgcatgggatgaagtgttgaattcgatcgtgctgattcgacttgctcgatcgatatcgctccgttgttgctaggcctccggcctgatctatactacctataacgatgaatgtccctttcgtcatcttgcaatgtaactaaacttac

SEQ ID NO: 73282 - DNA, 470 bp, Oryza sativa
  Clone ID: PAT_MRT4530_73579C.1
atcctgcaacctgcaggacatatcacgggggggttttttatgaaatattcaaccgttaactgcattaagcagggtgaaaaaagcattgcgcgtaactgcacttaaggagggaaagaataatggtacccaaagtaatgattggatgtctgattatagaacttgggaacagacaacagaaaggttattttcacgaatattacatccatcagaggttgacagggggcagtgatctccagatctggatagtgaatctcatgtaacttctggagctaacagagtttggactatccataattgaccatatgtctgaggaaactccaatccttcttgtgcaggtactagtatttagattacttatttggaatgggccatgggatcaatttgctgaaaatgaacatgcattggattcaagtgcgcaagaagatgctctttcgtgttatgcctgtgctgtatttgacgctaaagggtgg

SEQ ID NO: 73283 - DNA, 1620 bp, Oryza sativa
  Clone ID: PAT_MRT4530_7357C.1
tgcattacaggtggcaagattgttctgcagggagttcagcaacgcataagtgcatttggtacaaacctgcccataacaatcagatccaacatggttccacgaatgcgactgattgtctactatgtcactatggatggcagcgttattgccgactctctccttttaggtgtggaagaacagtgcagacaaaaccaagagtctgcatatagacagtttcatagtacagaaacggcactactcaggatcaagagtgatattctgattgcaatggacagacagaaaatcactctcctgttattacttgacttgagtagtgcctttgacactattgagcattccagattactagatatcttgaagatatgctgcggtgtcgacggtgttgctctcggctggatcgagtcatacttgtctgatcgacatcaaaaagttaaaattgatggcattgtctctgactctttccaggtgccctttggtgtgccacagggctctcggctcggccctttgctttttatgttatacacaagtaatctaatcaagagcactcaggataattttcctgaagtctcctgtcactgttatgcagacgacacacaattatttttatcctttagaccatccactagtactcaagatgcaagtgtttcaatgttggaaaaatgtgttaattttattcatagatggatgcttaacaataatcttaagctaaacgatagtaagagtgaatttttggttataggaactccacaacagatctcaaaaataagcattgacggtgtaagagttggatcctccaatgtgataccctctgttacagcaaggaatttaggagtatactttgatactaatttaaccatggaaacacatgttaaaaatatatgcaaatcaacatactatcttctgtacaatctcagacgtatccgcaaatattttgatcaaggaagtatgaaattggttgtacacgctcttatcacaagtaagcttgattattgtaacgggttgctgtttggaatgcctgattctctgatagctaagttacaaagagtacaaaatgcatgtgcaagacttgtctatcgtcggtcgaaattcacttcaaccgcacctcttctgagagaactccattggttgccagtccgtcaaagaatctcattcaaaatattgttaatcgtctataaatcattgagcggtcaagcccctagttacatcaaagaattactacaactcaaagtccaatcacacagtcgtagcctgcgcagttccacagataaattattgtttcagattccccatggcaaaactaaaatagagtatgagtcggaggtttatataatgggagattttaacattgatctcgtgaaatttactggcaatgctgtttccctggagattcttccaaggcatgtaggacctgaacgtaccgtttatgaacccaatggggagatacgggtagaagttactgcacctaacaactcctatgttggccttctagctgttgacaaagctgtctatctgctaagaaacaaggaccgaatgggcaaacgaaagatgtatgattggatgaggagctatgacacaggatgcggaccaggagggggacaaaacactgctcaaattttcaag

SEQ ID NO: 73284 - DNA, 337 bp, Oryza sativa
  unsure (1)..(337): unsure at all n locations
  Clone ID: PAT_MRT4530_73580C.1
atccactggccgncnttttacancttcgggagggggaaaaaccctgtcnttncccaaattaatcnccttgnnagnacatccccctttccccaactgggcntttataaccaaaaaaagcccccccccnantcccccttccccaanattttgcncacccttcanatgggcaaaatggcaaaattgttaaccctttaaaaatttctttaaaattncccnttaaatttttggttnaaatccncccccaatttttnaaancnannaggnccaaannntnttaaattcccttnaaaaatnccccaanaaaataaaccnaaaaaaaaggnttaattttttttcc

SEQ ID NO: 73285 - DNA, 5778 bp, Oryza sativa
  Clone ID: PAT_MRT4530_73581C.1
atggtgacctcgccggagattggatggtcggctgcgaacatggaggacatgcgatttttagggcgtgacagcccctctgtcagaatagagatccaaggtgtacctttcctgtttaaccttattctgttagaatctaaagatcatgatgtcatcctagggatggactggttagccagatataaaggtgtgatagattgttccaatagaaaagtaactctcaccagcaatgatggtcaagttgtaactgttcatgcattgccctctgaacctcgaaggtcaagtctaaaccaaataactttggaagagattcctatagtccgggagtaccctgatgtgttccctgatgatttacctggtatgccgcctaaaagggatatagagttcagaatagatctggtgccaggaacaactctgatccataagcgaccatatagaatggcagccaatgaattggaagaagtcaagaggcaagtagatgatttgcttcagaaaggatacatcagaccgagttcatcaccatggggagctcctgttatctttgtagaaaagaaagaccatacccagaggatgtgtgtggactatcgcgcacttaacgatgtgactatcaagaataagtatccactgcctaggattgatgatttgtttgatcaacttaaaggtgccaccgttttctccaagatagatcttcgatcagggtatcaccagttaaggattaaggaggaagatatacctaagatagcttttactactcggtatgggctgtttgaatatacagttatgtcttttggacttaccaatgcccctgctttctttatgaacttgatgaacaaggtgttcatggaatacctggataagttcgtggttgtctttattgatgacattctcatatattcccgaactaaagaagagcatgaagaacatcttcgtcttgcattagagaagctgcgagaacatcagttgtatgccaagtttagcaaatgtgaattctggttgtctgaagtgaagttccttggtcacgtcatctcagcaggaggagttgtcgttgatcctagtaatgtggaatccgtaaccaactggaaacaaccgaagacagttacagagattcgcagtttcctaggtctcgcaggatattaccggaggttcatagagaatttttccaatattgccaagcccatgacacgactgcttcagaaggatgtgaagtacaagtggtcagaagaatgtgagcagagttttcaagagttgaaaagtcgcttaatatcaactcctattttgattttgcctgatccaaagaagggtttccaagtgtactgcgacgaatccaagcttgggctaggttgtgttctgatgcaagatgggaaggtggttgccaatgcatctcgtcagttacgtccgcatgagaagaactaccctacttatgatcttgagttagctgcagtggttcatgcgttgaagatttggcgtcactatcttttcgggactcgaacagaggtgtatacggatcacaaaagtttgaagtatatctttacccagccggatctgaacatgaggcagcggagatggttggaattgattaaggattatgacctgggaattcattatcacccgggaaaggctaatgtcgtagcagatgccgttagtaggaaaggctattgtaatgctatggaaggacgacagttgccattggaattgtgcaaggaatttgaaagattgaatctgggaattgtcagtagaggctttgttgcagctttagaagcgaagcctactctcattgagcaagtcagagaagctcaaatcaatgatcctgatatccatgagatcaaaaagaatatgaaaagagataacaaagatttgaaagatgcaattctaaaggaagcccattatacgttatactccattgaccctggtagtactaagatgtaccaggatctcaaggaaagattttggtgggcaagtatgaagcgtgagatcgcagaatatgtagcgacagatggacagaccgaaagggtaaatcagattttggaagacatgttgagagcttgtgctttagacttcggtggaagttgggataagaatttgccttacgcagaattctcgtacaacaacagttatcaagctagtctccagatggctccttacgaagcactgtatggtcggaagtgccgcactcaccggtgcaagaaactacgacggacgacgacgtacggcggccggcgacgagctccgacaacggcacggcttggctcgacgtcgacggcggcgctgcggcggcttgcgacggtggcgaaggggcggccgaggcgatttttagggcgtgcaagtccatatgtcagaatagagatccaaggtgtacctttcctgtttaaccttattttgttagaatttaaagatcatgatgttatcctagggatggactggttagccagatataaaggtgtgatagattgtttcaatagaaaagtaactctcaccagcaatgatggtcaagttgtaactgttcatgcattgccctctgaacctcgaaggtcaagtgtaaaccaaataactttggaagagattcctatagtccgggagtaccgtgatgtgttccctgatgatttacctggtatgccgcctaaaagggatatagagttcagaatagatctggtgccaggaacaactctgatccataagcgaccatatggggatcctctagagtcgacctgcaggcatgcaagcttgctaggggggcgcatccgctctatagctcgtatcttctcggggttggcctcgatgcctcgggcagagaccaagaacccgagaagcttgcccgcaggcacgccgaacacgcacttattggggttcagctttatgcgggcggagcgaagagtttcgaaagtttccgctagatccgagagtaaggtctcttggttgcgcgtcttcacaaccaagtcatcaacatgggcctcaacattgcgtcctaactggctacccaaagaaattcgagtagtacgttgaaaagtaggacctgcattctttaacccgaaaggcattgtcgtataacaataagttcctattggggtaatgaacgcagttttttcctcatcctccctagccatgcgaatctgatgataaccagagtatgcatctagaaaacacaaaaggtcgcaccccgcggtggagtcgacaatctgatctatgcgtggcagggggtaagggtccttaggacatgccttgttaaggtcggtgtagtcgatgcacatccgaagcttgccgttcgccttgggaacgacgaccgggttcgccagccactccggatggatgacctcacggatgaatccggcctccaggagtcgcgccacttcctcgcagatgaaggcttgacgttccggggcctgccgccgcactttctgccggaccggcctccctggggaccccgggcatgtccgccggtctccaggcgaagacgtcggcgtttgcccgcaggaaggagacgagcgcgtcttcctatttgtcgtccagaagaccaccgattcgtgtggtcttagacgggccgtcgcccagggcaacctccttgaccgggacctcgtcgcacgtgaccatccgctgcctcggggtggcggggacgaggtgctgagcctctcgtcgccacccgcgggcttggacgccacggcgaggtggtccgcacgctgctccatacaagcaagcgcgactttgaggtcgccatggacggtgatggggccaccggggcccggcatcttcatctgtagataggcgtagtggaccgccgccatgaacttcaccaacgcgggcctccccaggaccgcgttgtagggcagactgaggtccgccacatcgaagtccacccgctccgtgcggaagttggcggaaccaccgaaggtgaccgggaggtcgatatgacccagcggccaggtgtgccctggcgtcacaccgatgatcggctgggacggccggagcaccatccccggggccttgatggcgtcaaaggctacgggggaaaggatgttgagggctgcacccccgtctatgaggacacgccccaacttcacattgcaaacggtgggggaaaccaccatcgcgatctgtcctccccgggcaacgcacggcgggtggtcgatctggtcgaaggtgagggcaacctccgaccaccgcgcccgccgcgtcgcctcatgggtaagggccgcggccagaagctctcgcttcatggccttgaggctccggcgagaagcgtgagcgcacgctcccccatcgacggtggcgacggtggcctcaggctcctggaaccccaggtcatcattgccatcgtcgatgtcctcggcggtggccttctgcttggcctcacctcgccggttgccggcgggagccgccggggccttgccctcacggcgctcctgcctcttctcctcctcccacttcctcgtccgctcagccaaacttttgaccgcgcggtagtccgcgaggtcgtggagggaggtgttgtgcacggtacaccacttgccggtcgggcgctccctactgggagcgccggcctccttctttttgtcgctcgcaggcctcccctttcggggggcccgcgaagcgccctcgacggcgaggacatgaccctcgtcgtcggaacgggccgacttcttcttcctcctcctgtcccgccgccctggctgtgcggcggacccgggggcggccggagctgccacaccagaaccggaggagttccaggtccaggcctcctccttgcgagccacacggtccgcgagctcaaaaagctgcgcggtggtctggggctccttggaggcgatcttctcgagcatgcggttgtgccgcacgccccccccccgcgcctggcccttcagggccatggggaagaaattcgccatgaccctgtcgtcacccccggcggcctcgatcccggtcgtgtagatctggagaaactcggcggggttgacgcttccgtcgtatttttcggtgatggtgggccggaaccttgggggccaacggacgttccgaaggctcgccacaaaggctcgacagccggcaccgtcaaccggggacacggggggccggcccccgtgcccggaacgaagtggcgctccggacgaggaagcgccctccgttgcgtgggcggcgcgacgatcgtcgcgccggcgctcgatatcgagccgggcatccggccccccatgcacatcttcttgggtcggaggcgttgacgagggaatggcggacgaacggcgggtaacggccgccgctcgccgcgccctccgcctcgacgacgtggagccggcggcggcagcgccagaggcctcggtgcgggtgacgcaggagcgcgcccgcagcctggagcgcgccttggggcgtgccgccatcgcagtagacgaggcggcgacgcgccccgtctcgccgtcctcccccgtcgcccgcgggcggagaagtcacggatctttcgacctccccgagcgccaccccccgcccaggatttcggcgataggggaacggtggggtgcgagcccgccgccgccgccggaagtgacctctgacaagcagagcacacgcctcctgccccgctcgccagctttcccggtggacgcccatttcaaccttcattcaatggccagcgacttccttgccatgcttgtgctgaagcctggaatggatctgaccgggactgacataccaactccaggagttagcacgccggctctggctagggacgagagccaggaagctctcatcattccgacgggacggggcgaggcgtgtgacaggccgcctgttgccacctaa

SEQ ID NO: 73286 - DNA, 783 bp, Oryza sativa
  Clone ID: PAT_MRT4530_73582C.1
atgtcgattctcctccactttattgccattctctgcaaaagcatcgtcctggtgataatatcgccaaggggggcaagttttgagtttgcttatactattaaacattatgtaaccaacaatcaagcggaatatgaggcagttctcaaggggttgcagttattgaaagaggttgaagccgatgctattgaaataatgggtgttcattgttgtatcaatcaagccaaggttgtaatgggagaagtgcatgaagacatatgcggcataaagcttcggcgtacagggtattttcggtcgacaatgttagaagattgcttccgatattatatgggatgtcaagactgccagaagtttggagcaattcagatagcatcaacgtcggctatgaatcctattattaagccatggccgtttagaggatggggcattgatatgatcggacagattaatccaccttcaagcaaaagatataaatttatacgggtagctacggattactttagtaagtgggtagaatcggttcctttgaagaaggttgattctagagatgcaatacaatttgtcaaagaatatattgtctaccaattcgatgttcctcaaactatcacaaccgatcagggatcaatctttgtgtctgatgagtttgttcagtttgccgacggcatgggcatcaagttgttgaattcttcgccatattatgcgcaagctaatggacaggctgaggcatctaacaaaagtttgatcaagttaattaagacaaagatctctgatttccctcggcagtag

SEQ ID NO: 73287 - DNA, 372 bp, Oryza sativa
  Clone ID: PAT_MRT4530_73583C.1
atggagggcaacgtggagtttgttagagtttatgttgaatatgtgtacaatgtcgattacagtttaggaattggagttgtaataggccagttttataacatcctcgccttcactgtcgagattcagccgaattcggcgagatccggcgagccccaggttggatctggcgagcttagtggagtggagtcgcagccatcgccgccgtccgaggccagactcgacgaaccacgggctagatctggcaaggatgaggcggcgctagcattccgacgaggaaggtggagggagagcggtggaagggaagagggagggttgcaccaacggtgggaggagaacggcggaggaggaaagggagagttgtgctggtggtag

SEQ ID NO: 73288 - DNA, 243 bp, Oryza sativa
  Clone ID: PAT_MRT4530_73584C.1
atggcggcgaggcatgtctccgtacctgcgatgcttgatctgtatctgcatcagagcattgctgcatcctgcacgatgaatggcggcaaaggcttctcgcacctctcagggttgctggagacaacgcagcaggacaatgtcatccatcccaatggcaatttgatcagctccatggctgaagtgacctctagctctcggcaacaaccaagttacaatagagattccgatggttcccaggcctag

SEQ ID NO: 73289 - DNA, 1644 bp, Oryza sativa
  Clone ID: PAT_MRT4530_73585C.1
atggccgcgcccgcgggcaacgtcgagacccctcctcgccgccgcgtgcgccgccgcatcgccgccgccgcggccgatgacggcggcgaggtcgacgacgatggcctcagcgtgctgcccgacgaactgctcctcgtcatcctgggccggctcgacacgcgcacggcgctcgccgccgccgcgctctcgcggcgcctggaccgcctcgcgcgcgagatccccgcgctcgtgttcagcgtccgcgacgtgctcccgccgcgctaccacgcctgcgtccgcgcccacggcgacgccgccggcgcggacgccaggaagctcgacgcggcgatcggccggtgcgagcgccgcgccatccgcgggttcgccgactgcgtcagcgccttcatggagccgcgcgtcgccgtcgccccgcgccgcgccaggagtctccggctcgagttcttcgcggcgcgcagcacgggcttcgtcgaggacctgatcgccatggcggtcggcgcgtggggcgtccaggacctcgacatcaccgtcgtcaagccggcgctggtcgagcagggcccctgctacgccttctgcttccccgaccaccgcctcagcgcggagtcgctccggtcgcgcatccgcagcctcgccgtgtccaactgcttcctcccgccgccgtccgagctccggcactacgccgcgctcaccaagctcgtcctgcaggacacgcacccgcggacgcccctcgccttctaccgccaggtgctcgacgcgtgcccgcggctcagggcgctccacctccgccgctgcggcgcgccgtggtacgccgcgctggtggtcgacgggatgccggagctccgcgagctcgtcgtggacggctgcggcttccacaccgtcgacctgcgcgcggcgccggcgctggagcgcgtggcgtgcgtggacggccccgtcgcgctggccttcggcggcgccccgcgcctcgcccgcctcagcctcacctacgcgctcgacgaccgcctggtgctcgtccggaactggaggctctccggcctcctcggcgacgccccggcgatggcggagctcctcgtccgcttcaccggcgagcccaagtggatgacctcgggaccgctccgctcgccgctgcccggcctccgcaggctcgtcgtcgccgacatgccgtccaactgggacgtgtcgtggccgcgcgtcatcctcgaggcggcgccatgcctcgaggtcctccacatccacgtccaagaagaagaagacgacgccgggacaacggcggcggcggcggcggagataccatggccgccggcggagagcgcgcggcacgagcgcctcgcggagctggcggtggtggggttcgccgagacgcgggggcaggtggggttcgtgaggcacgtggtggaggcgtgcgtggcgctgcggcgcgtcgtgctggtgaggcgcgggcgcgtcgtggtcggcagcgaggggcggtactgggactggaagctggtggcggcggaggcggcggcgccgcgtgagggggaggtgggaggtggcggcggcgacggcgagcgcccgacggcggcggcggagtggagcgaggtggagaagatggtgatacggagccaggtgaagagcgcgtcgaggcctgacgtggaggtgttcattggatga

SEQ ID NO: 73290 - DNA, 355 bp, Oryza sativa
  Clone ID: PAT_MRT4530_73586C.1
ctaaactgagcaaatggttattgcaaaaacatcatcttcttcttcatcttcttagtttacacaacaccaactctatcatcatctcttcgcactaaacccatcttccccaacccaaatacaactaactcgctagccacaaatccatccaaccacaattaaccactgctaaactacggtcccccacttcacttgcctgggaccaagttggtagcgtacgcccatgccttgttgttgacagtctcagcgacgttgtctcccaggttctccaaggagccctttccggtgactatggcctccactaagaatcctaacatggacaacattgccaggccgcccttcttgatctccttcacct

SEQ ID NO: 73291 - DNA, 834 bp, Oryza sativa
  Clone ID: PAT_MRT4530_73587C.1
cccacgcgtccgcctagagaccagcagagtgtagtgtgctgtgtgcctcttgctagctaagcaaggagatagccggagccatggcgaccatcgccgctgccgccgccgcccgcaccgccgtcgttggccggccgtcaggggtggctcagctgagagcgaggaggggtgagagggtgaggtgcggctactcctccagggacggcaaggaggcgacgcccgccgccgccgtgaaaggcgcgacgtcgatgctcgcggcggcggtgacggcgtcgtcgtcgtcggcgccggcggcgatggcgctggtggacgagcggatgtcgacggaggggaccgggctgagcctggggctgagcaacaacctgctggggtggatcctcctcggcgtgttcggcctcatctggtcgctctacaccgtctacacctccacgctcgacgacgacgacgagtccggcggcctctccctctgaggccttgttcggttaatccgagaaagaaattgaagaggggattgagagaataattcccctctataataggagttaaataaatcctctctaaatcccccgctcgcgcgttactcgacacgaggcggcagttaattattttgcactcttagttggtgtagagaccaattcaagtttccacttcgatgagtccgtttactgatcctgcctctatcgtttttttttttttactgttctgcaaataggcggggcctgcctatgcttgagtgtgcatgtcgaatttggtgtaattaattggaaacgtgcatggatattttgtaactaattaagttggtgtttacctttagtagtagcaggataaatttttcat

SEQ ID NO: 73292 - DNA, 256 bp, Oryza sativa
  Clone ID: PAT_MRT4530_73588C.1
gtggacgaagaagagaggcgcatttcaatcgaagaagacggaggagcgctgctcgtacgcacccgctgcttctcctgctgcaccttctcccacaaatggccagcaaccatgctggtttccccgccctcgatagatttgttgcccgcaagcgcactcgcagttaggaaaaaccacctcctccaccttcttcttcttgttttggttgttcttgttgttgctgttgctgtggttggtgcggggagggttgtgggggggg

SEQ ID NO: 73293 - DNA, 533 bp, Oryza sativa
  Clone ID: PAT_MRT4530_73589C.1
taagcgtaagttaaatttttgtcggcacttgctccggacatcaacggcggagcgtcatggaggtgttcgccgttgctcctccatgtccttcggtgttcgaactcgccgccgcggtggtcgccgccatgtgcgtggggcgcggagcggtggcccgatccgccgccgcctcggctgtcgcccgcggtcgccccgtcacgggatccgccgtcgagccgcctgcatccacgcctgacacgcaccaccgcagccggatccgtgtacgtggggcgcggagcggcggccggatgcgccgccccctcgcctcgccatgccatgttggatccgccgacgccgcgccttcccgtgcaggattatccccggatccgtcatcgcgccggatacgccctaccatggccagatccgcgcgcgtggggcgcagatcggcggccgggtgcgccgcctcgtcgcctcctacacgccgtcaaccgtcgcctccacgcctgcagtcgtgccataccggatccgccgacgtcgcgcccaccgccgctcggtag

SEQ ID NO: 73294 - DNA, 1833 bp, Oryza sativa
  Clone ID: PAT_MRT4530_7358C.1
ctataaatcggttgctagatatggaaggcatgtgcctatatgtactctaccatatgtgataatccaatctatcgtgttgagcctgtcgtcgatgacggtccagctctcgtcgccaggcttggcaatggcgcgcaccgtgggatcggagaaatcgactgccactactgtggaggcatcctcgacgacaaaaccggcggcgttcacgcgaagacccacgccatgggcgcccaaacgccagctcgctcgtcggcgccactccggtgtcaggagcgctgtcaccggcgggaggtcggtgcggtggcgggtgagcgggttcaggaggtggaggcggaggctgggctcgtggagcagcagcaggaggccctccggcgtgagcgccagcatcgtgtggtcggcgagctccgggatgtcgtccgtgtggatgcacccgccggtggagacgttgagaaagcggtggcggcggtgggtggcggcggcagtggtgcccttattgtggtgggccttgtcgagcatgatccagtgacgagggaggaagcggctgtctaggccaccatcttgcgggcgcgggtgcagcgaggaggagagccgccacgggcggcacacggcacggaagcggacgtaatcggcgacgtcgttggcgagggtgagctccgcgatcttgccggccggcccgtccccgaggttcgtccagtcccttgtgccagttttgctattgtggttgatagagcttggtagcgagcgcctgggcaccaccaccgccaccgcctgctcattgccgccggctggcgtggggcgggagcgtttcgcctgggttctcgctggttcggtggaggcgcaagctccccgcggcgattgtgacttattgaactggctggctggtcgcttttccatcccaccgcggcaagttcttttctccccacatgtttcctcccaagagaggctgatgcggcagcggccgttgacggcacatgcagggatccacggcgcctcacggatcagatacacaccctcgagaagcattgagacacctacagctcccaaggctgcggcggcggcggcggagcctgcttgctgctcctcctcttcagcgacgccggtgcgcacgaggtcagctgtgccaatgagagagagtgacgtaagcatgttgatggcggctgcggcggcggcgtctgcggcggagctggtgcgcatgatacccctttctctcattcctccttgatgaggacatcctccactattacccactcgccgcgccgccgtgtttgccatgaagaacatgctgtaggccgagtagggagtgtatttttcatttggtgcccacttccagattgtctcatcttcctccccatcttgaagttgcacccccagcaaccagtccgccagccaaaatttggtgttcttcccatcacccaacacttgtctcgttcctgcgaggtagaggtcttgcaagtctttcgatgttgtcgacttggcggtctgaagtgctgacttgtagtcgacaacagggtagccttcctcctcgaatccgcatccggcgagatcaaagacagcgctatatctctcggcctgtcctgttgttccccctttttgccaaccacttgagacgaagtccttgccgaaataattgatgttcttgattcccagcccgccattttcatgtggcatgcagaccgctttccaggcaaccaagcagtgtccgccattcacctcttcctgcccggtcaaggagcggttggacatcgtgcttcgtaagctttcagagggggagcgggagcccgaggtaggtgattgggaacagctcgactgcgggctgatgttgagcttgcagcgcat

SEQ ID NO: 73295 - DNA, 4707 bp, Oryza sativa
  Clone ID: PAT_MRT4530_73590C.1
atggcggagcagcaactccaagcaggtaagaacggcgaccaacggttgccggaggtaatcttgtccacgctgctacggcggaagctggtgggtccgccatggcgtggccctttaccagcggaacgcgtttctccgccgagaacgctgggcgactgcctggcgttggcatctcggtgtccgcggcgtaggcggcgcgatggtcgacggtgcggcgttcctcgttcatcgtcatcgccggaggccgggacggttggttcaaaattcgtaattccgaaatcgttgggcgtttcaaacgactccgatcaattactacggcagggttcacggcctgatttccctcctctctgcggtgcgcactcgtcggtctctaccgcgattgccagcgcaggaggggagatacgaaggccggcgccatctgcatctcagtcggatcggattcgtttggggcccgggaagtggtttcggcccaccaaaggattgacctccctctttgctcgctctggactcaaacctagatcgcgaaaactgcagccgccatcacgccccactgcgacgatctcgtacgctgcggtcgtacggagaggaaaagccatggcggcacacggaggcggagggtttggcggtcaagggggagggagaggctggggcttcgcgcaaggtttccaccctggcttcgacggcggccgcggccgtggccgtgatcagcgcggtcacaacggtggcggattcggaggagggtacggaggcggatatggcggcggaggctatggtggtaacagtcacggtggatacggaggcaaccggaaccgccgcggttggcagggtgggcgccgcttcgcgccggctgctggccacgcggccagtcagttccacgccggaggtggcgttcctggacaccaggccggtggccaggcggtggtcggccaactgcagcagcaggccgctgctggtcagttccagctggctggcttccagacagcggggctagctgaccaacagcccgcccaggcgcccttccaggcacctctggctggccagcagcctacccagccggctgcggctggcaaccagaccagggaggctggggctgtgctcttccagcaggtcagccaaagccagaaggcccaggtggctgcaccggccaacggtggcggcctcggtacgtctcaggccgggacgtcggcgctgctggcctccagccaagcagcaccggcggctgctccagctggctccacaagaggggccatcattggaggatcggcacaggatcccgcggcgacacatctggaaggcttcatggcaaccaagcccgaacctgcacaagccggaaagcagaagagcaagggtaaaccctactgtttctgctgctatacaaaggggcacactatagatgattgcactgtcttgctttgctgtgatttgtgctttgaaaatcatgttctaaagaattgcccaaatgtgaagaaaacaaatgcgattgcggctccatgtggttatgcagtagagggcatgggcttttactatatccctatgaatgacaacccaaagagtaatgtggaggagcacacggtcttgggtccaatggacaccaagacaattaagggaaagatccgcttcgagaaaggtgtcgagaatgatgtgaacagatatgagattgacaaagtttgggttcagtttcggggtctgcctagcgagctcagagaatttcctatcatatgggctatagggtccatattaggggtctctaaagcggtggatatgcgctttaccaagacgtttggcaggtccagactgaaggtggctgttctagacccgaacaggatcccagattacgttgatgtggtcattggtgacttcgtttatgagctgcagttccgcatggagatagatatgcctgttggagagccttcagtcattgacatggactctaccacagacaatgatggtgacaatgatgggaaaggcgaggacccaatggaggaggatgccaacaaaaataatggcacccctgatgacttaccaaaggatgctgcccctgaaaatgcccctgcagaccagctacccaagcatggcgcgggtgctgagacaggcaagctgaaggagaaaacagtggctaagtctgatccgggaaaaaataaaaggcccgtggctgtactatctcaggggatctctctggagggttccattcagtggcaggcaaacatgttgggtaaccatggcattcagtggcaggcaaacatgttgggtaaccatggctcttctagcaaaccggtggtgcacaagggagagactgtatctcctctgaggtccagcaagcgcaatgtgtcctccctagagcaggactccatggaaaaggccaccaaactgaaagctcgcaaaaacttggattccactgctgcaaaagatgattctgttatactggctacaactgactctttaggaattaatttgggggacgatgttagttcggttctagattctgtacattctttaaaacaaattgagttacaaagatttaacgacttttgctcatctagtaaagaggagaaacgtagctgcgaggaaaactcatcagtttgttcggaggataatgttgatattgatgctttaaatactatctgttcggaaattgcggaaagccttggtgatgggggctgtgacccgctgtgtctacatacccccttatcacaaataaagaggaggcagcctaaggcacagtctgatttaaaaggtcattttctctccgaattagtacgagtttgctctaaagaaaccatacctacagttgtaggtggtgtctttaatatacttcgtaacccacaggagaaaaataatgataactttaacgatagatggccatttctgttcaatgcagtaattgacactttgaatcttagagaattggagtcatcagggagatcttttacttgggcaaatcacttacaaaatcaaacttttgagaagcttgacagaattctagtttctacggagtttgagacaaaattcccactctctactgttagcatcctcactagggaaatttcagatcatacacctttgctatacaattcaggcggtgcgtccgcagcttaccaacctcaatttaaatttgaattgggctggttgcggagggacggtttcagtgatattgtaaaggaggtgtggcaaggggtgtccattgagggtacacctttagagagatggcagaggaaaattagacgattacgccaatttcttcgaggttgggcgaaaaatattactggtgcttacaaaaaagaaaagaaagagttattggataaattagatacacttgttaagaaagctgaacatactatactcaatgagtttgaattaaatgttaagcatgttctaaatgatagactggctgagttattgagggaggaagaaattaaatggtaccaacgtgctaaggtcaagcacctattggaaggagatgctaacacaaagtactatcatcttctggcaaatggccgtcacaggaaaactcgtattttccaattgcaggacgggaacgaggtcattactggtgatgctcaacttaaggagcacatcaccaagtactttaagaccctgttcggcccatcacagacttcatctatttttttagatgagtctcaggtcgacgacatacgacaagtctctgcagaagaaaatgagtctttaacggcagattttacagaagaagagataaaatgtgctatattccaaatgaaacataatactgcacctggtccggatggtttcccaccagagttttatcaggccttctggacaattataaaggacgacctgttagctctgttttcggatttccagcagggatcgttgcctcttaatagcctaaactttggtacgattattctactgcccaagcagaaggatgttaggactattcagcaatacagaccaatctgtctcctgaacgtctcctttaaaatctttaccaaagtggctactaacaggcttacatcagtagctcagaaagtgattaaacctactcaaacggcttttttaccgggtagaaatataatggagggggccattattcttcatgaaactttacatgaactccacacaaagaagcaagatggggtcatttttaagatagattttgaaaaagcatatgacaaagttagatggtcttttctccaacaaactctcagaatgaaagggttttcacataaatggtgcaattgggtggagaagtttactcaagggggtaatgtcagtataaaggtgaatgatcaagttggtaattatttccaatccaaaaagggcttgaggcaggaggatccgatgtcgccagtactatttaatatagttgtcgacatgttagcgattctcattgctagagccaaaaacgctgaccgcgtagagggtgttatcccacacctgattcaggatggcctgtcgatactccaatatgcggatgatacggcctcaggaaattttactgtcaaatcgatgtatgctgcactaatcagtaatggtattagagtttcacaggatatttggcaaattaaggtactattcaggggtacgcattggttacgccaatgggcgaagctgcaacggcatgaggatctgcgttcacagttgatcgcggcatcgcaacatcttgagtcatcagctttgcaattttttagttccaatggatggttatcagctagacacatcggtctttag

SEQ ID NO: 73296 - DNA, 392 bp, Oryza sativa
  Clone ID: PAT_MRT4530_73591C.1
gagtacttgtaaattgcatctgatttatcattattatcacaggaaagacacccagaattgtaactaagaaatacagctcgggcttttgcattatgtccttgattgtttttaacaaatgatatcaaggggcattatctcaaaaactttgaaaggtccaacagaaccacagttctaggaggggtaaaatcaggcaacacagaaaccaatttagttcactctacaaaatcaattgtctgatagcacgacatgagcaggtcttccagcatttatcaccttgggacagactgacccatctccaaacggaaaagacaggcaagtgcatctcatcgatggtattgattgatgttaaagtccgggataggtgcgacagagggtaccctgagagagcgcgc

SEQ ID NO: 73297 - DNA, 5755 bp, Oryza sativa
  Clone ID: PAT_MRT4530_73592C.1
atgaccggccgccccaagccggtgcatgctgtgaccccttcgccagcatcgccgatccgctcaaagttttgggcaacgccggacgacgatgactcggaggatgatgatgaggcaccgacaccgcccccgttcacaggctcatcggcgacatcttctccgtcgacggaggaattcgtcaacgaggcaagcgcagcgggattctcacgtgcacagctcgtcatggcggagcagcaactccaagcaggtaagaacagcgaccaacggttgccggaggtaatcttgtccacgctgctacggcggaagctggtgggtccgccatggcgtggccctttaccagcggaacgcgtttctccgccgagaacgctgggcgactgcctggcgtcggcatctcggtgtccgcggcgtaggcggcgcgatggtcgacggtgcggcgttcctcgttcatcgtcatcgccggaggccgggacggttggttcaaaattcgtaattccgaaatcgttgggcgtttcaaacgactccgatcaattactacggcagggttcacggcctgatttccctcctctctgcggtgcgcactcgtcggtctctaccgcgattgccagcgcaggaggggaggtacgaaggccggcgccatctgcatctcagtcggatcggattcgtttggggcccgggaagtggtttcggcccaccaaaggattgatctccctctttgctcgctctggactcaaacctagatcgcgaaaactgcagccgccatcacgccccactgcgacgatctcgtacgctgcggtcgtacggagaggaaaagccatggcggcacacggaggcagagggtttggcggtcaagggggagggagaggctggggcttcgcgcaaggtttccaccctggcttcgacggcggccgcggccgtggccgtgatcagcgcggtcgcccacatggccacaacggtggcggattcggaggagggtacggaggcggatatggcggcggaggctatggtggtaacagtcacggtggatacggaggcaaccggaaccgccgcggttggcagggtgggcgccgcttcgcgccggctgctggccacgcggccggtcagttccacgccggaggtggcgttcctggacaccaggccggtggccaggcggtggtcggccaactgcagcagcaggccgctgctggtcagttccagccggctggcttccagacagcggggctggctgaccaacagcccgcccaggcgcccttccaggcacctctggctggccagcagcctacccagccggctgcggctggcaaccagaccagggaggctggggctgtgctcttccagcaggtcagccaaagccagaaggcccaggtggctgcaccggccaacggtggcggcctcggtacgtctcaggtcgggacgtcggcgctgctggcctccagccaagcagcaccggcggctgctccagctggctccacaagaggggccatcattggaggatcggcacaggatcccgcggcgacacatctggaaggcttcatggcaaccaagcccgaacctgcacaagccggaaagcagaagagcaagggtaaaccctactgtttccgctgctatacaaaggggcacactttagatgattgcactgtcttgctttgctgtgatttgtgctttgaaaatcatgttctaaagaattgcccaaatgtgaagaaaacaaatgcgattgcggctccatgtggttatgcagtagagggcatgggcttttactatatccctatgaatgacaacccaaagagtaatgtggaggagcacacggtcttggtacgtgtcttagacggttcctttactgttgatcaactgacagtggaacttgatagactactgccagctaaaatcacttgggagattggtttgaaggggtctgatgccttcatcattactaattttccatccgagctccgagaatatgcggtgaattggggtccaatggacaccaagacaattaagggaaagatccgcttcgagaaaggtgtcgagaatgatgtgaacagatatgagattgacaaagtttgggttcagtttcggggtctacctagcgagctcagagaatttcctattatatgggctatagggtccatattaggggtctctaaagcggtggatatgcgctttaccaagacgtttggcaggtccagactgaaggtggctgttctagacccgaacaggatcccagattacgttgatgtggtcattggtgacttcgtttatgagctgcagttccgcatggagatagatatgcctgttggagagccttcagtcattgacatggactctaccacagacaatgatggtgacaatgatgggaaaggcgaggacccaatggaggaggatgccaacaaaaataatggcacccctgatgacttaccaaaggatgctgcccctgaaaatgcccctgcagaccagctacccaagcatggcgcgggtgctgagacaggcaagctgaaggagaaaacagtggctaagtctgatccgggaaaaaataaaaggcccgtggctgtactatctcaggggatctctctggagggttccattcagtggcaggcaaacatgttgggtaaccatggctcttctagcaaaccggtggtgcacaagggagagactgtatctcctctgaggtccagcaagcgcaatgtgtcctccctggagcaggactccatggaaaaggccaccaaactgaaagctcgcaaaaacttggattccactgctgcaaaagatgattctgttatactggctacaactgactctttaggaattaatttgggggacgatgttagttcggttctagattctgtacattctttaaaacaaattgagttacaaagatttaacgacttttgctcatctagtaaagaggagaaacgtagctgcgaggaaaactcatcagtttgttcggaggataatgttgatattgatgctttaaatactatctgttcggaaattgcggaaagccttggtgatgggggctatgacccgctgtgtctacatacccccttatcacaaataaagaggaggcagcctaaggcacagtctgatttaaaaggtcattttctctctgaattagtacgagtttgctctaaagaaaccatacctacagttgtaggtggtgactttaatatacttcgtaacccacaggagaaaaataatgataactttaacgatagatggccatttctgttcaatgcagtaattgacactttgaatcttagagaattggagtcatcagggagatcttttacttgggcaaatcacttacaaaatcaaacttttgagaagcttgacagaattctagtttctacggagtttgagacaaaattcccactctctactgttagcatcctcgctagggaaatttcagatcatacacctttgctatacaattcaggcggtgcgtccgcagcttaccaacctcaatttaaatttgaattgggctggttgcggagggacggtttcagtgatattgtaaaggaggtgtggcaaggggtgtccattgagggtacacctttagagagatggcagaggaaaattagacgattacgccaatttcttcgaggttgggcgaaaaatattactggtgcttacaaaaaagaaaagaaagagttattggataaattagatacacttgataagaaagctgaacatactatactcaatgagtttgaattaaatgttaagcatgttctaaatgatagactggctgagttattgagggaggaagaaattaaatggtaccaacgtgctaaggtcaagcacctattggaaggagatgctaacacaaaatactatcatcttctggcaaatggccgtcacaggaaaactcgtattttccaattgcaggacgggaacgaggtcattactggtgatgctcaacttaaggagcacatcaccaagtactttaagaccctgttcggcccatcacagacttcatctatttttttagatgagtctcaggtcgacgacatacgacaagtctctgcagaagaaaatgagtctttaacggcagattttacagaagaagagataaaatgtgctatattccaaatgaaacataatactgcacctggtccggatggtttcccaccagagttttatcaggccttctggacaattataaaggacgacctgttagctctgttttcggatttccagcagggatcgttgcctcttaatagcctaaactttggtacgattattctactgcccaagcagaaggatgttaggactattcagcaatacagaccaatctgtctcctgaacgtctcctttaaaatctttaccaaagtggctactaacaggcttacatcagtagctcagaaagtgattaaacctactcaaacggcttttttaccgggtagaaatataatggagggggccattattcttcatgaaactttacatgaactccacacaaagaagcaagatggggtcatttttaagatagattttgaaaaagcatatgacaaagttagatggtcttttctccaacaaactctcagaatgaaagggttttcacataaatggtgcagttgggtggagaagtttactcaagggggtaatgtcagtataaaggtgaatgatcaagttggtaattatttccaatccaaaaagggcttgaggcagggggatccgatgtcgccagtactatttaatatagttgtcgacatgttagcgattctcattgctagagccaaaaacgctgaccgcgtagagggtgttatcccacacctgattcaggatggcctgtcgatactccaatatgcggatgatacggtaattttcatgagccatgatgtcgccaaagcgattaatatgaagttaattcttacaacctttgaacaactatcaggcctcaagataaatttccataagagcgaaatcttttgttttggtagagcaaaagagaacgaagccttttattccactattggtgtaagattggacaaggggggctaggtatccccaatttagagattcaaaataaatgcttactgagcaaatggcttttcaaactgttaaatgaggacggactttggcaggaactgattaggaacaaatacttgaaggaaaagcccctaggttgttgccagaaaagggctacggattcacacttctggaaaggtttaatgagcataaaagacactttcctgggcttgggatcgttcaaaatcaaagatggatcgcaaacgagattttggtgcgatacgtggctgggtaataaacctttaaaggacagatttccatcattgtttaatattgttagaaggaaaaatgactctgtggccaaagtacttagttcgtcccctctgaatatttcgtttaggcggaatttggtgggagcgaatcttagtagatggaatagagtgcttgcttccatacaggaagtattattacaggatgggggtgactcgtttgtgtggtctttgcaggcctcaggaaattttactgtcaaatcgatgtatgctgcactaatcagtaatggtattagagtttcacaggatatttggcaaattaaggtcccttcaaaaataaaaatttttttgtggtacttaaagaaaggtgtcattcttactaaagatattttagctaggaggaattggcatggtgatttaaaatgcgctttctgtcatcagcctgagtcaattcaacacctgttttttgattgctatattgccaaatcatctaacaacaatgaaaatactaattataaaaaaat

SEQ ID NO: 73298 - DNA, 431 bp, Oryza sativa
  unsure (1)..(431): unsure at all n locations
  Clone ID: PAT_MRT4530_73593C.1
tgatgaggggaggagtttccgggngtgttggtgagagnncacactaataagaatagataaaaactgtctcaanagctaaaanaattagngtggtgtggtgtagaaataatcggcctngtntggtgtccacgccgtggatagatgccccatctcngtacccgtagtnttgcagacgtcggtcctccgtgacgcactngcacgcaaaangtagatgtgtctaatgcacgttgtccccctntgtgtgtgcatctnaccagtgttgtgtgttcngtagtntggtatttacacccacaatgcnttggggaatgtttgtcgtgcaacngancacgcgcaatggtaggtgcgtgtgtcttgtntgtctgtgtgtgtgtacccgactcacatanataatgagaganatnangaattaataaaaaaaaaaaaaaaaaaaa

SEQ ID NO: 73299 - DNA, 207 bp, Oryza sativa
  Clone ID: PAT_MRT4530_73594C.1
atggccttcccgcaccggcccagcccaccgctgtttgtcttcctcctccgaccggtcgcgcgcgcgcaccacatgttcgacgaaatgtctcgcccgagcactgagtcgtggcagtgctgcgtcgcaccgagccgccctcccatgcgccgcgcgccgtgccaggaccgcatcgcgccaaagccgcgccctgccaagccgcatatccca

SEQ ID NO: 73300 - DNA, 574 bp, Oryza sativa
  Clone ID: PAT_MRT4530_73595C.1
cccacgcgtacgaggacgcgtgggaatttcagcaaaacctagcacctgaaaaagcttgtttggatcattagtcaatgtaaacctgtttaaagtgttggcattgccaaatccaaaaaaaaaaaaaaaggggagaccaattaaaaaaataaaaatttaaaaacccgggagatgaaaaaaaaaaattttttttaaaaaacccccaaaattacattactggggcggcttttaaaaaaaaaaaaattatgaaaaaaacgggggggccccaaattaatccccttttaacccttcccccttttgcccattttggttttttaataagggcccccactttatttcctttccaaaagttttcaaaccggtggtggggaaaaaaccccccctttcccaaactatttacctgggggggggtgggttttttccccaattggatctttaacattggggccccccttatccccctttcttttaattttttcccttttttttaggaaagggtcccccctttttcccgaaaatatataaaaagggggtttttttttaggtcccaatttaaagttttactggcccctgcccc

SEQ ID NO: 73301 - DNA, 395 bp, Oryza sativa
  unsure (1)..(395): unsure at all n locations
  Clone ID: PAT_MRT4530_73596C.1
tacccggtcgccggatatcacccgggtgcgaccccacagcagtcccggttgtgttaaaaatgaggttggcacccaanttaaaggggtgtaagtttagtgcccacangttggaaatgttatnaagatgttgagacaccctcgtgggatgtgtttggtgcatgcttgttatacccgatgatgtttagaaatggatgttggacangatgatgaaatatttggtttgcccgagggtggattgttcttaagaatcntcccgagatggtttgaggaggtgcccaaactggagatggtatgagatgtctgtgggatgtgggaagaagatcgccatttgatttggcttcagagcttntgaataaaaaaaggnccattgttgctaaaaaaaaaaaaaaaaaaaa

SEQ ID NO: 73302 - DNA, 340 bp, Oryza sativa
  Clone ID: PAT_MRT4530_73597C.1
actgtagtaatgggcctagggaggacaattggcctaagatggctgattactcaaagaatgaacaaactgaaacgggaaaacatggattgcctactggagcgctttgaaagaggagatctatggggaggaggggaactgcatcaactggtggatattgagaagctgacgcagcactgaatagcaaactctcgcgagttggattattactcgcttatgcttagcgagaggtaagagagcctttcactggtatgttatcatagtcagatgtgtcttgagagatggaatgcgaggcagacagatctttagcataattttatgctaggaaggaccacacaacgat

SEQ ID NO: 73303 - DNA, 152 bp, Oryza sativa
  Clone ID: PAT_MRT4530_73598C.1
ctcgactgcgatgacgtcgactacgagcacttcaacggggacggggtgtactaaaaaggactcgccggacacacaccacacaccaacaattacaacaccattggtgcgcaaacccaacataagcacctccagagcaacaacaaagttcatct

SEQ ID NO: 73304 - DNA, 216 bp, Oryza sativa
  Clone ID: PAT_MRT4530_73599C.1
gaacatttgagacccaaccagtacgaggcactagtgccgggaaatgaagtggggcaagataatctggtcacaagagatgagatggcggggttactaaaattaagagtacgtcggaatagacccccggccacaaaggagaagcagatccaagtggcgatggttaggaaaaagcgaaagatagataacgcatcgacagatcacaattgcaagatgtga

SEQ ID NO: 73305 - DNA, 457 bp, Oryza sativa
  Clone ID: PAT_MRT4530_7359C.1
ggaaaaaaaaagggaataatgggggaaaaaggctcccggggaatttttccctttttttcccttgggggaaaccgcccttttgccagggccccttggggggaaccggtaaaaaggaaaaaaaaggaaaaaaaaggtttcccaaattttttttttttgccattggcttgggttccccccggcccagggtaaacccgggggcccgttgggttaaagggggtatttgggggggggggaaaaaacttgggcctccccggcgggaggggccccccggcccaggggcccccccgggcccttggggggcgggtttccagacaaggcctgggccccccgggaggcataagttggccggcctcaaaccgggcaacctccggacttgggggggggggttctccttcgggcccccccgcatggggggacaaagggggagtttcgcccccccttttttttgctcgggggg

SEQ ID NO: 73306 - DNA, 126 bp, Oryza sativa
  Clone ID: PAT_MRT4530_735C.1
atggcgcacccggagctggagatggcgcaccgggagctgaagctggcgcaccgatcgacaacaccaacggaggcagttctgccttacaatccagcggagggactttcacaggattcgttgtactag

SEQ ID NO: 73307 - DNA, 195 bp, Oryza sativa
  Clone ID: PAT_MRT4530_73600C.1
atggggaggcgttgggcagcgacacgcaaaagccggcgggcggagtcgacggcggcgtgtgggtcgagtcggaggcgatggggaggcggcggaggaggtggggaagagggtggagtcaactgcagcgatgggaaggcgttgggcggaagaggagccgacagcggaagccggccggcggaatcgaaggagaagtag

SEQ ID NO: 73308 - DNA, 261 bp, Oryza sativa
  Clone ID: PAT_MRT4530_73601C.1
aacagcaactcaacccagcactgatgtgtgatagccacaagctgattgttgaaaacgactccatttggtcttacataagagttaataggtctaacatgacacggctcaaacttatactgtaagctagagtggtgttctaactagcgggtgtgcgagcatcaccccaaatcacatgccatacaccaaattcaaacattattacatccgcatctaaatgataaggtaactggatccctaacccatgcttctcaagcaaacatt

SEQ ID NO: 73309 - DNA, 1931 bp, Oryza sativa
  Clone ID: PAT_MRT4530_73602C.1
atgagcgaatccggcagggtcaccgccggcggaggaaggggcgagctgcggccgccggagctgccgcgggacccggcgctggagttcctgtcccggtcgtggagcgcgtcgggcgccgccgacgtctcccgccgcgcgctcgccgccgccgccttcccggcggcggcggcgtcggccgcggtcatcgccgaggacgtctccggtgagctcgacgtcgacggctccgcctccgggagctccttctccttcgcgtcggcggccacctcgcagctcatcatggacaggatcatgtcgcaatcgatagacactgagaatttactcgtttcttgtttcatggagcagcaggaggtgtcgccgctgacctccggccgcctctcacacagcagcggccctctcaacggcggcggctcgctctccgacagcccaccggtctcgccggacgtcgacgacagcaaggctcacatgcttcagaaatactacacaccaaaaagccactgcagaataatctctgaccagcaggaagaggtgtttgatttgatggtctttggtggttgcttgttttgcagagcggtgagcacgccgaagccgcagccgtaccgcggcgtcgtcggcggcggcgggaagacggtggggcggtggctgaaggagaggaaggagaagaagaaggaggaggcgcgggcgcacaacgcgcaggtccacgccgcggtgtcggtggcggcggtggcggccgcggtcgccgccgtggccgccgccaccgcggcctccggcggcggcagggacgaccgcgccgcgcgcaccgacatggccgtggcgtccgcggcgacgctggtcgccgcccagtgcgtcgaggctgccgagtccctcggcgccgagcgcgaccacctcgccgccgccatcgcctccgccgtcaacgtccgcacacccggcgacatcgtcaccatcaccgccgccgccgccaccgcgttgcgaggcgccgcgacgctcaaggcgagggcgctcaaggacgtgtggaacgtggccgcggtgatccccgtcgagaagaacgccatcgccgccgccaccaccggcggtggccaccacaaacacaacgcccagaagcagcagcatcaccaccgccaccatggcaacggcagcaacacgagcagcagcttcagcgacgaggtcgccgccgtcgacgacgacgacgacgacgacaacaacttcctcaccatctgcagccaagagctcctcgcccgtggcaccgagctcctcaagcgcactcgcaaaggagctttgcattggaaggtggtctcggtctacatccatcggacgggagtggtgatgctcaagatgaagagccggcacgtcgcgggcacgctcaccaagaagaagaagaatgtggtggtggacgtgtgcagggacgtggcggcgtggccggggaggcacctgctagagggcggcgagcaccggcggtacttcgggctccgcaccgcggagcaccgggtgatcgagttcgagtgcggcagccagagagagcatgacatgtggaccaagggcgtcgcccgcctcctcgccaccatcgatggccgtcgcaagcgcttcgcctgaccgaacgccgccgccgtcgccggcattgcctgcaaaagctgttgtgatcatgtcactcttcactgttgctgtcattaggagcagaaaactgaacaagattcagagatggtttgtagatgtgtgtggtgttgatttctcttttcttttttggttttatgtgtcatgtaagaagtgttgttttgtatcttctcttttcagttgtctctgatttcaacttgagggggtttgggcaatgaaaatacagacagacaagcatcatctgcatttgtaaaaaaaaaaaaaaaaaaagactcgaggggggccccgccccccaattcgccctatagtgagtcgtattacaattc

SEQ ID NO: 73310 - DNA, 337 bp, Oryza sativa
  unsure (1)..(337): unsure at all n locations
  Clone ID: PAT_MRT4530_73603C.1
gagctcaaaagacacacattccaaaagcatctgtggccatctcctcctagtcctaggctcgcgtcaatggcggcgtccaccatggcactctcctcccctgccggcctcgccggcaaggggntcgccaatgccaaggtgttcggcgagggccgcgtcacgatgcgcaagtcggcggccaagcccaagcccgccgcggcgtcggggagcccgtggtacggngccgaccggttgttcttacctcggcccgttntccggggagccgcgttcttacctaaccggggagtttcccgggantaaggtttgganaacnccggtttttgggccncccgnaaagttt

SEQ ID NO: 73311 - DNA, 648 bp, Oryza sativa
  Clone ID: PAT_MRT4530_73604C.1
atggtggaaagggaagcccacgcgagagtgaggaggacgaccgaggagtccattagagtgggggaaacgaatccaccaccacctccacctccacctccacccacccactccaaagcccaggtgcccaccaaactgctcctccctccgccttccggccgcgacccagccgagccccacgcgacgcggccggaggatcgccgcctcgaggagacgtacggcaagcgccgcggacctgaagcgggtggccgccgccgcgcgcgagcggatccaggagacgcgcgcgcgcctccaggatcggcagcagcagcagcagcaggaggacgacgagatgtctcccgccgaatccgatcccaccgccgcagcagcctcttcctccgcatcctaggttgcaaccggtttggtgtcatggcgtgtgtgtgttgctgctgcagaatgatcagctgattggagtggcacgggcggcttaccattttcacataggggagcttaggcctttgtaatatactacttacttacagtgttgtgtggaactgtggatcatcagaggctgagatgatggtgattagcagtagaaacattctaatccatccttttgaaataaagaaaaaacattctaatcaaaaaaaaaaaaaaaaaaaaaaaaaaaaa

SEQ ID NO: 73312 - DNA, 241 bp, Oryza sativa
  Clone ID: PAT_MRT4530_73605C.1
gacgaggctttaaagctactagtatgtgtagctaggaacggatcatccatccatcgtagcattgcctcgttactccaccccgtcctttatgtttattagggagccacagataagatagcaacgccctccatccacctccctccccacttcgctctctcgtctccggccgcgcgcgcaagtccctgtcaactgctagccccgcctgcttcggtcacctcacccaactaacccctccctcccc

SEQ ID NO: 73313 - DNA, 294 bp, Oryza sativa
  Clone ID: PAT_MRT4530_73606C.1
cgggactaaagttaggatcaccaaccgggactaaagatcaaatatgcccactgtagccaccaaccaggattaaagatgatttttagtggaatcgggactattgtggattttggtcggccgaccaaaaatggtttctccaccagtggtagcaaagccacaacactgcaatgccacttgtacgtccggttccaatttatgtgtttagttcacgttaaaattgaaagtttggttgaaattagaatgatgtgacagaaaagttgaaagtttatatgtgtagaaaagtttttatgtgat

SEQ ID NO: 73314 - DNA, 493 bp, Oryza sativa
  Clone ID: PAT_MRT4530_73607C.1
gtgaaccctccgatctttcagcatgttattcttgagggggctggttttgcattcttcactacctatgcactgttagcgcttttctgggccgagatactttaccaagcacgtggaataatgactgatcgacttcgatcaggtttctacatcattaattgtgttgtttatgcattgcaggtaaagcatgatctttctatttactaagtctagtgctaactcactttgtataaatttttcatgcattgtcggtgtctgtttgctgaacggcattaacatttttaatttctttgtatatggtgctattccacattattagaggcctttcttttaagaaaagacattattagaagccaattggaattgtagaagaattcattactttggcatagcgagaaaaaaatatttctgatatttaaaactctaatgtcaaaatatagatgcttactaactcaaatataaagtagttagcagcagatcaagatagtgcacagag

SEQ ID NO: 73315 - DNA, 4755 bp, Oryza sativa
  Clone ID: PAT_MRT4530_73608C.1
atggcctcggcgttggtacttgcatctcaggaggttggagaaggcagtcgggatagggattcccatggtaccctggagggtgatgctgaaggtttctacactgaaggtccaggaaccttcacggagggagaagtctatgaggaagaagaagatgcaattgaggtgaatcttgaagatgaagaagtcaagcttgcgggtcaatggacaatcctatcaaggtattactcaatgcgcacaccaatccccacagctctttttgatgatatgcgcagagcatggaggctgaaatctggtatgagttataagtcgctcagagataatctgttcatcgttacctttacatctgagggtgactatcagtttgtagttcaagggggtccatggctgcataggggggacgccttattggtggcccaatttgatgggattataagcccgtcgcaggtacctcttgaggtggtacccatctgggttagaatctatgatctgcccttggtgttgatgacgagggaaagaggaaatctctatggtagtaagcttggtcacgttcgggaggtggatgtggagaatgacggccgtaataaacatgattttttccgcatccgtgtggatctccctgttaagcgccccctccggaaaaagcttgccattaagatcaaggagcaaggtagtgaggttgtcagacattttgacttacggtatgagagggtgccccacttctgcttcatctgtgggtttatcggtcactcagacaaggactgcgaaaagaaactactcacaggtggacaacccttccaattctctgcagacctgcgttgctcccctttgaaaccgtttgagaggaagatcagtaaaatacaaccagtgcagtcttcaggtgtggcacacaagctgtccttcaggagtgctggtagtgcaagctctacatcgtccagacagaagaagggtgagcaatgggatgaggcgatcccaccgagggtttcggcacagacaggtccagaacagtacggtgagttgtctcgggaggttatcactgatatagttgttgatcagctaccttcggaggagatgattccggcgatgaagaacctgcaccagcaagcttcctttggagagggctcaatggatgaaactaatagtcaacacaaaagaagaacaacagagcagggagatggcaagcattctggcagagtcaagcaagcactcttggagtatggcaaggcagcggaggagagtaaacagcttcagctagctcctagcagcactccacgagcgttgaagaggtttaaaaaggagaaaggggagagcataaaggtggaagacagggaagcaaccagctcgggggctgctggagaaatgagttgcttgtcatggaactgtcggggtattgggaacgccacgacagttcgtgatctttgtaccttggttaaggaggttggttcccatttagtgtttttatgtgagactagacaaaaagtggaaagaattaggcatttgcgtaatagattgggtttgaaaggttttgctggggtcagtaatgaaggaatgtgcggtggtcttgctcttttctggcacgagactgtttatgtggaagttttaaatatgaatgaaagacatattgatgcgtatgtgagaatgactgtggatggtcctttgtggcatgttacttttgtgtatggggagccttgtgttgagaatagacatcgtatgtggtcccttttggaagatataaggcaatcctctgatcttccatggttggttatgggagatttcaatgaggtgctgtggcaatacgagcatttctccaagagacctagaaatgagtctcagatgagagctttccgagatgctttacatagctgtgaattgcatgacctgggttttagaggactgcctcatacttatgataacaaaagagaggggtggaacaattggagagatgtgtttagtaatgcccaactatctcacttagtgtccccttgctctgatcattgtccaattgtgttgcaattgtcgggtgattctcggacccaagggaggaagaagtgcttgcagtatgagatcttttgggagagggaagcagcaatatctgaagtgataggtgaggcctggagtgaatatgggacaaaggaggatctgggggagattaacaaggctctcagtaaatccaagattactaggctcttccaaactaaggtttcagctaagatgaatgataaactgtgcgaggattttacagaggaggaagtggccattgctatgtttcagattggcccaattaaggcgccgggccccgacggcttcccggctcgtttctatcagaggaactggggtggcttgaagagtgacattgtgagggcagtgaaggaattttttaggtcaggaattatgccagcgggggttaatgacactgcaatcgtgctcattccaaagattgatcaacccactgaactaaaagacttaagaccgatcagcctgtgcaatgtgatctataaagtggtttcgaagtgcctagtgaacagattgagacccctcttggatgaattaatatctgttaaccaaagtgcatttgtacctggtagaatgatcacagataatgctcttctagcctttgagtgcttccactatatccagaagaacaagaatccaaacaaagcagcaagtgcatacaaacttgatctatcgaaagcgtatgacagggtggattggggcttcttggagcaggcaatgtataagttgggtttcgctcaccggtgggttagatggattatggagtgtataaccacggtgagatactcggttaaattcaatggaacccttcttcattcatttgctccatctcggggactttgtcaaggagatcccttatctcccttcctattcctgttcctggccgacggactatctttgctcttagatgaaaaggtccagcagggggtgctttctcctattcacatatgccgtagtgctccgggtatctcacacttactattcacagatgatactctgttatttctcaaggctgtaccagaacaggcagaggtgatcagggaggttcttaatgactatgcaactgctacagagttagttcaggaggctatcagggatacactacaaattgctaataatgtttttgaggataagtacttaggcttcccaaccccagatggaaggctaaagaaaggaaaatttcagagcatccaggaaagaatttggaagaggctgatacagtggggagaaaattatctttcaagtggaggaaaggagattctgatcaaggcggtaatccaagctattccggtgtacgtcatgggaatttttaaactcccagaatctgtgtgtgatgaacttacaagaatcacaagaggtttttggtggggtggtgaaaaggggagagcaattgagtttggtttggaattgctgaagaaggggataatatggagaattgggaacggtcgctcagtccgtatatggcgtgatccatggattccgcgtgatcactcaagacgaccgatcaccaagaagagtaactgcagaaccaaatgggtagctgacctcctaacagatgcaggcgaatgggatgtcgatcgggttcgacagatattctggcccattgatgctgaagttatactgaaaattcgtgttccctctcaggatgtaagcgactttgtggcttggcacccagacagattagggaggttttcagtccgaagtgcttatagcctggcagtttcgcttgcttctgagaatgcttgttcagcctcatctgcagtcgaccgtagtaaagcatggaacatgctttggaaatgtaatgtgcctcagaaggtaaaaattttcgcttggaaggtggcattagattgccttgctaccatggtgaacaagaagagaaggaaattggaggccacagatgtttgtgcaatttgcggtactgaggaagaagacattgcccatgcattgtatcgatgtccacatgccaagtctctttggatggtcatgaaggagtcccagaatatatcctgtattatggatgatggcccgtttgtatcaggttggatctttgatagattggagcatcttctcgaacccgagcgggctatgtttctcatggtattgtggcgcaactggtttgttcgcaatgatattacgcatgggaaacctgcaccgacaactgagtcttccagaagattcttggaaagctatatgtgttctctgcttgagatcaaacaacaaaccccaagcaaatttaatgaaaggaaaacatgttgtggattatgtagcgacgggcgccatcaggagttcccagatgtagaacaatgtcaagcacaggtggataagggaggaatcagcatggtcctcagggacagtacaggagaggtaattgcttcagcctgtaaacccctggcgagctgcatcagtgccttagaatcagagcttcttgcctacagagaaggattactattggccctgcattggtccctcaggccgatcattgttgagtctgactgcctagaagcaatacagcttctaaagtctactgagaaagcgatgtcggatcaagcttttctagttaaggaaatcaaggacctcatacatgttagtagggagattaagttggttaagggtcaccgaagtcagaatagtatcagtcatcttttagctaataaggctagcggtgaaaacatctctgaggtctggttaggaaatagttgcagtttcatctctcatttggtttgtaatgatattctagaagagtaa

SEQ ID NO: 73316 - DNA, 273 bp, Oryza sativa
  unsure (1)..(273): unsure at all n locations
  Clone ID: PAT_MRT4530_73609C.1
gtnattcnttgttttttggcaacaaaaacaccagnttaatttttcagcaagccaaaattttttnaaagnanaccaccgcctcaattgtgtcaacaagccttaagtaaaactttttcaaacacagncaccattacagntaccttgcagccatttcgcccgtttcacnggntttnaggncgttntataccctcacatnnggcgntgccaggntgnccggcccaaaacctactttttcccanctggngggcctggactnaagctctcgtcnctcgg

SEQ ID NO: 73317 - DNA, 1839 bp, Oryza sativa
  Clone ID: PAT_MRT4530_7360C.1
cgccaccagtcgcacctaccaactgcctcgccgccgctgctgcctcgcctcttccgccgccgcgctcgccttgacaagatgctcggtcaggcgcacattgatgtctcgaggaaaatcttggacctctgcaagggtctgcctgtggccattgtaaccatagctggtcttgtggcttgcaagccacaggcatacgagaaacagtgtgccgagatctgcgtctccctgcctccagtatccgtggactgccataccccggaaggcatgacaaggatactcaactactgctacagcagcttacctgcagacctcaagacctgctcgctctacctgagcgtgttcccaaaggacagcaggatcagcaggaagcggttgacgaggcgatggatagcggaaggctttatcagcgaggagcacgggcagagcatgaaggaacgcgcggaaacaaacttcaatctgctcatccgaaggaacatattgaagcctgtggatcacagcagcgacgggaaagttaagacctgccaggttcatgacatgatcctcgagtacatcatgtccaagtccagcgaggagaactttatcaccgtggttggcgggcactggctcatgcggacacccagtaataaagttcgtcgcctgtccatccacagcagcgatgtgaagcatgccaaagaaaccatggacagaatgaacctgtcccatgtccgatcagtcacagtgtttgggagcttgaaccagctgcctttcatgtcgctcaagctcggcattgtacaggtgctggacctggaaggctgcaagggcttcaagaagcagcatgtcaaggacatcttcaagatgcttcttctcaaatatctcaacctccgaggaacagacatcaacagcatcccttccaagattgggaagctacggtacttagagacccttgacataagggacacgaatgtccagaagctgcctgatgccatcgttcagcttgaacggctgacgagtatactcggtggaaacacaatggcacaggtaacactcaagttgccagcggaggcaacgaagaagccgttgcgaacactgcacatcctgtccgggatcgagatcactggggagccgacgtccgttaatgatttccacgggtacactgcccttaggaagctcgggatacacaagctacaaatccaggagggtactcctggcttcaaggccttgctctcttccatccaataccttggaggtagctcgctcaagaatctcttgatcaatgatgagtgctccggtttcatcgacgcactggattctctgacctcaccaccgagatacttccattccctccagctgtacggcatgttcatcaaggtgcccaggtggattgctcatctcactgaactgaagaacttaaccctgtcagttacggtgctccgaactgataccttggagctccttcagaagctacctcgtatgttctgccttatattttcgaacaagtcggactcagaggggcagatcttggtcaagcatggagggttcgactgccttaagctgctccgcttggacgcgccgctcctgccattgctcgtcttctcggagagggccatgggcaacctcgaaaggcttgatatgaagttcaacacgctggaaggcgtcttcggcatggataacctcgcgagccttcgtgaggtgcacatgacggccggtgaaaaagccggtgagatcaccaagtcaatagtgcgtgagctggaggccgaggcaggtaaatacgccaatacaccaagagtggtccgagaccgagcggtctcgcgcacacctcgcgcgacatcatgcagtaacgcacgatttcgcgctttcatttcg

SEQ ID NO: 73318 - DNA, 1400 bp, Oryza sativa
  Clone ID: PAT_MRT4530_73610C.1
cgcgtacgcggaaaatggacatctgatcgactacacctggataagccaactattcttttatgcttcaaggccttcgacgtgaatatggtgcatttcaagcgctgaagtcagctgagagctttttccatgcttctaatctatcgtgtaaaactgattcttcattattttctattgatgttaccttatggggggtgggaggaagcggcggcggcgggacggctcggaggcgccggcgatccacccgcgcaaccgctacgccgccgcggcgccggacttcgcgtcgctggcgtcgctctacccgtccttcgcccccttcgtctccgtctcccggggaggccgcgcctccatcgacttcaccgacttcgccgccacccgcgagctcacgcgcgtcctcctcctccacgaccacggcgtcaactggtggattccggatggacagctgtgccctactgtgccaaacagatccaattacatccactggattgaggatcttctctcatcagacctcataccaccaatatccagttcaaacaagactgtaaggggctttgacataggcacaggtgccaattgcatctaccctctgcttggggcttctttactaggctggagctttgttggatctgatgtcactgatgttgcccttgaatgggctaaaaagaatgtggagagcaatccacagctagcagctctggttgagattagaaatgcaaacaaaatgtcctgttcttctgaatctgaagcagttgatggtgaagcagccagggagaacacttcgaagccagtggatggtgtactgaggtcgaaaccatctatccttcttggcgttgtgaaggatagtgagagctttgacttctgtatgtgcaatcctcctttctttgaaagtatagaggaagctggtcttaatccaaaaacttcatgcggtggaactgctgaagagatggtttgtcctggtggtgaacaggcatttataactcgtataattgaagacagtgtttcccttaagaactctttcaggtggtttacttcgatggttggcagaaaagcaaatctaaaaatattggtttcaaaagttcgtgaagctggggtgtcagttgtgaaaactactgaattcgtgcaagatgagcaggctcaggctgcaatgttgcacgatgaatctggttctgtagaaggcaactctacaaagcttcatagtggtgtactggaacatccttccgtatttcggtgtttgaacaaatgccaggcacactcctagtcagaggttcattattgaacaaagcactgtcagatacacctttgttggttttcatcaatgcataaaactagaggacacattaaagatggaatttctcagcaaggctcggaagtttaaggccatcattagggactgattcatgaac

SEQ ID NO: 73319 - DNA, 2751 bp, Oryza sativa
  Clone ID: PAT_MRT4530_73611C.1
atggcctcggcgttggtacttgcatctcaggaggttggagaaggcagtcgggatagggattcccatggtaccctggagggtgatgctgaaggtttctacactgaaggtccaggaaccttcacggagggagaagtctatgaggaagaagaagatgcaattgaggtgaatcttgaagatgaacaagtcaagcttgcgggtcaatggacaatcctatcaaggtattactcaatgcgcacaccaatccccacagctctttttgatgatatgcgcagagcatggaggctgaaatctggtatgagttataagtcgctcagagataatctgttcatcgttacctttacatctgagggtgactatcagtttgtagttcaagggggtccatggctgcataggggggacgccttattggtggcccaatttgatgggattataagcccgtcgcaggtaccttttgaggtggtacccatctgggttagaatctatgatctgcccttggtgttgatgacgagggaaagaggaaatctctatggtagtaagcttggtcacgttcgggaggtggatgtggagaatgacggccgtaataaacatgattttttccgcatccgtgtggatctccctgttaagcgccccctccggaaaaagcttgccattaagatcaaggagcaaggtagtgaggttgtcagacattttgacttacggtatgagagggtgccccacttctgcttcatctgtgggtttatcggtcactcagacaaggactgcgaaaagaaactactcacaggtggacaacccttccaattctctgcagacctgcgttgctcccctttgaaaccgtttgagaggaagatcagtaaaatacaaccagtgcagtcttcaggtgtggcacacaagctgtccttcaggagtgctggtagtgcaagctctacatcgtccagacagaagaagggtgagcaatgggatgaggcgatcccaccgagggtttcggcacagacaggtccagaacagtacggtgagttgtctcgggaggttatcactgatatagttgttgatcagctaccttcggaggagatgattccggcgatgaagaacctgcaccagcaagcttcctttggagagggctcaatggatgaaactaatagtcaacacaaaagaagaacaacagagcagggagatggcaagcattctggcagagtcaagcaagcactcttggagtatggcaaggcagcggaggagagtaaacagcttcagctagctcctagcagcactccacgagcgttgaagaggtttaaaaaggagaaaggggagagcataaaggtggaagacagggaagcaaccagctcgggggctgctggagaaatgagttgcttgtatggaactgtcggggtattgggaacgccacgacagttcgtgatctttgtaccttggttaaggagacaaaaagtggaaagaattaggcatttgcgtaatagattgggtttgaaaggttttgctggggtcagtaatgaaggaatgtgcggtggtcttgctcttttctggcacgagactgtttatgtggaagttttaaatatgaatgaaagacatattgatgcgtatgtgagaatgactgtggatggtcctttgtggcatgttacttttgtgtatggggagccttgtgttgagaatagacatcgtatgtggtcccttttggaagatataaggcaatcctctgatcttccatggttggttatgggagatttcaatgaggtgctgtggcaatacgagcatttctccaagagacctagaaatgagtctcagatgagagctttccgagatgctttacatagctgtgaattgcatgacctgggttttagaggactgcctcatacttatgataacaaaagagaggggtggaacaattggagagatgtgtttagtaatgcccaactatctcacttagtgtccccttgctctgatcattgtccaattgtgttgcaattgtcgggtgattctcggacccaagggaggaagaagtgcttgcagtatgagatcttttgggagagggaagcagcaatatctgaagtgataggtgaggcctggagtgaatatgggacaaaggaggatctgggggagattaacaaggctctcagtaaatccaagattactaggctcttccaaactaaggtttcagctaagatgaatgataaactgtgcgaggattttacagaggaggaagtggccattgctatgtttcagattggcccaattaaggcgccgggccccgacggcttcccggctcgtttctatcagaggaactggggtggcttgaagagtgacattgtgagggcagtgaaggaattttttaggtcaggaattatgccagcgggggttaatgacactgcaatcgtgctcattccaaagattgatcaacccactgaactaaaagacttaagaccgatcagcctgtgcaatgtgatctataaagtggtttcgaagtgcctagtgaacagattgagacccctcttggatgaattaatatctgttaaccaaagtgcatttgtacctggtagaatgatcacagataatgctcttctagcctttgagtgcttccactatatccagaagaacaagaatccaaacaaagcagcaagtgcatacaaacttgatctatcgaaagcgtatgacagggtggattggggcttcttggagcaggcaatgtataagttgggtttcgctcaccggtgggttagatggattatggagtgtataaccacg

SEQ ID NO: 73320 - DNA, 313 bp, Oryza sativa
  Clone ID: PAT_MRT4530_73612C.1
atccaaaagggttttcccttaaaaaagggggccccccccgggggttttaaaaaaaaaaacccccgggccaaaaaatttggggaatttgggggaaggggccccaaaaaaaggccaattggccgggactaaaaggcccctcaaataatttaaccccggaaataaatatttgctccccggccaaaataacccctcgaaaaaacaaaatttccaagggggggtaattgggggggaaggggccccccctttaaggtggaacgggggaaaaaatggggccccctcccattttggaattggggccttggttttgaaccat

SEQ ID NO: 73321 - DNA, 1641 bp, Oryza sativa
  Clone ID: PAT_MRT4530_73613C.1
aatttttaaactcccagaatctgtgtgtgatgaacttacaagaatcacaagaggtttttggtggggtggtgaaaagggggtgcggaaaacacactggaaggcttgggatacgctgactaaacccaagaattgtggtggcttgggtttcagggattttagattgttcaaccaagctctgttagccaggcaggcctggaggctaattgattctcctgacagtctttgtgcaatagttctgaaagcgaaatatttcctaaatggaaatctcattgacacaagttttggcgggaatgcttcgccgggctagagagcaattgagtttggtttggaattgctgaagaaggggataatatggagaattgggaacggtcgctcagtccgtatatggcgtgatccatggattccgcgtgatcactcaagacgaccgatcaccaagaagagtaactgcagaaccaaatgggtagctgacctcctaacagatgcaggcgaatgggatgtcgatcgggttcgacagatattctggcccattgatgctgaagttatactgaaaattcgtgttccctctcaggatgtaagcgactttgtggcttggcacccagacagattagggaggttttcagtccgaagtgcttatagcctggcagtttcgcttgcttctgagaatgcttgttcagcctcatctgcagtcgaccgtagtaaagcatggaacatgctttggaaatgtaatgtgcctcagaaggtaaaaattttcgcttggaaggtggcattagattgccttgctaccatggtgaacaagaagagaaggaaattggaggccacagatgtttgtgcaatttgcggtactgaggaagaagacattgcccatgcattgtatcgatgtccacatgccaagtctctttggatggtcatgaaggagtcccagaatatatcctgtattatggatgatggcccgtttgtatcaggttggatctttgatagattggagcatcttctcgaacccgagcgggctatgtttctcatggtattgtggcgcaactggtttgttcgcaatgatattacgcatgggaaacctgcaccgacaactgagtcttccagaagattcttggaaagctatatgtgttctctgcttgagatcaaacaacaaaccccaagcaaatttaatgaaaggaaaacatgttgtggattatgtagcgacgggcgccatcaggagttcccagatgtagaacaatgtcaagcacaggtgggtgagacctcctttgggctgggtgaaactgaatattgatgggtcctttgatgctagtcaagataagggaggaatcagcatggtcctcagggacagtacaggagaggtaattgcttcagcctgtaaacccctggcgagctgcatcagtgccttagaatcagagcttcttgcctacagagaaggattactattggccctgcattggtccctcaggccgatcattgttgagtctgactgcctagaagcaatacagcttctaaagtctactgagaaagcgatgtcggatcaagcttttctagttaaggaaatcaaggacctcatacatgttagtagggagataagttggttaagggtccaccgaagtcagaatagtatcagtcatcttttagctaataagg

SEQ ID NO: 73322 - DNA, 151 bp, Oryza sativa
  unsure (1)..(151): unsure at all n locations
  Clone ID: PAT_MRT4530_73614C.1
ttgcacatncgcctgattaggattttggcacgcaatgcagaaacacgttcctattactagcgcaccaaaaaaaggatggctcatgagttgggaacatggatcagaaaaactatgtaatgagtggaggacattcgaggacaccttattatta

SEQ ID NO: 73323 - DNA, 527 bp, Oryza sativa
  Clone ID: PAT_MRT4530_73615C.1
gtttgggattacaaccattcctagaccatctgtggtgctcctggacgggaccttacaatttcaatctgacgcccaatgcggtgagcctggtgccctgcatgtgctgacccccagacacactggagctgggatggtattcacttgaccgagccgcatatggacatatcgcgcgaggttggttgcatggcccacttcggggatcaacccatcgtacagaattcttgagctcctagttgttttgtccactcgtacctctagggtatcagaatagcccagccaattggatcagaaaggttgtttccatatagttgtatgtatatctccttcgattcgttgcgatccggtaaaaaagaaaagttgagatagagaggtctgaaattaaacctgattttgttcattcatcagtgagttgttatgagtaaaaaaaggtgtattgccaccaagtggttaacatatgatacagagtttctttgtgtgtacatctgcttatctaattaaaaacccgtatggttcctcaaaaaaaaaaa

SEQ ID NO: 73324 - DNA, 243 bp, Oryza sativa
  Clone ID: PAT_MRT4530_73616C.1
acgcacgccgcagccgccctcgtggcctctaattacacgttcggctgtgtggtctgttttcttgcgagcgtggtgttgctcttcatggagtatgtgaagtgaagccaacgagttgactggctaaggtgtaatgggtgagatatctgacgtagagacctagaccactagtcagtctcatagtacatatggattgactgtatcgagatgatcgagtacgtcacatcatcaagagacactagtaag

SEQ ID NO: 73325 - DNA, 2255 bp, Oryza sativa
  Clone ID: PAT_MRT4530_73617C.1
cgagagtaccaattcaattcggacatggccgtgttcatcatcgccaataatcctttggcgcgctatgccgtcttgtttgctgctgctgtctttcttgtcgccgccgcgcaggcacagcctaccacgcccccgccgccgccgccgccggagatggactgcaacggtatactcctcacctacaacctcgatcgccgtgacaagatcaggccattcgtcgccgcacccgaagccgacgcccagccctactccttccgcgccaccgccaccgtcctcaactccggcacccgcgctctccgctcctggacgctgcgcctcaccttccaccaccgcgaaatcctcgtccaactcgatggcgccgtgctcacctccggcgccgacctgccctacaacaccacggcagacaacgccacctccttctccggctacccgcagacggacctcctcaccccgatcgccaccgccggcgacctcaccaagatacaggccacgctcaacctggtcggcacgctgttcgcggggccaccgccgtacgtcccgctcccttccgcgctctcgctcgccgacccgtcctacacctgcccgccggccatcaacgtctccacgtcgaccctctcaacctgctgcatcctcacgccggaggccgcggcgaacgcgagcgccggcgacttggacgcgggcagggcgacgtcgtacctcccgcgcggcgcgggcgacctggtgatcacctacgacgtgctccaggcgcacgagaccacgtacctggcgcaggtgaccctggagaacgacgcgctgctgggccgcctcgacggctgggagctgtcgtgggagtggctccgcggcgagttcatcagctccatgcgaggagcctacccgcgccaggtcggcgccaccgactgcgtctacggcgcgcagggagccttctacaagggcctcgacttctccaaggtgctcaactgcgaccgcaagccggccgttcttgacctgccgccgtcgcgccgcggcgacgaggacatcggagggatcgaccactgctgccggaacggcaccatgctgcccaagtccgtggacgcggcgcagtccaagtcggcgttccagatggaggtgtacaagatgccgcctgacctcaaccggaccaagctgtacgctccggccaacttcagggtgtccggcgcgtcgccgctgaatccggagtacgcgtgcgggcagccggtgcgggtgaccccaacggagctccctgacccgagcgggctcgcgtcgacgacgctggcgctggcgacatggcaggtggtgtgcaacatgacggcggcgccgccgtccaagccgcccagctgctgcgtgaccttctccgcgttctacaacgagtcggtgatcccttgcagaacctgcgcgtgcggctgcccggcgagccccgcggcggcctgcagcacgacggcgccgtcgatgctcctgccgccgtacgcgctgctgatgccgttcgaaaggcgggggagggaggcggtgtggtgggccggcgagaagcggctgggggtgccgaggccgatgccctgcggcgacagctgcggcgtgagcatcaactggcacgtggcgacggactacgccggcgggtggagcgcgcgggcgacgctgttcaactgggagggcgcggacgtggcggagtggttcttggcggtggcgatggagaagcaggcgtacgacgggttcgagcaggcgttcacgttcaacgccacggcgatggggaacggcaccaccatgatcttgatgaaggggagggaagggttccagtacctcaagagggagagcaacatgagcggcgtcgactaccccgtggccgggaagcagcagtcggtgctgctgttcaccaaaaagaggagcggcggcggcatcgacgtggtcggcggcgacgggttcccgacgagggtgttgttcaacgggcacgagtgcgccatgccgcagaggattccgagcagtgcccatcgtcgttgtcttgtcctattgtggactactcttcttgtattcatgtcgtccattctactggtgttgtcgctgctgtaaaaacgttcaacgcgtcgctggtagaggagacaggaggcgctgctaggatggtttgtgatatgatgtatggcggcggtgggggtggagatgagaggagggctagggttgtgatttatcgctattaaattttgtaacacattcagacatgtaaataatctctaatgaaaatgttatcaactacaaaatcaaaaaaaaaaaaaaaa

SEQ ID NO: 73326 - DNA, 1217 bp, Oryza sativa
  Clone ID: PAT_MRT4530_73618C.1
ccagatcgctcagtctcacaccgcacagagacagagaagagctctagagagaacgagagagagagacagagagagagagagagagggagaatggggaggagagcttgctgcgcaaaggaagggatgaagagaggggcatggacgagcaaggaggacgacgtgcttgcctcctacatcaagtcccatggcgaaggcaagtggcgcgaggtcccccaacgagctggtttgaggcggtgcggcaagagctgcaggctccggtggctcaactatctccggcctaacatcaagcgcggcaacatcgacgacgacgaggaggagctcatcgtcaggctccacaccctcctcggcaacaggtggtctctcattgcaggcaggctgccgggccgaacagacaatgaaatcaagaactactggaacagcacgctcagccgcaagatcggcaccgccgccaccgccgccgccggcagccgcggtggcagcacgccggacaccgccagagcgacggacgcggcgtcgtccagctccgtcgtgccgccgggccagcagcagcagccagcctcccgcgccgacaccgacacagcaacggcagcggcggcggcggcggcgacgacgaccaccgtgtgggcgcccaaggccgtgcggtgcacgcgcgggttcttcttccacgaccgtgaaacggcgccgctcgccgcggcggcgccggcgccggcaggggaattaggagacggcgatgacgtcgactgcgactactactgcagcggcagcagctcggcggcgacgacgacgtcgtcgagctcattaccggcggtcgtcgagccgtgcttctccgccggcgacgactggatggacgacgtgagagccttggcgtcgtttcttgacaccgacgacgcctggaacttgtgtgcgtgacattagttcgtcgtccgtacgtacctacgtatatgcatgtgtgcgtctcatagaatgaatataaaataatattttctccatctattttaagtgcagttgcgggtttccgtatataaaattaacgattttgctatatatttgtcgataaattttctcctaaaaatttgacagatgtaattacagtacaatcgtagtataattacactgtaactttcatgtaattacactgtaactatagtgtaacttgtatgtaactttcaaaaatctctttgtaatatgttatttcggtaaaaaaaaaaaaaaaaaaa

SEQ ID NO: 73327 - DNA, 219 bp, Oryza sativa
  Clone ID: PAT_MRT4530_73619C.1
gcacgaggcgaatacctatcctaaaatttctgggaccctgcttgaaaaccaagattttgtctcaattcagactgaaaatattttacacagtgaagaaaaattgtgcagaaaccaaacgtaaactagatggatcatgcattgtttcagcaccttctaattagctagttgtcttgaacagtacactccttgattcttctgtatttccacttattgttccaa

SEQ ID NO: 73328 - DNA, 262 bp, Oryza sativa
  Clone ID: PAT_MRT4530_7361C.1
cgcgcaggtaccgcggggtgaggcggcgaccgtggggcaagtgggcggcggagatcagggacccgaggaaggcggcgcgcgtctggctgggcaccttccgcaccgccgaggacgcggcgcgcgcctacgacgccgccgcgctacgcttccgcgggcgccgcgccaagctcaacttccccgaggaggtgcgccattgccgacgacggacgtggaggtggcgcgacgttgggcggcggtgcgccgctctgcccgcgccgtcgtt

SEQ ID NO: 73329 - DNA, 460 bp, Oryza sativa
  Clone ID: PAT_MRT4530_73620C.1
cccacgcgtccgtccacgcgtccggcgaaggccactccaatggatcactccacctccctgctccggctcatcttcctcgccctcggcgcagccctcgtcgtccttgtcgttcgctccgcgttccgccttcccggcgacatcgacacgactacgacctctctgttcgatgatggcaacggcggcagctgcaccaggttctcgccgtgggcgtgccggcaagggcggggcgacccgaggtcgaagccgtccaagccgcggcgaccgtcgcacgagtccgacgtgccgcggcacccgctcgacccactcacggtgagggaggtgaaccgcgtccgcgagctcctccgcgcgcacccgctgtttgcgtcggcgccgtcgtccctgttcgtgcactcgctggagctcgacgagccggaaaagtccgtcgtcaagagctggcggaagggcgccgacccgctcccgc

SEQ ID NO: 73330 - DNA, 441 bp, Oryza sativa
  unsure (1)..(441): unsure at all n locations
  Clone ID: PAT_MRT4530_73621C.1
gcccctctnttttnctcccggaccccctcctccccagtctccaactccaccatttggctcatccagtcatcgcccacttgctctagattcatccccaaatatttnnttctcaaggtttattatagcatttnatttttaagaagagttcacaaacaggagtagatacaagaacattcaggatgagtgttgatccattccggttctatgtgtaggaagaggaataatggcatgcattagtcatgtcttgagcaagagttggagtgctgctgccacagtagtcttctcctttttgtnctctagcatttggccataagccatagttctttctcgagctgttgttnctgcaaaggcattgtcgcaaagtcatgangaattttgatggtggcaaattaatgcctatccggagaaagagttgaagcgactggntttccaggatttgtt

SEQ ID NO: 73331 - DNA, 2637 bp, Oryza sativa
  unsure (1)..(2637): unsure at all n locations
  Clone ID: PAT_MRT4530_73622C.1
atggaagttcttaataccaatgatcatgggactgcaagaacacgggatggtgaagagacagcatctgttccagttgagaatcctgattcatcgcatgaaatggagaagaagttaacccacaatttgacagaaaatgggcaggctcctacaggtcatactgtaccttcattaccggatacggtctctaaattgaaaccagctcaggaatctgatgattctttgaaagataagacagaccttcctacttcaacaagtaagaccgaagtgaacaatatatctgaaaatggttcgaccaaccagagcactatgctatcagatgaatcgagaacaaaagaagacaagatgaatcatcacgagaacattgctgccaccacaaacaaaaaggcagaaacagatgcgagacctgaaagtccatacagaggtctcattgacactgctgcgccatttgagtcagttagagaggctgtcaccaagttcggaggaattgttgattggaaagcatacagatctcagacactagagaggcgcagggtcatgcagcttgaacttgaaaaggctcaacaagagattccacaattcaaacaagattcagaagcttgtgagatggccaagttacaagtggttgaggagctagggagaactaggagacttgtagaggagctgaaacacaaactggagagagcagagattgatgtggaccaggcaaagcaggattccgaacttgcgcagctgcgggcacaagaaatggagcaggggattgacgatgaagctagcgtaatagcccaaacacaattggcagttgctaaagagagacatcagaaggctgttgatgaactgaagttggtcaaggaggagatgagatcaacacacgaaaagcataccgttttagctagcgaaagggacatagcagccaaaagagccgagcaagctatttctgctgcaaaggagactgagaagagagttgaggaactcactttagaacttatcgcaatcaaagagtctctcgagtcagcccatgccgcgcatcatgaagcagaagaacacaagctcggggcggctttggcaaaagagcaggattgcctggcttgggagaaggaactgcagcaagcacaggaggagttgcagcaactcaacatgcaacttgtatcaaaaactgatgcaaagtccaaaattgatgaaaatacgcacatgctacaaatcctcagtaaggagctggctgcctatacagaaaacaaaatgagtgaagaagctggagtgatcgaggaggatggttctgatgaggctaaagaaattagcaggtcaatcaagcgagcccttgcttcaacaagaaaggagcttgaaggggttagaggaaatattgaaaaggcaaaagacgaaaccaatttaataagagctattgcagaatcaattaagtcagaggtggataaagagaaagcttcacttgttacattgcagcagcgagaaggtatggcatccatagccgtctcttctctggaagctgagctcaataggacaaaagaagagatagaaatggtgtacatcaaggaagcggaaacccgtgaaaaaatggcagagcttccaaagatgctgcagcaagcagctcaggaagcagaagacgccaaggtggcacctcattctgcacaggaagaacttcgaaaggcgaaagaagaagccgagcaaaccaaggccgctgccgcgactgcagagatcaggttacgcgccgttctgaaagaaatagaggcctctaaagcatccgagaagcttgcccttgtggcggctcaagcattgcaagagagcgaggagacaagtagtgttgaggattcccctagaaccattacacttcctataagtgaatatcattctctgagcaagagggtctacgaagccgaagagcttgcgaatgagagggtggccgcggcattggcgcaaatagagctagcaaaagagtctgaaacaaggaccctggagagattgcaacaagaaaccaaagagatgcacaagaagaaggatgctcttcaaatcgcactgcagagggctgacagggcaaaggaaggaaagcttggtgctgagcaggaactgaggaaatggagagcagagcttgagcagcgtcggaaagccgcaaaacatgttgctaatccttggactgctccacctataagatcacctgaacagaagggctcttacaaggaagacgatgcagttcttactgaaccaaattcacccatgtcaaatagtagcacggatgactttgttgtggaccagaagttgaggaaaaagaaaacattcttcccacaaatgtcaagcattttgtctagaaaggcacagacgtaggttccctgtaccaggcctattatgctttactgttctcttcatttaacactgcaaaaatgtaaatggtgtgtttgagtacataagtttattttccacaaccctgtcacttggtgtggatacgtngagggcaaacttttgtatgataattttggatatttttttaaactaaagttccttcgtttccaaaactcagaggcaatnatngtatgtctgtttctgatgttangtcatgaaagcaagaattttctgtaacaaaaattgtcaattatgaaaacagattgaagtttgaaaaaaaaaaaaaaaaaa

SEQ ID NO: 73332 - DNA, 425 bp, Oryza sativa
  Clone ID: PAT_MRT4530_73623C.1
gcacgaggggaagagttggtgcgccatgtccaagtccccatacatgcacagccacttgtgttgattatagctgcatacctgcaactaaatgcaagaatctcacatacaaaggcaccagaagcctgcatccttggaacagcaaagaaaggaatcagcaatatgttttttcttgtgtttcagaatccaataactgaatgtgtatgactggatgcacaggaccaagaagttttcagaatggaatggacctccactcaggatggtcaagctgatggcactagcttattgttaagcatttcttttgaagctgctagtgtcaagtgttcactactgaacgctgtgcactttgatgactatttagataccaggggatatccgctcgagggatgaatacactttcccttgaacccttcaactttctgcaccga

SEQ ID NO: 73333 - DNA, 3520 bp, Oryza sativa
  Clone ID: PAT_MRT4530_73624C.1
ttaggtggcgacaggcgatctgacgcacgcctcgccccatcccgtcaggacgagggcttctaggcgctcgtccccagctggagctagcgtgttacctcccagagatggcacgttagtcagagagcttagaatctctccctgagtccccggccgaaccggcaaaggggggcctgcgcggtctcccggtgaggagccccacgctccgtcacccttgccgggcgaagaacagtgtagaccctccatagacttgaacagtgccctggaatgcggacaccacagcaaggcatgtgttgtatcttcactatccactccacaaatagtacaggtatcagagctcgccatcatcctcttcttcttattcaccatggtagccaaacagtcggaagctgctttccatgcgaaaaccctgactttgttgggcacattacacttccaaatgttgtcccaggccttcttcatactcacacccgaggaactcgaactctcttcttcctgggccaactgctcagcgagcttgtatgcacttcttacagagaatctaccattcttatccgggtgccatgcaacaaaatcctcctcctgacgagatgacggcctgatttgtagaatcttttccacatctattggtaggaagatactttctaacctgttcacatcccagcttccatcctctcgcataagttcagacacccatctaagcctgcaattattcctcagcgtgataggccttcttgagaggtccctcggaacccacggatctctccaaatacggaccgagcatccattgccaattctccagatgatacctttcttaagcagatcaagtccatgctcgattcctctccatctcggggatgcattgccactgaatggagtatccgtcaacgagccgttagggaaatatttcgcctttagcacccttgcacacaaactgtctggattgtccaaaagacgccaggcctgccgggccaaaagtgcttggttaaagagtctatagtctttgaaaccaagaccaccgtatcctttcgatcttgtgatcctatcccaggccttccagtttgttttcctcactcctttatcagctccccaccagaaattgcgtgttagccacgttaaatcatcacatacagagtccgggagtttgaatacccccatcacgtatactgggatggcctgtatgactgcttttatcaacacctccttgcccccactggaggggaaactgtcgccccattgtaacaaccttttccagattctatcttgcagggactgaaacttgcctttacacactctgccctccggggtcgggaagcctaaatatttgtcctcaaaactattgtttgcaacctgaagagaggcctttatcgcctcctggacatccgttggagtggcctctccaaacataatggaacatttagaagggttgataagctgtcctgtacttgattcatagctgctcaacacctctttaataacatccgcttcttccgtttttgcatgcacgggggaaattgcacccttcatcactttctccttcagtaacagagataagccgtcgactctggcagtattcatgggcctacttgggccgtggcccttaattaagccagtgcgtctattagaaccaaacttcaaatgacctacccggattttgcgaccatccttcaactgtcctaatggaaggcctaatactctcttggcacaacacgtaaacgccagaagatcgaggcaaccgaggccggccatcatccagaagaagcgatcaaggtgcccctcgttgagatcatcggggatccaccccggccggccgccgctcgccgtcgcccacgacacggccgtcacgatgacggagctcaggtagtcgcccgccgcgacggcgaggagcccgagcgccgtgcacaccgtcttcatggcgggcggcgcctggctgtagaagaagtccagctgcccgatggtggcgagcagctcgccggcgcccaccagcacgaactgcggcgcctgccacagtatgctcgccgtcgtccgcgccgcgctggcgcgcttcgtctcgaccgtcgccgcggcggccatggcgaggccgaccgtggcgaggccgccgccgatcctgagaaggtcggagatgcccttctccctcccggtgtgcttcctggcggcgggcacgaacacgcggtcgtacagcgggatcagcacgatggtggtgagcatttggaaggcggccagcgacgctggcgggacgcggagggcgccgacgtgcgcgtccatcggcatgccctgctcgacgaacgtcgacttggtctgcgccgtcccggtgtagaagaaggcgatgcacgcccacacgggcagcatcctgactagaatcttgagctcctccacctgcgtcaccacgcaaagcctccatggattgcgcggcgcctcctcatccgacgccgtcacgacggcggccttgtcgaagaattcgagatccgtggtgtgttcgatcctctcaactcccttcatggaggatgcgtcatccggtagctcgtagagaagggccatgtcgcccggcgccgcgacgttgaacttgcggacggcggcgacggcgacctggcagactctggtgagcgggctaccgcgggttgtctgaaacctgtacgtccgcgacgcggcgacaaggcaggagagcccgacggcgaggaccatcgccggaatccccaatcccaatgcccacccgtagtggccttgcacccacaccaagccggtggcggatatcacggcggcgcagttcatggtgaatacgtaccagttgaataatgacgccttgctcgcgcgctccgatgtgtcgccggcgtcgaacccgaaagcgatcatgtacaggccaagaaacaagacgaactcttgagctgaaggcatggacagtgttgatgagctctcgatcagctgcggcagcagcgccgagagagacgccatgagcatcccctgagctgaattcatggcgggatgcagtgactgattgaagtggggggatcttagcaaactgacagcgacgccgacgcagcaggcgacgaccatggtgcggtacctcccccagtaggaatccgcgacgacggcgccggccagcggcgtgaggaagcaggtggccttccagatcgacacgttcttggcggcggcgacattgctctgatgcagctgggttgtgaggtaggtgacgaggttgtacatgatgccattgttggcaaggcagtagcagaactcggctcctagaatcgagcggcatgctctccatccaccagtgcgatgcttcagcgccgggttgccatcgatgtcaagtgacccatccgaggtgtatgcttcttctacctcgggttggagcagcggtgctgcgtgttcttgctgctcggtggaggccatggcgaattggcgagcaagcagcaccagggaaacgagcgaatatgtcccacagctctatcagaattcagagaccacaaaaaggaacagaaaaaaaaaaggatacgattcgttctggccggaacccacgcgtccg

SEQ ID NO: 73334 - DNA, 1228 bp, Oryza sativa
  Clone ID: PAT_MRT4530_73625C.1
atgtgttgtaagtgtcagtgttgtactgagaaaacggacgtggccaagcggaggccagcccagcccaccaccacgcgtatgcatggctggcgaattgcgatgcgccattttgctcacaaattttctcccttttacacgcaaacacatgatcaaatctcaattcgcaaatacattatgcatatagagaacagattgcatcagccgtcaacttcgatcaacgcatgcttagctaaaaacaagggcaacgactcggaatcatggtgcttagtcgtcgtctgctaccaagtaccaacttgccgaggggaatttttgttggcttcaccgaccaagctgaaaattttgaacgatcttgggaaaataacaagacatagatcgagccggaggattgcaaaacacaggaaacacacacaggaatggccgtttgattggaccacaggaaaaacgcaggaatcagatgagagagatagactcagaggaaatgttccaagagaagttaaagttaagtccctagtttcaaacaccacctgagtggcagtacttgctgaagtctgaacgcaaatgctggccggattactggacgaacaccacgacggcggcgcgcgcgagtgggcgcgacatgcaacaaaccgcaagatgcgaggagggggacatgtccatgcatccacgcatgcgtttttgtctcgatcgaccggcgccaccatcagccgccatgcatgattctgaaggccgacccatggaccaattggaccaattgtacaggcatcgagaaccgagcgttgctcggttggctagcatcgctgtggcaacaccagccaaaaaacctgcggctcctgcaaatctcggcctgtacggcctgatagcccagccaggcctggcccatcacgcaacgtgcgcaattatcagccaggccttcaccttgggccctactggtagtactactgggccagagggtgcgtgccgtcaccgcatgcgccaagaaatccttccacccgccgacgacgacgaggcgacgatccgcacgcgagattcgcagcttcccccacacgccgcgcgaggcccatgcatcctcctgttccgcgacacgaactgcgccgtggcgtggcgggtcgtgtggtggcgccgtgacatgtcgtcgaggcggcgagattccacgcgaattgggacccatcaacaggggcgtccatcccgccgtctcagcagcgtgtactccgatcctattaagaaagct

SEQ ID NO: 73335 - DNA, 450 bp, Oryza sativa
  Clone ID: PAT_MRT4530_73626C.1
atgcgccgccgcctcctgctcctcacgccgtcggccctgcaagaagcactgcgccgcccgcctcagaaaccgcctggggcgccgccgcctcccgccgccgtcacttgcgccgaccctgcgaggagccgccgcgtcgcctgccttgggaagccgccggcctaccacctaggagcgcccgccaccgaagtccggcgccggttcctcgccgggaaccgccgccgccgccgccgcaagctcctgcccgagctgcgacgaacgccgccgagtaccacgccgccgtgcgccgcctgcaatgatgcgtctccagccgcccgtgacctcgccgcccaaaccacctttgcctctgcgaaaatcggtctaaatcgaatccgtatccaactccctcctgtgtcgaacgcggtatccatccagcttgtcttcggtcgtgtccatgccgtgaccgacacatag

SEQ ID NO: 73336 - DNA, 467 bp, Oryza sativa
  Clone ID: PAT_MRT4530_73627C.1
gcaaccggagaaactgccaaagtcaatggcagcaaccagtgctggcacaacagctcaaggatgatcggcgcaaacagtcctcaactgccagccaattagcagtgttcagccgattgtgcagcagcttacagctacaacagtttgctggcgtttacttcgatcaggctcaagctcaagcccaagctatgttgccactaaacttgccgtcaaatatccggtatcttacccaagctacaaacaactgctcccctgtagcaattcctaccgtcggtggtatctggtatgtgaattgtaccagtatagtagtacaggagagaaaaataaagtcaggcatcatcgtggtgtgacaagtggaaacatcggggtgatacaaaatcggaataaaaatggtcagcaatttaaacataagcctctgtaaggataaatcctagtacattggtggaaattaatttaaaaaaaaaaaaaaa

SEQ ID NO: 73337 - DNA, 639 bp, Oryza sativa
  Clone ID: PAT_MRT4530_73628C.1
ccggctgcgaaaccaacgacggcaccccaaacctcctccgcctccgccgccgcttccgcttaacctcctcgctctccttgacccccccgcctttcaatcgggcgcggccgttcggggttcgcgtttttatcggatcgcctcgttcgttccctcccctcccctccccttcgcgcggttctttgccgcgccgcgggggttccgttccgtcgtggagcggctggccccggagccggaggccaaggggcgtggacggtggagggtaatccgtggtgttgagggagccttggtgaggtggtggttcgggctctcgcggcggcgtcttccatgggggagaggcggtccggctacagggacagagggggcggcgagcagggaaggtattggaggccaccgcgctctcacggaaatggaaatttctcagttccattgtgggaaaagaaattttgcactgatgcttgtgcaatcccatggggtaaactctgtgaaaccaagaaattgatgtcattgtacaaaaatgtggttgactgggatgattcagctgcattagaaactttcaacgatgcaaaagctcgtttctgtgctgtataccatggccaaccttgtgatatcccgttacctgacccaaacatgtatattgac

SEQ ID NO: 73338 - DNA, 359 bp, Oryza sativa
  Clone ID: PAT_MRT4530_73629C.1
tcttgttcttacttgtttcttcgatttgcttgcaggaatagggttgatctgcactggcaagatcagcaacccacggagaggtgtatcgatcgctaaggctcaacacaacgtctcatacggttgtagtcagatcgtcaacgtttctcctaaattgtagttatcacaactcaccgaaagatcgggccaacaacagccttgagtgtcgagaggaactcagggtccatcaatgtggaatgtgtgttctgcgctttgtataaaacagaggacgattcatggtagaggtggttcagccgaactggaggtttggctgactcctcattggttctgactgcatcagttttccttgtgtggttcgtcat

SEQ ID NO: 73339 - DNA, 390 bp, Oryza sativa
  Clone ID: PAT_MRT4530_7362C.1
atgggggaggagaagaaggaggaggaggaggagaaggccgcggcggcggagggccccgatctcctgtgcagcttgctggaacaagggcggctggcctcgccggcacggccgccggcggcacagccttcagatcatccgatgatcgagagagatatatggaatcctaccggtgcccctgctggcatcagagcacttgtgtggttcgcgaacactgttgctctcgtgttgcttgctttctttgttgtcccgttagttccacggtgcaacagtatcgagggggtatttgccatcgttttctgtttggtcatccttcttgggatacctgtcatgggtcattgtacgctaaaagagatccacgaagaaatgaaggctagagagggaggccgataa

SEQ ID NO: 73340 - DNA, 1362 bp, Oryza sativa
  Clone ID: PAT_MRT4530_73630C.1
ctatctaatctgtagcctgttcgctgtccagattctattctgcaatagaagccatgcaaaatgcttgcatttggaaggtgcccaatgcttccaaatcaattttgcagctgctgagcttatcctgccattaaactgtgctatgtaggctgactttgcgttgtactttccatttgccatccatcgccaagttatagtgtcctcaacaccttctgtgagtgcaatgtcgctattccacacgtggtagaaaacctcaaagaattccttgactagctcgactgtgaggttgtgcctgatgtctagtatccattggtcatttgctaatccttcgtagaccgtcctacctttccttttggcatgattgtataaggctggggctaactccttccgtggttgttcgccaatccaatttgattcccagaaactcgcttttcgaccatcacctatcgtcacccttgtagcagaggcaaacaaccttctgtccatttcatcacaagggggaggtgtccctgcccaaggcttatttgggctctcccagctgaatttgcatttgcccccactaatctctttgtcgccagcccaaaggaatctctttctaattttatccatatcatgcaggaaattttttgggggtttcagcgctgtgaggaaatatgttggtattgaggttagtaccgaagagacaagggtcttccttcccgcctgttgcaacagctttcctttccatcctgcaagacgagagtggagcttgtccatgactggttggagatgcactctcttgattctccccgttaacagaggtagtcctagatatgtgatggggaaattagtccgctttccattgaaattgttcagcacttcctgaagctctatgttctcacatctcataggcaccaccgagctcttacttaagttcacctgtagatctgtggcatgtccaaacttttctagcagggtgatcaggttgtccacatcagctcgacttgggttaagaaagattgccgcatcatccgcatatagcgatgttcggaacttagccaccctgtttgttattggtgacaagatcccttggtctgtggccacattcagtatcttttgcaaagggtcgattgctaatatgaagaggtagggtgaaagcgggtccccttgccgcaatcctctcttatgtgtgattgcctctcctgttgtttcattcaacattatcttggatgtggtggtcgataataacaaggcaatccagtctctccaccgcgtaccgaatcctctccattgtagcatttccaacaaatattcccaggatacagagtcaaaagcctttgcaatgtccagcttgaaaaagaggcctggtttccttttgttgtgcat

SEQ ID NO: 73341 - DNA, 306 bp, Oryza sativa
  Clone ID: PAT_MRT4530_73631C.1
atgccgccgtccgcccgtccgccgctccctcgtctcgcgccgtcgccatgcaccgacgcctccgccgctgcatgcagtcgtccatcgtccagcgcccgcccactcgtctcgcaccgccgcctgcccatcgcccagccccgcgcgctgccatccgctcgtccgccgctccctcgtctcgcgccgccgccatccaccgggaggcccccgaggtcgatgcggccgcagcacgcagcctcccagcggctgccgcctcacctcacctcgcccctgcccgcgcttgctgcctccgccgcgtctgaactctga

SEQ ID NO: 73342 - DNA, 1737 bp, Oryza sativa
  Clone ID: PAT_MRT4530_73632C.1
atgcttccaaatcaattttgcagctgctgagcttatcctgccattaaactgtgctatgtaggctgactttgcgttgtactttccatttgccatccatcgccaagttatagtgtcctcaacaccttctgtgagtgcaatgtcgctattccacacgtggtagaaaacctcaaagaattccttgactagctcgactgtgaggttgtgcctgatgtctagtatccattggtcatttgctaatccttcgtagaccgtcctacctttttttttggcatgattgtataaggctggggctaactccttccgtggttgttcgccaatccaatttgattcccagaaactcgcttttcgaccatcacctatcgtcacccttgtagcagaggcaaacaaccttctgtccatttcatcacaagggggaggtgtccctgcccaaggcttatttgggctctcccagctgaactatagccatcgcactctcaaggctcgagcaaatttctctggccaatttactttgcatttgcccccactaatctctttgtcgccagcccaaaggaatctctttctaattttatccatatcatgcaggaaattttttgggggtttcagcgctgtgaggaaatatgttggtattgaggttagtaccgaagagacaagggtcttccttcccgcctgttgcaacagctttcctttccatcctgcaagacgagagtggagcttgtccatgactggttggagatgcactctcttgattctccccgttaacagaggtagtcctagatatgtgatggggaaattagtccgctttccattgaaattgttcagcacttcctgaagctctatgttctcacatctcataggcaccaccgagctcttacttaagttcacctgtagatctgtggcatgtccaaacttttctagcagggtgatcaggttgtccacatcagctcgacttgggttaagaaagattgccgcatcatccgcatatagcgatgttcggaacttagccaccctgtttgttattggtgacaagatcccttggtctgtggccacattcagtatcttttgcaaagggtcgattgctaatatgaagaggtagggtgaaagcgggtccccttgccgcaatcctctcttatgtgtgattgcctctcctgttgtttcattcaacattatcttggatgtggtggtcgataataacaaggcaatccagtctctccaccgcgtaccgaatcctctccattgtagcatttccaacaaatattcccaggatacagagtcaaaagcctttgcagatggtccacgcttgagaaacagaggccgtggtgttccgtttctgttgtgccattgagtatgcaccaacgttgtcgcactatatatagaaattatctgtgtatactgaagttttacctcttgttgaagatcgaaaccgatgcagctcaacccgaaagcaagaactcgtcgaaacaaaacgaaagtgaaaagggtggcgatgcgccgagattgtattgaacgtgactctatccatgcgtgacaatcatcatgaagcacattaacctaaatcgacaacatatgttgtatcatattgtcggattcggcttcatcggctaaccttgtccgactcgaactctgccgatcttagtcgtagccgattcggacttcagccgatctttactctgtttccgggataatctctatctcgattcctcctttacatctgattcttggattaccaaatttggtcgt

SEQ ID NO: 73343 - DNA, 747 bp, Oryza sativa
  Clone ID: PAT_MRT4530_73633C.1
gcacgagggtcccgtcggccccccggctgctcgtcatcttccacttccaagatttcaaacaaagaaatctccatccgggccggcgcaccagctgaggaggagagccatccccatccatccatcaatctgctcgcgcggatccggaatttgcgagaggaggcatggtgagtttgcagggggcgcgagggggcggcggcggcggcggcggctacgggtggaggtggggggagaaggctggcctggtcgtatccctcctagacgacgcgctcttccacgtcctctacgccgccgaggccgtcgtcctctccgccgcgctctgcagcttcttcctctgctgcggctgcaacatctgacgagacctgatgggtacctgatctgcgtgctcttctgcttcgatgcggcggcggcggcggcggccggcgtcctagtccgacctgaagcctggtgaaagggcggcgcctgtatcatcatctcctcgcacaacttcgcatcgcatgtaaccttctcggcgttggccgtcgcgtggcctgttcagttctgtttggcttcttgttcttttgtgagccaagcacgttgcacctgaccggagtgcttgttgctgttgcctcttttcttttgctcctggagaaaaaattttgtatcgcgctgttcccgttctggatttttgatgtacaagttctaaattttcaaattctgcaagtgaactcataattttctgaaaaaaaaaaaaaaaaaaaaaaacttgag

SEQ ID NO: 73344 - DNA, 461 bp, Oryza sativa
  Clone ID: PAT_MRT4530_73634C.1
cacacctgcccgaattcgtccaatccatctgcacccgcgcccgtgtccctctcgcgccacaggacaaggcctcccgaccgccgctacctcctcatctcctctccgagtcctcgcacggtcgtcacagtcacccccagaactcagctaagctcgcgttcgttttcgcaaggagcagaggaggaggggagagatggatcacgcggcggaggcgcagaggacggacctgatgacgatcacgcggcacgtgctgaacgagcagggccggcacccggagtcgcggggggacttcaccatcctactctcccacatcgtcctcggctgcaagttcgtcgcctccgccgtcaacaaggccggcctcgccaagctcatcggcctcgccggcgacaccaacgtccagggtgaggagcagaagaagcttgacgtgctctccaacgaagtcttcgtcaaggcgctcgtcagca

SEQ ID NO: 73345 - DNA, 2744 bp, Oryza sativa
  Clone ID: PAT_MRT4530_73635C.1
ttttggacctcgtcgccacaaccaccatgttccctgaaaccaacaccggcaaaacacaaagcaggggagccggtgaggggcccccgtgcgtgcgtgcggacgtgccatgcgccaagatggcctcgacggtaccggccctgatcgccgacgacctgccgacgaacgtgacgtcgcagatcaccgatgcggcgcgccccaagaccaccagctcggtggtctgctactccccgatgatgatcaccaccaacggcatctggcagggcgtcaacccgctcgagttctccctccctctcttcatcctccaggtcgccgtcatcgtcgtcaccacccgcctcctcgtcgtcctcctcaagcccttccgccaaccccgcgtcatcgctgaaatcctcgccggggtggtgctcgggccgtcggtgatggggcaggtggaagtctgggcgaccatggtgttcccgcagcgcagcctgctgacgctggagacggtggcgcacctcgggctgctctacttcctgttcctggtcgggctggagatggacctggacgtgatccggcggtcggggaagaaggcgctgttcgtcgccgtggccggcatggcgctgcccttctgcatcggcatcgccacgtccttcatcttccggcaccaggtgtcccggaacgtgcaccagacctccttcctgctcttcctcggcgtcgcgctctccgtcacggcgttcccggtgctcgcccgcatcctcgccgagatcaagctgctcaacacggagctcgggcggatcgccatgtcggccgccatcgtcaacgacatgtgcgcgtggatcctgctcgcgctcgccatcgccatctcggaggtgaacagcaccgcgctgtcgtcgctgtgggtgctcctcgccggcgtgctcttcgtgctcttctgcttctacgtcgtgcgccccgggatgtggtggctcatccgccgcatccccgagggcgaggtcgtcagcgacatgcaggtctccctcatcctcaccggcgtcatgctcgccggcgtgtgcaccgacgccattggcatccactcggtcttcggcgccttcgtctacgggcttgtcatcccgggcgggcagctcggcgtggcgctcatcgagaagctcgaggacttcgtcacgggtctcctcctcccgctcttcttcgccatcagtggcctccgcaccaacatctccaagatacgcgaccccatcaccgtcggcctgctcgtcctcgtgttcaccatggccagctttgccaagatcatgggcaccatcatcatcgccgcgctctacaccatgccgttccgcgagggcatcgcgctcggcttcctcatgaacaccaggggtctcgtcgagatgatcgtgctcaacatcggacgtgacaaggaggtgttggacgacgagtcgttcgcggtgatggtgctggtgtcggtggcgatgacgacgctggtgacgccggtggtgacgggggtgtaccggccgtcgcggcggctggtcgggtacaagcggcggaacctgcagcgcatcaggcacgacagcgagctccgcatgctgatctgcgtgcacaccacccgcaacgtgccgtcggtgctctcgctgctggagctctccaaccccaccaagcgctccccgatcttcatctacgcgctccacctcgtcgagctcaccggccgcgcctccaacatgctcgccgccgccgccgcgtcggcctcgaagcagaaccggagcagctcatcctccaccctgccccccgtcacggagcacatcttcaacgccttcgagaactacgagaggcacaccggaggcatttccatccagacgctcgcggcggtgtcgccgtaccagaccatgcacgacgacgtgtccgtgctcgccgaggacaagcacgtctcgctgatcgtggtcccgttccacaagcagcagacggtggacggcgccatggagccgatcaacccgtccatccgcgggttcaacgagagcctcctctccacctcgccgtgctccgtcgccatcctcgtcgaccgcggcctcagcgccgccgcggcgcgcatggcggcgctgcaccgcgtggcgctcttcttcttcggcggccccgacgaccgcgaggcgctcgcgtacgcgtggaggatggtcgagcacccgggcgtcgccctcaccgtcgtacggttcgtcccgccggattaccgggtaaggtcctactccaacaccaactaccggtcggtcgcctccgacgccgacccgcgctcgatcggcatagacacggaaggcaagaccgagctgcagatggacgaggagtacctcggcgacttcaggacgcgcaacatcggcaacgacgccatctcgtactccgacaaggtggtggccaacagcgaggagacggtgtcggccatccggaacatggacgacagcctccacgagctgtacatcgtcgggaggcgccccggggaggccggctcgccgatgacggcgtcgctggaggactggatggagtgcccggagctggggcccatcggcgacatgctcgtgtcgtcggacttctcgatgtcggtgtcggtgctggtggtgcagcagtacgtggtggccgcggcggcgcccgcgcctgccaccaccgcgcctgccgggaacgccgatccggtgcgccagtacgtgagcaacgcaaaccagcggccgtccgcggcgtaccggacctcggcagcgtcgacggccaacagcagatggtccggtggtggcaccgtaggcttctga

SEQ ID NO: 73346 - DNA, 200 bp, Oryza sativa
  Clone ID: PAT_MRT4530_73636C.1
aacatactcttactggggttttgttaatttttaccgatgacattttaaacactaatttattttcaatcttatcattgacctttgatacaagacattttcttctccacaacacccaccattgtcgcctacaaggatcgctatcccttatagaactagaaaaaacgtataatattacgattttgaagtaaaactgaataatt

SEQ ID NO: 73347 - DNA, 1305 bp, Oryza sativa
  Clone ID: PAT_MRT4530_73637C.1
atggccggcgccgtcgccgtcatcgtcgccgccggcgagacgcaggtccccgacgacgtggtggacgaaatcctggtccgcctcccctcccgctcctccctggcgcgcgccgccgcggcgtgctccgcgttccgcgcgctcgtgtcgtcgccgcgcttcctccggcgccaccgcgcgcgccacgggccgtgccccggcgcgctcctgggctccttcgcgttctcctccgagggcggcgccttccaccccgccgagcccccccacgcgtccgccgccgcggcgcgcgccgtcgcggccgccgcggacttctccttcgcgttcctcccgccgtcgccggtggtgggcgacgacgacccgcgcaggggcctcgggtggatcgtccgcgaccaccgcgacggccgcttcctcctcgaccgcgtcgcctccctcgacgacaacgtgttcccggagctcgccgtgtgcgaccccctctcccgccgctacgtcgtcctcccgcccatcccgcgcgagctcgccgccgccgtcgacaggccgctcggcgtcatcggcggccgccgccggtgcgagcccttcctcgcgccgtgcgacgccgacgccgacgccgacgccgagtcagagcccgcgttcgccgtgatatggacggcgcgttgcccgaggaaggtggtggcgttcgccttcgcgtcgcgcgacgggcggtggcgcgcgctcccgtcgccggagtgcttcgtgtggagcaggcaccgctcgccgttcggctgcccggtgcacgccgtgtggaaccggcggttctacgcgcacggctgcttctactggctcgactgcctcacccaccggtggctggtgctcgacacgcgcgccatggagatcaccgtcaagcagatcccgtccccggcgtgctactgggaggagcacgtcgccgtcgtcgagggagaagacggcaaggtcggcgtgttcgcgcacgacttctaccgcgccggcggcgaggcgtgcctctactactacaccatcgtcgacggcggcgatggcccgcggtggcggctggagcggacggtgccgttgccgtggccggcggcgcacggccggccgtacagcatccgcgccgccgccaacgggagcctgatcctcgaggtcagccatggcacgccggcgttcatgacgagctaccggagcagggacgtcgagctgtacaggatcgacgtcaagagcttcgagctggagatgatctgccgcgcgcggtgcgccgccggcgacatcgcctgggcatacttcggcttcccgccattgctgtccttgccaaccgtctga

SEQ ID NO: 73348 - DNA, 453 bp, Oryza sativa
  Clone ID: PAT_MRT4530_73638C.1
atgagcggcgggctcaggctgctcgacgccgcgccccgccgtccgcccgcgaactcccgctccgccacactccccggcaccggggctggcgccggccctggcaccggcgacgtcgccgggttcggagcaggcggcgagctaatgccacccccttcaaacatcgcagcatacggcgatggcgccggcgacggcgacacagccggagccggtgccggcggcggccggagcgcgcgcatcgcgttcttgcaccgccctgcctctcgccgcctcgtgtgcctcagctcggtgggcgcatggcgcgcggcaatggcgggctcagctcaagctcaagcagctagtggagtgaccactctcggcgtaaagaactatgagcttgttgaactagttgatggattctccaaattccgtggtgatgtatccgttaacaacgagatgtctatggtgacttcataa

SEQ ID NO: 73349 - DNA, 300 bp, Oryza sativa
  Clone ID: PAT_MRT4530_73639C.1
gagagaaactgaaacagacttaattatggcttcttatacaagtggctggtcccactaaacaatttaaacatacttacttttatttgtacaccaacttcattttcttcagtattattcattccctcataaacatatgttatcagccttccgttcatccaatatttttcttccggtacaattgcagaacattttcttttttacttttttctttttgacacaagaattttactataggctacaacactctcacagtcacaattttaacaattcacacaaccgcatatgatttaccaattccct

SEQ ID NO: 73350 - DNA, 1063 bp, Oryza sativa
  Clone ID: PAT_MRT4530_7363C.1
gttatgataatgatttatatcgtccaaattaaggttgaacacaaacaacataaggcagatatccacaaggctgcaaatggcattatacatagtggacacatacgcactaaattgctcataatatagcctacagtctaggcgagcaactttgctagctctatgatccacaaattcaactaaacagaatgaacctacctaacaaacaagcctggtctggcctgatcttcatgaatacaggcagaaaaagttcttcagatgtaaacgccacagttcagcagcatccttgatttccttcgcgaaattctcaactgcatgcccattcatcctcatgacttcctgtcaagatgctactgcaatgctgagcacccagaggtccaaaattcacctatcagtttttggtgcaaacattttcttgggtcaatatctattctttattagtggaatgaggcagagcttctgccttgtttaaaaataaattcgcccattatgtcactgagattggaccagaagctcagttacggttccttggcaaccagattagcagtcttcaggacttcatcaatagccttattgattatgctatctctggcctttactccaatggccagtgctgttctgacattcaccacttgacctaacctcagtgagctttctttgttgtccttgaggcacaacacaggaacctgccttgtagatgccagggttggtatgtgttttgttaaccatttagggttgcaatcagcagctacaaggacaacctgaagaagcaccggaggagctctacacagagctttgtcagttattgcttcagtagaagagtgaccagaatgggtggcagcagtagcagcaggcattcgctcaagaacccttgtgacatcattgaccccaacggcaaattgtcgcttcatccatatcttttccggcaacccttcccttgaagcctttgcaacctccacgctcttaataagcttcgataataggtcatcaagagcgtctcctccaatgtaatccgaagttattcttcccaggaagaaaacacattgtaatcaatcccttaaattat

SEQ ID NO: 73351 - DNA, 2649 bp, Oryza sativa
  Clone ID: PAT_MRT4530_73640C.1
tctgcgacgactatttcgacgccgtggatttcggatcacaaaactgtggcaaacaaaaattatgcaggctgctgacacagatatttcagctttagtggaaatttgagaaaaatagccggcatcgctttgagtttttcatggatcttgttggggatcagcctgtctgtgcacgcacagcttgggcatacatgaaatctggtggtcgtatttcacatgctttgtcagtgtatagctgtcaacttcgccaacccaaccaggtgaagaaaatatttgagtttcttaaagatgggttccatgaagtcagcagctccctggatttgtcttttgatgatgattctgttgctgacgaaaaaatacccttcctagcatacctagctagttttttgaaggagaataaatacaatccttgtgaaccaccagctggttgtctaaacttccggaatcttgttgctggatttatgaagagctaccaccatatcccattaactcctgataatgttgttgttttcccttcccgtgctgtggcaatagaaaatgctcttcgattattctcaccagcgcttgcgatcgttgatgaacatctgaccagacacttgccagcgcgagggttaacttctttagcaattgagggaaaagccaaagatacagttactgtaattgaggcaccacgccaatctgatttgttgattgagttgatcaggaaactgaagcctcaggtggttgttactggcatggctcagtttgaggctatcacaagtgctgcttttgagaacttattaagtgtaacgaaggatgttggttctcggttattcatcgatatttcagagcatctggagttgtctagtttgccaagctctaatggtgtattaaaataccttgctggaaagaccctaccttcccatgcagctatactatgcggtttagtaaagaatcaggtttattctgatctggaggttgcttttgccatttctgaagatgcagctgtttatagggcattatcacaaactattgagctattggaagggcatacgtctcagatcagccagcactattatggttgtcttttccatgagctactggcatttcaaattgctgatcggcatccacaacaagaaagactgcctgcagaagtgatacctcagaagatgataggattttcaagttcagctatgtctaccctaaaagaagctgaatttttcattcctgactccaaagaatccagtgtcattcatatggatttagatcgcagcttcttgccagtgccttctgcagtgaatgcctccatttttgaaagttttgttaggcggaacattactgagtctgaaactgatgtccgttccagcattcagcagctggtgaaagatagctatggtttcccagcagatggttgttctgaaatattatatggcaacacctgtcttgcactcttcaacaagcttgccctttgctgcatccaagaccagggcaccttacttttccccttgggcgctaatggtcactatgtctcagcagcaaagtttgtgaatgcaaatacgctgactattccgacaaagttagaatcaggcttcaagattgaaccacgggttctagctgacacacttgagacagtatctaggccatgggtttatatttctggccccacaattaaccctactggtttcctgtacagtgacagtgatattcaagagctcctttctgtttgtggtaaatatggagctagggtagtaatagatacctccttctctggtctggaattccaaactgatggctggagtcgatggaatttggaaagatgtctttctgctgtgaattgtccaaaaccctcgttctctgtagctcttctcggagaactgtcctttgagctgactgctgcagggcatgactttgggtttctgattttgaatgactcatccttggttgacacatttcacagtttcccaagcttgagtcgtccccacagtacgctgaagtacactttcaaaaaactactgggcctcaagaatcagaaggatgaacacttctccaatctcattatggagcagaaggacacactaaagagtcgtgctgaccacttgataaagacacttgagggctgtggctgggatgttgctggcagtcatggtggcatatcgatgctggcgaaaccgactgcctacatcggcaaaataatcaaggtggatggttttgatggcaagctagatggctgcaacatcaaggaagccattctcaggtccaccgggttgtgcataaacagcagctcatggacaggaataccggatcactgtcggttcagctttgctctggagagcagcgaattcgagcgtgcaatgggctgcatagttcgcttcaaggagttggttcttggaagcaaggcttttcatcagatcaatggtaactaaatgaaatttcccatcgtcgtggaaactgaatcctgaagaaatgtagccactacatacatattattatccattgttagcctgtcctgttcggggctgattgaacatttttgtgcttagaaaaagaataatgagcacaggaaggctggtatgaatgtagtagcaaactggaattaagtctgaacgacgtattggcatggcatatttctccagaaaataatgcttcttttattaaaagctaaaaaaaaaaaaa

SEQ ID NO: 73352 - DNA, 1047 bp, Oryza sativa
  Clone ID: PAT_MRT4530_73641C.1
atgggcgtcgccgccgccaacgtcgccgccttcgttttgctggccatcgcgcccgtggccgccgcgccgtcgtcgccgcctcgatctggcggcgactccctgagtttctccgacgtgatcagcatctccttcttcatggccgtcttcttccccgtgttcatcgtcctcctcgcgttcgcgtgcctccgcctgttccggccgctcgacgacgacgacggcgagcccgcgctggcggacacgtcgtcgtcggagtggtcccgccgggggggagggggcggcaacagggcggggctcgacgccgcggagatcgcggcgctgccgctggtgtcgtaccgcgacgccaggcggcaccggatcggggacgcgcggggcgacccgctggagtgcgcggtgtgcctcctcgagttcgaagacgacgacgccctccgcctcctcccggcgtgcccgcacgcgttccatcccgagtgcatcggcctctggctcgagaagcacgtcacctgcccgctctgccgcgccaacgtcctcgacgcgccgccgccgccgccccctcccccgccttcgctggagcaggacacggcgtcgccgccgccggctcacgagacggtggtggtgatcggcgacgccggcgccagcgaggaggcggaagcggaagagaggatcaggatccagtgcctcgcgggggtccgtcgcgcggcggggcggcaggctctcccgcggtcgaactcgacggggcacgagcgcggcggcggcgggatggagcggttcgcgctgcggctgccggagcacgtccgcctcgagatcctcatgtcgcacaggctgaggcacgtgacgagcgcggtggcgtccgtgcgcgtcagggaggggagcgcccacgacgccggcgccgtgcggaacgccgtggcgaggctcctgtcgctgttcgtgcccggagccgggtggaagggagacgacgagggcaagtccagcaaggcggcggaagggtcgtctcgccggcggcgcgacgagtcggcgaggggaggagtcggagaagagaagaggagcgagtaa

SEQ ID NO: 73353 - DNA, 341 bp, Oryza sativa
  Clone ID: PAT_MRT4530_73642C.1
tttgtttttttctaaggagcggaaaagatttagcatccctttttttactgaacatacaacaaatttaacaatttgtatgatcatagtgtgtgaaaaaaaaaatccagaacgaatcccttttaattttatggcttccatgtgtggtgtcggcaggctggtggcaatgagtactcatacaccggaagattccacttcaccggtgatggaggcggcagtgacaggtacctgttctacggcgacacctcgtactgcggaggctgcggaggcgtttattggtaggctgtaggcagacgttgacaacaggtacctgttctgccgcgacacatcataactcggctgtg

SEQ ID NO: 73354 - DNA, 890 bp, Oryza sativa
  Clone ID: PAT_MRT4530_73643C.1
tccccggcgaggtcgatgaccgccgacgccggctgcggcggcggtatggactcggctcatgggggcagtgtcgggtgtcctagacgaacgtctgtcgtcccaaaacttgcggtgggttggggatccctgacctcaggttggcaggatttgccctgcgtgttcgctggctctggcttcagcgctcagggcacccctgctgggatggcctgaagtccccagtcaagcagaccgtctccgacatgttcgcggcatccactttcttcgtgccgggaaatggtgagtctatgctcttctggtccgaccaatggatcgatggccgctcggtggcgtccttggctccagatctcctcttcgttgttccccagcgtcttccaggttcacgcacggttgcttctggtctggcgaacaactcctatgtctctgacatccgcggtgccctcactatcccagtcatctcccagtttctccttatttgggatgcggtgcttcacgtacagctctcaccgggtgtcgagaatcgtctcatttggcgttggacgtatgaccagcgctactctgcgcgttcggcataccaggctttcttccatggccagcattcatttgcctgagctgatcttctctggcacgtaaagggtcctgctaaatgcaggttcttcctttggtttgcattccaacagcgttgttggacgactgatctcctccagaagcatggcatcgatagtcactcggcctgccctttttgcactcaggatcttgagacggcgaaccacatcctcctcgactatgtgtttgctcagtaggtctggctctctggttctaggactggtggccgtccttcagggcctgctaacctgagcatctccgcgctagcttcgacttcctggtgctcc

SEQ ID NO: 73355 - DNA, 243 bp, Oryza sativa
  Clone ID: PAT_MRT4530_73644C.1
atgcataaactaggaatcgaaacaaaaatatatgagttagaagtctacatgctaaccatatatttgttactgcataaaaatcaagtaagacatggtgttactgcacgaagaacatcgcgttactacgttgttctgagacgagagctgagaaaattggaggtggtggggaaagtgaagggcgggtttgaccgagatgggggagctttgaccgaggtgtggggtgggttttgccccctggagtga

SEQ ID NO: 73356 - DNA, 345 bp, Oryza sativa
  Clone ID: PAT_MRT4530_73645C.1
atgctcaggttagcaggccctgaaggacggccaccagtcctagaaccagctgccacgggggagagagggcatcccagccaggaggcgatagcacacagagccagacctactgagcaaacacatagtcgaggaggatgtggttcgccgtctcaagatcctgagtgcaaaaagggcaggccgagtgactatcgatgccatgcttctggaggagatcagtcgtccaacaacgctgaccctttacgtgccagagaagatcagctcaggcaaatgaatgctggccatggaagaaagcctggtatgccgaacgcgcagagtagcgctggtcatacgtccaacgccaaatga

SEQ ID NO: 73357 - DNA, 888 bp, Oryza sativa
  Clone ID: PAT_MRT4530_73646C.1
ttccttccacagctgccaagagaccaggagcaccaggaagtcgaagctagcgcggagatgctcaggttagcaggccctgaaggacggccaccagtcctagaaccagctgccacgggggagagagggcatcccagccaggaggcgatagcacacagagccagacctactgagcaaacacatagtcgaggaggatgtggttcgccgtctcaagatcctgagtgcaaaaagggcaggccgagtgactatcgatgcccatgcttctggaagagatcattcgtccaacaacgctgttggaatgcaaacaaaggaagaacctgcatttagcaggaccctttacgtgcagagaagatcagctcaagcaaatgaatgctggccatggaagaaagcctggtatgccgaacgcgcagagtagcgctggtcatacgtccaacgccaaatgagacgattctcgacacccggtgagagctgtacgtgaagcaccgcatcccaaataaggagaaactgggagatgactgggatagtgagggcaccgcggatgtcagagacataggagttgttcgccagaccagaagcaaccgtgcgtgaacctggaagacgctggggaacaacgaagaggagatctggagccaaggacgccaccgagcggccatcgatccattggtcggaccagaagagcatagactcaccatttcccggcacgaagaaagtggatgccgcgaacatgtcggagacggtctgcttgactggggacttcaggccatcccagcaggggtgccctgagcgctgaagccagagccagcgaacacgcagggcaaatcccgtccacaagaaagcacgacgtttcttgtcaatggccttaataacccagactggaaggccgatcaccat

SEQ ID NO: 73358 - DNA, 381 bp, Oryza sativa
  Clone ID: PAT_MRT4530_73647C.1
atggcctctgctctgctctgcgtgtgcgcgaagccgccaactgcgaagcggcggcagggttaccggttgcgcggtgagcgtactacggcccgccgcgacgaggagcagacgagcgccgagcgcgcgcgcgcgagacacggagaccgacgtgcacgtagagcgatgggcctcggccggacccccgcgattcatcaagcccgatgctgggggtctctgggcgacgcgggacaggcccgcccggtacggcctatgccacggaagaggcctgtgccgtataggtgccagcgcaatggggccgtctgctgcgtcttgggcagcgaaagaggcccgtgccatgatgccatcagggattcaggtgctctaggaaaaagtctaacttaa

SEQ ID NO: 73359 - DNA, 204 bp, Oryza sativa
  Clone ID: PAT_MRT4530_73648C.1
aaagaggaacatcccttcctcattttatttctttttattatcaatttcccaaacattgagaagcctctttcaaacctgatactgtttgctagtcctaaccaacatttgtaattaatttacccaaggcctaattaattaattaatcactaatgaaatatttaatttaatccatgccaccccccaacatgaggcaagccaaggaac

SEQ ID NO: 73360 - DNA, 352 bp, Oryza sativa
  Clone ID: PAT_MRT4530_73649C.1
ccctagctttcgaaggagactggcgggggggggcgctgcgtgcggcgtgcggtgcggcggggggcgcggtgtacggcggggggtagccggcgaccgaggcgcagtcagccaggcaggggcggatgccggctggactcactggcgcaccatctgctagggtggctgctgagcgggcgcacggccgtggaggcgtccacgcaggaagaggaccactcggcttggcgctagggcgcggggcagcggctgactcttgaggcaactgctcggggcggtctgcggcgacagctgtattgaatgccgacgtgcggcctgatgcgacagctgctgtgcgatcatggacgacatgatctac

SEQ ID NO: 73361 - DNA, 570 bp, Oryza sativa
  Clone ID: PAT_MRT4530_7364C.1
atgagcaagaagaagaacaagtctcaattgccaataaaggcgccgttgaaagatgctgaacaagggagcgtggaggttgcaaaggcttcaagggaagggttgccggaaaagatatggatgaagcgacaatttgccgttggggtcaatgatgtcacaagggttcttgagcgaatgcctgctgctactgctgccacccattctggtcactcttctactgaagcaataactgacaaagctctgtgtagagctcctccggtgcttcttcagtccagaaaaggacatgagtccattgcccccttcaaagaacgagtgctttacagcttgccagttgtccttgtagctgctgattgcaaccctaaatggttaacaaaacacataccaaccctggcatctacaaggcaggttcctgtgttgtgcctcaaggacaacaaagaaagctcactgaggttaggtcaagtggtgaatgtcagaacagcactggccattggagtaaaggccagagatagcataatcaataaggctattgatgaagtcctgaagactgctaatctggttgccaaggaaccgtaa

SEQ ID NO: 73362 - DNA, 200 bp, Oryza sativa
  Clone ID: PAT_MRT4530_73650C.1
atgaggtctcatcctctcagccgcatctgccatagccgttgtgcattgttctccgcctgtcgaatgtatctggtcctcatcgctgctctgctcaagctgtgcattgagtctgcaccttcaagcggtggtagaaggaatgacgaccgggtggcgcacctgggtggtgatgccgccgaaagagtggacaacgacgaagatgg

SEQ ID NO: 73363 - DNA, 1010 bp, Oryza sativa
  Clone ID: PAT_MRT4530_73651C.1
acaattactttatttcataatcatagaaaatatattaaaattaacatagttccacttaatccataaataattagaaaatttttaattcaattttactctattatattgcccattaattaattatagtaattaatttaagcagattttggcgccttgactgcctcgaagcgtggctccttcgcatcgaacttttgcttggcgtacacatccatgtactccccgaacacgtactccgggtactcgccgccggcgccggcgccgccctccaccgtcggcgagatggtcgcctcgaaggccgggttgtagaaagacgcgacagagcgccggttgccgtcgcgcatggggaggacgcggtgccacgcgctgcgttagcggccgttgctgagcacctccacctggttgccggtgttgacgacgatggcgtcggcgagcggctgcacgtcgacccactcgccgcccctgagcacctggaggccgccgacgcggtcgtcctggaacagcaggatgacgccgccggcgtcggtgtgggcgcggaggccggtgatgaggtcggggcgcgggcacggcgggtagtggctgaccttggtgccgaagaacggcgcgtggcggccgtcgccggtgaaggcgcgcctcatgcgccccttgtcgaggccgaggttctcgtccatggcctccatcaccctctcggcgagcccccgcagcgccgcgcggtactcccgcatcgtctccttgaactccggcggtttcgacggccactggttgtcgtcgtggaggtagaagatgtcctcccagtccatgtcgtccaccggcgccgccgcctcgccgcgccgctccgccgccatgagcccctccagcgtcctcaccggctcgactccatgaacgccgcctcccggagtcggtagctggaagaatccccactcctcgcagccattgtcgatctgcgccatcgtctcggccctctccgcggcggtgccgtcgagcttggagaagttgatcaccggaaccaccat

SEQ ID NO: 73364 - DNA, 310 bp, Oryza sativa
  unsure (1)..(310): unsure at all n locations
  Clone ID: PAT_MRT4530_73652C.1
gtcacgcgagttattgacctagaggtcttctactaccacattacactaatggtgcatctctagtatatatcatgcaagggagaggtntacatgggcaactttccaggctgtctgagtctaccacaacagttccacaatcgaggcagtcccatttgaccgaaagtaaaagccaaagtcaaaagttcagggatgaacatcaaaagatccaccgtttcagacaagaagatgtaattgctttgcctgctagagtagctcattggtgctacaatgataggtgaagtgccagttgttgccatatatgtcactgatc

SEQ ID NO: 73365 - DNA, 1438 bp, Oryza sativa
  Clone ID: PAT_MRT4530_73653C.1
ggattcggccgagctcgtgcgggcacggggcttacatcacactagctaattagctacttactcttcttcttgctagcttgctagcttctgcatttagacattgcaaaatctgaaaaaacttgagaaattaactaaacaaaatggttgttccggtgatcgacttctccaagctcgacggcaccgccgcagagagggctgagacgatggcgcagatcgacaatggctgcgaggagtggggattcttccagctggtgaaccatggcgtcccgaaggagcttcttgatcgggtgaagaaggtgtgcttggagagctaccgactccgggaggcggcgttcatggagtcggagccggtgaggacgctggaggggctcatggcggcggagcggcgcggcgaggcggcggcgccggtggacgacatggactgggaggacatcttctacctccacgacgacaaccagtggccggtcgaacccgccggagttcaaggagacgatgcgcgagtaccgcgcggcgctgcgggggctcgccgagagggtgatggaggccatggacgagaacctcggcctcgacaaggggcgcatgaggcgcgccttcaccggcgacggccgccacgcgccgttcttcggcaccaaggtcagccactacccgccgtgcccgcgccccgacctcatcaccggcctccgcgcccacaccgacgccggcggcgtcatcctgctgttccaggacgaccgcgtcggcggcctccaggtgctcaggggcggcgagtgggtcgacgtgcagccgctcgccgacgccatcgtcgtcaacaccggcgaccaggtggaggtgctcagcaacggccgctaccgcagcgcgtggcaccgcgtcctccccatgcgcgacggaaaccggcgctccgtcgcgtcgttctacaacccggcgttcgaggccaccatctcgccggcggtgggcgccggcggcgagtacccggagtacgtgttcggcgagtacatggatgtgtacgccaagcagaagttcgatgcgaaggagccacgcttcgaggccgtcaaggcgccaaaatctgcttaaagttaaaaatagacttttatttgtgaattaattaattgattagttgcataaactatacataaccgcttttgctattcaagataaaaaataggtgaccttacaaaatttaagtggttattattgtcatgagaatacaactattgttatgttacagtatatagtttggtattttagtgtgtcacggtttgtcagtaggaatatataataatgtaatagatcgtgttgttatatatacatgaataaactatatattttttttaaaaaaaaaaaaaaaaaaccgtgcgaatataagcgaaaagaaaattgacgaatttgttaatagaaaagagaaggcaaggtagataaacgtgaaagcaacgacaaaaaaaaa

SEQ ID NO: 73366 - DNA, 346 bp, Oryza sativa
  Clone ID: PAT_MRT4530_73654C.1
tatctgacttgctcaattatttaaatttgagagtcatgggcgcttcaatagggcgagaaaggataggttactgatgaggtctatccagaataggctggatctgagcgacgcaagcgaataacacacaggattaatgcgtgaagtggacgagattgtgcattttgctttgaaggcgcgagctgaggcacttagctgtggactacggtgattggcgctggagccgtggagtatgtgcatgtgcgcatccagcggctcaacaggagaaaggggctaactcctgagcatgggatagaggaggagtacagcaggcgcgagagtcctgatgggaggggaacaggagatttgc

SEQ ID NO: 73367 - DNA, 1911 bp, Oryza sativa
  Clone ID: PAT_MRT4530_73655C.1
atgaggctgaacctcacgtcgggcctccttccgtcgctgggcgtccccgcggggctcctgggcttcttcctggcgagggtgtggatccgggcgctggacgtggtgggggtgtcgcacctgcccttcacccgccaggagaacaccctcatccagatcgccgtcgtctcctgctccaccatcgccttcagcggtggatttgggacgtacatacttgggatgagcggcaagtcggccaacgaggggcacatcggcagtcatgggaggaacgtggaggagcccaacatagggcgggtcatcgccttcctcttcctcgtcaacttctccgggctgtttatcatcgtgcccctcaggaagatgatgatcatccgccaccggctcacgttccccagcggcaccgccaccgctcacctcatcaacagcttccataccccacatggagccaagcaagcaaggctgcaggtggtgacgctgttcaagtccctcggtgcaacagtgctgtggcctattttccagtggttcttcgccggagggaagaactgtggtttccagatcttccccacgtttggcatggcggcatatcgccgcgggttctacttcgacttctcgacgaccaacgtcggcatcggcatgatctgcccgccgatgatcactgcctcgatgctcgccggctccatcgtgtcgtggggcatcctgtggccgtacatcgagacgaaggccgggaggtggttcccggagaacctcgacgccaacgacctcggcggcatcatgggctaccgggtgttcgtcggcgtgtccatgatcctcgctgacggcctcttcaccatcctctccgcgctggtcaggactgcctgcgccatgcgcaagcgccgccgcggagcttccacggtgacggcggcggtgccgccgttccagtgcctcagcgccacggagcggaccatgcagagcttcgacgaccgccggcgggcgcaggtgttccttcgcgacagtttccccacctgggtcgccgtcgcgtcgtacgccgccctggccgcgctctccgtcgtcgccgtgccgctcctgtacccgcagctcgggcaccgccacgtcgcggcggcctacgtcgccgcgccggtgttcgcgttctgcaacgcgtacggcgtgggcgtcaccgacatgaacctctcggcgacgtacggcaagatcgccatgatggtgttcagctcctgggtcgggatggacggcggcggcgtcgtggcggggctcgccgcgtgcgggatcatcgtcagcgccgtctccggctcgtccgatttcatgcaggacttcaagacggggtacctgacgctcacctcccctcgcgccatgctcgtcggccaggtcgccggcacggcgctcggctgcgtcgtcaacccggccatcttctgggtcttctacaaggtgtacaacatgggcggcggcggcggtgacggcgccgacgtcgcaccgtacgcgagggcgtaccgcggcatagccgtgctcagcgtcggccggcacgggctgccggaccacagcgtcctcctctgcaagctcttcttcgcgatggcactcgccctgagcgcggcgagggaggtggcggagcggaggaggtggcgcgcgctgcggtacatcccgagcacgatcggcgtggccgtggcgttcttcgtgccaccgaggatacctgtgggcatggccgtggggtgcctggcgctgcacgtgtggaggaggcacgtcgacgccggcggcgcgcggctgctgttgccggcggtggcgtcggggctcatctgcggcgacgggctcgggtcgctagcgtcgtcgatgctgacgctgctcagggcgcggccgccgatctgcattaagttcgtgtctcgcttcgagaaccagaagctggatgctttcctcgcaacacggcatgcttaa

SEQ ID NO: 73368 - DNA, 220 bp, Oryza sativa
  Clone ID: PAT_MRT4530_73656C.1
tttcttgtctagctagatcctctgcagctgagaccggggtggattggaagagctcgtgagtgtctgatcactgacagctgtgcatatttttttgctgtatgcgtacatgcactatatgatgctaacacgcgtatcactagcggacatcgactggtactagtgtcacgactgagatgttcggcatatgttcttttgtcatgtaaatatgaagaaatcaagt

SEQ ID NO: 73369 - DNA, 273 bp, Oryza sativa
  Clone ID: PAT_MRT4530_73657C.1
ggggggaacaaaaaagcataccactggcctgacattaattgtaaaaaagggattggaacaacaggggccggatggaatggataattacatgcatagaacaaaacaaaggatgggatggaggggataaaaccatcctagctggataaattagggggacattctttttttttaaaataaagataaaattaacttatggggcccattaaattattactaattgatcatcgggaccgccatcattttcatttgtctgcattttgcaacaagaaggaa

SEQ ID NO: 73370 - DNA, 266 bp, Oryza sativa
  Clone ID: PAT_MRT4530_73658C.1
gggcccaagggaaattcttatcaaggggggcccaaaaaaaagccccccttcccatgttaaaaaagccgggttacttatgcccggcccgggaaacaagggtttcccaaaagcaacccaaagcccttttttttaccgccaagggccaccaaaccaacaatttaacccccctttccaatcttgggtttcccttaaccactctcccccctaaccttttaaaacctccttttccttcttggcctaggcgccggcccggcccgccccgggga

SEQ ID NO: 73371 - DNA, 218 bp, Oryza sativa
  Clone ID: PAT_MRT4530_73659C.1
gtagtggggcattttgggatttggcgcgcgtctggggggagagcagggtggtggtggtgggcaatggacgggcaagaggaaagggagggggagagaaaccaggaatgccgccgcgtgtggcatgcacgtacgcatgccgtacgtgcagctcgtgcatcgcagccggtgcccgggacggcggcgccggctctggttctgggttacacttgagtcttttc

SEQ ID NO: 73372 - DNA, 162 bp, Oryza sativa
  Clone ID: PAT_MRT4530_7365C.1
agatccgatcagcaaagcaaagccgcagagcagcagcaggggggcagagggggcaaaagtctcgccggaagaaacaccgcaatcccggtgagcgtgtagttccgagcgtccaagccgagtccacatcccgaggtgagctgtgtccagtcgggccagagttga

SEQ ID NO: 73373 - DNA, 365 bp, Oryza sativa
  unsure (1)..(365): unsure at all n locations
  Clone ID: PAT_MRT4530_73660C.1
acgcgtaaacacaacacaacccgacgaaaatctgctggaagggagaatatcacaacttcccttgcctctgttgcccctgaagctgatctntgaagtcgtgagttgtacttctgtaaaaaattagtagtttccactagtgtgagcgttggaggggacggtgtttggtgcttgccctatctgtaccctgctacacgtctattatgttcttgagttcctttgttcgcctttttgtgttntttccttcgttttntntgntgtgtcttaaaccccctgttggagattaagaccaggttttgaagtgtggaagaggttgtttcaatcgtctaattgattcaactattcagcaaaaaaaaaaaaaaaaaaaa

SEQ ID NO: 73374 - DNA, 213 bp, Oryza sativa
  Clone ID: PAT_MRT4530_73661C.1
atggcgacgtgccggcgagtgggcggcaacgacgtttacaccctcctctcgtttcgattcggattccgagctcgctgcagcggggggaatgaggaaagtcagcggcgcgcgacgcgggagcgcgcgaggtttgaggcggaggtggaatatgaaaatggaaggacggttttgaagggcggtttcgctgacgtggcgcctacgtggcagtattga

SEQ ID NO: 73375 - DNA, 1826 bp, Oryza sativa
  Clone ID: PAT_MRT4530_73662C.1
atggtcatctttggtggggcggagcggccgccggatctggccgccctcgccacccaccgtggcgaagactatagccacacccgagggtcagatcctttgccgtcgtcgtcagccgttgccgccctccctcattgttcgcccgccaccgcacccgagggccgcctccccgttggtgagggccacctcccgtcgctggtggcgccgtcgtcgccgacgccggcggagacgctgccgctgtcggtgatcgaccgcgtggcggggctgcgccacctggtgcggtcgctgcacgtcttcgaggccggcggccgcaacggcggcggcgagccggcgagggtggtgatcagggaggcgctggggaaggcgctggtggagtaccacccgttcgccgggaggttcgtggagggcgacggcggcggcgaggtggcggtggcgtgcaccggcgagggggcgtggttcgtggaggcgacggcggcgtgcagcctggaggaggtgaagctgctggaccacccgatggtgatccccaaggaggagctcctgccggagccggcgcccgacgtccagccgctcgacatcctctcatgatgcaggtgacggagttcacgtgtggcgggttcgtggtggggctcatctcggtgcacaccatcgccgacggcctcggcgccggccagttcatcaacgccgtcgcggactacgcgcgcggcctcgccaagccgcgggtgtcgccggtgtgggcgcgcgacgccatcccggacccgcccaggatgccggcgccgccaccgcggctggagctgctcgacctccgctacttcaccgtcgacctcagcccggaccacatcgccaaggtcaagtccgccttcttcgagtccaccggccaccgctgctccgccttcgacgtctgcgtcgccaagacatggcaggcccgcacccgcgccctcgtcgccgccgccgccgccgccggagacgacgaccaggagcgccgcaccgtgcgcgtctgcttcttcgccaacacgcgccacctgatgctcaagggggacggcgcggcggcggcggcgacggggttctacggcaactgcttctacccggtggcggcggcggcgagcggcggcgaggtggccggcgccgacatcgtcgacgtggtgcgcatcgtccgggacgcgaaggcgaggctcgccgccgacgcgtggcgcggtgggcggtgggcgggttcgaggaggacccctacgagctgaccttcacctacgactccctcttcgtctccgactggacgcggctcggcttcctagacgccgactatggctggggcacgccgtcgcacgtcgtgccgttctcctaccacccgttcatggccgtcgccgtcatcggcgcgccgccggcgcccaagctcggcgcgcgcgtcatgaccatgtgcgtcgaggaggcgcacttgccggagttcagggaccagatgaacgccttcgccgccgccaactagctacacatgcttatactatcatatcatgcacactagttaattatattaattacagtaattataatccttattagtattaattaatcatcaagagggacagtgcaattaattaagcattgtctcatgcaactctgatcgatcgatcgatcggtgtgtgtacgtaattcggctggttaataatggatttgcaacttccttcccccgcagtagacatatctagttaattgcgttgtgtaagagaaattatttttccttctaatatattgacttgtaattgtgttgcgcgttcacgaaaaataatggatttgcaagtagtattaacaaaaaaaaaaaaaaaaaaaaaaaaaaaaccggt

SEQ ID NO: 73376 - DNA, 378 bp, Oryza sativa
  Clone ID: PAT_MRT4530_73663C.1
ccagacggcccataactgaccgcaaaacttatcccagaaatggtcctttttggggccagagtggctggcgccgtcgtccaacttgacggcgctagcctctttggcgccgtccccctgccgacgtggcggggcgatgctaaggaactcacaagaaccaaccatataaaaaataaacccaaacggatgaaatatgtggcatgtggaattttccaaagctctaccgaaaaacttctctcctcgaaaacacaatcttgcaagcggaatttggaggttttaatattgctgaactttttatgtagatgtacgtggatatattatttgcctgatttcgagtccagaaacaggaatggaggcgaggggtggggcggaggggggcgg

SEQ ID NO: 73377 - DNA, 205 bp, Oryza sativa
  Clone ID: PAT_MRT4530_73664C.1
atgtcccgtcaaacgttgccattatactcctctacggcccgtccactgtctcttctctttattgtcattgagattttaaaaatcgaacataattatcgtttgggttcatttttactttctagaagtcccgccaaaccaagtcccggcaaccgccttactcgtttgcttcacggcctgcctgacgtccctccttttaatcgtcatt

SEQ ID NO: 73378 - DNA, 447 bp, Oryza sativa
  Clone ID: PAT_MRT4530_73665C.1
atggtctctcagacgtggcgcagggagttggctggccgcctgcaaggacgccgcggcggatcggaggagcatgtgctggaggatgctaatcgtgcacggtactgcggcaacggcggtggcggcgactatttcaacgggcgacgatggcagcggccttgcccaccgagcagcggcgacaacatccttctcccccgcaagtggcggtggatgtggcgctactccctctccccactgcaggctccttctctcactcatcaggcagtggccgccgccccgctcctcgccagatctggtgggtgcggcggtggtggcggcggacgtcatggaggcggcgggtcggatggcatagaggcgtcggcccagatggcgtggaggcggccagccggacctgtaacatcctcaaattttaaactaaaatttgactacatcatgctggcttttgactag

SEQ ID NO: 73379 - DNA, 516 bp, Oryza sativa
  Clone ID: PAT_MRT4530_73666C.1
atggctcaattctcagcggtgctagaagagtcggcatggctcgggctcaagcaggggcttgccaagggcgttagcatcaacagcaatggcatcacctttaccatctttgctttcaacatttcgggattcactgattatgtcggcctttgccaatgtttggtcttcgcccaagttgtcgggcttcgccgattcttcgccaatgcggcggcagcggaggcagtccaggcggagaagaagaaggcggcggtggtggtggttcggatggagaaggaggtggcgacaatggtggttcagacagagaaggcgccgtccttcgccgccgttccggtcgtcgccgtcgctcggggaggccgccatcgtggtcgccaagtcgccgccgtcctcgtccgccccttcgccgtcgccgaagatcgccggagcaccgtcgccgccgtcgacccgatctccgccgccgcttcttcctcgtcgccggcgccgtccgttgctcttccgccgtggttttggtcaccgggttga

SEQ ID NO: 73380 - DNA, 457 bp, Oryza sativa
  Clone ID: PAT_MRT4530_73667C.1
ctattcccccggtcgctccatcccaggggcgacgcgggtggcgattcaagccgcgccgccccctcccttcccctgctctccccagcctcgccgccgcccgaacagccgccggcaaagccgggagaaggcaaggaaggcagcggcggggctttccatctccctcgctcgtggtcaaggcggctggggcgccgatgagaccggacgacgggagtgaggcgacggcgacgatgtccagttccagcgctgccgagcacggatccggccctcccttggccggatctggtgctcccaccggcgggagtcgtgtgggacggtgggatccgccgccttcccggccggcagcgacgacgccgcggcctgccaaggagaggtaggggctggcgcgccctcgccggtgcggagacggcagccgtgacggtgtccgatgccatcatcgggacggtcagcaacggcggga

SEQ ID NO: 73381 - DNA, 502 bp, Oryza sativa
  Clone ID: PAT_MRT4530_73668C.1
cttagatccatttctcctctcccctccactcccacctctccctcaatcgtggttggcggcggcggcaagtggagctgcggcggcggatcaggcggcgaggaggctcacgcgtggcgatccggtggcgcgaaggcacgtgggtggcatggaggctcgcgacggtgggcgggccagcagaagtcaggcgaggctgcgggaaggctcgcacgtggcggatctggcggcggggaggtacggaggcgtggaggctcgcgccggcgggcgaaactgggggcggggaggctcgcggcagcaggcgaggctgtgggcgggctatggagctcacgtccaacccgctttaccgtcagcggcagcgcaggggaagggggcttcggcagacggcaaggggatcgacgcaaggggctcggtagcgatggcgcgcggctctctcctctctgcgcctccggcctcccacctccctccgcctctcttcggctcgacggcgactgcaccggcaggatga

SEQ ID NO: 73382 - DNA, 2025 bp, Oryza sativa
  Clone ID: PAT_MRT4530_73669C.1
cgcgggagataacctcgccggagcaccgccaccgccgctgtcgatcttcttccccgaggcaaagccaggagtctagacaaactcagcttcatgagttcaagttcaggaaaagcactggcatccagcatctcctattcagcaggaaagagcagcattttcttgctctgcctctttgcaggatacttgggaattcctggccgaaaattccacttgctcaagaccgtttgcagcactgcatctccttccatcattggaagttgtggagggaaccttctttagactactttagcacaagtcttcagtttctattagtgtggaagcttggcctgcaaaaccagcaaccttagctacgtagtaggcctttggatgatggtttcttctcagacatcctctctgacaagaactatcgcacaggaccccgagctcttcacagcaaaaataattctcccaatgggtcccccggatgttatctctgaaaatgatgagtttgatttctctgatgtttttggcaccactccagttcagacgccaacaggcatttcggtagctggtccagacagtcctgcacctttggctgagtccaatgagggggtttacaatgatcctattgtcatcatcaagcgatctcattctcttgttggtccaacatcacttgttagccagtccctgcgacttagcaatctcactctaaataaaacagaggggtcatcagaacctgcagaagaaaaggaaaggaacctagggcagctcagtgatgaagagtttgacaatgccacaacagaaaatgaaggtattgggcttgatgactttgaaatcttgaagcttgtaggccaaggggcatttgggaaagtctttcaggtgagaaagaaaggtacttcagagatatacgcgatgaaagttatgaggaaggataagatcttggaaaagaaccatgcggagtacatgaaagccgaaagagatatattaacaaaagttgaccatccttttgtagtgcagctcaggtactcctttcagacaaaatatcgactttatcttgtcctggacttcataaatgggggacatctcttcttccagctctacaagcaaggattgttcagggaggaacttgcacggatctatactgctgaaattgtatctgctgtagctcaccttcacgacaacgggattatgcatagagatctcaagcctgaaaatatccttttggatgctgatggccatgccatgctcactgactttggccttgccaaagaatttaatgagaatacaagatcaaactcgatgtgtggaacagttgagtatatggccccagagattattcttggtcgggggcatgataaggcagctgactggtggagtgttggaatcctcctctttgaaatgctcacgggaaagcctccgtttgttgggaacagggataaagttcagcagaagatagtgaaagagaagctgaagcttccatcgtttttgtccagtgaagctcattccctcttgaaaggactgctccacaaagaaggtggcaagcggctaggaagcggtccgggcggcagcgatgagataaagaggcacaaatggctcaaaccgatcaactggaggaagctggaggcccggcagatccagccgagcttccgacccaacgtgagcgggctcacctgcatcgccaacttcgacgagtgctggaccagcatgccggtgctggactcgccggtggccacccctgtcgccggcggcgccggccacagcagcttcgccgggttcacctacgtcaggccggctccgttcctccaggatgtcaagcctccctcttcctctaggctgaaagactagctagcagccagtgcgagtgaagaaacggatgaaccaagagcaaggggaaagaggcgaagggtaggaagttactactaaaatatctgtaaaaggacaactggtccatgtgaatgcacttccggagctaatctacccaggagatatgatccatttgctcagaccctgaaaaaaaaaaaaaatttgccctcacaattttaaggg

SEQ ID NO: 73383 - DNA, 441 bp, Oryza sativa
  unsure (1)..(441): unsure at all n locations
  Clone ID: PAT_MRT4530_7366C.1
accaccggcangcngcacggncncgggcncngccacggtcncnggcacnggcncgggcatggtggcatgagggtggantcccacnccnacnactactncagcgagggcggcgagatcnaccgtgggaggaggaacaactccatgcactcgcangantncctgatgaggcagcagagcggccatggcggctacagctacngcggcggccancagcaagagtnctacaagcgggatgagcgcgagcacnagcatcgcgagcgcgtcngcnagatcggcgccctcgccagcngcnccttcgctctctatgangggcaccaggcgaaganagaccggccaaccgcanaggcacnngatcaacnaggcctngccgcngttgcgcngttggcccccgcgctnccctaccactancaccgggagcagaancnggcactnccgcgccaa

SEQ ID NO: 73384 - DNA, 384 bp, Oryza sativa
  Clone ID: PAT_MRT4530_73670C.1
gttgggagaacacttgagaattctttttcacaaaaagataaagaacatgcggagactgaaacaatgtggctaatttgcatcctcagggggggcaataacaaaccacttttttttttttagcaaagaacacaaaccccccggtctaaaaaaaaaaaacacgttaaacccgcgccggttctggaaaaggggaagggcaacccaatggagccctacgaggggaagcttactaatgaacatgaaccggcgcccaatgggctccctatgaaaggtctaccttacacgaactatggggcggagggggaaaaccacagaccggttggattcaacttcttgggggacgaccagcaaaaggggcacaactttgatttggcggaccaatactgg

SEQ ID NO: 73385 - DNA, 255 bp, Oryza sativa
  Clone ID: PAT_MRT4530_73671C.1
agtagttcccgaaccttaccaaacaaatgaacaattcgatattaactacatcgatgatcgatcggggttgaacgcatattcgtctatccgtcctgttagatgagtactactagtacaaagtgcatcgtacatacacaagtacgcgtatacatcacgactcacgtaacacggagcacgtacgcctacgcgggcacgggcgagcgtcacaacttgttgcactgcacgggcgcaaaggagagcgtgtcgtggccgacg

SEQ ID NO: 73386 - DNA, 1586 bp, Oryza sativa
  Clone ID: PAT_MRT4530_73672C.1
ttttttttttttttttttttagtagtaaaatgagcacctctgtttttattacattaagaacaaacaacagcatcgttcaaaataattaagaatctatggatcacaagatctaactctggcacctaagatttctgtggatttccacggttctaagtggtattttctacacatttcataccttgagcatcgataacaacaacgaaatgctgatatgtaaaaactcatgatgctttggcccctcggaggtaaacaaaccagggcgccagacatcatgatggtacatcatgtacaacaccaaccaaagttcctgcaagttatcggaaatactcctgaacctgaagtgcttttacaggaagcgaggcctcgcccttgttggttccgcagtgagttgtcaagctaacttcgacttcatgggggcgactatgctatcgttcaatgggcttatacaggacgacggttacatatttggactcaaacctgtgggttagaccaagggccaccagcggatgggcaccccagcctttctcgatgaagaggtggttgaggactatgtgctggggccgtgcacaactttcatcagagttctgtgagttgagaacacccagatggagttgggatggaagaaccggtggctcttttgagaaatccttttcctcgggtgcctggatactgtagctagaatctggggatgggggaggctcaaattctgccacactctcaacactttcagggacaaaatcatgaacatcaagaaggttaacagcgttgcccatgatatcagtttcacaaggaagatcaggaagacatttcctttctccatctacaacaaatctgtaacgataaactcccgatggaagtatcaacaggagcgaatgatctttcccagatttctgcatgggtttccttgatttccagttatcccaggatccttcaacagatacattttttcctccaagcgtccacacgatcaagacaggaatttccttttgaggggggccatcaaattcctcttcttgttcattcattaagatccggttgaacactggagttacatcagctgctctttggagtggaggcacaggtgtcacagtgaagcctcccttttgagctgcacagttcaactgtcttggcaaggagctaatctcgaacgatgtaccacataggaataaccaatcaaagtttgcaagcatgatagtgaattgaagatgatttttttgctggggcacgaacatccgcggcgagagggagcggccggggctcccgggcggcgatccggcgcccccgccgcccccgacgacgcccaccgagcacgcgcgccgcacgtggttgccccctccgccgtacggcgggaagccgcgctccgaggaccggaccgacgagtcctcgacgtccccctccccggccgccgccgcggggtcctcctcccgcccgctcgcgttccccatgcctcccccctcctcctcctcctcctcctgctgctgccccccgccccgcgggcggcgaagacgtcggcgaaatcacgggatgcaccactcggcgtcgcgccaagccgcgccccgcccccgccccgctgccggacgcgtggg

SEQ ID NO: 73387 - DNA, 219 bp, Oryza sativa
  Clone ID: PAT_MRT4530_73673C.1
atggtggaggacccaagcaaagcaggaagcccggtgcccattgcggcggtgcgcagtggagccatagattcaagacgagctccttgccaccagccttactctcctaccctctccaccctccgcgccaccaaccttcctaccatcgacggaaacgagcggactccagcacaatgcgaggcagtgcctggcgatgatggtgatgaagaagaagatgcgtga

SEQ ID NO: 73388 - DNA, 447 bp, Oryza sativa
  Clone ID: PAT_MRT4530_73674C.1
atggaacccatcatcctcagatccagcctccccatcttcttcttcctcctcctccccgtcactttcaaccgcacccttcgcgccgcggcgagttcgaacctggccacctttcgcgactgcacgcttgcgtttcttcgaagtgccgacttcgtcatccctggccctggagggaccacctatcatcttcgacgcctctatttcggcgtcctccaaggttcgggctgtgaaaaagcaaaacaaaaacaactgtttagcctaaagggcatttccataaaggaaatatacggctcggagcaaaagcaaaaactcactttcgaccccagtggggagaacaaggcggggaagcccgagaacctcttcgccctcgttcacgaacacatcccagacacgagcgagaagggagatccgaaggaggcaaaactcctcacaaaggtcttgggtgcttag

SEQ ID NO: 73389 - DNA, 262 bp, Oryza sativa
  Clone ID: PAT_MRT4530_73675C.1
ggcaccagggcaatgccatggtccctcacatgtcgggtacttcgctcgacgcccagaagcgctacgctgatggtaccaaggccatcctggagagctaccttagcggcaagcttgactacaggcctcaggaccttatcgtccacgctggtggctacgccacgaaggcttatggcgagcgtgccaagatcaccaaggcatagaaatgtatatataatgaatgaatgaattttatattttctgcaccaaaaaaaaaaaaaaaaaa

SEQ ID NO: 73390 - DNA, 1473 bp, Oryza sativa
  Clone ID: PAT_MRT4530_73676C.1
atgtcgccgccgacgaacggcgccatctcgctcgcgttcccgcccatggggccgctgccggcggacgcgctgatctacccgttcgacggcctctcctacgacgacttcgtcctccctgtcgccgccgcaccgcagcatccgctccccgtcgccgtcgccgaccccgcgcccctcctcctcctgccgccgccgtcctcctgcacctgcaacggcgccagcagcggcatgggcgccgttgcgccgcgcacgttggctctgggcgccaccaccgacggcagcgtgatgacccccaccagctggggcagcgacggcggcggcggcggctcctcctccgcgcgggccgtgcgctcgccgtcgccggtgctgccgctggtgcagggcaccggccagaggacctcctgctaccgcggcgtgaccaggcacaggtggacggggcgatacgaggcgcacctgtgggacaacacgtgccggcgagaaggccagaagcgcaagggccgccaagttacgactccagtagagttgtttctactgtccgtccttgttgattggcatttggcaacaaacttttgtactttactcgatacgcttgcagagttgcacagtgcagtggttccttttttttttttaagaaaggactaccagtggttccatgatagtgatactatgacatgctgcttctttgcattcagtggctatgacatagaagataaggctgctagggcatatgaccttgctgctctgaaatattggggtgctaatgctaccactaacttccctaaagaaagttacgtgaaagagattgaggagatgcaaaagatgagcaagcaggagcttgtagcctcactaaggaggaagagcagtggcttttctagaggtgcatcgatctacagaggtgtaacaaggcaccaccaacatggccgctggcaggcaagaattggtcgtgttgcaggcaacaaggacttgtatctcggcacctttgcgaccgaagaagaagcagcggaggcgtatgacgttgcagcgctgaagttcaggggcgccaacgccgtcaccaacttcgagccaagccggtacaacctggaagcgatctctcagagcgacctcccgatcagcgtgtccgggaggcggcacaacagcagcagcaacagcaacaatccagcaccagaagcaggaggccaaatcactctgatgagcagcccgccgatctcccagcagtcgagcagcgcgccaccgtatctcatccacaacctcctgcagttccagccatgtggtcccccatacgcaccaccaccaccaccaccaccaccaccaccaccaccacaggctcttccgctgccaggatcgtacaactttgcagagccagtaggcttctactggccctacggcgatggggaggagcagaaggttcagctcaacagcaacatggttggaatggctagtggtggctttcttcatctggccaatgctgccaactga

SEQ ID NO: 73391 - DNA, 402 bp, Oryza sativa
  Clone ID: PAT_MRT4530_73677C.1
aaaaaaaaagggccttggggccccccttttaaaacaaaaacaaaggggtcttggggggggaaaccccccccccggcaagggggggggaaaatttttgggggggaaacagttttcccggggggggggcccggggaaccaaaatttcccatatcaggcagaggcaaagggggccctcaacaagggaaagaatccccttagggttcctcccccccccctgggggaacaggaaacaaaaaacccgcttacccccaaacaaaaggttctatgggggacgggagcaacattaaaaaacttttggggaccccaaaaagcgggaaatcgacccaacatttttgggggacgggaaaaacccgaacccggggatttcccccttcgttttcgctggagttgggtgggcggggg

SEQ ID NO: 73392 - DNA, 306 bp, Oryza sativa
  Clone ID: PAT_MRT4530_73678C.1
atggggagcttgtgccgcgctccacaactccttggcaaggtggccacgaacaccgcagtcgaagcaccttcctctgtgatgcttgctagcactcgagctcatgctgctcgcgtcgtcgtcatccttgtcatggccgccgctacggccagcacccttctcgctattgacacggcgtgcgtcaccgccgcgcgccctctccttgctgttgtgccgacaccaacgcgcctcccactactcctcggtgaggagcagccactcaacaccatgcgcaacttcttcaacgtcggcatcctccgccatgcgtag

SEQ ID NO: 73393 - DNA, 243 bp, Oryza sativa
  Clone ID: PAT_MRT4530_73679C.1
atggtgaagatagccaagcacttatgccgccacggcctcggcatcattctcacggtgatcgacccaccggacaatgacgccacttcggtgtttggtcaacgcaatgctcgccaaccccttgaggtcctctgctcgccacccaccatcgatgccctcttgatcgatatgttctgtatggacacactcgacattggaaccaagcccaccatcccaacctacttgttcttcgcctctgtggcctga

SEQ ID NO: 73394 - DNA, 156 bp, Oryza sativa
  Clone ID: PAT_MRT4530_7367C.1
atggatgagacgatacccgcagcggagacatcggatgagtccgtgctcacggaggagacctcggaggagtcagtgctcgtggaggagttggtgctcgtggaggagacgctcgagatcctcgaagccttcttccaccagttcaacttcgacctttga

SEQ ID NO: 73395 - DNA, 802 bp, Oryza sativa
  Clone ID: PAT_MRT4530_73680C.1
atgatgaatgaaatatttgaaacaagtgacttctgcaatgctctgcaaaggagggagcaagatattgtgaatgcaatggatcttcttgagttcacaaaggcagaacttgatgttttgagagaagattgtggatggaaagaatttcttggaaaggtcacttctttttgtgtgaagcacaaagttaaagttgttgacatggatgggaagcaacttagatgcatggcatcatttagcccagccaaatccttctctgcttttaatgttgacaacttagttaagcttgccaagttctatcctagtgattttgatgttgaagaaatgaaccaactcccctttcaactgaaccgctatattagtgatgtggttggttcaagctctgctcaaggcgataaaggtactgctggtgaaccaggtgacaaaggtagtggttttcaggaggtcatggttgaagatcttggtccagatggcagtggattacaaccacaattttacaacttccaagatcggattgactatgttgtgcaacatgctttgatcaatcaatcaggagtcttagtcaatactttaaccaacatggtgaagacagtggttgatggcacaattgctgagcatgaagttacaggaccagtgtatttgccagagaagccgatgaaggttgatgttaatcctttcccggtgaacatggagaggtattttgaagaagatgatggtggttttgatcctcattgggactgtgaattttttagattttgctggaacgaaggtatgaggctgccatctattgaggattgccctggatgcg

SEQ ID NO: 73396 - DNA, 758 bp, Oryza sativa
  Clone ID: PAT_MRT4530_73681C.1
gacgagggaaccaaccaaccctaccttggctttgccggcgggcggcggcgatggcgcccgcggcggcgatggcgtccgcgacggaggcggaggctgaggagagggacaaacccatcgtcgtccgtgtcaagcgcaagccctcccagacccgccccgacgctttctggctagagatcaatgagaggccggtgaagaaggctatgctcgatttctccagcctttcagtctccgagccatcctctgctcctaataaagcttcagaggaaccacgaattaagaaacttctggtacagcacattgagacagtacaccattctgaggcagttcaagatgttttgcactctcttctgcattctgacttggatgccaaagagataaagagcaagacaaaggaatggaacaacagaactaatcaagataaaaaacaagaccagctacgatcagcagccagacagaggcatgaggaccttggaagaaatgctcgctttgcacaaatttggaggagtcggaaaggagacaggaatgaagttgatgaatcactacgagaaatatgccatctttatgatgctgtccaagattacctcttttgagagaagcatccagcagaaccaaggattacctcttttgaagagggtgcaattttatgcaattttcttccacttatacgggaacatttgccatcagctgctgaagaaattgaatcagatattatttcgctggcacaatcggaagattcagaagtttatgacatatatact

SEQ ID NO: 73397 - DNA, 1641 bp, Oryza sativa
  Clone ID: PAT_MRT4530_73682C.1
atgcctgcacgccagctgtcgccagccctccaggcttacacacgcgccgtcgccgtgctagctcagccgcctgcatgcgcgcgcctcgccgtcgccggtctcgttgcccagccgcctgtgcatgcgcgcctcgcagtcgccggtcgcggcgtcgccccgccgcctgagaatgagagtgctagtggggaaagcagtccaagcacagtaccgcctgatgtagagaccgatgatattggaggagggccaaatgatgagtcatcaagtgatgaagacaataatggtggtgcatatgacataaagcatgatcctggattgaggattcctatatcacaatatgatgtcaatgaccaagattcagttagaagggagtatattgcattgggcccttgtcaaccaaagatgaagaaggaggattttccgcagcatgagtgtggagaggaacttcatgatgagtgttttgcaattcttgctgatgagcctagtgatgcctaccaacaagaacaattggctctttgcttgcggtttgtcaataagacggggcaactagttgaatggtttcttggtcttgtccatgttgaagatactacatcattgactcttaaggaggcaattaagtccttgcttattaagtgccatctacctttatccaagcacaaagttaaagttgttgacaaggatgggaattataagcctatacaaaggtcgaagaagttcttcaaaaatgctattaattaccatcgattccatgccgatatgtttttgggtgtcattgataggcaacttcaagagctcaataacaaatttgatgaggtaaacccagagttacttagatgcatgtcatcatttagcccagctaaatccttctctgattttaatgttgacaacttagttaagcttgccaagttctatcctaatgattttgatgttgaagaaatgaaccaactcacctttcaactgaaccgctatattagtgatgtgagtaaggatgagaatttcacaaatttgatgagtttggcagacctgtctatgatgcttgtgaaaacaaacaaggtttctcgctatgaccttgtttacaaacttctgaaatttgtgttagttctccctgttgcaactgctagtgttgagagggttttctcttcaatgaactatatcaaaaacaagttaagaagcaagatggggcaagaatatttgaatgattgcttggttatattcattgaaagatatttcttcttgcaagttaagaatgaagacatcatcaatcattttcaaaatatcaagaaacggaaagttcttctctatattcgatggcggaggtacagcgacgatgacgactcttacccttcccgtctccccatcaacctcgatgacagggctaggcacggagacagtggcgacggccgtccttctttcttctcctctgccttaaagcaagaggagagcgccagaggatggggcgtcgtggtagaggaaaggggtgccagcgcggttggggaggtggcaagtgtggtcgtgcccggctggttcgggcacgacacgagcgcagtggacgacgatggcaatgagctcggaacaaccgtatctggcgactctaagcttgcccatttgtgtgattttttcctctcttttgccccttttttctag

SEQ ID NO: 73398 - DNA, 1767 bp, Oryza sativa
  Clone ID: PAT_MRT4530_73683C.1
atgaagaagggggattttccgcagcatgagtgtggagatagcactaacgatcatgggggagatgctctttgttcaatggaggttttagaaattggaacattaaaagtagatttagtaaaccatgctggtgctgtcaatagtgctcattgtgaagctgaagagagatacaatttgttcatgcaacctaagacatcaattcgtgagtcctttgcatcaaactctgcagagtttaaggatcaatacttagctcgcttgacatggtcacttaagtgcataagatatcttctgcggcaggagttggcttttcgtggtcatgttgagtcaaaggattctaacaacaaaggaaaatttagggaacttgtgcaatggctagctgggaactttgaagaagttaataaggtggttctaggaaatgctccaactggttgtcaaatgatagaccacaagattcagaaacaactcattggttcttgtgctcacaaaacaactaaacttgtcatagaggaacttcatgatgagtgttttgcaattcttgctgatgggtctagtgatgcctaccaacaagaacaattggctctttgcttgcggtttgtcaatacgacggggcaaccagttgaacaaccagttgaacggtttcttggtcttgttcatgttgaatatactacatcattgactcttaaggaggcaattaagtctttgcttattaagtaccaactacccttatccaaggtacatggacaaggatatgatggtgctagtaacatgaagggtcatattaatggtttgaagaaattaattgtggatgagtccccctcagcttactatgtacattgttttgcccatcaacttcaactaacccttgtagctgttgctaaggagaatattgattgtgcatggttctttgggcaacttgcatatttgttgaatgtccttgggatgtcttgtaaaaagatctgcatgcttcgtatagctcaagctgagtatatgattgaagcattgaagttaggtgaaattgagagtggccaaggtctgaatcaagagatgggcttagcaaggccaggtgatacacgttggggatctcactacaagacaataatgcatgtcatgcttctatatccttcaatcaagaaagttctattcaaggttgggaaagagtgtaatggggcagaggctataggagctcaaactatgctacaagtatttcagtcatttgagtttgttttcttgttgcacatgatgaatgaaatatttggatacacaagtgacttctgcaatgctctgctaaggagggagcaagatattgtgaatgcaatggatcttcttgagttcacaaaggcagaacttgatgttttgagagaagattgtggatgtaaagaatttcttggaaaggtcacttctttttgtgtgaagcacaaagttaaagttgttgacatggatgggaagtataagcctatacaaagatcgaggaaattcttcaaagatgctgttaattaccatcgattccatgctgatatgtttttgggtgtcattgataggcaacttcaagagctcaataacagatttgatgaggtaaacacggaattacttagatgcatggcatcatttagcccagccaaatccttctctgcttttaatgttgacaacttagttaagcttgccaagttctatcctagtgattttgatgttgaagaaatgaaccaactcccctttcaactgaaccgctatatattagtgatgtgggtaaggatgagaatttcacaaatttga

SEQ ID NO: 73399 - DNA, 213 bp, Oryza sativa
  unsure (1)..(213): unsure at all n locations
  Clone ID: PAT_MRT4530_73684C.1
gataatgctggtatcgataagttaagaggaaaagatacaattagtgctactactaatctgctggggcaaatgacctaaaacacatgcaacaatgggagccgaaagttaacattncaagtggacaggcaagggaagaaaacctaccctttaaagtataatacacatgagccatcaacgagccccgccaccctacatgtgccatcaaccagttct

SEQ ID NO: 73400 - DNA, 582 bp, Oryza sativa
  Clone ID: PAT_MRT4530_73685C.1
ctagctcagccgcctgcatgcgcgcgcctcgccgtcgccggtctcgttgcccagccgcctgtgcatgcgcgcctcgcagtcgccggtcgcggcgtcgccccgccggtcgcccacaggccacagccccctcgccggctcgctgcctccgcgcctcgcgcctagccagcgcggcggcgccccgcgcccggcggccgccggcggcgccactccatctccccctgtccctcccatcttgtggtgcagcgatggcggaggtacagcgacgatgacgactcttacccttcccgtctccccatcaacctcgatgacagggctaggcacggagacagtggcgacggccgtccttctttcttctcctctgccttaaagcaagaggagagcgccagaggatggggcgtcgtggtagaggaaaggggtgccagcgcggttggggaggtggcaagtgtggtcgtgcccggctggttcgggcacgacacgagcgcagtggacgacgatggcaatgagctcggaacaaccgtatctggcgactctaagcttgcccatttgtgtgattttttcctctcttttgccccttttttctag

SEQ ID NO: 73401 - DNA, 243 bp, Oryza sativa
  unsure (1)..(243): unsure at all n locations
  Clone ID: PAT_MRT4530_73686C.1
gacccangcggccggcacagcatattgagaaagttatgcgcgcacttggtgactatctcagtgccaaggttcatgcttgtgttggtggtacgggtgattctgaggaccaaaggattcttgctagtatagctcatgtttttcttggaacacctgtgcgtgtgtctgacatgctgcgtgcgcagtccctacacacggattacatctagatgcttggccttgatgaacctgaggaaatggtttctg

SEQ ID NO: 73402 - DNA, 687 bp, Oryza sativa
  Clone ID: PAT_MRT4530_73687C.1
atgcaagataggaggtttggcggccgacgacgtgggggaggcggcagcagcgaggtgggagaaggggagggcgtcggtggcaagagcactggcggggagagtgaggacaatggggatgcaccgctgccatcgtccatgggcgcggatccccttgtgtatgccatcgaggtaggctactgccgctgccaccataggctagttggcgaggaggaggatgggaggggtcctcaggcaatcgtgtggctggccgccgtcggccaccatgctcctctccccaccttccaccaccgcactcaccggtgcaggcgctggctccagatccacgagctccctgtgggacgaagatggtgatgatgtgctcccaccgttctctttgctgtcccccgtgctcccgccgccgtcgctttcccctcctcccacgttgccggccgctggacctctttcccacctgccggcgaaggccgaggcccagctgagccggccacccgagccctcctctctcccggggtcgccgacaggtggggcccacctgtcgggtcctcccccaacctccagccgccgccaccgcgccgccctagtgccgtcgccctcctctccgccgccgccgccgccgccgctccggtcgccgctagccgccgtgccaagccacgccgttgacgccgtcgcgttcgccgtcgtgcgggccat

SEQ ID NO: 73403 - DNA, 1120 bp, Oryza sativa
  Clone ID: PAT_MRT4530_73688C.1
atgaatgatatctttattttcaatgttgtaattagttccctaggtttgcttgaaatccctttaaaagggagaaggttcacatggagtaatatgcaacaagatcctttactggaaagactgtattgggtatttacatctgcatcttggactttatctttcgccaacacaactgtcctccctttgaccaggaatatctctgatcatgttccatgtgtggtcaagattgacaaaaatccttaagtccccaatcttcagatttgaaaatttctgggtggaagctgaaggtttctttgatattgtccagcaagtttgaatgttggatcctggctttgatgctcctgcaaaatgcaattccttcaaacttaaaattctcaggaagaaactgatcctttggagtaagaacttgtccagactcatgcttctcttgacaaattgtaataaagtcgttgattttcttgatcttctagaggaagaaagatgcctttctttacttgaatagaatttcggggaggcagttaagcaccacatcttaaaacttctgggagaaagttggtattcaggaaaatttattggaaaaaaagatgtactaatataaatggatgatgctgggagaagaaaacaccaaattctttcaatccattgccacaaaaagatacaaaataaacacagtttctcaagttatggatcaaaatggtcagatagtttatttgcatgatcaaaaagcaagtcttttctatcaaagtttcgaaaacagtatgggtatctcttgctccccaagaatggtctttgatttgaatgatctctttcttcctagggcagacttggaatacttgactgatatgttttccactcaagagattgatagtctcataactttaatcccagctgataagtaccaggcccagatggtttcaatggttttttcatgacaaaatgctggcacatcattgctcattttcatgcagaagctacagacttgcaggttctcaataattcttacatcactctggtgccaaagaaacctttctccagagacagttaatgatttcaggccaatttctctaatgggttttagtcttaagtttcttaccaagttgatggctgatagattacaaggtgt

SEQ ID NO: 73404 - DNA, 1161 bp, Oryza sativa
  Clone ID: PAT_MRT4530_73689C.1
tatactaatttaaaactttcattagaatataaactcagcaaatattcatccatagcccccgaactgccagttaattaaaatagttacgcattggtcccagctgcctttccatcgtgaaccgtacaatctcgctatagtatcatccaaaacaaaacaagaagtcggaggaagagagggacgatcacctttcagtctgtccgtccattctattacagtcgatctactacacatgaaaagcaacactacacatatgcatcacagctgaccagatcctcaaatcactcctccctacccaaaccctcatctctcggtttccgtcttctcagaaatgttccgattgggctcactcattgcagcaccagcaccatcactccctcttgatatagcaccatcattactttcagaagtagctgctgcttcttattgatgaactggcacaaagaaaatgtcacaacctttttgctgtgatggaggaggttcttgagtattccaagcagcagctgcagatgcagctagttgttcttcaattactttcatgagttcttcgctggtgtaaggtgcagcctcaggcttatcatccgagccagcaacaacccaggggtccaaacactctgctagtcctttgagaccaaagactaacagagcaaccactccaataaccagagcttcgggagctccaactccaaataaagaagcgtaaacaccagttccacgacttgttcttttgctctgacggcggcggcggagatggcggccggagacgaaggatagaccgagcgcgcagtagggctgagcgagcgtgagcctcctcctcctccacctctgtgaggaaagggaaggggaaggaggagtgcacgtggcgacgcacggaggaggtcggagtagcaggccggcgatggccatcgccggcggcgggcttcgaattcgattcgattcgtagggtatataccgctcactcgcaagtcgcaccgcaccaccacaacacaagaagagggaggcgaacgatagagggagatattgcggcggcgcccgacaacggggacggcgtaagggggaggcggaggtggcggcgcgaggggtggcagaggcggcggcgctcggtggcggcgccggagagggagaggccgcgggcccggcgagccggcctgcagcccggggatc

SEQ ID NO: 73405 - DNA, 476 bp, Oryza sativa
  Clone ID: PAT_MRT4530_7368C.1
ggaggggctgtgcgcggcgcctccaccaactcctccgcggtacgccaccgacgatgccaacgccgctcccctccgccggatctaggaggggagggcaagaaggggagggagccagagagaaagggaggggccgcgcgcacggcgcctcctccgctgatggtgtgcatgcgccacctcattcgccaccgtcgccgtgccgccacctacgcctctcccctccgccggatctaggagtggagggaaggaaggagagggagccggagggagaggaaggggccgcgcgagcggcacctcctccgccgacggcgcgcgtgcgccgcctcctccacctccggcgccgcctccgttcggtggtggacggcgccgaagccatttctagtagagggagagccggaggagaagaaaaaaaagggagggagagaagtggaggaaaaagtgagggagaggggaggcacggaactggaaatcaaatttaa

SEQ ID NO: 73406 - DNA, 3585 bp, Oryza sativa
  Clone ID: PAT_MRT4530_73690C.1
ctaatgtggcggttgctcacaagacccttgaaatgatagccaggaaagcatgtatgatagcttgttagatacaagttttttgtagtaatcagggtaatcagtatctgttgtcgccttgtataccagactatcttccatatcctccatctccctcgacaggcgagcctcaccagcaacttgtgcatatttggaaacttcgaggaacatttccctcacgagaagtaccaccattttttcattgtaattactaacaattttatccatacgctctggattggcctccaccttgtccatctccatcacgagagtgatctccattttctcaatcgtcaatgcgtagagagcattgccatttgctctttggctttcagaatcagtgaggcacgtcagcatagcactgcgtgccataaggtttttatagtacacgggaacaatgatctgcctacatatcatcgtcaccatttccttcccgaggcgaatgttcatcttctccatctccattgccaaacggacctggccgtgagctcgagcatggttggaacaactcttgcacatgttacttacatgttgttccaccagttgtttattgttagtggaaccgtttatcagcccagaaaggttggcctccatgttctctatcaccaatgtgagcttgtgcctcatgccggcatatcgagtactgccaccggaaccttcaggagataataccctcacaagacgatccaccagctttatatagtaattgggatcaaatatctccctcagcagattggcttccatctcctccaactctttggtgaggctctcctccatcaaagtgcaaagtggtgtatccaggatgttcaaggtggacatttgagattgcaggttgccatttatcttctccatcactctcaaactgatgtcctgcatcgtctccatctccctggagaggcgtcccacaagtttctgatcatagttggggtcagtgattctagtgatgatttcgacggcagcgacacgggcaatgctagccactacatcgtcattattttctccatcaattccattccagataacctctacttgattgttgagtttctcatccaccgtgtttggtgttggaagacacctgacatgaactgtgaacaacttgaagatattgtcatggtcgtcctcacggacattatccatgtagaacaggaagttcttcactgaagtggcatgaagggcaccgaccatgatggtagacttcctggcattgtcgatcataaatgactcaaattggccacactcaatggtagacaatgctacaccaggagatcttgagctgctgcatatcatgtctacctctgtacccaggacaatgatggaggtaattttgttcatgcaggatatgaaggcctctgtgatcaagttgcggtcatcgttaagcaagtcatacatgccattggatctgcttgctatgttgtacatggccctgacattgtgcattccattgaagccgaaggtgtggatattgtagttggtacttagtgcttccatgcagatggaattgtcatggttgtcagaaatgacaatgatggctcccatacgatccttctcttcttgtggccgattatctagcatcccagccttccttagaaagattgcatgctgaagattttcgtgattgctgcatgttaagtagtcacttatagatttttgaacgggctgaatggcattagtcaacaatactttcgacagcttgcagctgatgccatctgcagcagctggcgctgatcgtgcagttgtggagtttgcgtgttggcttgcagggaatgtcggagtgggaagggacgagttgacggagctgatatggatgcaattccttgcgaacttcacggtgttcttgagcttctccctccaggtctgcgtggcatgtttagtcgatttcctggccacaaggtttatgaaggactgtatcttggtaaaggtttgttccctcccttgatccgacatttccaagagggatgctccatgcttggttagagaggattggacgggtatgattgcaagacggtccttgtgtttgagcttatccaagatgacacccgtggcctcgctaagaatctgcagcctttcccgagctttcccctccatctctatggcttgacagcctacgtcgagtatgacaaccaagtcgacaaatggggtcttctgcttggccaacccggtttctggcaccttgacacatgccagcaccgcgacaccatgtttttgcctgttctgatctgccaaatttgtgccacccagccgctttgcatttatttccagctgcactggaacatcatcggttgcttgcctgtcaatgaatagcggcggcagaggcaactgccaccgttggtgtgacaaccacgacagcatgtactccttccacaagtagtcgttgtacaatcgtatctccatctcttgcatctccgcagcaagcctggagatggcaatggccttccagtccactttggcatacaacttgttgctcctggtcatcgtccaccatccacgcagctcgtctgcggccgcatggcgctgctcccaatcctgattatcatttgcagagatacgatccacaactttgatagcctcgagccgcaccatctctgccatcgtatcctcgtggatggccacaacaacgttttcagccaatgatgattgcagctggttgttgttctggacattttcaactttcaacagattgggcacctgatcaagaaagagtgtggcttggcccttattgcgaatgttgacgatgtagttggtggttgccacactattagcagctgggtttgggtgagcattggcccaaatggtgatggccttcttgtcagaggagatgaagtagctaaccagaggggcttgaatggaggacagaaccacatttttctcctcgcaaatgagcttcacctctatcggcatagaggaggtgatcctcctgatggtggtgcggaaggcatcagttgtgttgccatgctcgtcatccaagatggcataggtgcagtcgcagctactggcaacgatgctgtgcatggtcctcgtgttgcgagagttatgaaagctgaaggcgtggaccgagggaaatctccagggttggagaagggattcgacgggggccacgccatcatcgcttgtgttggagatgacaatgatgtgtccagcacgattctccttatcatcttgcccacggccaaacaagatcatcgtagaaacagcggaggccgcttccctgctctcggcggcagacaccagcgctaacgacggttgaacggggagaatcgctaggcggtcatcgtccccaagcgtctcggcgacaatgctcacagcctctacgagcagcttcatgcagttcttgggtaccttccagtcactgcgcacatggaggacgacgacgagatccacgggcttgcgttgcactgaagatattccggatggcaccgtgatgctcaccataacggggatgtcgtcgtcgaccttcgcgtaggctctcgccggtggtagcttgcatttcgagaggaagaaatgaattgactgagctgcttcatgttcagtacaacttgtatgctgattcat

SEQ ID NO: 73407 - DNA, 327 bp, Oryza sativa
  Clone ID: PAT_MRT4530_73691C.1
tcagaagaatgactgggccaagaggccgatctgaccggggggcattggagaagagtgggaaaattgagagtagcacgagagttttcacttcgactaaaaatatcaagaatcattgcttggctcttgaaaaacaaccacagccgacgtggatacctactggcttatctcgctctcaaaagaggaggatacaacgtcttcgggccatagatcaaaaagaaaataaggccgaagatgtagagaacaaaacatgtaataatttagaacctcaaacagcacctaagcaaatgtggagacctaaagaagtaaaagttaagagaccggtgattt

SEQ ID NO: 73408 - DNA, 465 bp, Oryza sativa
  Clone ID: PAT_MRT4530_73692C.1
attcggcacgaggaacaagtccaactgaccttgattgacactttcctattgctctcctccagatgttttcaagcttaagacgcctacagtgcctctcagaacagttggaggagagcaataggaaagtgtcaatcaaggtcagccaaaaatttcctgaggaaagaagtttcctatcatcagtccatgttactgaagagctggctattgcggaagttggatttagccatccagatcacatatcaagagcagaaaaaatgcaaagcctaatagaaagcacactgcagaatgttctcgggtgcaacgtggaggttaagttcaaacttgttccacggccagtgagaaaagatgcaaggtcaaagagacagtcattcagtctcctcagctgctcaggccggaagcaagaactgtcagattcagctgtgaccgacgaagatgaaactgtgaggcatggagcaagagaaacac

SEQ ID NO: 73409 - DNA, 401 bp, Oryza sativa
  Clone ID: PAT_MRT4530_73693C.1
ccgagtcagttcaacggcccacaagccgagaagccgagcgtggcccacattcgcggcgatggcccgatgcagttccgcggcccattgggcagagtaatcagcagcggcggcccgacgcggggcaaatctgagacgtcgtgcgcgtgcggtgacgaccgtcgagcggctcctgcttcgccggctggggggcacacccgagggcggcgcgcaaacggcaatgagcgccgagcggcccggacctcatcggtggcgggcgtggggggaggcaccaagcctactcttgccgtctctggcaagggacggtggaggggtgctctaggatagtgtgcgcacgaggaacccgacgcgactgcgaggaggtgaaggtgcggtggtgccgctccggtgagcttaggggcttc

SEQ ID NO: 73410 - DNA, 2429 bp, Oryza sativa
  Clone ID: PAT_MRT4530_73694C.1
gaatcaattgagtgggcttagatcaaaacccgattccattaaggattactttgcaacaactaccaaatcacaagctacaccatacacgccacgcattctggttacatgcttcaaaaactcttccaactcgatcagaagagatcagcacccggagttatttcccatctgcactaccataatcccccctaattaaacacaacacgcgaacaaattaacagcccatagacttgttttttaccaccttcttcttcttcttcttcttcttcttcttcttcttcttcttcttcttcttcttggtctacgcttctatcttaagattcttaattttaattagcctcctccgagaagcaccttgttctactgggcttctgctggtcagagagtacttctgcttctgctggatctactggtagcaaagcacatctctgctcttgtcagggctgtgttttgtgcggcgccgccgcgacggcctcggcgacgctgaagaacacgcggtctgagccgaacgtcttgccgaccaccgagttgtacagcctctcggtcaccgatccaaccgggttggccagcacaagctcgatgtttcttttttccagcaccttcttcagctctgcaagtgcatcgaggccactcgtgtcgatcgctgcaacagcactcatgtcgaggatgatgcatctgacagggcactggttgcacttggcggcccgctcgtcttcctcccggagaaacctcatgatcctctcgccgaggtacatggagttggcgaagtagatggcggactcgacgccgacgacgaggaaggacggcacacgcatggcctccctgtactgcgccatgctccggtagctcgccgtgccggggacgacgcccttgaccaccatgtttgggcgggtgacctggaggaggatcttgaagagggagatgccgacggcgatggcgaggcccatctggacggagacgaggaggacgccgaggaaggcggccatgcaggcgaggaagtcgagcttgtcgaccttccacagcctggcggcgccccggacgtcgatgaggccgatcacggcggtgatgatgatcgccgagaggatcacgttgggggtgtagtggaacagcggcatcaggaacagcagcgtcaccagcaccgccgacgccatcacgatgttcgacaccgccgtcttgcaccccgcgctgtagttcaccgccgacctcgagaacgatcctgtggtgacatagcaggaggcacatgagccagccatgttcatgacaccaatggccatcatctccttgtttccatcaacctggtagttgttgatggatgcaaatgtcctgcctactgctatcccttcagtgagagatagtatgccagtcataattcctgtgtttaaggccagtcctacgtaggagccactgaaggtcagcatattcgctgaaggagggttcaatcccttggggagatcgccaataacactgatgccatgagctttgctgacgaacgagatgatggtagagatgatcactgatgtcagtggagcagctgctgacacccagaaaagctttgggttcctggcgctgatgtggcgtgtggtgaggaggacggcgaggaaggcgacgcccatgaggatggtctgccacgcccactcgtcgtggtgcttgaagacggagtgcatcacctggacgaaccccatctgcgacgtgaaatggatgatcccgagcaatcccttgagctgctgcagcgacacgatgatcgccgcgccgcccatgaatcccgtcagcgtcgccttcgacaagaaatccacgatgaaccccagccggaggaagccgagggaggcttggaagacgccggcgaagaaggtggaggtgaaggcgagctggaggtagaggatgggctcctggtccggcgacaccgcctgccggagcatcgaccccatcaccagcgacgctatcgacaccggccctacagccagatcccgcgagctacccaacaacgagtagatcagcggcggcacgaagctcgaatatagtccaatgattggaggcaggttggcgagcttggcgtagctgattccgtcggagcggaggaggcggaggctgtagtcggagccccaatggaagatggggaagaagtactgcagcgcgagcaccagccgccgcgcggacgactggttcttgaactggtggagcgggtcgtcggggaagaacacctccgccagccgctgcctcagcgccttcgccgtcgacctcctctccggcaccgacaccttgtgcagctccgccgccgccgtcgtcgtcatcgccggcgcctcgccccgcggcgtcggcggcgcggagaccaccgccggggtcgtcggcgcctgcgccggtggcgcctcgacgtcgtaggagaggctgtccaccttgttgttgacaaccatggcgatcgagtcgagagggaggag

SEQ ID NO: 73411 - DNA, 515 bp, Oryza sativa
  unsure (1)..(515): unsure at all n locations
  Clone ID: PAT_MRT4530_73695C.1
tcttccttcacaccctcattcccatcttaaatggtctacattacaggattttatggtcagaaagatcaactggagctggcactttatattctccgaaactctgtcaggctaaagtcaatgaagataaatccaaagcctataattgctgaatatcttggagaggtgagagaaagtgaaggatttttctttctgggatggctaccaggttgcttttaagtttctctgcacaagaggatcgctataatgttgttgatgttaaggaagttgggcttagtgttattgagagcgcaccagatctctagctaaactggtcccatatgtatccagttcctagcagaaaactcttgccngccaagaaggccagaaagaaaatgcatagacccttgattttattgaatagttagtttatatgaaactttctttactgaatatatgctacgcgtgcctcccaaaattacgtatgtttggaatttgaataaaagtacccaaccaatttggagtgtgttgaaaaaaaa

SEQ ID NO: 73412 - DNA, 144 bp, Oryza sativa
  Clone ID: PAT_MRT4530_73696C.1
gattaatactcctatggaatattcattttactaaaattatcgaaccagaacacaaagaggaatgaatggcatcgagaaaatgtcgccagatcagcatggagatgcttttgggccacgcctcggctaggttgacccccgggcggc

SEQ ID NO: 73413 - DNA, 239 bp, Oryza sativa
  Clone ID: PAT_MRT4530_73697C.1
ggtggtcgtaggtaaaatagttgctacaaagggggggttttttgcagatctgatcgggcacgctcctcctcatccgaagacgacaccgacgtcggagagaggagaagacggacgcacttgatagctggcattttaccaagcaggctgtaaacgagggtcaccatgacaaagctctgggactacttctaagatgcagcgcttgatgacagccaggacgaggacccagacagaaaggtaaa

SEQ ID NO: 73414 - DNA, 945 bp, Oryza sativa
  Clone ID: PAT_MRT4530_73698C.1
atgtccgggggagaagacgtccgcaaggtttctcgccaggacatacagctcgtccagaatcttattgaacgatgtcttcagctttatatgaaccagaaagaagtggttgagaccctatcattccaggcgaaaattgaacctagttttactgagcttgtctggcagaaacttgaggaagagaatcgtgagttctttaaagcatattatgtgagacttatgcttaagaatcaaataatggtcttcaacaagctccttgaggatcagtatcggcttatgtgtaaagagcagccttctggagtaccttctatgcctcctactactaatggctccaacatgggcacatacactactcccagcactgcaatgccagatagcttgctacccaatggaagttccagcggtattgtaaatggcactccatccagtgaccaatttatctatgctggtaaagtcattcatggtcttcctagcagtatggatgcttcatctagtctactggcagcacataactcaactgctgggaggtttaatggagacaatggaacaacaatcaagacagaagcaagctactcgggcaactctgattttggtttctgcaatgagagcgctttcctagaaccttgccagtcaattggggatgcctctggtggatccttcagcagctctgagctgaatggacagccactaggtgatccaattatggacatggattcatcatcttttggtttcttgagccaaattcctcggaatttcagtttttcagatttaactgaagactttagccaaagtgcagaaatattggagaattatggcagatccccttttatcccttctgaaccaaataatttctcagagtctactcctggagaccatgcagaaataggaaatagacggctagataccatatccgagggtgttagttatgaagattttggaagcgattaa

SEQ ID NO: 73415 - DNA, 790 bp, Oryza sativa
  Clone ID: PAT_MRT4530_73699C.1
ctctctctctctttttaaaatacctccggataacgcatggttgaaccctgcggatcaacagagtaaactgcaacaaaccacgcgacccccaaacctctctctctctcctcgcctccgccgtcgccgtcgccgtcctcgactgctcctccggtgtgatccgatcacgcgcggcctctccgcctcccgctcgcccttctccgcttcgcgtgttgtactgttctcccgcggtcccgcccgagcagaggtttgggttggccagcgagggaggttggctagggcagcgggctgatgagagaggcgtcaggcatgtccgggggaggaagacgtccgcaaggtttctcgccaggacatacagctcgtccagaatcttattgaacgatgtcttcagctttatatgaaccagaaagaagtggttgagaccctatcattccaggcgaaaattgaacctagttttactgagcttgtctggcagaaacttgaggaagagaatcgtgagttctttaaagcatattatgtgagacttatggttaagaatcaaataatgggcttcgacaagatttttgctgttcagtattggcttctgtgtaaccaggtcgctcctggagttccttctttgttcagacatgagagtttacaataattcagtattggagaagttggtaaaagctttaaaaaaaacactactaacaaaactaaaataacaaatagcgtgcgtcccaatggaagttccagcggtattgtaaatggcactccatccagtgaccaatttatctatgctggtaaagtcatt

SEQ ID NO: 73416 - DNA, 477 bp, Oryza sativa
  Clone ID: PAT_MRT4530_7369C.1
atggatagcgtcggcttcacggcgacggttcgttccggtcttcgggctgccaaggagaggaggggaatggatcaaagatcacctaaggatgcttcatatgcgaggaattgcgccgaagctaacccgagagcgaggaacggacgacgttggccggcggccggacttgaggaagaaagagaggatctccttttcggcggatcttcagctcgattcccttggcaggccttctcctggaacattggcgacgctcatggcgcagcggctcggtcggagatgcatcggatcatcgggaacggcgaagcgaccgacggcggcgctctggacaccgaggacgccgacgagctcgacgcaagatgttacctagatggaagatggggtatggggaagaatgtggattcaatggtgtgtctaaccaggtggtttgctgaagattggatgataaatgggtccaagttgatgtatcctaggtgtatgtga

SEQ ID NO: 73417 - DNA, 254 bp, Oryza sativa
  unsure (1)..(254): unsure at all n locations
  Clone ID: PAT_MRT4530_736C.1
agctgggagctgcgtctgcttcctgtgaatagccactgcagagatacgctgcnccagttgaaanancctgattnggaanctgcttcctgactgttttanagtgtattatcagatgtcnccctnantttctgttgtcccatcgactgccatgatgatgtnaaacaaatccaggatttgatgtgtnanatttacctgttctaatggatgttgatcttanccnngaaaaaaaaaaaaaaaaaaaaaaaaaaaaaaaa

SEQ ID NO: 73418 - DNA, 282 bp, Oryza sativa
  Clone ID: PAT_MRT4530_73700C.1
atgtcttccaccagcaccggcgatactggaacaggagggaatgacggcactactggaaaaggagggaactatggcactggaggaggcggaaccgagaatgtcaacatcaacggaggcaataccaatgcctcatcatctactagagcgttctctggtatgcatgttatcctccgcacctgcacttggagaagctatggggacctgttgaagaccaaatttggtagatcatgcatcaaattcgaagctgagatcgaagtggatttggtggaggaaacagagtaa

SEQ ID NO: 73419 - DNA, 2431 bp, Oryza sativa
  Clone ID: PAT_MRT4530_73701C.1
ccgtccggaaaaaaccggaaaaaagaaaagaaaaagaaaaaaaaaactcgagctcacgcgcacacgcacgcgacgcgacgcgaccccgaatcggaggcgaggccgccgactccgagcggatcgggccgaggtcgacggcatgggcggcggaggaggcgaggccgggggcggcgacggaggggagtcctctcctgctgcggctgcggcggcggcggtggcgggggccgcggcgctgcacatccggtgcgcgaacgggtccaagttcaccgtgcgggccgacctcgacgccacggtgggggcgttcaaggaggtggtggcggggagctgcgacgtgccggcggcgcagcagcgcctgatctacaagggccggatcctcaaggacgagcaaaccctagaaagctatggtgttgaaacagatcataccattcatatggtgcgtggcgctggtcccccagccggatcagctgcacctgctgcagccagcccccaagcttcagctgctcctagcagcggcccaacagatggtcttggaagtttgtttcctggccttggtggtacaggaactgctggtaccaggccatctggtctttttgggtctggatttccagaattggatcaaatgcagcagcagttaagccaaaaccccaacttaatgagggaaataatgaatatgccaatgatgcagaatctcatgaataaccctgatttaattcgtaacatgatcatgaacaatcctcaaatgcgtgatatcatcgaccggaatccagatcttgctcatgttctcaatgatccaagtgttctccgccagacccttgaagcagccagaaaccctgaaatcatgagggagatgatgcggaacacagacagagcaatgagcaacattgagtcttctcctgaagggtttaatatgctccgacgcatgtatgaaactgtccaggagcctttcctaaatgcgacaacaatgggtggagaaggcaacacagctccaaacccattctcagctcttcttggaaatcagggttctaaccaaccaagggatcctgctacaaatgctccaaatactggctcagagtctacaacaggaacccctgctccaaacactaatccacttccaaatccttggagctccaatgctggaggtgcgcaaggagcaacacgggcaggttctactggcaatgcaagaaccggtgccactgggggccttggagggttggggtcagctgatctgagcagtttatttggtggtcttgccggtaatacaggaactggtgctactggtggtctaggagggttgggttcagcagatttgggaagtttgcttggtggttctcctgattcttcttccttgagccagattttgcaaaaccctgttatgatgcagatgatgcagaatatcatgtctgatccacagtccatgaaccagttgcttaacttcaacccaaatacacgcaacctcatggaatcaaacactcagttgagggaaatgttccaaaatccagaatttattcgccagcttacatccccagaaactatgcagcaattactctcgttccagcagacattattatcacagcttggtcaaaatcaacctaggcaggatggtagccaaggaggcaatgcgacaggcatgcggggaaatgttagcctcgacaccttgatgggcatgcttagtgggcttggtgctggaggtggcataggtgtacccaatacatccaatgttccaccggaagaactgtatgcaacacagctcactcagctccgagagatgggtttcatcgacactgcagagaacatccaggcgctagtcgcaactgctgggaatgtgaatgctgcggtggagcgtcttcttggcaatcttggccagtagctaaagcgtaccagacgctgcccataacgtcaccaactccgctcttttgcaagaggttttttagcccctccaagttcaaacgcagcgtctgtctacagtctcaggagaaaataaaacaaagaaatcccacccccaccattaacttttccatacatggtcgtcatgcctttgtttttaccgtgttgtatttgactatttgggttgatgtacatacatatgaaattatcggatcttaccgcatagaatatgggtctacctttgcaaaaatcggaaaaaaatcctcaagatgtatgttgatgccttcttgtgttttggggtatcttcataaatcataacgcagccttgttcttctaggcataaggtaattaaggtagctggccttgttctagacaaggcagctgccatgctagtgctgtgtcttctctgttggttgctctatccatttgacatttgcactgctctcgggattctattggcaaatacatgataggttactgccccaaaaaaaaaaaaaaaaaaaaaaaaaaaaaaaaaaaaaaaaaaaaaaaaaaaaaaaaaaaaaaa

SEQ ID NO: 73420 - DNA, 4713 bp, Oryza sativa
  Clone ID: PAT_MRT4530_73702C.1
tcatttgaagtactttctgcagaatgaatctgcagcatctgggtactgagctctgatgtagttctccaggcacttcttgtaggagaaatcttttctggatccatctgaggacatgacatataagcacctacttccatggaatacctgatgcctatcgactgttatgtagttgccgttgccagctatcttcttcttcctctctgggtggtacatgagaacatttgtgacaataaacttctcatcatctggaggaagtttaataccgtccctcgattcacggatgatcctctttacattctttgtgattggttcgatttgttcaaatatctgctgctccactggtgtaaaagcacaactcgctacctgcctcatactgcctccacggcgtgatgcctctgatttccacactgctctaccaccacctcgattcctattattgccactgcctcggtgtgatgcctctgatttccacactgctctaccaccaccttgattcctattactgctactgcctccacggtgtggtccctctgatttccacacttctctaccaccaccttgaccgcgattattattcttcctgttccattcacctggtcgggatgatcctgcaatggtgaagttctgtgtgcccgcgctatttgaactataccaacttggtttatcatcttgctgtgttgcatctgagttccagttactcttggtcttcagttgccttctctggaacacctgaccagtaaattctactgcagtagaatttggggaactcttggtgtttccttcatgccaatttggcttcctcggatgtttttggccagtgctgtgcatccctgccctcctaccctcagattccatcaggaattcagcttttggtttgtctgtccaggtgatctgattgttttcttctaaacatactttatcctctggaatgcagtcaacatcatataagcagtagttatgaggaacaattgccttatctttagttgctcctgttgtttctactgcttccaagaagtcatacagaccatacccaccaaggatactcttgcttgatgacatgttctcgtcattccaaaggatttcaaaagctgaaccagttccaatttctgcattattgccccaagagcaggctgatacaacattgcccagctgatcggagtaggccttcgctgctgccttctcaaagcattgtattgatcttgatagtgtagcctccataaatggtgcctgaaccttcagagattgacatgtggccttgtagccagagttgttgaagccatgcaaatcgcctgtgcaggtcatgctacttgcaactgttgtcaggtgctcttggagaactgattttgtaatcattccaacagacttggaaaggtactgaatttcagctaaaaggagaaaggggaataactgaacctgtgtgactttttcgaatgcggaggaaatgccaaacacctgtcggacttgctgtatatcgtacggcatagacctggtggtgtcaatcagatccatcacagggatacatgcattcattgctactccccaggcattgccactctcagcagccgcagcctcttccacagtgatttccagtgccgcctcgcctttctgttctgcaccagagctctggacccaaaatgttgattctggttcaatccttactaggttggcttcctcaactcgaggatcaccttttataacagtgtctaaaattatagggaaaatggcattagtcatgaaatcgataactcgttcagtagattcagatatatttttagtgatgcttccagggaggaaaaactgcaagcaggaaacctgaaattttttatcatcatctgtatgttggtcgcacaaacttgtgcttgaaatgaaagtgactgtcttcaatatttcacgcatcgatcccttcttctttatgttattcctaaaagtctcctggcatttgtgaagaacactgtccataattgtttcaatctgattcaattgcttcttgtcaaggtgaatatggccaacaagatgatgagctgcttgagttgcttgctgttgatacttgatggatatctctgtggtacaatcctctaatttgatcctccttaagcaggctcgaattgtgagtgctctctccatgcattcattttcacaagagcactggttcagatacaaaatgacctttcggtgattggcatcagctttagtgcttgccctagtaagcagtacttccttcatcgagtcccaagaaattatattattctgattaggagccaacactgccttgtaagcagcatttgcaactgcagtggctgccaagataccaacggggtcacctggtgtcacacaatttgatgcatcccttgagccaaactgaagaactaagttaccagacgaagttcttatggatccatcatagcatgctgtgacatctcggagtcttgacatcatgttcttgaaaagactgccaggctccactagccctttagatgcacgcattatcttctccctttcacatatagaatgaagtagagcctcatatgggtttagtccatggtaaattgagctccttacagtaccatattcctctagagggttgcaacaattggtactcccgcaacatctgtgcagagacttagacaggcaatcctccactaacctgctactgtatagtcttccgttgtgttgtagttgaggccccaggaaaccaagctgctccactactttgttcatgttggaatcacttttgggatcaaccaacagtcctatggcagaagaatgggttatgaaatccataattggttccctgtacttatttagctcaagtggattattttgaatagcttccagaattggacttgggacagtgaaatctcccaaatttatgctgaagcaatcaataagcagtgactccattagtaagggctgcagaagattcagaaattctgtggcctcccttggaccctttgtagaaaggatcgatgagatggtggtaccagtagctaaggctccaacagattctctgtcaagatggtctgccagtgttattgcattagatttagtggtctctagaatctgaggaaaggtccagtaaggtccaccaatcagtggcttctgggggtacatccctgatgagaacattgcatttgtaatttggtttgcttccctctcagaatactccctaccacacatgatcttcagagctagtgagaaatcattcttgaactgaaagttcagtttcccattatgggagctcaccagctgcttatccacagtgtatagctctttagcttcagctcttgctgaaagcgaccttgggtagaagatttggacacagtcaccatcaaaatctgctccaagtgggtcacaaatgagtgggttgatctttatggtgtgatcattgtggacttggacatagaaggcctcaactgagtgcttatcagtgcttggtggcctgttgaggaagacaatatccccgtcgaaaacccttctgttgacaatttcgccgaccttcagtatggtgtgtttcttgttcggattgtccttccctgcatccaatgagtacgtgatggaattggcatctgtatatgtcaaacatagtcctttattcatcatgtcttgcaattgagcaatgttgtggtctgtgactttttcttctactgacattctctttgctacttcctcaggcaccccaacaacattgagaccaatgtatggatcaccagtaatcacaccacgggacgagaagcttgagctcttactgatgaacaatgtcttcattttttgcttccattgcattgctgttggttgacttgtgaacgtgtcatctccgtgaccctttgttgttcctccgaggttgatgtagttggcaacatcgacctgaagatcatctgcaacttgatccacttggatgtttgaggaaccaatccttgaaccacgaatctgctgtatcttacgtagtgctttccttaataagtttgtcgatgtgcctgaacagctgaatgtatttccatccaaaacattggaaaccctcaggcagtttggtgggacgcagagatagctcagtataaaaccatcctgaggaatatatcccctaacagaaagccaccttcttgtttcttcagggatcttctttatgatgttttggacctcttctgggagcaaaggacgacaatgagaggtacccctcgtgcaactgccaaactgatcaaggaagctccagaatccctcttccagttctttcttgataggtgctctcaactccaagccacgggcaccattggacttcttgacttctgcaacgcacagcggtgggagctcctgacagtgtgaacatgaagtgaatttgcttcccttaagagtgctcttctttctgttcttgatcttgaggcatctcaggcatattaagttgagtatctggctcagctcggtgacatggctcgggtggaagatgggcatgggcagctcaatgaatctgaagtgaccctcgcattcttcgatggcgttgctgccacacgactgacagctgccgacttgcagaggcaggcccaagtatggattgttcagcagctggctttgatgcgtgatggggatcggcttctcgagctcgttcaccggctgcgccttcagaatttcctcgttgctggtgatactcaggttgatgcgtctgatcgaggcctcggggatcatggcagtagcagcagatgttggatcaggatgaccttccat

SEQ ID NO: 73421 - DNA, 616 bp, Oryza sativa
  Clone ID: PAT_MRT4530_73703C.1
cgctgacaccgtcaagccactgtcgctccaccgccgcacaggccgccgccgcccgccgccttccctcccaccatcacttcgcccccagccttccacatggcgacccctagccctcgccgctgctgctccgcgcgcgccgcccgtcctcgtcccgcagcccaccgccgccgcaactccccgccgccgacgctgccgcagcccgccgccgccggcctccgcccgctcgtcatcgtcacaccgcgccgcctgtcaccgcctgtcgtcgtcccgccgccaccgctgccgctgcccgttgccgccggcgcccgccgtcgccggcgcctgctcgggattgggaggggaggagagagaacgagatgaggaaaggaggattgtaggggtagttgagtggcattttcgtgtaaatactctaaaaaattagagggtagtgggtcttttggggtggagtggagctgtggagcagcaaaagcccagctccacccccgtagttcattttctaggagtagctctgccaactccactccaaaaaaaaggaggatctggaccgtttggcacaactccggctccagataagttggagttgggagctagagctgtgccaaacggggccttagcg

SEQ ID NO: 73422 - DNA, 3372 bp, Oryza sativa
  Clone ID: PAT_MRT4530_73704C.1
ttcgcggcagcttgcttggcgctcgcctccctcggccgcacttctttcttcctgattcctgacgtcttggatggtgcgctttattatgacacacgacctgcactagtgtttacagctccaagtatgggttccagagaacccttcctgagtgccatcttcttcttcttcttcttgcttttgttctgcctcggctgcaagtgtatagcttcagagttacacttacacacgacccagactgcggtcctcaaggttgatgcctcactgcaacatgctcgacagatccccgacacgctatttggaatattttttgaggaaatcaaccatgcaggagctggtggaatatgggctgaacttgttagtaacagaggttttgaagctggaggccctcataccccatcaaacattgatccatggtccataattggagatgactcttccatatttgtggcgactgatcgaacgtcatgtttcagtcggaatactgttgctctaaggatggaggttctctgtgacaattgcccagctggtggtgttggcatttataacccaggattctggggcatgaacatagaagatggaaagacctacaatttagtgatgtatgttaaatcaccagaaactgtggagttgacagtttccttgacaagttctgatgggtcgcaaaatctggcttcaagtaccataccggtttctgacacttacaagggacatggttttcgcacagaactaatatctatgatgttggacttaaaaccacgattcttgagattccctggaggttgcttcgtggagggtgaatggttaagaaacgcattcaggtggagggaatctattggtccatgggaagagaggcctggacactttggggatgtttggcattactggactgatgatggccttggatattatgagtttctccaggacgtattggacagtctagaatttgcaagggggagtgcagattcgacatggggttctgttagagctgcaatggggcaccctgaaccattccctgtcaaatacgttgcaattggaaatgaagattgtgggaaaaaattttaccgcggtaattacctcaagttttataatgctataagggaggcctatccggacattcaaatgatttcaaattgtgatgcttcatcaagaccacttgaccatcctgctgatttatatgacttccatgtctatactgattctaagactttgttttcgatgaagagtgcatttgatagatcatctcgtaatgggcccaaggcttttgtcagtgaatatgctgtttggagaagtgatgcaggtagaggaagtctacttgcttcattggcagaagctgctttccttactggactggagaagaatagtgatgttgttcagatggcaagttatgcaccactgttcgtgaacaacaatgatcaaacgtggaacccagacgccattgtatttaactcctggcaacaatacggaactcctagttactggatgcagactcttttccgtgaatctagcgtgagcctcacgatctctgcaactgggcttcaggcccgtgttaacgcactgggatcaactgccactgttatcacatccagcaatgtgatggatgagaactcttttagtaacccgaataaggagcagatgcaagtgtcacttggtcctcattcgatcttggtctgggccggtccaaagtggtggcagagatgtgcagctgcaacgcgcacgggtcgcagaatgatgagagtgtggccgccggcgacgacgagcatgctgtccaggcaagccattgtcgtcgtcgtcgtcttcctcgttctgttcttcgtcggcggcggcagcagcagatgcgaagccgagacgttggagacggcgtctctccatgtggattactctgtcgctcgaagaatgccggacactttgttcggcctcttcttcgaggagattaaccacgctggaagtggtggcctttgggctgaactcggccatggttttcgcaaggaactcatgtacatgcttttggacttaaaaccacggtttctacggtttcctgggggttgctttgtcgaaggcaattggttaaaaaatgcattcaggtggaaggaaactattggtccatgggaagagagacctggacactatggagatgtctggcactactggacggatgatggccttgggtattatgagttactcgaggatgcaactgacagtcttgagtttgcaaaggggagtgacaaatcaacatggggctctgttagagccacgatggggcaccctgaaccattcccactgaagtatgttgcactagggaatgaagattgtgctccattcaagctgatataccgagaaaattatcccaagttctacaacgccataaaagaggcttatcctgacatccaaataatttcaaactgtgatggctcgtctgggccacttgatcatcctgccgatctctatgactaccatatatatgaaaatgcatccactgtgtttttcaagaagaatgaatttgataggacatcacgtaatggtccaaaggtatttgtaagtgagtatgctgttaatggtgaggatgctggcaatggaagccttcttgcatcattggcagaagctgctttcctaattggtttagagaaaaatagctggaacccagatgcgattgtcttcaactcctggcaacagtatggaactcctagttattggatgcagacatatttccgtgaatcaagcggtgctatgattcatccaattatgatcagttccagctactctgatttattggctgcctctgcaatcacctggcaagacgctgagaatacctttctgagagtgaagatagtaaacttcgggccaaatgctgtgaacctcacaatatcttcaagtggacttcaagctggtgtagatacggcaaaatcaactgtgactgttctcacatccagcaacttgctggatgaaaattcatttagtgaaccaaacaagggcggcggcatgcatgctcttctcctgctcgaccgcggtgccggcaacgggggtgcacgcactgctccttcagctcacggcagaatggaggccaaaagcctcaccaagttagagtacatgtacatatggaacttggaacctctctgcttgtttttagtggcaaaatggacagctccatcttacttgcacactcattcagaaacaaacattgattcattccgccagcactacactggagctgaagagcgcgccgccatgccaattcggagccagaaaagagcacgccgccgccgcgccatgccgctccggagacacggccgtgagccaccggttgcgagggtggagatcgaggcattgagcaagtccacctccacgacactatcttcctcctttcccgtgcgctag

SEQ ID NO: 73423 - DNA, 307 bp, Oryza sativa
  Clone ID: PAT_MRT4530_73705C.1
gccacgccaccgataacaacgggatgtagaacactagctggcggctaggtacagagagaggacgatctacatgaaaccggctagcttgatgccaaacatgcactgaccgactgtgctaagattacattgcagacagccaacctgctcagggaggatgacttcggacagaatgcatcttccacatatgacaaggtatgtgcattgtacacgactgcatgcatgaggcacaacattattcatgtgaatacattaacacatcacgctcgagggccggcgagtaatgctgatggacaaaaagatacataca

SEQ ID NO: 73424 - DNA, 442 bp, Oryza sativa
  unsure (1)..(442): unsure at all n locations
  Clone ID: PAT_MRT4530_73706C.1
cgacgcgcgacgccgagcgtgcattccccggtccctcgagcgaccgtacgtcacgtgattccgtagtctcttctgaattgcgattccgattgattgcngaccctgaatgtgttgaatgtgtgcactgccattgcgttatggaacctgcatcatcgtgccatcgcatnacatgggcgtgcgtacgaggattaattggtggattaggtgctcttcgtgaaataggattatagttgagttcgagtcgacgggacgatgagtactggtcgattttgtagtaaatcaatatgatgaatgttttactccctccattatacatattataaggtgttttagtgttttttttcctangataaactnaatttcaagtngaatgaatttgggcatgtaatttattgcccanngtttcattttggattactcnttaaaaaaaaaaaaaaaaaaa

SEQ ID NO: 73425 - DNA, 3801 bp, Oryza sativa
  Clone ID: PAT_MRT4530_73707C.1
atggcttccagagaatccttcatgagtaccattttcttcttcttgcttctgttctccctcggctgcaagtgtatagcttcagagttacacttacatgcgacccagactgcggtcctcaaggttgatgcctcaccgcaacttgctcgacagatccctgacacactatttggaatattttttgaggaaatcaaccatgcaggggctggtggaatatgggctgaacttgttagtaacagaggttttgaagctggaggccctcataccccatcaaacattgatccatggtccataattggtgatgactcttccatatttgtggcgactgatcgaacgtcatgttttagtcggaatactgttgctctaaggatggaggttctctgtgataattgcccagctggtggtgttggcatttataacccagggttctggggcatgaacatagaagatggaaagatctacaatttagtgatgtatgttaaatcaccagaaactgtggagttgacagtttccttaacaagttctgatgggtcgcaaaatttggcttcaactaccataccgttagtgccttttctctcaatactgggacaggagaacaaggatgtttgcccattcccattagttttgaaaggattatattgttgcagggtttctggtgcatcgaattggacaaaactggagcagaagttggttgctcaaggaacaaatagaacctcaaggcttcaaataacaactaacaagaagggagttgtatggtttgatcaagtatcgctcatgcctgcagacacttacaagggacatggttttcgcacagaacttatatctatgatgttggacttaaaaccacgattcttgagattccctggaggttgctttgtggagggggaatggttaaggaacgcattcaggtggagggaatctattggtccatgggaagagaggcctggacactttggggatgtttggcattactggactgatgatggccttggatattatgaatttctccagctttctgaggatctgggtgctgccccaatctgggtgttcaacaatggaatcagccataatgatgaagttgatactgctgcgattgctccttttgtaaaagacgtattggacagtctagaatttgcaagggggaatgcagattcaacatggggttctgttagagctgcaatggggcaccccgaaccattccctgtcaaatacgtcgcaattggaaatgaagattgtgggaaaaaattttaccgcggtaattacctcaagttttataatgctataagggaggcctatccagacattcaaatgatttcaaattgtgatgcttcatcaagtccacttgaccatcctgctgatttatatgatttccatgtctatactgattctaagactttgttttcaatgaagaatacatttgatagatcatctcgtaatgggcccaaggcttttgtcagtgaatatgctgtttggagaagtgatgcaggtagaggaagtctacttgcttcattggcagaggcagctttccttactggactggagaagaatagtgatgttgttcagatggcaagttatgcaccactcttcgtgaacaacaatgatcaaacgtggaacccagacgccattgtatttaactcctggcaacaatatggaactcctagttactggatgcagactcttttcggtgaatctagcggtgctatgtttcatccagttacaatcacttccagctactctggttctctggcagcatctgcaattacttggcaggattctgaaaatagcttcttaagagtaaagattataaactttgggtctgatccagtgagcctcacgatctctgcaactgggcttcaggcccgtgttaatgcactgggatcaactgccactgttctcacatccagtaatgtgatggatgagaactcttttagtaacccgaataagcagagcagatgcaagtcacgcttgctcctcactctttctcctcattcgatcttgcgcttgcccagtccaaactcgtggcagagatgtgaagcagcaacacaaggtatactgactagtcatttacattgtgggaagctgagtagagaacaaattcaactggtggttgataaaatcatgatgggagaaaagattggagagggaaactttgtgtcttttgcattgatgagaactgtttcagtaaccccggataaggagattaaccacgctggaagtggtggcctttgggctgaactcgtcagtaacagaggttttgaagctggagccaacacatcaaacattgacccatggtccatcattggagatgaatcctctgtgcacgtcacaactgatcgctcatcctgtttcagtcaaaatccggttgctgtaaggatagaggttgtctgtgacgattgtccagctggtggtgttggaatatacaatccaggattctggggcatgaatgtagaagaaaggaagacatataatctagtcatgcatatcagatcattagaatcggtggagttgacggcttcactcacatgctcaaatggatcgcaaaatctggcatcaaattttgttcgagaaactgatttgttaaattggacaaagatagagctgcagttactagctcatgggacatgcagaacttcaagacttgaactgacaactaggagaaggggagtgatatggcttgatcaggtgtcactcatgccttcagaaacatacaagggccatggttttcgccaggaactcatgtacatgcttttggacttaaaaccacggtttctacggtttcctgggggttgctttgttgaaggcaattggttaaaaaatgcgttcaggtggaaggaaactattggtccatgggaagagagacctgggcactatggagatgtttggcactactggaccgatgatggccttgggtattatgactttctccaggatgcaatagacagtcttgagtttgcaagagggagtaaagaatcaacatggggctctgttagagccgcgatgggacaccctgaaccattcccactgaagtatgttgcactcgggaatgaagattgtgaaatattcaagccgacataccaagaaaattaccccaagttctacaatgctatacgagaggcttatcctgacattcaaataatttcgaactgtgatggctcgtctaggccacttgatcatcctgctgatctgtatgacttccatgtatttgtaagcgagtatgctgttaataatgacaaagggggtgatgctggcaatggaagcctccttgcatcgttggcagaagctgctttcctcactggtttagagaaaaacagcgatgtcattcagatggcaagctatgcaccactcttcgtgaatgaaaatgatcgcacctggaacccagatgcaattgtcttcaactcctggcaacagtatggaactcctagttattggatgcaaacatatttccgtgaatcaagtggttctgtgattcatccagtcactatcagctccagctactttgatttactggcagcatctgcaatcacctggcaggacaatgaggatatctttctgagggtaaagatagtaaactttgggccaagtgctgtgaaccttacaatatcttcaagtggacttcaagctggtgtaaatgcggcaaaatcaactgtgactgttctcacatccagcaacttactggatgagaattcatttagtgaaccaaacaaggttgtgccagttacaagggagttacccaatgctgggcaagagatgcagttcttactccttccattctcattgacctcatttgatctggctatgttttag

SEQ ID NO: 73426 - DNA, 780 bp, Oryza sativa
  Clone ID: PAT_MRT4530_73708C.1
atgtggggcccacgagtcagtcccctgtctccttccttcttcctcctccctctctcccttctctctctttctctccccttcttcttccccttcggccggtggcgcgtggcggcaagcaagcccgcagcggcggtggcagaggaagcggtgaaggacggcgggagcaggccgacggtggcaagggagttgggaggcgagcggaggaggagtaggcggcgcggctcaccgcgaggagcagggcgatgtggtcgcgacggcggggatcccggcgagccgcgcagacgagggggagcggtggcgcagcggcgccagggcggaggcggagcacacggccggccttcacgccatggcggtggcggcggccgtcgatccgcccgccgcgccgcccttcttcacctccgccgctccggctccctgcacgaacacggcgcctcccttcttgagctcgaggaaggcaaaggagcccttcccctgctcccgctcccgctcggtcttgacccacgcgcccagaacgacgtgctcgccggatgcaggtgcggatggtggcgggctccagatcgtcggagagggaggccgtggccatggcagccgcagcggcatattcacccatgggggagggaagggatggataagatgcgtttgcgggcgatggcgggctctaggtcgtcggagagagagaccgcgaccatggcggctgccgcggcgtcttcggctatgggagaagcgagggtttgggaggagccggacgtgtcgggcggtcggcggtgctattcatcctag

SEQ ID NO: 73427 - DNA, 1020 bp, Oryza sativa
  Clone ID: PAT_MRT4530_73709C.1
atggatgggcagtgggaggagccgcagcacgcggggcggcggcggcggcagccggagcccgggaagaacctcatcaagatcccttcctaccaggaggtgttcgggagtggcgcctcatcctccgccgcgccgccctcctacaaccctccacccaccaccgccgcctcctcctcctcctcctcgtcgtcgttttcgcaggccttctccttcctcaaatccaccgagttctactccccgccaccgccgccaccacagacgaccaccccaagtctccggtaccatcttctacaccctgactacttgtattatcggataagagagttgcagaagaatttcaagctccgcgtcattttgtgccatattgatgttgaagatgtcgtcaaacctttacatgaagttacaagaacatcactgctacatgactgcaccctcttgtgtggatggagcctggaggagtgtggtcggtacttggagaccattaaagtgtacgaaaacaagtcagctgacagcattcgtgaacatatggataatgactatttatcaaggttgacgcatgctcttacatccattcggcatgttaacaagacagatgttgtgacgcttggctcatcttttgggtcactttcacaagttatgaatgcttctatggaagaactagctcgatgcccaggaattggtgagcggaaggtaaaacgacttcatgacactttccacgagccattcaaacgggtttccagccgcccaaacattgtagtgcctgacactcctgacagagagaaggcgtcaggccaaccttcatcgacaaatgatggtgcacaggatgctgtggagaagccagacgcatccgtgaacaagaagagttctaatgtaagatcagcccttactgaagcctttgccaagtattcagaaaagatacgcaaccagaatcgtgattcaacaaatgtggctggtgaagatcagacgagaagggctatctctttactagaatccgatatgatagaaggagcagctctagcttaa

SEQ ID NO: 73428 - DNA, 1023 bp, Oryza sativa
  Clone ID: PAT_MRT4530_7370C.1
gatatgacagattatttgaagggttgcaagtttcttccaaagcttaacaatgagataccaagtgaaagaaatgctacgtataaacaaagattcagcagcctggaaaatctagtattgattatgtttgaggacgacgcagtgttaataccccgggaaacggcatggttcgggtactatcccgatggcgccttcagtccagtgcagccacctcaaaagacaaagttgtacacggaggactggatcggcttgaaggctttggaggaggctgggcgtgttaagttcgtatcagtgccaggagggttgtggaacggatctttgccacacaccaactcctttgaccctgcatcctcagattgtggtatggatatacatccacctggtggtttcctaagcatgttacaaagtggtcaacagccattagtcccacctcatgttttgttcccagcaacatggccacctatgccacctatggcaccaacaactaattcaggcactatcatcaacttagatgatggtgacgatgttaggactgctaagcgtcttacatgggcatcagatgaggacttgcggttgttttatgtggatgactatcctaacgaaggtccattcacagttttgcactgttggaaggttcttcgtgatgaacccaagtggcatgctgttttggaggagcttgaaaagccacacaagcggagcttggatgatggaagtgacacactatcacaaaaagatatcggagaaaaggagcgcccaatggggaggaatgaagctaagaaacaacgcaatggcaaaggcaaaggcaaaggcaaggatgatgatgacagtttacatgaagatatgaagaagtacatggatgttcaagctgcagctagcaaacgacatgaagagtttttagggactcagcaccgtatttcagatgcaaaagttgaagtagcaaggcttaggagagaggctgtcttgacggaatcatatcaaaaattgatgagcatggacactagtcaaatgactgatgagataagctga

SEQ ID NO: 73429 - DNA, 1888 bp, Oryza sativa
  Clone ID: PAT_MRT4530_73710C.1
atgaaggcgctgcggcgatccagcacctcgtcctccccgtcgtcgtcgtcctcgtcgccgacggccgcgtcgtccccgccgtcctcgtcgtggatccacctccggtcgctgctcgtcgccgcggcgtcgtcgtcttcgtcggcgtcgtcgtcggcggcggcgggaagctccgtggccatggtgtccgcttcggcgcccgccgcgtcgtcgtcgccgtcgccgtcgccagcgcccgcccccgcgccgtcctcgccgcactcggatcggaaggttgcggggcctgcaatccaaactgaggacaccggatttttaagagcgaatcgattatgtgttcaatctgttgacatgatagtgggggagattcggggtggaataaagtctccatggtctcgaaggaaaagaaaacgagtactttctcgtcaacaatgggaaggtctgttttctgctaatgggaaacttcgtgatcgaggaaagaagtttctgaagaaagttcgcagcgggggcattgaaccaggaatcagggctgaagtttggcccttcctgctaggagtctatgatttaaatagcacagaagacgaaaggaataccatcaaaatcaagaaaaggaaagagtatgaaaagttgaggcgacagtgccagcaaattctgaattgttacaagggcaatgggctgaaagtaataaatgaaaataatgaggagtgttctggtatagagtttagtgctgaaggatcagaatcaccttgttttgaagatgtcaatattgcaagggcttctgtgtcacatgaggagctgaaacctgaatccgagcctgagcaaccagataactcaatgtgtgctgttacagaatgtatggaagaagacacgggtgaattaatttgtttagatccttgcatagcagagtcagaatcttctgattctgaatcatctgatgaagatgaccctggaaggatatcgatgtctggtgaggaaaattgtgatccagatcctaaatttaccaggactacttcattcaaggcagacttttttaagtctagcaagacttcagaggattttgccacgtggcaacgcattataaggttggatgctatccgagcaaacacagaatggattctgttctctcgcaaccaggccgaaatttctagagagagagctttgcagtgtgcagaatctgttgggttaagagattatgaccatttagatcccagtatgatttatcatgctgctcgattagtggggcttcttgaagcatatgcggtctatgatccagaaatcggttactgtcaagtgatggaggaggacgatgaagcattttggtgctttgtgggtttcatgaggaaagccaggcacaacttcaggcttgatgaggttggaataagaaggcagttgaagattgtctctcagattatcaagcgaaaagattcgcacctgtacaagcacctgcagaagctgcaagctgaggactgcttctttgtgtacagaatggtagtggttctcttcaggagggagctcacctttgagcagaccgtatgcctttgggaggttatgtgggctgatcaggcggcgattcgcgctggtattgggagatccacctgggcaaaaataaggttgcgtgctccaccaaccgacgacttgttgctttatgccattgcggcttgcgtcctccagaggaggaagctgataatcgagaagtatagtagcatggacgagatattgcgagaatgcaatagcatggctgggcaactggacgtctggaggctactcgacgacgcacacgacctggttgttaacttccacgacaaaatctgatctgagggatgcgtttctctttgttcttgcggtagaacaaatatagacctcgacatttttttttttgggggggggggggggg

SEQ ID NO: 73430 - DNA, 243 bp, Oryza sativa
  Clone ID: PAT_MRT4530_73711C.1
atgccaattagagatgaaagctcaatgaggggaaagaaagcccttcccgtgtggcgcgtatgggcgagccccctccccacaaaggggtcgtgcccacgcatagggagcagcggcctgaaccccccccccccttcgggctcagggtacctcgtcatacctctcgggcccgaggggttgaaccgtccccgaggcccttgctcggccgccacatggcgtccatgtgggagccttgagcgggcgtga

SEQ ID NO: 73431 - DNA, 1580 bp, Oryza sativa
  Clone ID: PAT_MRT4530_73712C.1
atggccgaatctagtgctcccacggcggatcgagctagatcaacggcgcaacggcaacaacaacttggagttgaggcggagctaggacatgcagggacggcggtggcaaacatggatctggtgagggggatggctacatctgtcgtcctagcgactggcagtgatggcgacaatgatgaggtggcggcgtgcggccatggagaagacgatgcatggaacggggtggaggagggacatggctgccaaggcgagccgaggtggtggagtgcggccatggaaaaggtggtgcattccctagccggcggccatgggaagccggcatgggtggcgccgggagaactgaagatgaaagcagttgttgagtcaggaactatggatgttgattttagtcttgacaatggaggaagcattattctaaggctgcagttcctactcagtgatgaagatcgcagacgggtccaagaaatgaggaactctgcagtgaaaagaaagcagcaagagctgctttctgatggttatgtactttctcaaggtgattttgaaaattttcagacagcttgttgtctaaacaagtcgaaaatatctccaacatttcgagagaaggagatgaatcttcagttaggaagagcatgtcactggatgatttgcaggagaaggctgttttctctgcaattattgtagatccccagatgaaagacacaaaagaatcaccggagcaaagtggatcaaatagtgcagtgcagaaaatgataagtgcctttcaaagcagctctccacaggatctgacgcggatcaaatcagaaagctcactaaaagggctgtctgcttcttcagagaatttcacccagtcttcttcagacaagtcatctagttcactagcaacccaggatgtttcaggccacacagaggcaggtcttgtggctgggacatcaggcaaaatgcagcttcctcctggtgacaaaagcttcagtaacaaaagatcaaatgcaaccgagcaacaggccgttctgtcaaccacatctgaaggcagaatccgtaggctattcagagagaaggacctcgataattcagagatggtgatcacagtccaaaaccggagcaagaagcggtcgatgccgaagcgtcgtcgcgccgccattggcccttactctcttgaacacatgcatccccatgtctgcatcaccactgcaagcaggcagctgagagagcttgttgagcttgagccacccttggattcgtttgtgtttgtaggacaagttgatatcaagagaccaaatgtgaggggaggagctagcatgcaagatcagggcacaagcgacagtaaaacgaaaaatgagatggtttctgctcgaggtgatgatcatggttttccaatattggatgggcggttgattaatcagggagtgcgtgttgtcattgtgatcatagcttgcggagcaatatttctgaacaacagataagggtagcaggacatgtacatttagattgtgtgtgtgtgtttttctttttcaagtttcagtaagtaatgcaactgctatacacctccatccctaaaaaaattaacttccgagaatgaatct

SEQ ID NO: 73432 - DNA, 1462 bp, Oryza sativa
  Clone ID: PAT_MRT4530_73713C.1
ggatccccgggctgcaggaattcggcacgaggaaagaggtaaagatgcagtgatggctaacaatgtttttccctatgctacatatgaggggatggtggatattgatcaaatcactaatccagtgcaacggcgatccatgcaagatcaaatatgtaattttggacaaacaccatctcaattgctgacaatcccacatacaaagagaaggccattggcagacatcttaaagctgcagacaatattctggaacccaactgaagtcagatcttatgtactacctaatccagaaaactgcaatgttcctgctagtgcaatgcttgtatccgatgactctattgtagtcgtaggtgcaaatgttcctgcagcacatttggcactgcaccattggcagccaaatacttcaaatggcccagggacacctttcctctttcatcatggaagaaatgccataaatttaagtggtggtgcaataatgcgtatcttcaaaggatctgctggttctgtagacgactatcagttcccaagggctattgcttttgctgcctctgcaatccaaaattcatcggttgttgttgtcacatgtgagagagaggttataactggggggcatgcagataattctgtgaagttgatatccccagacggagcaaggaccattgaaacggcatttgggcatcttgctcctgtgacctgcgtcgctttatctccagatagcaattatcttgtcacaggttctcgtgacaccacagtaatactttggaggatacgtcagataggctctttacgtaagaaaagtactccagaacctccaccatctacaccaacaacaccaaatgattcagcctctggtgatagcagcactagcaattcaagcaaagttctagaaaccagcaggaggcgacgaattgaaggtcctatgcatgtactaagagggcatcttggagaagtaacttgctgttctgttagttctgccttgggacttgttgcttcctcttcaagtacgtctggtgtccttctacataatttgaggacaggcaggctcattaggaagctggataaacaggaggcacatttaatgtgtttatcttctgaaggaatcatattgatttggaatgaatcagagaaaagattatcgacattcactgttaatggaatcccgattggtacctcggttctgacacctttctctggtcgagttagttgcattgagatttctgtggatggcaagtttgctttgatcggaacatgcttgtccaacagttgcaatcgtgatggttttagtgctatagatgattatgagcttgacaaacccaacggtgatgatgatttgccagaattaaatgagactaagccctctgttcatgtgccctcggtctgcttcattgatctatacaaacttgagttgagctcgaagataggggatcggatgctgcaggaaggcaacggggttctcgagtcgtga

SEQ ID NO: 73433 - DNA, 735 bp, Oryza sativa
  Clone ID: PAT_MRT4530_73714C.1
atggcgaacttccaggccgcgctgctcctcctcctcctccgcttcctcctcaatctcgccggccaccgcggagaggttctctcggtctcggcggcgcagcagcaagacccacccggcgacgacctggtctttctcaaactgcgtagcggcgacggcgacggcaccgtcctggccatgcaccgccacgacatctccttcgccggcttcaccaacgggagccaccactggcacgtcttccgcggcgacgaggacgccatccccaacgccaggcgcctcccgttccgcaacacctaccgcgacctcatcggcggcctccaccacgtccccggcctgccgctcgggaaagcggccgcggcgcgggccgccggggtgctcgcctcctacgaccccgacgccgaggaggggacggcggcggtgaagcgggcggtggcggcgctgtcggtgatgttcacccaggccctgcggctggagccgatcagggagacggtgtcgagcgggtgggagagcggcgaggcgcgcgtggcggcggagcacctgccgtacatcgagcactgggacaccatgtcgttcgaggtcctccggtggaggcgcaccggcgagtgggacgggcccttcaccgaggtgctgaggaggcgcgccggcatccgcagcgccggcgaggcgctcgccattgccaagctgctcgcgaaccgcagcttcgtgcagctgctgcaggatcacagccacagcgcctga

SEQ ID NO: 73434 - DNA, 329 bp, Oryza sativa
  unsure (1)..(329): unsure at all n locations
  Clone ID: PAT_MRT4530_73715C.1
tttaaaaacaaccagttggggcccnacggcnaaaaganaattttcngganngnncgncaccttnantaatcngaggggncccccncccagnaaaanaagggggngttcnctanccactgggatagagngggcgggggtgtgnttnncggtaacaanggnnattnntttggngncacancntgggnnagttcgggnancgtcgatnttttttaaggnactnganacggncnggnggngggcggtngcngntngnnggcgggcnntacntcgaatngncaggggggggnagtngcnnnnnnggcgnncnngganacnngnnngngntcggg

SEQ ID NO: 73435 - DNA, 741 bp, Oryza sativa
  Clone ID: PAT_MRT4530_73716C.1
atgtcggcctctactcctcctctttctttctcccccttcttccttctctttccttcttttcccctttccttccttcccgtcgaccacgccgattatagcggcggccgacgcatggaggctggagcacggtggtgcagcgactcgttggctcggcgttgggcgaaggcggcaggcggcgtccgtgctccaccaacaccgacgctcgccaaggccgagcgccgtcaagctcccctcgggctgtcggatctagaggccgccgccggccttgccaacctcgcactgctcaggcctttctgctcgacaacggctttgcgacaacgaggcgatagcggcggacaaggtgggaggtggcaagtgacatcgacaacagctttggggatggagctctgggcggggatggcgcaaaggctagtgacagcggcggcggctcacgacgacgacgacctcgatcggggtacgaacttgcgatttgtccgtgtcactgcgatgctcggcggtggtggcggcggatggtggcccagacgatgtcagccgcggcaggtggtggtccagacgtcggtggcactctcgtggccagtgtgccctccagttcgcccccggccgatgcgctcaagttgttggtgggtggttggcagagagaggaaggatgggactaggagtagtggtgggatccacctttggctagtggaggaggctggctacatttggccaactggaggatcaatttggacagccggatag

SEQ ID NO: 73436 - DNA, 217 bp, Oryza sativa
  unsure (1)..(217): unsure at all n locations
  Clone ID: PAT_MRT4530_73717C.1
cggacnnatctctgngncgcagtntcgctcctnnnnctcctctattaccgntctncgaccgcnttgcgacggcgntggcggagctgntnctggtgtccccntcncctcttcttntncntcnnctcaccctgtnccttntntggntcgtnggagctagcgcaggtattagctnctacacaaatnccaggggagnctnctgnttngttccgggatacag

SEQ ID NO: 73437 - DNA, 653 bp, Oryza sativa
  Clone ID: PAT_MRT4530_73718C.1
ctcttaaataaacatctagtgggaactcagacaatggctcttaatggttttaacactgtgtctgaaaggaaggactacttaacacaaatttttcaatgaatttattactctttccaacagataaacccaatgcaaatgtcagccttagtaagcatggataaagctgaatgattctaagacagagtgatgagtcctttgtctgacaaggctgactctgaagcctatcaatagcaagtcccttcctttcccttattaatgcttaagttcccaatgttgggcaaagtacctgacacagagtagtgcctcaaaacacttttgtgcaataaatgtttgaatgataaaggaatgactataacagtaattccctaaagttttctttaaaatttcctctctagatcatggatagtgttttttgtaaaatatctttcaaactctattatgatttttaaaccatgaggataaataggacaatattaaatcatgactagagtaaagaattgttagaggttaattttataaatgttatgcatctataaactgagagtgggtaatatgtagtttgcagcaggaatgcaggaaactgaaaataactcacagaccctgtaatgcctgaggagtccactaggtttagggtcattagtgtgatcatggcc

SEQ ID NO: 73438 - DNA, 675 bp, Oryza sativa
  Clone ID: PAT_MRT4530_73719C.1
atggcggcggcgcatggcggtggcgcgggatctggcgagcggcagctaacctccacacggatctggcggccggccaccctcccccctcgggatccggctcccctccctcctcttccttccctccccaaattcggcggaggggaggggcgtcagcagcggtgcggccggaggggagcgcagaggcctgtgggagcgcggatccgacggtcggccgccctccccccgcaggatccggctcccctcccctccccttccttccctccccagacccggcggaggggaggggcgtcggcggcggtgcagctggagggagggcgaatccggccaccgtcgacgagggtgggagcggtgtcctcggccgatgacgtcgacggcgatccaccgcctctccatcgttcgagcccgcccgcctactgccaccgccgccagatccgagcgaggggcagctgcctctgccggatcccgggggaggggggagggtcgctcgccgctcccggtcgcctgccgccgctggagctgaagaaggcgaagaggttggagccggaggagaaggagaaggaggcggcgccggcgccggcggtgtggcttgcgggggcgcgagctcgacgcggtcgcgcggtgctagctcttgagtggaagataagggggaatactgagaggaggagaggaaagtga

SEQ ID NO: 73439 - DNA, 1047 bp, Oryza sativa
  Clone ID: PAT_MRT4530_7371C.1
atggcgggggaggggggcggaggggctggcgcgctcgctctgccacctcagcgccgccccaccacgggtggtggaacggatctttgccacacaccaactcctttggccctgtatcctcagattgcaacatggccacctatgccacctatggcaccaacaactaattcaggcactacgcatgctagatcaaggtcaaaagccaaacctgtcatcaacttagatgatggtgacgatgttaggactgctaagcgtcttacatgggcatcagatgaggacttgcggttggtgagtgcatggctgtaccactctaatgatccgatcaatggaaatggcaagaagaatgagagctactggggagatgtagttgaattatacaacagcactacacctattaaccggaaaagggaagtaaagcatctcaaagatcgatggcaaaggattaagagatgggtgggatttttctgcgcctcctggaagaaggctgcattagtttatactagtggatattcagatgatcagttgagagactttgctaatcagttttatgtggatgactatcctaacgaaggtccattcacagttttgcactgttggaaggttcttcgtgatgaacccaagtggcatgctgttttggaggagcttgaaaagccacacaagcggagcttggatgatggaagtgacacactatcacaaaaggatatcggagaaaaggagcgtccaatagggaggaatgaagctaagaaacaacgcaatggcaaaggcaaaggcaaaggcaaggatgatgatgacagtttacgtgaagatatgaagaagtacatggatgttcaagctgcagctagcaaacgacatgaagagtttttagggactcaacaccgtatttcagatgcaaaagttgaagtagcaaggcttaggagagaggctgtcttgacagaatcatatcaaaaaatgatgagcatggacactagtcaaatgactgatgagatgaaagctgagcacgtgatgggtctcaagatgttgagggagaaactgcttggtgatataatctaa

SEQ ID NO: 73440 - DNA, 1198 bp, Oryza sativa
  Clone ID: PAT_MRT4530_73720C.1
atgagcttcaacaagagcagggggggagcagcggtgctcggcggaggggacgagctggtgctccgtggcaccatctccaagaaatggaccctcctcctctgcctcgccagcttctgcatcggcctcatcttcaccaacaggatgtggacaatgccagaaccaaaagagatcatcaggagatcggctctagaagtgaacaagatgaacctgttgtctggtgactgtgctccgaaaagtgttatggagcaaaaagatataattggagaggtcccaagaactcaggatgctatacaggcattggacaaaacaatatcaaacttagaaatggagttagcatcagcaaaggcgtcacaggaggagtctgagctcaatggagcgccgctatcagaatctacggggaaacggagatacttcatggtcattggcatcaacaccgcattcagcagccggaaacgaagagattcacttcgtgctacgtggatgcctcaaggtgaaaaaagaaggaagcttgaggaagaaaagggaattatcatccgattcgtcattggtcataggttagtgcaagaaaacatgtactttgggcgatctgatcatgttgaagggtatctggaattggctgcaaagacgaaatcgttctttgtgacagccttgtccatgtgggatgcagagtactacattaaagtggatgatgatgtacatgtaaatatagcaactcttggtaacatattggctaagcatcggtcgaagcctcgagcttacattggttgcatgaaatctggtccagtcctggctcagaagggtgtaagataccatgagcccgagtactggaaattcggcgaatgggggaacaagtacttccgtcatgcaaccggccagttatatgcaatctccaaggatctagcttcttatatatcaatcaaccagcatgttctccacaaatatgctaatgaggatgtatcattaggagcatggttcataggtctagacgtcgaacacgtcgatgatcgcaggctttgctgcggtacacaaccagattgcgaatggaaggcgcaggcaggcaacgtgtgcgccgcgtcgttcgactggagctgcagcggcatctgcaaatcggcggatcggatgaaggaggtccatcaacgatgtggggagaacgacagcgccatctggagtgcaaagttctgaactgaaggaacataat

SEQ ID NO: 73441 - DNA, 261 bp, Oryza sativa
  Clone ID: PAT_MRT4530_73721C.1
tcgtttacagatacacgagctgtgacgcgaaccacctatttgtgccgtgtacggtggattacgtgctccaagtgatcgacttcttatcagcgcttggtgtgcccgttctatcatgagcacgtgcgtggagaatgaccacaatctgttggtgacaagtggacaaagacgacgttccgcttcgtgacaagcagagcttgcacgtggagactgaaggcagtttggactcggttgctcaatcatgaggacattgggtcactgtac

SEQ ID NO: 73442 - DNA, 392 bp, Oryza sativa
  Clone ID: PAT_MRT4530_73722C.1
agggggagcggggcctgcaagacgaagacccggcgaggggccggtgggcggggcgagaaggggggcaacaaccggcgggcagcgtagcgggcgacaagcggcgggggaaaggggggggcggggagagggggagcgtgagaaaaggagggccagaaggcggaagactggggaacggcggtggaaagcgcgggcgggcgggcgggccggggcgggggagggaacccccggggggccggagggccacggctccccgttgcatcgacggcgcgacaggggggaaccctaacggcgatggcatttttaggacaaaattgtttgtccgatggcatttcttggaactcacacttgtcgatgctggcaactatgccttcgaaagggtcgatgattcatga

SEQ ID NO: 73443 - DNA, 408 bp, Oryza sativa
  Clone ID: PAT_MRT4530_73723C.1
ctgttacctgaggtagacgacgaaggagcggacgggggttacctgggattggatctgccacatgcatgcgccctagcttgtcctcggccatgagaattggagatgcagatgcactggttcacagccaacatctgtggatatgacgctgcacattaggtggacggcgctctgaccctggactcccgcctgatctgacgcagcaaggggggatccagacggccacattgagcgtacaagctcacgatcgtggagagaggacggcggcctgcttcagatgtctaccacctgtgagcagaatctcatacgacgacgaagtccacgggcagtacaccgcgcactccgactgcgactggatcatatgggatgttaatctaggacattcaaaggaccatgatcagaactctgtac

SEQ ID NO: 73444 - DNA, 1134 bp, Oryza sativa
  Clone ID: PAT_MRT4530_73724C.1
gttaatcgatatcaagggcattactcttcttgttttcaagttcatgctgaaattactccacggagcagacagcagagaaatcgatcccagatgacaagcaagattatcgcacaataacgtcttgtttggtaacacaatgaaatcatgatgtaaaaaaaaaggaaaccaataaattagaggaaaacggagacccacagattatcacatttcttgcattctgattattaatcacctcattactcttctttaaccacctcgcttctgctcttcttgcccttggcggcggcgtaggcggcgccgtggaagtcgaggaagagcgcgagcagcgacgcgttgaagacggcgttgaacgcccacccggccatcccctcgcacccgccggcggcgaagtgccgccacagcatcaccgccgacgccgcgaagctgaagaggaactgcgcgatctgcagctccgtgacggcgcgcttccaccgcggcggccaccggaggccgaggctgcagcagaggtagtagccgtacatggcgacgtgcacggcggcgttggtggcgagcgcgatgggcatcagcgactgcctcgtggcgagccagaggtagcacatggcgatgacggcggcgtggtggtagacgtggagcagcgtcagcgggcggcggccgaggaggatgagcagcgtgtcgccgagctcgtacaccttggagaggtagaacacgtgcgcccagaagaagaccgggcccgacgccgccgtggcgccgccgggagggaagcagaaggcccaccacgcggagggcgccgtggcggccacggagagcacgcacccggcggccatggcggcggagagcgccaggaggaccgcgctgtggagcgcggagaccgcacggagcgcgcgcgggtgcggcgacgggagcgggaccacgcggcggtggaggaggaacaccgtggcgaggtaggcgcagatgacggcggcggcgaaggacggggtcgaggcgggcgtgcggccgggctcccaccggaaggaggcgacggcggggtggtcgaccagcgcccaccgggcgcgccgcagcagcgcggtcgccgccatctcgcagggcactgtgcacccacctccccctcctccccggcctgtggagcgcactgtg

SEQ ID NO: 73445 - DNA, 188 bp, Oryza sativa
  Clone ID: PAT_MRT4530_73725C.1
tgaagatgtttttaagatgaaaggtattctccacctagcggacgtagtattttttcctctatccaaccgttgttgtgagttgtaactgcagagttattaactgactcacccggctttcaagggttggcaccatgtgatgattgcatgactcaatcaggaaagacccgcaattggactagtcggacctc

SEQ ID NO: 73446 - DNA, 249 bp, Oryza sativa
  Clone ID: PAT_MRT4530_73726C.1
tcctatgagcacgtacaccaagctcgaactgggaaaatactaatggttggttgatctggtaatagaatagtttggtgtacttctgtttggtgatgacttgagcagatcagcaaaggatacttgtccatccttccaaaaatccactgctgcctgtgcacctgcttcgcatggttgagcaagttatctccaattcagagagcaaaagtatacctgcaactgcagcttcttcataaagcaaggtactagtac

SEQ ID NO: 73447 - DNA, 2067 bp, Oryza sativa
  Clone ID: PAT_MRT4530_73727C.1
aagtttggagaagaggaaaaaaagtaagtatgagagggatgtaaggaagagttttttttttttttttttttttttcaccatcaaaatatcatgctgtaaactcttgccaaacggcttaataattaccaacaagctggctttacagcattgcagactacagcaacgtttaaactaaaaattattaacgttgctcaattatgtatgaaacacaagaaatgttgaaccaggaagctggaacatgaacatctgaacattctttcttatgatgttcagatgaaacacaaaacttgactttatacatcatcatttatctggtaaccacttcttccgggctccttccaaagcttcttcccgcatccttgttaattcacgaaaccattgctcgtactgagcttcaatcagaccaagctctccatttaacacatctcgattttcagtaattgaaaccgatgcaccgatcaccaactccgagtgatgtgatgcttgatccatctgaaagattgcaaaattacttgaaccattacttaacggatgtctgcagcccagtttatcggttcctttgtacgcaccacattccagtgtcctgtattcgtcaacgccatactcactaagacttttggaactcccatcaagctgaacagaaatgtctgacccttcagagctatttggtcctccttcaactagtacataatcatgtgtcaactccgatggatgctgctgggaagtaattacgtgctcactttcacccattttagattcgctggaagtactcattactgcatcattcatcagctgctgaccagggacaagattcactatcaaaagatcaataaaatcagcaatgaaagtaacatcacagtctgctaactccaactgctcgaccatttcagcagcaacagacatagctgtatcagaatccaagtagaagagaaaatgaatgttccttgcatgtccacacaaatcggcaattcgcaaaaccagtgatactgaattgtcatcaagtttctcgcctgttagctttagctctgtgtttttgttagttcgcgtgaactccaacacagatctatgtggaccaccaagatcatttctcttgcatgtgctagtacacatagattcattggtgtcaacatccatgtgcaaagcttccaaagagacatctactgatttgggtaatgatgacggaaacttagtgccaacaagaacactagaattatcagagcaaagaaaggggtcttgcaatagttctttggcagacagcctttcagaagcaggaactaaacatttatcaataaattgttttgcctgaatatttgtgattttagccagagcagccggcttgacacccttagatactttcttaaaaatttgagctgcatttgtacattcactgtaaggatactcaagagtgaacatctccaacatacacattccaaatgagtatatatcaacaagttcatcataattctcatcatatagctcaggcgccatgaattcaggagtaccaataacactttttgctctaggcgttagcatcaccgtggctaatccaagatctccaatcttaacttctccatgattcccattgacaaaaatgttgtcacacttcaggtctctgtggataattggaggttggtgggtgtgcaggtaatccagcccacggagtacctgtctagcccaattctttattgccttcaagtcaacacgtggatgtttctgacgatactgcctgagacttccagatgtgaaaagttctgtaataacattaattgtcttcttttgatcatcaacccaataattatagaacttcattacgttttcatgcttgagagactttagtagatgaacttcagagtatagccgttcaagattatctggagattgcataacctcatctatctccacttggctccatgcaacctcaatgccttcaacctcatcaaatgccttgtaaacagtcttcatagctcctctccctagcacctcattgtagcgtatgtaccgcctggtcggatccacctccacgcactcagcatcgtccaccttatccagatcgccgaacacctccat

SEQ ID NO: 73448 - DNA, 590 bp, Oryza sativa
  unsure (1)..(590): unsure at all n locations
  Clone ID: PAT_MRT4530_73728C.1
gcgggagcggaaggnaaggcgaaggcgtgacgtcacccaccggggagggaggagatggagctggtctcctcgtcgcgctccgtccttcctcggtgcggcggcggcggcgttgcaggtgtagctgctgctccgttcaggacggcgtccgccagctcgaggcgcaaggggacgagcggattcgtgtgtgctttgggttgcgatggtgaggggaagaagagcgtggcggaggggacggtcagaaggagggcggccctcgctttgctgctggcttcgccggcgatgtcggtggcgttctcggctcacgggaagaccaaaagcaggaacccttacgacgagaggcggctgcttcagcagaacaagaagatccaggaagccaaccgggctcctgacgattttccgaatttcatcagggaaggtgagcaatcttgcccctgatttgtgcatcatcgggccgccgtagattatcttgttctactacagataacatgctgagcagttcaagtttactctggagcaatgtaatgtaagacatttgatgcctgaaggttgaatgacaaggtttacttccataaaaaagacttattttcttt

SEQ ID NO: 73449 - DNA, 203 bp, Oryza sativa
  unsure (1)..(203): unsure at all n locations
  Clone ID: PAT_MRT4530_73729C.1
cccacgcgtccgcccacgcgtccgggtgatggcccgcgcggtgccgtcgacctcctccgcgctcttgggcgaggcgcggatcaccatgcgcaagaccgacgtgaagcccaagccggtggtgtccttggggatgccgtggtacggngccaagcccgtccgtgtacctgtgtccgttgttcggtggccatcgtttgtacctaact

SEQ ID NO: 73450 - DNA, 543 bp, Oryza sativa
  Clone ID: PAT_MRT4530_7372C.1
atggctggatgcaggcgctgtttggtcctgtcactgtctttctcctccctttggctggctatgcagcgagagcgtactactactactactggattactgtcagcggcagatgaggtgaacgttgccgagaggaagaggacggcgtgcttggttgacacaggtggtggctcgacaacgagggcgacggggcggctcgacaatgtggcgacggcaagggaggagggaaggtgccgccagccgccgttgtgcgtcgtcgtctgcaagggagagccggtgtgcaccatcgtctgcgggggagagccgaggaagaaaccatatgagctgcaacagattgagactgcgcgcaatcgccaaagggtttcgcacaggaggtcagggcgatggcgttggatgcaaaaccacgacaacaatacaacattttcgctagaggcagagaaaccaaagagggaaccacaccatccacgaagatctaaagaaaatcatgatgaactatggatgaaaaccacgacaacaatacccgaatggagctccaagggaggttga

SEQ ID NO: 73451 - DNA, 3660 bp, Oryza sativa
  Clone ID: PAT_MRT4530_73730C.1
atggaggaacacatcactcaagcgattgcagtgttggtgacgaaggtggagagggtcgacaatctctgcaagcagcttaagcagatcgacctcaagcttgaaactcaagggaagcggctggattcggtccaaagcaaggtggatttgtccatgtcttctctcgggcaagttcagcatgagcaagctcaggtcgcgcgggctctcaaggcggtgacgtctgcttcttcgtcaccaactccaccgccgactccacctctgccgtcgcaaccgcctccacttcttcctccacctccgaagccgcctactaaggatggggcctcttcttcatcttcggcgccaccgtcccctacccatgtgcactctgcaccgtctcatcagttcaatcagttggtttaccacattcgcttgtataatcctgctattactcagggctctgttttggtgtctcagtttattcggggtcttaaagaggaattgagatataatgtacatgctcagcaacctgtcatagtcactcaagcttatatggcagccctggcttttgaaggtgctcaacagttaaataaatcctttgtcaagaaggatactggggttggtaaatttggggataaagggaaatctactctgagggaattgtggaaagctcaacaactgaaggattatcgtcgtgccaatggtttatgtttcaaatgtggtgagaagtatagtcctactcatgtgtgtggcaaagttgaaggggttcagttgaaggccatggaattgactgacactactgaaattcttgatgatagtgtgctggatgctcttaccaacctggatactcctcctgatgatggtatgttactatctgtccaggctttggctggtaccagttctgctaattctttgcagttgagagctttggtgggaaatcaggtggtgttaatcttggttgattcgggcagttctcacagttttatcaatgcagatctctgtcatcgtttgcagctgcctttggtatcctgtgatcctgccaccgtgaaaattgctgatggcactctgctcacctgttctgctcaagttcctgcatttacttggtggatacagggttacacttttgtctcttctatgaaggtcttggatctgggaggttatgatgcagtgttggggatggattggctgtctcagtatagccctatgcagtgtaattgggctgagaagtgtctctcttttgcttatcaggcacaaacggttaagttgcaaggtattgtctctcactcccttcagcaactcactgctgttacttctgataaaccgtgtaagtggcaagctggtaatgatatttgggccttggctgtggttgaaactgttcctgcaccttcatctgtttctccactgccacctgctgtcaccaagttacttcatcagtatgatcagatttttcagaccccttcttctctacctccccagagacaatttgatcattctatccctttactgtctggagtttccccagttaacattcgcccttatagatactcacctgcccagaaggatgagattgagaggcaggtcactgagatgttggcctcaggattgattgttcacagctgtagtccatttgcttctccagttttgttagttaaaaagaaggacaatacttggaggttttgtgtggattatagaaggcttaattctttgacagtaaagaacaagtttccccttcctattgtggatgagttactagatgaacttgctggcaccaaatttttctctaaactggatcttcgcagtggctaccaccaaattcgtatgaaagaaggggatgaagagaagactgcattcaaaacacaccatgggcattttcactttaagaagctctctatctatgagaaggaatttttagccattatgatggtaattgataagtggcgctcttatttgatccggggtccattcactattaaaattgatcaccagtccctttgtcatttggatgatcaagtattggggagtgaattacaaaagaaagccatgactaaattgattggtcttcaatataagtttcagtacaagaagggggttgataataagttagctgatgcattgtctcgggtggggcatttctttgctgtgcaatctgtttcagtgactcaacctcagtgggttcaggaggtcattaactcctatgtggtggatcctgcagctcagcaactcttgactgaattagcagttgtcaatcctaatgctaaaggattttccttgtccaatggtctcattaagaaagagggcagaatatgggttggggctaattcggggttgcagaccaaattgattacaacctttcattcttctccagtagggggacattccgggattcaggctacttatcagcgtttgaagaaactttttctttggcctggtatgaaaactgccgtggcggaatttgtgcaacaatgtgccacttgtcaggctgctaaacatgagcattgcaagtaccctggactattgcaaccgttgcctattcttgctggggcttggcaggatatttcgatggatttcatcgaaggtttacctctctctaagggcaagaataccattttggtcgtggtcgatcatttcactaagtatgctcactttctaccactgaaacatccattttcggctcttcaagtggctgaagtcttcctggatcaggtggcaaagttgtatgggatgtccaagtcaattgtctctgatcgtgatcgagtgtttactagtaacttttggaagacactgtttggcagatttcatattcctcttaatttgagcactacctatcaccctcaatctgatggacaaactgagcgtgttaatcaatgtctcgagatgtatctcaggtgtgcagtttctaacactcctagcaagtgggcagtctggcttcctttggcacaattttggtacaacacttgttttcacacatctctacagtgttcacctcataaagccttatatggtgctgatccttcttatggattgttgccgtctttatctgagggagattctgaaggtcaatcggctgatgctgctgaaatactcaaaacacgcaccttctattctagcattcttcagcatcatttagcccgtgctcagaatcatatgaagcaaattgctgattctaaacgcacttttcgcacttttgctgtgggggattctgtttatctgaagctacaaccatacgctcaacattcggtggtgaatcgtccttgccacaaattggctatgaagtattttggtccctttgtgatcttggagcgtattgggtcagttgcttatcgtctggaattaccggaggcaagtcaggtgcacccagtgtttcatgtgtcccagcttaagcaatttgttccttcgtcagtccctgtcttttcggagctaccggacattgtggcgctggatgaggtggagctgcttcctactgcgattttggaccggcaaatggttaagaaagggaatgcagctgtggtgcaagtcaaggttctttggggtactttgcaagatcactttgctacgtgggaggattatgaagttctttgcaccagatttcctttggcgccggcttggggacaagcctgtgctccagcgggcggcaatgtcatatcacaggctatgacaacggacgaggaacaggagaaggaagcgtaa

SEQ ID NO: 73452 - DNA, 155 bp, Oryza sativa
  Clone ID: PAT_MRT4530_73731C.1
cgaaaacaaaacaaccaattagagagaagtggttaggatcactatctggatgcaatgcaacacagttaacggacggatcctactacgcatgaggcaggccagataaacctattactggccggcggcgaaaaagctgaactgcaggggctaaaccc

SEQ ID NO: 73453 - DNA, 902 bp, Oryza sativa
  Clone ID: PAT_MRT4530_73732C.1
cgaagagtccgggagaagagcaaaaaagcaaaacagcaaagcgaggagagagatggcggcgaggcgaggtcgagggcgcgggcgcgagtgggaggacgacgacctcggcgtcggcggcgggcagcccccgcacctcgccgcgcccgtcgtctgcctcgcccgctccgccggggacctcgccgccggcgccttcgtcggctccctcgtcggatacgggcaaggtttgctcactaacaaaggtatgaagggttcactcagcagtgctggatcttctgccaagactttcgcagcactgtctggtgtccaaagttttatcctgtgcttgctgagaagattgcgagggaaagatgatatgatcaatgctggcgtggctggttgttgcacaggacttgctttgagctttccaggtgcaccgcaagcgatgttccacagctgtgtcaccttcgcggcattctcttgcatcatggatggactcaataagcagcaggctgccatggcagcgacacttgccagtaaaccttcaaccattaagcatcaggagggagacgtcctcccaccgttcactcttccaccgctgctgaacgcttcggacgctttagcttcatgctgccaagccttcctcaaaccgaaggactagactgctgaagaataatcacaaagaaaatcttgctccattagttttgtatctgcccttagtattcggaattcatgcccagttatgtgctatgttttcctgaacttgctttaactttgatcctgttttggttctgtgggtatcatactcccaatttttgtatctattttgtttacgcactttgtaacaagcttaatgaaaaaagataatagcaatatgagtgcttatcaggctaaaaaaaaaaaaaaaaaaaaaaaaaaaaaaaaaa

SEQ ID NO: 73454 - DNA, 568 bp, Oryza sativa
  Clone ID: PAT_MRT4530_73733C.1
ggcatcaactcaattgttttactgattcaacatgagaaacaatcgcatggctggtattagatgtctcgctaaatttcttagcaagcatatctaccaatttacccatcacctattcaatcccttggttttccctattacagcaagttaatagcagctatatcccttcttcttgcctccacaagttaatctcttccccttcttttcttgctgtgagacctcaatctgaccaaatcctcaccttctcagcagcagcagcagcagaaaatcctcaccttctcgagcagcagccgcagcactttctcaagcagcaagcagcagctgcaccttctcaagcagcaccttcacacggcagcaagcaacagcaccttcttctctccacacgccgtcgccaacttgccctccgtgcacgcggtctccgttggcgctccctgctagccaaaccttcttctctccacgtcggaatcctccaagcacaaccacagcagccaccgctacctccaccgtcaacacgctcgcttcctcgccgggagctccagcaccacacgccaatacaccgccggtgcgccct

SEQ ID NO: 73455 - DNA, 1284 bp, Oryza sativa
  Clone ID: PAT_MRT4530_73734C.1
atggctcatgcccttccaatggaagcgtcggcggtccatgggtaccagagctcgacggtcgtaggcgtcgccgccgcaggagatgggggacggcggggagaccgcgaggggaagccgtcggcggcgaggagaagtaggggaagggaagacgatgtggcgccgtcgctcaagggaggggagagagcgagagaacgcgcaccgccgcaacgccggaccaacgccgaccaccaccgcacccgtgcccaccgacggaccagcgccgccgctgttacgcctctaccgccagaccaccgcacaccaatgcatccctcatccgcaggagccccgcccgggactgcccccgacggcgccgcggtggttccccctactgccggagccgctgcggcgctcaaccagcgccgacggaccaccatagcgccggagctccctcatcctcgcgacggaccagcgttgccgctgctgcgcctccaccgccggaccatcgcgcaccaccgcatcccccttccgccggagcggagccacgcacgggactacccccgacaacgccgcggttgttccccctactgccggagccgctgcggcgctcgactagcgacgccggaccagcgcaccgccggactagcaccgacggaccactgcagcgccaagccaccaccgcggtcccatgttccgctaattcccatctcgggggttttcgtgttcgcctcgccttgccctggctcacttcggggcggaggtggcgtcgctgtccccgatcgaattctgccgatgcgcccctggctttcaagatctaagtgcatgcgcgccctcgccgcatgccgcccggcgctccggcagtccgggtggccggacgcgatcggctccgagatccgccccgccgtggccggatctggcggggtggcggctgacggcgggggtggagacggcgatggtaggggcgagggggtgtgggcgacggtggtcggaatggcgacgatggaggcggcggcggggatggcgacgacggtggggttggcaacggcgatggattggcgtcagggtggcggatccggcagcgccggagtacgtcggcagctggctggtggcgtcggcaggtggccgacgacatcagtggcgggagttgcggccggcagtggtggtgaccgggcaaggtggccgtggcgcgaggaggcgcggtactggtggggggcgggtgcagtgatgcccacgtgtcggcagaggtttagctggcggtggagtattggggtgtcaacggtggataggcaggcggtggatggcgggtga

SEQ ID NO: 73456 - DNA, 1433 bp, Oryza sativa
  Clone ID: PAT_MRT4530_73735C.1
atggagagtgaatactctttgctgctgatggatgatcgatcgatcaacgctgcatttgatcatccgccaggtcctactcataggtgttattggagcttttctcgcttctggttacagcaaaattctaacctcaagcgctctaagggatatgaacaaggcgagctctcattagcacatcactgttcaatgcaaattaatctggttgttttcactgtcttcacaccatccctgatgtttgctagcctggctaagacggtcacactttctgacgtcatttcttggtggtttatgccagttaatataggaatcacattcattgttggtggcactctaggctggatagcatgtaaaatactgaaaccaccacagcatttccgaggaatgatcattgccttctgttcagcaggaaatcttggcaacttgctcttgatcattgttccagcagtctgtgacgaagacggcaacccgttcggaaaagaccggagcctttgccgctctcgtgggctctcctactcatcattatccatggctcttggtggcttattcatatggacacatacatacagcctcatgcagaaggcaggcaaaatgtaccacaagatgcagtccaaaagcatccagtgcccggccgacagcgatgaagagcatcatcctgcacaaggtcatgatcaagtaaaattagacggtgaaactgcttacgctgatgaggaggcggctcttctggtgtcagctaaactggctcctgaacacaatgaagagaaccaaatggaagctccacttctgacttgcgagagagagattgctaacaaaggaggattctggacaaacctgaaggaaaccgtccaccaggttgtcgaggagctgatggcaccaccaactgtatctgcaatacttggatttgttgttggcctagtcccatggttgaaatctcttgtcatcggcaatggcgccccactgagagtcatccaggagtccctccaactaatgggcatatttcaagtgtttcctcagcctttactcacggttcgtttgtctttcagcaatggcacgattccttgcatcaccctaatcctaggggggaatctgacacaagggctacggaagtcggtgctgaagcgtacggtgatcatcacgatcgtctgcatacgctacgtgatccaacccttgatcgggatggcggttgtccatgctgcctatggggttggattcttgccacacgatccattgtaccgctacgtgctgatgatgctgttcgcgctgccacctgcaatgaacatcggtagcccctggctcagtttgtggacttacctgattgctgccattgcgcttacgacgtggtcgacgatattcatgtccatcctgtcttgaggttgagggtgacaatcaagaagaaccgaatttgtggtaatattcagctcacggatagcacgtaa

SEQ ID NO: 73457 - DNA, 513 bp, Oryza sativa
  unsure (1)..(513): unsure at all n locations
  Clone ID: PAT_MRT4530_73736C.1
ttttgacctgcggcggcgacgcctacgaccgtcgagctctggtacccatggaccgccgacgcttccattggaagggcatgagccatcagtgctaagctccaatgctgattacgaagaatcccatgcttgggatgaccgccacagcggctgcgaaggagccacttcccgagcagtcgtgccatgatcgataagagtgatcgatggatgcgagcgtatggtgtccattgtgcagtcgtgcaggctttccctataaattaattgacaggaggaagaaatcacaggtggtttaccaatttcaatgacattttatagttcatcaaagaattgaacttctatatggtagccgggcaaatagcagggatgtttctttctctacacctgtatcttggctgatcatttagtttctttctatatatatatgctggtaaatgctctatgaagcataatagttcttatggcttctggattacacttagctgattntatcttgcaaaattcaacactttttttttt

SEQ ID NO: 73458 - DNA, 1050 bp, Oryza sativa
  unsure (1)..(1050): unsure at all n locations
  Clone ID: PAT_MRT4530_73737C.1
ccaatactatctaatcatgttcttatttagtgaaaaaatgatgctgccatcacaccacctgcaaactaaatcagggtagcgattcagtctatataaatataggtgtatgtttcccagattcaaatctttgtgacctagataatggtgaagtatgcttatccaattgaatcaacctaaaatgagattatgttttatgtgtgatggttgaaagaaacttactcctttctccatctaacttattgatatgaagtacagtcctaacaaacacgtctacagtaacctagctaaattatatgtgatttcatatgaactattctagcaagaaggagagcatggagttggttgatatgaagtaatgctttagtgttgtgcgttgacaagtgagtttaatcaatctttggaaatgtgagaattgccagttagctntaagttttctttgaattccatgacaaatgcatgtttgtaaatatagcgcgggtatcgctacatagttgccaacataataacaaatcaactgacataagaacttggtgcacgaattagattatctcatccttttattttggttattgtcaggctttccctataaattaattgacaggaggaagaaatcacaggtggtttaccaatttcaatgacattttatagttcatcaaagaattgaacttctatatggtagccgggcaaatagcagggatgtttctttctctacacctgtatcttggctgatcatttagtttctttctatatatatatgctgttaattgctctatgaagcataataagttctcatggcttctggatttacacttagctgattttatctcgcagaattcaaccactttttttttttatcgtcacatagatgtaagatttcaggttatgtgatggtcacaaacttcagaattcaagttgtattagcctatgttggaacgaagaccttcagaagaactatatgtaatataaacggtgtaaatgatgtaaatgttgtgacacttagtctttccaactatattctttcaatgcttaccgaatatgtgaacaattgat

SEQ ID NO: 73459 - DNA, 600 bp, Oryza sativa
  Clone ID: PAT_MRT4530_73738C.1
atggccaccattgttgcatgggagagtagaaacctgcagctgcaaggaggaggaggtggccatggcggtggcggcggcggtggcggcggcgagcggcgggagtacatgttcgagaaggtggtgacgccgagcgacgtggggaagctgaacaggctggtggtgccgaagcactacgccgagaagtacttcccgctggggccggcggcgaggaccagcccggcgggcaccgtgctgtgcttcgaggacgcgcggggcggcgacagcacgtggcgcttccgctactcctactggagcagcagccagagctacgtcatcaccaagggatggagccgctacgtccgcgacaagcgcctcgccgccggcgacaccgtctccttctgccgcgccggtgcccgcctcttcatcgactgccggaagcgcgccgcctccgtgtcgtcctcgtcgctggtgccaccggccttgatcaaggtgcagctgccgccgtcgcggcctgtcgtcgacgaggaggaggctgcgtgtggccggcggtgcctccggctgttcggcgtggacctccagctccgcgccgatgcctcgccggcgctggatttgcagctttga

SEQ ID NO: 73460 - DNA, 1297 bp, Oryza sativa
  Clone ID: PAT_MRT4530_73739C.1
atgacgctcgcgcgccaccgttgccggcccagcgaggtcgggctgggttttcacccgccatccaccgcctgcctatccaccgttgacaccccaatactccaccgccagctaaacctctgccgacacgtgggcatcactgcacccgcccccctgccgaccagtctccgcaagccgccaccggtcacgccttgtcacctcacgcagcgtcgtcctctacctccatcgaccgcgtcgcaacggcaacctcgccggcctaccaccagtaccgcgcctcctcgcgccacggccaccttgcccggtcaccaccactgccggccgcaactcccgccactgatgtcgtcggccacctgccgacgccaccagccagctgccgacgtactccggcgctgccggatccgccaccctgacgccaatccatcgccgttgccaaccccaccgtcgtcgccatccccgccgccgcctccatcgtcgccattccgaccaccgtcgcccacaccccctcgcccctaccatcgccgtctccacccccgccgtcagccgccaccccgccagatccggccacggcggggcggatctcggagccgatcgcgtccggccacccggactgccggagcgccgggcggcatgcggcgagggcgcgcatgcacttagatcttgaaagccaggggcgcatcggcagaattcgatcggggacagcgacgccacctccgccccgaagtgagccagggcaaggcgaggcgaacacgaaaacccccgagatgggaattagcggaacatgggaccgcggtggtggcttggcgctgcagtggtccgtcggtgctagtccggcggtgcgctggtccggcgtcgctagtcgagcgccgcagcggctccggcagtagggggaacaaccgcggcgttgtcgggggtagtcccgtgcgtggctccgctccggcggaagggggatgcggtggtgcgcgatggtccggcggtggaggcgcagcagcggcaacgctggtccgtcgcgaggatgagggagctccggcgctatggtggtccgtcggcgctggttgagcgccgcagcggctccggcagtagggggaaccaccgcggcgccgtcgggggcagtcccgggcggggctcctgcggatgagggatgcattggtgtgcggtggtctggcggtagaggcgtaacagcggcggcgctggtccgtcggtgggcacgggtgcggtggtggtcggcgttggtccggcgttgcggcggtgcgctggtccatcgatcgcgacaagcgagagaggacacgcgcggcggagtcat

SEQ ID NO: 73461 - DNA, 1129 bp, Oryza sativa
  Clone ID: PAT_MRT4530_7373C.1
atgatcgacaaagccgaaaatttccgacaaagaccgtgtgtgaaatctttctcgtcggcgtcgacgtatccgtttccacgagcccaacgacgaatccactcctcttgccaacgacgacgagctgtagagcaggatgagctgccggtccaaacgacaagtagctccgcggccgccgccgtcgtggtcgccgccgccgccgccgtcgcaacatggccacctatgccacctatggcaccagcaactaattcaggcactacgcatgctagatcaaggtcaaaagccaaacctgtcatcaacttagatgatggtgacaatgttaggactgctaagcgtcttacatgggcatcagatgaggacttgcggttggtgagtgcatggctgtaccactctaatgatccgatcaatggaaatggcaagaagaatgagagctaccggggagatgtagttgaattatacaacaacactacacctattaacccggaaaagggaagtaaagcatctcaaagatcaatggcaaaggattaagagatgggtgggatttttctgcgcctcctggaagaaggctgcattagtttatactagtggatattcagatgatcagttgagagactttgctaatcagttttatgtgaatgactatcctaacgaaggtccattcacagttttgcactattggaaggttcttcatgatgaacccaagtggcatgctgttttggaggagcttgaaaagccacacaagcggagcttggatgatggaagtgacacactatcacaaaaagatatcggagaaaaggagcgtccaatggggaggaatgaagctaagaaacaacgcaatggcaaaggcaaaggtaaaggcaaggatgatgatgacagtttacatgaagatatgaagaagtacatggatgttcaagctgcagctagcaaacgacatgaagagtttttagggactcagcaccgtatttcagatgcaaaagttgaagtagcaaggcttaggagagaggctgtcttgacggaatcatatcaaaaattgatgagcatggacactagtcaaatgactaatgagatgaaagctgagcacgtgatgggtctcaagatgttgagggagaaacttcttggcgatataatataa

SEQ ID NO: 73462 - DNA, 315 bp, Oryza sativa
  unsure (1)..(315): unsure at all n locations
  Clone ID: PAT_MRT4530_73740C.1
ggggaacaaaactttcgaactcttttttttctccttggtttctttttcatttcattccggtgggtggcaccaagcggttcaaaccccctacccaatgcgaacccgggggggggggacatcccgggctgttaacccctacccctgggtgggtgggtggggggcttctcggctcgggggagccgctgggcccggtaacggctcgactcggtggttgggtggttctggcccgggtggcttggggnttctggccccggtgggccccgcctttcggttcctccagttcccgccggggtcgccgccgttgccgccgccccg

SEQ ID NO: 73463 - DNA, 828 bp, Oryza sativa
  Clone ID: PAT_MRT4530_73741C.1
ccccgagatgggaattagcggaacatgggaccgcggtggtggcttggcgctgcagtggtccgtcggtgctagtccggcggtgcgctggtccggcgtcgctagtcgagcgccgcagcggctccggcagtagggggaacaaccgcggcgttgtcgggggtagtcccgtgcgtggctccgctccggcggaagggggatgcggtggtgcgcgatggtccggcggtggaggcgcagcagcggcaacgctggtccgtcgcgaggatgagggagctccggcgctatggtggtccgtcggcgctggttgagcgccgcagcggctccggcagtagggggaaccaccgcggcgccgtcgggggcagtcccgggcggggctcctgattcatccctagccgccactgttccccaccgttctctcgctctctcccctcccttgagcgacggcgccacatcgtcttcccttcccctacttctcctcgccgccgacggcttcccctcgcggtctccccgccgtcccccatctcctgcggcggcgacgcctacgaccgtcgagctctggtacccatggaccgccgacgcttccattggaagggcatgagccatcagtgctaagctccaatgctgattacgaagaatcccatgtaagccatcagttcttgagcctaagctgctagatctccttttcccctgtattcctacgctgtcatgcatgttctgcctgcaatgcgaggaggcttgggatgaccgccacagcggctgcgaaggagccacttcccgagcagtcgtgccatgatcgataagagtgatcgatggatgcgagcgtatggtgtccat

SEQ ID NO: 73464 - DNA, 166 bp, Oryza sativa
  Clone ID: PAT_MRT4530_73742C.1
ataggattagagaaaaaacagaatacattgacgtgggacaatatttaaatttcaaaaatttaaaaacgacggtcaaaagttttgaattatttagggaagctaaatttaaaagcattgtttatataacggggaccacgatatcaatcttaggaaaaaattaaagttg

SEQ ID NO: 73465 - DNA, 515 bp, Oryza sativa
  Clone ID: PAT_MRT4530_73743C.1
cgtctgcagacaccgctcccagtgcggcggcgctgcgccggatccaagatgttccctgatgtggagtcacacagccaccaccaagaccttcgtcctcctgctccatccaacaagcgagctctggaggaatggagatgccagttggagacggctgctcactgcatgctcactgcaactgaatctatcgtcgtcgtcgcccggcttgccatgaggatttatcgtatggatgctgctactgtcgatcagagctttgatcgagcacttaatttgcttgcaattagtacccagcttatatgtaggcagcccattccttttgctctgacgcctaaataaaaccgtcgtcgtcgttgtcagtgtgtgcgtgtgtcgatcaatgttggatggatccactagctagcttggatggatcatctatcatcatggtgatctcatcatgtactcctgctccatctcctcatgcgtgccaggcttcttaatataatctacctctgctttcatccaaaaaaaaaaaaaaa

SEQ ID NO: 73466 - DNA, 167 bp, Oryza sativa
  Clone ID: PAT_MRT4530_73744C.1
tctttatgagcaagaaaatggacaggaagagggtgggcatcattagcgccggtgcgagcttcatatccaaatgcaaacactcactgtacaaattatttaacccaaattaattaaaagtaacctacatcatacattttgtttataataattccattaagtaatattct

SEQ ID NO: 73467 - DNA, 268 bp, Oryza sativa
  Clone ID: PAT_MRT4530_73745C.1
aagctttttttttttaggaaaaccaacattcaaattagtgggaatatttcgtataccaaagttcttacaaattctgcagctctcagtacaaataatggaatgggccttagacttcttctcgtttcttctatattgatgccagagtagattaatatatatgggctcaattaagcagcaggaaaggacagtaaaagggactaattaaaaaaatgaattttagggataggtgccatgtatccatcggccgcaatatatcctcgttaagctt

SEQ ID NO: 73468 - DNA, 541 bp, Oryza sativa
  Clone ID: PAT_MRT4530_73746C.1
ctagtggatccccgggctgcagtggcagaagcaattcttgagctcaatcagcaacaacatctatctccttcttgcttagttgaggccttcgccctcccaagaagaagaagatgtcttgctgcggcggcaactgcggctgcggcagcggctgccagtgcggcggcggctgcggcgggtaattaactaactaactaaccaactgctaattaattcactcaagagaccattgtgacacgcacagatcgataactgatcaatattaacattaatacgcatggatgcagatgcaagatgttccctgatgtggaggccacagccaccaccaagaccttcgtcctcgctgctccatccaacaaggcgtgcgctgcagcattggtgctggcggtggggtccggcgtgcccggcggcggccgccgctactcctgcttgtgtggctcctccgccagcccctgcccctgctgcgcctgcaactgaatctatcgtcgtcgtcgcccggctgcatgaggataaatcgtatggatgctgctactgtcgatcagag

SEQ ID NO: 73469 - DNA, 770 bp, Oryza sativa
  Clone ID: PAT_MRT4530_73747C.1
cctcgaggccggcccgggagcaaccaagcaagaagcaattcttgagctcaatcagcaacaacatctatctccttcttgcttagttaagtccttcgccctcccaagaagaagaagatgtcttgctgcggcggcaactgcggctgcggcagcggctgccagtgcggcggcggctgcggcggatgcaagatgttccctgatgtggaggccacagccaccaccaagaccttcgtcctcgctgctccatccaacaaggcgagctctggaggaatggagatggcggcggacagcgcgcgacgcaccgtgcttgcggacgcgtgggcggacgcgtgggcgcccctcgacgtcatcgccatcaacgacaccggaggcgtgaagcaggcgtcgcacctcctcaagtacgactccacgctcgacatcttcgacgccgacgtcaagcccgtgggcgacaacgccatctccgtcgacggcaaggtgatcaaggtcgtctccgaccgcaacccgtccaacctgccgtggggcgagctcggcatcgacctcgtcatcgagggcaccggcgtgttcgtcgaccgcgacggcgcgggcaagcacattcaggccggcgccaagaaggtgctcatcaccgcccccggcaagggtgacatccccacctacgtcgtcggcgtcaatgccgaccagtacagccccgacgagcccattatcagcaacgccttctgcaccaccaactggcttgcccccttcgtgaagatcctcgaccagaagttcggcatcat

SEQ ID NO: 73470 - DNA, 1227 bp, Oryza sativa
  unsure (1)..(1227): unsure at all n locations
  Clone ID: PAT_MRT4530_73748C.1
ggccggaaaaccccccgccacgcgtccgaaaaattagtggcgagattgcaaggatgtgtgggtggtggaccctggatcgatcacctccattctttctccgcatctcgccacagtacgcttcgctgctctcccgcctatatataccacctcctcctcgatcatcagttcatcagcaaccaaagcaagaagcaattcttgagctcaatcagcaacaacatctatctccttcttgcttagttaagtccttcgccctcccaagaagaagaagatgtcttgctgcggcgggcaactgcgggctgcggcagcggctgccagtgcggcggcggctgcggcggatgcaagatgttccctgatgtggaggccacagccaccaccaagaccttcgtcctcgctgctccatccaacaaggcgagctctggaggaatggagatggcggtggagagcggcgagaacggcggctgcggctgcaacacctgcaagtgtggcaccagctgcagcgggctgctcctgctgctcctgcaactgaatctatcgtcgtcgtcgcccggctgcatgaggatttatcgtatggatgctgctactgtcgatcagagctttgatcgaggccttaatttgcttgcattagtacccagcttatatgtaggcaggccttgccttttgctctgacgcctaaataaaaccgtcgtcgtcgttgtcagtgtgtgcgtgtgtcgatcaatgttggatggatccctagctagcttggatggatcatctatcatcatggtgatctcatcatgtactcctgctccatctcctcatgcgtgccaggcttcttaatataatctacctctgctttcatcccaaaaaaaaaaaaaaaaaaaaaaaaaaaaaaaacaaaaaaaaaaaaaaaaaaaaaaccttctttaatttggcctccacagttgatcaccccncctgcccaaccatcccaatttgaatataaatgtgatatgagcaatccagtatccactgaagtaggacaggctcttcgtgtgccacattaatctgtaaccccctctttactcacaatggcaggcaatattgccttaccatttccatatgcctcgactaaggaactctcctcagtctgcatttatcctgatatgtgctgtaataaaaaggatgcaatgatttaacagatagattagctgaaagtgaaggatagcatgagattgaacgaaaaaaaaaaaaaaaaaatttgcggcc

SEQ ID NO: 73471 - DNA, 441 bp, Oryza sativa
  Clone ID: PAT_MRT4530_73749C.1
ctgatttaacactgatggcattggcaggaataggcctgcgtcacgataagaaattaggttttgcgtcttgtgaacgaagaccaggtgctactgaaggggtaaatgtactaatcgaaaaagaaaaccaggatggacaatgggcatatggtatcacttgcattgaatacactgagtttgaaaaatatggcatcccagaaccaacagtaacaaatggcagtttgcaggctaactatccagcaaatacaaatatactatatgttgatctgcaagcagcagaggaagttggttcgcgcaaaaatgctagctgtttacccggaatggtgctaaatttgaaaaaagctgtgtcatacttggatcatctgggctttgagttgctgctggaggcaggttagaatgcacgatgcaaaacatagcggataattttatgaacacatataacta

SEQ ID NO: 73472 - DNA, 242 bp, Oryza sativa
  Clone ID: PAT_MRT4530_7374C.1
caaaaaccacgatttataaagtgccggatatgaggtgcacaaattaacgttacattgagcttcaataaaacatcatgcgaaaagccagcaaaaacaaatggcagcatacaggtaatgaagctctactggagtagcctcgaacaggtccgtcttattttcagtggcactctactccatttgttgcgaaagagtgaccatgttctactgggtggcgtacatgttacggatcaggtgaactacgc

SEQ ID NO: 73473 - DNA, 203 bp, Oryza sativa
  Clone ID: PAT_MRT4530_73750C.1
ctcggccacgcgttcatgcacgcatgcacatatgctatgctacgtgataatgcatgtatggacatgtaatgatataacgtatacccgatatgtgtacgtataataaacgtacgtatgctgctgagaataaatccgatgaagaaataaataaaaccgtgcttgcatccacatctggattagtgcatataccggtgcatgcattt

SEQ ID NO: 73474 - DNA, 2646 bp, Oryza sativa
  Clone ID: PAT_MRT4530_73751C.1
aaggccttccgcaggctgcatgatcccgacagccgcctcgacgtgtggtcgccctgcctcccgccgctccgctcctcgagctgacagcggctgccctgccgtgtacctgtcttcttggagttctcactcctctcccagtccccgtccttcgccatccgcccgcagagggtcttcagcgcgccaccatagccagggaaatggccggcgccggccaccgccagcgagaagacgcgcgggggggaggacctggcgctcgggacagggctcgcgcgtatctccgccctgcacgcgagcctccgcggggatcgctccctcgctgacaagctcatcgcgctggacgacgagaccaaggtggtttagtgcttaagggacgggccgaattttctggttctgagggctctcgagcagcgggatgtgtgcatactcaaatgccatatcgccgcatgccaggagcatgtgctcggcgccaagcaagacgggaacggtcgccaccacaagcatcttcacgatgataacgattggagcgatgtgcgattcgccctaagacaggcgctgtataacaaggctgcttttgttgccaagtggagctcggagggagtggtggagggtgtggcggagagcggggaatcggagcttctccggcgtctgctcaaattcctcggcgacatcgacgtgttctatgactgcattggaggcatcatcggctatcagattatggcattggagttgctttcagcctcgaaggaccacaagcaccggcctagcaaacacaagtctcttgacttccatgttccaagtggacttaatctaatggatgatagtgaatatgcatctcaagctgctctgtgggggattgtgggtttgccagatctaggagagatttatccgattggtggtgctggtgatcgtcttggtttagtggactcggatactggtgaatccctccctgctgcattgcttccttattgtgggagatctctattagaaggcctcatacgtgatctgcaggctagggaatttttgcatttcaagatttttgggaaacaatgtataactcctgtcgcgatcatgacaagctctgtgaaggataaccatgagcatataactgcaatatgtgaaagacttgaatggtttggcagaggccgtgagaatttccgcttatttgaacagcctttggtacctgtagtaaatgctaaggatggtaaatggttaaccagcggagcactttttcctgttggtaagcctggtggtcatggtgctatttggaaacttgcatgtgatagaggtatattccaatggctttaccaaaatggcagaaaaggcgcaactgtacgtcaagtcagcaatgttgtggctgcaactgatttaacactgatggcattggcaggaataggcctgcgtcacgataagaccagtgctactgaaggggtaaatgtactaatcgaaaaagaaaaccaggatggacaatgggcatatggtatcacttgcattgaatacactgagtttgaaaaatatggcatcccagaaccaacagtaacaaatggcagtttgcaggctaactatccagcaaatacaaatatactatatgttgatctgcaagcagcagaggaagttggttcgcgcaaaaatgctagctgtttacccggaatggtgctaaatttgaaaaaagctgtgtcatacttggatcatctgggctttgagtgtagtgtagatatgcttctgagcgatgggttcaatgatgtagaatatatttctctcattttgcgtagtattgattactccatttcttgttgctgctggaggcaggttagaatgcacgatgcaaaacatagcgataattttatgaacacatataactacaggtgcagtaaaggaatagaaagtgagctagacacattcattgtgtacaacgaaaggaaaaaagtcacttcgtcagctaaaaggaagctgaaatcagaagataagtcattgcaccagactccagagggttcactccttgacattatgcgtaatgcttatgatctcctttctagctgcaatgtaaaggttcccaaggtcaaagacaactgtgaatacttgcgttctggaccaccttttcttatatttcttcatcctgctttaggtccattttgggatatcacaaggcagaagtttgtaggtggctcggtctctcaaggttcagaattgcaaatagaggtggcagaatttctatggcaagatgttgagctcgatggaagcctaatcgttttagctgacaatattatgggttcaaccaacaagaataatactggagaacaaataatgcactatggtgccagggatcaactggattctgccaataatgtctactggaagcatgatgtcgagagatcagaatctgtgaagatcattcttcatgaaaatgccgaatttgaggcaaaagatgttgtccttaagggtaaccatatctttgaagttcccactggtcatagaatgcgcattgttcaagatggaccagaatttgttgctaagttagatcccataagcaaggaaatgatggacagtggaacctggtactggaagtatgcagtagatggagctcatgtgaagttggaaatggacctatttattttgaaacagcatgtcaatgatctggagcattggtga

SEQ ID NO: 73475 - DNA, 509 bp, Oryza sativa
  Clone ID: PAT_MRT4530_73752C.1
cattcttcatgaaaatgccgaatttgaggcaaaagatgttgtccttaagggtaaccatatctttgaagttcccactggtcatagaatgcgcattgttcaagatggaccagaatttgttgctaagttagatcccataagcaaggaaatgatggacagtggaacctggtactggaagtatgcagtagatggagctcatgtgaagttggaaatggtagaactataagggcattatcaacactaaattcttgattcattgatttccagctagcttaatcatatcgagggcacacgtgactaatgaattttgttgactaaagtccatcctgtagttgctgttgtaaaggttttaggtctaaatagattgatgtacagtgcacttgaatattaaggcatgctgtcagcctattctcttactcattcaataagtgatgtacggacagagatatttataaatgttgaggagaattctcattctccgaaattccccaaaaaatgtctccttttgtttc

SEQ ID NO: 73476 - DNA, 364 bp, Oryza sativa
  Clone ID: PAT_MRT4530_73753C.1
gtgttgataaacatatataccaacatgcgagaatcagactagatacaagaagaagcgtggatctcaaagtggagtagtatagaaagtatgaactgtatcacgaatgatgcattcaagggtagaacgcattatgaacaagaaactttacccgatttatttccactagatttaaacagatttgcactgcatttacaactggcttcccctatttttggagtgaattaaacgatattcgttattgaacctgttaatggcgatcacataagccagacttatgacacacatatccaagattgtgcttggaaagtataccgacgcttggtggggtgctaatgacttaaatttgcatactatcattatatgg

SEQ ID NO: 73477 - DNA, 1598 bp, Oryza sativa
  Clone ID: PAT_MRT4530_73754C.1
ccgccgcggcccacctcgcggagcgcgcggcgggcggcggcgcgggactggaacgtgacgaagccgaaccccttgcacgcccccgtggcgcgccgcgcgacgacgtcgcactcggcgagggggccgaagcgggagaacgccgcggcgagcgcgggggcgtcggcgtgcggtggcaggccgtggacgaacagcctgcggtgggagggggacgcgtcggcggcggcgcggatgcgggccagcagcgtggggtcgtcgtcggctcccgctccggcgccatggccgggcaaggcgcggcccaagcgggcggggcgcgcgggaggagagagggggatgggtccgggtggaccggatccatcatgccgggtcccgggacgggcccacgagtcagcgactcggcgcaccgctagggttttgcggacgcggctcacggcgcggcacgcgggtggaccaagaggtggagggcccatgcgcagcctaagggctctccgtggaccgcgcgcacagaagaaagggcggtgggggcggctgactaggtgcttgacccggtcgcggccgatgtggcgccgacgtggcgccttcgtggcagccacgcgggccggcgagaggaggaagaaggaggccggccgagacggatggcggacggcggcggcttcaccgggagcacgacccgacgattcaagagggagggagtacaccggaacgacgagatagaagaaagggggttgatccactggctcggattcaccggaaggaggccggcgacgacgaatcgcggtggtgcttgccggcggcggcaaaagagggaaacgacgacgatgcgacgagagctcgattcctaggtacttgagcatctacgcgacctccagagttcatttctagagtcggattgggtggagctacaccgaggaaggccggcgacgagcggctactaccgagtttgggcagcgacggtggcgagcctacgacgagcagcggcggcggtcggggcggcgccagagaggagagggagcgaggagggagaacgggagatgcactaccgagccgagacgggcgctgtgacgagcggccgatgacgcgggagcgagctctctggcctcgggccggggaaggggaaggagacggcgcctggagtcccgcgtcagctcctcgcgcgcacgccggcttcaccagcgcgcgcgatggaggggggaggcgaggacagcggtagcaaggcggcaagggcacggtggtggcgagggaatgaacgagagggagatggggcggctagggagcgaggccgagggctctgcctccatcccttggacgcatgcacacagtcggggctgggcgacgcgcggtcacgggcggcgtcagggctgacgcggcggcgaccgagcggctggcctcgagcgagcacacgcgcgggaacgagcggcatagccgaaaatcgaatggcggcagcgggaaatcggcgatggcggcagcgctggcgtgggagagagagatcgaacgagagagagagaaacagcgagagagaggaagaggacgagagagcgagagaactctctcttggctcggctcacgcgcatgcatcgcacgtgcgagaggagggaggagga

SEQ ID NO: 73478 - DNA, 1409 bp, Oryza sativa
  Clone ID: PAT_MRT4530_73755C.1
aatgaataagaacataacctccttagaatgtgtttcgtcaagatagtacggaacactgtacaaaattccgaaagttgaagagaggatcagaggatcacatggatgcttcatgaactgtatttgcatctatggttcaggttagcaaagagccaaagacagaggcatctactgacaagcatcctagagggtttgaggcataaatgcaacaacttaagcctctgagtgtgacgtagatttgctgctcccatactccattggtccataccatgttgaacacccagaagcgaggttcacaggctcagcactgatccctttgtccaatggaggaagccaacattggcgaggacggtggcttgtatggcccaagcaatcctgcaccgccgcttattccagcagcaatcttcaccggagatggcaccaccgctgctgcagcagctgctggactccgaggtgccaatggcttcattggcaggtgcagccaccggactactgcgggcaacaacagcagccggatttatggatgatgcagctgctgggttcggcttcagcgcagcggctgcagcgccggcagcggtgacgccacggaatacggggcaggtggtggcggcggcggcgcgcgtggttggctcttccgggcggggtcggaggctagctggcaatgcagcgtgcgcccctctaagacgctgtactgatcctagagcgccctcctggggtgatccgccgtgcggtacacgtaagagggcgcagccgcgggaggagcccgtgtcggcgtcgaagccgaacggcccgccctcgagctccccgaaccccgcgaagaaggcgcgcagccgctccgcgctcgcgcccggcgcgacgttcgtcacgtacacccgcctccccgccgccgacgccgccgccgcggcgccggcggtggcgtactgggcggagacggcgcggccggcgacggcgacgccgccgcggcccacctcgcggagcgcgcggcgggcggcggcgcgggactggaacgtgacgaagccgaaccccttgcacgcccccgtggcgcgccgcgcgacgacgtcgcactcggcgagggggccgaagcgggagaacgccgcggcgagcgcgggggcgtcggcgtgcggtggcaggccgtggacgaacagcctgcggtgggagggggacgcgtcggcggcggcgcggatgcgggccagcagcgtggggtcgtcgtcggctcccgctccggcggtggcggcggcgtccgagaggagcgcgaggaggcggggcttggagtaggggtcgaggaggcggcgcagggaggtcggggaggacggcggcgagcagtcggagtcggggccggggccggagtccggggaggggtcttgccgaggtttgcggcgtttgcggttgggtttctctttctttttctccat

SEQ ID NO: 73479 - DNA, 1645 bp, Oryza sativa
  Clone ID: PAT_MRT4530_73756C.1
ataagaaaaggaaggagggatgagatttagacttcctttggcggctcgggtacggcccaagggataagcgcggcgtggtcgagccaatgggccgggcgcgggcgcgagaaggcggccaatggccgggcaaggcgcggccggggatgggtccgggtggaccggatccatcgtgccgggtcccgggacgggcccacgagtcagcgactcggcgcacggtggaagggttcatgcggcgcggggcgctagggttttgcggacgcggctcacggcgcggcacgcgggtggaccaagaggtggagggcccatgcgcagcctaagggctctccgtggaccgcgcgcacagaagaaagggcggtgggggcggctgactaggtgcttgacccggtcgcggccgatgtggcgccgacgtggcgccttcgtggcagccacgcgggcaggggcgaaaggggaggaggaggaggaggcgcccgagatggacggcggacggcggccgagttcaccggagctcgtcgcgacgattcgagagagagggagtacatttgaacgataggacggacgagagggagtgagccaccggatcggattcgccggagggaggccggcgacgacgaatcgcggcgacgcttgccggcggcggcaaaagagggaaacgacgacgatgcgacgagagctcgattcctagggacttgagcatctacgcgacctcctgagttcatttctagagtcggattgggtggagctacaccgaggaaggccgacgacgagcggctactaccgagtttgggcggcgacggcggcgagcctacggcgagcagcggcggcggtcggggcggcgccagcctaaggagaggagagggagcgaggagggagaacgggagaggcactaccgagccgagacggacgctgtgacgagcggccgccgacgcgggagcgagttctccggcctcgggccggggaaggggaaggagacggcgcctggagtcccgcgtcagctcctcgcgcacacgccggattcaccagcacgcgcaatggaggagggaggcgaggacggcggtagcaaggcggcaagggcacgaaccgacattggcggtcaaggagagcgagctggcggtcatcgacgcgtgcagcaaaggcggcgacaggtgatgacgccggcggtggtcggggaaagggaaaaagaagggggaaaaagagaggctcgctccaagccgattcgggaaaggagtatgagggagagggagagctcggcctccgggttttggcaggacgcgcgtggagcggctcgggcatgcgcgcggggccgtgcggctgcgtggtgcagcgcggcagggcagcggggccgggcggcgcaggcgcggcaggcgcggcagggccgacgcggcggcgaccgggcggtcggccacgcgcgagcgcgcgcgcgcggacgtgagggcgcggccggattcaaacagcgacgacgggaaatcgacgccggggagagggaagaaagaaagagagagagagagagagccgagagagaaggagaaacagagagagctcggctcggcttggcacgtgcaacgcacgtgcgaggctgagggaggagaaacggttgagggagggaggtgggctgagggggaatacggcccacaacacccgagggagg

SEQ ID NO: 73480 - DNA, 174 bp, Oryza sativa
  Clone ID: PAT_MRT4530_73757C.1
gcgcgccgcgcccaggcgctgacgtcatcggccgccgtctccggcaaggccgacgcggcggagggaggcgggagatggccggagaaaggggagcatcaggagtgggagaagaggcggcacgtggcgttgatctcgagcgaggaggccgatcccgagacggccgaggtgctttga

SEQ ID NO: 73481 - DNA, 603 bp, Oryza sativa
  Clone ID: PAT_MRT4530_73758C.1
atggcggcggggaaagggaaggggaaggagggagagtgcgacatggcggcggcggcggcggaggcggagaagaagggagagggctcgacggtgtcgcgcggagcggcgggggagcgggtggtggaggacagcggcggcggcaggaggacgatccacctcaagagcaaggatggcaagcagcatgatgtgacggaggcgtcggcgaggctgtccaagaccatcgccgggatgattctcgccggcggcggcggcggcggcgccgaccagtgcatcccgacccccgacatcgaccacgataccctccgcgtggtgatgcagtactgcgacaagcacgccgccgacgacgccgacgaggaggatctcaaggagtgggacgaagacttcgtcgacgagctggaccaggacgccctcttcgatgtcatcgcggccgccaactacctcgacatcgatggcctcctcgacctcacctgcaagagggtcgccgacacgatcaagggcaagacccccgaggagatccgcaaggagttcaacatcgtcaacgacctcagtaaggaggaggaggaggagatccgccgggagaacccctgggccttcgagcagtag

SEQ ID NO: 73482 - DNA, 369 bp, Oryza sativa
  Clone ID: PAT_MRT4530_73759C.1
tagatttattaatatctatatttatataagcaatgttccgatcttacctgatttaattactttcatcctatatgcctgattgatatgttaaatctgccgtttatatggttgtaatggataacttctttcattcaaggtggtcaagttggtataaaagtaaacgaccaagtcggcaataattttcaaacatataaagggcttaggcaaggggatcctttgtctccaattctttttaatatagtggctggtatgctagctttactaattaagagggctaaagatgttggttatataagtggggtaatacctcatctagtggatgatgctttatctattttgcaatatgcagatgatactatcattttcttg

SEQ ID NO: 73483 - DNA, 591 bp, Oryza sativa
  unsure (1)..(591): unsure at all n locations
  Clone ID: PAT_MRT4530_7375C.1
gcaacatcaccgtcaatgaggcccagtcccgcccgctccgttcgtctggagcggggtctatcgcggcggcgtggcggntacggcgtcggtcgtggagtgcgncggctatcggaggatgtgtgtcggtcggcggctacgggctgccgtgaggtgcggctacggtgcggccggctggctacggcggcgtgcccgtggcggcggcggcggctgtgctacggtggcaccgtgtgcggcggctacgntcggcgactccggcgggtaactggaggatactgattggtggggcccatcgtgggccaagtgtatgcctgtgagctaatgcacgtggtgcagaatgcatgctgtaatgcatgcgagtgcgagtgcggttatgcgtggtgccagtggctgctgcctcgagtgcgagaagccctgctgatgccatgccatgcacagtggttaagggtgttgctntgcgtccgtggatgttgaccatggaattggagttcgctttggttatggtgtttgaactgcttgttgctatctatcggaatgaaatgaaatagaaaacaaggagaaaaaaaagagttcgaaaaaaaaaaaaaaaaaaaa

SEQ ID NO: 73484 - DNA, 240 bp, Oryza sativa
  Clone ID: PAT_MRT4530_73760C.1
atggcgcaccttgagctcctgctagagcgctgccacggcaatgcgaacatgccgaagtggcccgcgtccaagaggagctacgtgacgttcacgacactgccatgtgcagtggcgtacaacggcgacagtacgagaagggaagagacggcagcgttcttgttcatcgtcgttaaccccccaggtgttcctcactgcacaccccttcatcttccttctattcttaaaatattttacaagtag

SEQ ID NO: 73485 - DNA, 3819 bp, Oryza sativa
  Clone ID: PAT_MRT4530_73761C.1
cagggccgaaatgtttcaaacttcttaatttattccataaccagatgctacatcggacggcagcgacccgcgaccgcgggtcaccggaggcgaagaagatgaagatgaagatggagatggagatggcggcttcgtcaccagggcctggggctccctcgcgaagaagctattggaggcgccttcagaagcagcaaacatcttgtagcatggcggcgccacctcccttgccttccccagcagatggccggagaaatggtccccccagatgtcatatgtgaagtctttcttcctcgttgttgtcgtcgtcgcggcgccctcggttctcttcacagccttatctttcatcaggttggatccaggagcgcgagaacgaggcgcgatcggggaaggcgaggacaacaatggcgagcgccatgcattggttggtgcagtaggtgaaggcgatggcgacggcgatggatttcctgatgttactgaaggtggtggagcaggttgctctttagcagtttgcaaccaagaactcttctcatggttattcctagcagatggtggccttgcctcaatgtcagatccattctcaagtttactgctgtgcttcagttctgatggtgtgccagagaaagaccagctttgttttggggttgaactaggtgacaatggcgaagacggtgtcgaattcccactgtggctgctagaaacctcaaactttgctgcgagtcctgcgccaccgactttcctctttcttctcttccctttgtctctagcaactctgatggttagatttccactagtttctggagcttcaattgataccttgtcttccacagtattactagggggcagagacatagttgaagttgtattcagttgttcatctgcattgttcttgtcttctgtcctcttggggctattatgaatatccgcagggtatttatgagtttctttgtctcttttgtgctcccttgttgacctggaagttttgctgctacactgaaggaaagagggcttaacaggcttgtcgatggtacctttcccatcatgaatcttgatatagcaatcttgagagccccctgacaaagaagttgggacacctctcgcgaacaccagaacaaacacggatacagttccaaaaaggaatatcaatgttttccaatggatggatctgaggtacgactttctgcactggtcaagcatacaaacaggaatgtttgcagtcatagggattatgaaaatcccggtagtcatagccaattcaagatctctctgaaccatagctgaagagaagtcagctttaaaagaaacaagcattcttattgattcacttggcgctaagctaaatcccttgcagttatctactgaaaatccatccacagcacaatcagctccagagattttaacctttgtcacttgaagaggaaggtcaccgctatttttgacatgtatttctttcgacaaatgttgaccgcacaaagggctggtgaactctgatttagacaatgctgacttattctgaatatcggaaatgaggttaaactctagcttccaaacaggttcagattcctccagaaggacaatagattgccgtccgccatgtgcttgaagaggcagccactccatgcctgaaatattgcttctgatcaacaccatgcttgaccacatgcactgatttgatggacggaagatgataggaccaagtaaagcactctccaaaggaccaacaatggcctcagtgattgctgcatcacttaatgagaagccaaatctagtctctgttgagtcaacttcaggggacctgctcgagaatgtatgttcacatgcatcatttatagttttgcactgaccaataatttcctcagaattcagaaccagttgcatggatgcatgctctaggcttgggttatggacggttatccatttagaaaactgtgatccaacttggacaataggaaacagcattttttgatctgtgagaacagaaatcccagttcttgtaccatgagatctccatcttctaagtactgtatcatcagctttatatgcccttgtaattgttggcttcatgtgttgcaggccttttacttctacaatgctgcccaaagatcctgtccttgagttagcagataactcatcttcagaaaatggcccatcagattcagtaacagcgctagccgtataagaaagagttgcagatatcacatctcggcagggtatcaggattgaactaccaacagaactgttcgtttctaccactatattgcagttgtcaaatgagttatccgttggaactgaagtatattttatcagcgctatatctgttacagtatcaggaaagagtatcagtccattcaggtacttaacctcaaaattatttgatccatccctgttatcctcagttacccttacaatcctcagtaactttgttccctcattccttaaagaaagggaaataattgacccaactccagcacaagatgatacacgctcaaatgtgaccgaaactaagttagtgggttcatggtaggtacgtgcacgcacctctaactccataggtataacaacagtgtctactctatcagatgtgcaattgcgtaatttcatgcagatagcaccgaacaccattccttctgaaagaggttgcagttttaactctacaacagtgctgctttgtgtaggaagcacctcccattgctcactaggcctgatatggatcatcggcaatccaaattcagtactacttgctgtataccagttgctactcaaagaagtaaactccaacgactcgtcaaaagggcctaactgacaaactatatgagaagattgttttgtgccctggaatgaagacatccaaacagccacttcctcgacatagagagaatcatcaaaagggttgaatatcgacaagttcctctccagccgtccacctgttatgacatccatcccagctagtggctccaactgataaggtgatctgacagccatgcccttagcctgtataatgaacccaccgaaattcgtctgcaaaaccaaatgcgccgatgaaaagcctagcaacttcggcaagaatatgaaggtgactgatgcattctctctaggctgcagcaccagatcatcataaccatacacataaaactgcgggtcggtactgaacggctcgtacacgcgcaaggcactgtcattgttcaaattcaccacggtcagggtggccatggaagccacatacaagctactcttcccccaatccaacaccggcgggctaatctcaacatccaacgacgacgaaccgaaaatgccatcggtgctggcatccgcggcatccagctccggcgtcgcgccggccatcgcccgcatccaattgtcaggcacaaggggcgcctggcacgacgccacattataccacctctcaccaccatcctcccgtcccaccccattccgggaggtgatcagcgcgtccgccgccgacgagcacgtcaccacgccgcggtggccgggcaaccggaagcccaacgacggtggtggtggtggtccccagtctctcgacaccaccaaatccatctccttgactccatcatcctcgcttgcaagcatggactcaactgccgagggcgagaagcacagggcgctccggtccgcgcagccatcccggaaaccgaggcagccgccgaggtcgccatcactcccctccgcaccatcctccgccgccgccgccgccgacgacgagacgaacagcacagcaaccaccaagaggctgcaaagaacaagcagcaactccccgtgcaccattgaaaacaccacttcttgcccctggtatctcttacacat

SEQ ID NO: 73486 - DNA, 378 bp, Oryza sativa
  Clone ID: PAT_MRT4530_73762C.1
atgaagccgctatcgcttctgtcagcgctcgccctggcgttccacgcggtcaacacgggcgtcgccgtgtaccgcagccgcgccgacgccgcggccgtggcgctcgtgctcgcgtcctcgctcgcgctcgcgctgctcttcctctgcctgcgcctctacgagggcgcgccccccgccgaggccgcgaggcgccggtggctgcgccgcgccgtctggctgctctccgcggcgctcacggcggcgttcacgcgccgcgtcgcgggcgcaatgccgccagcgggggccgtcctcgtgtgggcgatgagcgcggcgaccgctggcggagggttctacgccctcgtcgtcgtcgacgacggccgcgatctcggcgcaaaatag

SEQ ID NO: 73487 - DNA, 519 bp, Oryza sativa
  Clone ID: PAT_MRT4530_73763C.1
accacacgtacgcccacgcatccgaccacgcgtacgactacgcgttcgtgcacgcgtccagacacgcgtccgttcattttatagatccgttaggagtaccctgaccggatgatgctcaccttatctgactgacgataggccaaggtctactacaccgtggtggagccctactatgccaccctatacgtccacgaactcgtttagaactccgactagtgcatgatgctctacaacgaaggcctctacaacatctgattacgtaccctaaagctcaccaccccaagcttttgcgacctaaagcacctaatctactccaccatgagcggagtaacctgctgcctgcgttatctggggcagctgaactgcaacctccgcaagctgggcgtgaacctcatacgattccctcgcctccacttcttcatggtcggattgacgccgctgacctcccgctgatcgcagcagatccgggccctcaccgtcccggagctcacacaacagatgtgggacgccacgaacatg

SEQ ID NO: 73488 - DNA, 240 bp, Oryza sativa
  Clone ID: PAT_MRT4530_73764C.1
atgccgcgtccactcgttccctctgacgccgccgacgccgcatccacttgtcgcctccgccgccgcctaagggaagaaacaggagcgaggggaagcagcgtggagcagggaggggcgtgccgggagggaggccggggacactggagcgacaatgatggcagcaacgtgcgtgaggaagccaacgactcaggaaggagtcgaggacgacaactggacatggtgacatgtgtgacgaagtaa

SEQ ID NO: 73489 - DNA, 632 bp, Oryza sativa
  Clone ID: PAT_MRT4530_73765C.1
tagtggatccccgggctgcagggagtattgtttgctgaaataaaataaaataatcattttccatggctatctattgcatttgccttgcgtctccgcatatatagtcttatgttcctacctacaaatcccgcagcaacgcgcggggtattttctagtatcccttatattaggggacggaggtagtaggtatctaaaagagattatagggttgaatcctagaaactgataatttaatggaagacaactctagcatctgattcttgaaaggtagaaagtgagacaaggcttcattttgtattaagacccagataacgataattcctttggtgcaattacttttggaaaatttggtgtttggcaaactgattttctttttaattgaagttgcaaccataaatagaaaaggcagtgcattgtgagaaaattaactgtttggtaacagaatgtctagccttaatttgatttctcaatagaccacatactgcattccaagtttatcacaaatagatccttacctctctgctgtgactcctaatctatctctttacaataaagcagtaggttgatgtaatcttgattgatattaacttcaccctccacctccatccaattccaacaagtgattcttgtac

SEQ ID NO: 73490 - DNA, 456 bp, Oryza sativa
  Clone ID: PAT_MRT4530_73766C.1
atgccgctaaatctcgcgctgtgctgcgcgcgcgggcgcggcgccgccgccggcgcgtactgctgccggccgcccggcgaccaggcggtgccgccgttacgcgtggacgccgccgccgccgacgacggcggcgactggtgctgctacgaggagctgccggtctcgacgccgccgcatgtgccgcgggggctggccagaggggacgaggacgacgaccacgaccacgacgacgacgatgggctggagctgacgacgaggggggcgccgggggttagggacgacgccgacgatcagcagctggtctcgccggcggcggcggcgggtggcgtcgggttcgtcgccaagccgtggatcgcgtcggtctacgagaggctgtcacgaacgttttccgtgctccccgtgacgagctcaccaccgtgtaggggtgcaagcgggccgacccacgagtttatataa

SEQ ID NO: 73491 - DNA, 292 bp, Oryza sativa
  Clone ID: PAT_MRT4530_73767C.1
gcagcaaacagtgtggccaacagctcaggcgggtagcgcaacatctcactaccagccattagtagcttcagcgttgcacaatacatcacagtcgttttactttgatcagactcaagctcaagctcaactttctgcccttaacttcccatccatatgtggtattatcctactatcatgctccgaggacattcccaccttggtggtgtctggtactgaatgtatagttaatgtcaaatgtttaaaataaatcatcacatcatgcgtgacagtgaaactgagtcaaaaaaaaaaa

SEQ ID NO: 73492 - DNA, 418 bp, Oryza sativa
  Clone ID: PAT_MRT4530_73768C.1
gtgtttttttttttttttttttttttttttttttttttttttttttttttttctttttttttttttttttttttaccttttaatttatgactggttccagcagggggaccaggggggcgaccggggggaaaaccaagaacggggcacgagggggggcagagctcccccctggaggaaagtgtaagccgctcacaagtggagagaaaaaaggagccagaagcataaaagggaaaagggggggcgcctaaaaaggcaaacaacccacaggaaaagggggaaaaacactgaccgcttaggaggggaaaaaactgtcccaccagcagtaataaagaatcccccacccccagggggaaagcaggagacccattgggcgcaaaggaatttataattgtcacaagggaggggggcaggggatgaa

SEQ ID NO: 73493 - DNA, 301 bp, Oryza sativa
  Clone ID: PAT_MRT4530_73769C.1
cgccagcagcggaggcccctggcgtcaagacggtggcggtgacttggaagccctcactgatttcgctttgttgcggtatggatatggatggcacctgcaggccaacgacggagggagggaacgatggccactgccggtggggatgatatgcgtggcgaggatgatgatgaccaatgcagcaataatgatgggcggagcatgcatgcgctgcagtagggggcgtcatccggggaggagggcgcacggtggcggtgttagtgcggggcatggggtggcggggattgcgcagccgatggattag

SEQ ID NO: 73494 - DNA, 2418 bp, Oryza sativa
  Clone ID: PAT_MRT4530_7376C.1
ttacggcccagcaaccagcatacaagcaggaggccgcgcggtccagttcacctcaccgcgccaccggagccaagcggccagcgcagcgcacccggtctcacgcggcgcaccgtcacgaaccgcatcggtccagcgagctatcacccctctgtcttcaccaggccacgtcgcgcccatgcacggtgacaccacgccacgccacccccacgtcgcgcgcgcgcctcccatcgcctgcctatacattatcttccgccgaggcctctccgcttcgcctcgcatcgcagcccacaccgcgggacgatctatcggtcagaaaaagcgagcagagcggtgggggagaatggcggtggcggcggcgacggttcgatggctcgtccttctcctggccgtgtcggcggcggccacggcgtcgcgcgagaagtggtggcatggcgccggcggcgaggcgagtggtggcggccacctcgtgcagaaggagtggcggagggtggtcgccgcgagcgacgctggcctggtgacggccgtggatgtcgccgacgcggccggcaccgcgtaccggctgcacttcatcacgatgagccccgggacgctgttcctccccgtgcagctgcacgccgacatggtgttctacgtgcacagcgggaggggcaaggtgacttacatagaagaaggggacagtgaatcaagttcgcttcaggtggagaggggggacgtctacaacttcgatcagggtaccatcctctacattcagagtaacgcatgcggcacgagagagcgccttcaaatttacgccatcttcaccagcgacagcatcaacgctgatgacccaaggcatccgacatcagaagtttattcctttgtcagtgacctgttgaaaggatttgaagtagaagtccttcgaccgggcttcggggttccacgcgaagttgtggaatccatcaaatcgaccaaaaccccgccggcgatcataccgtataatccagaggaggaggacgaggacgactcgtcaaattggacggaggaaatcaccgacgcgctgtggggagtgcgagatcctcacttcctgaacaagaagaagaaggacaaacaaaaggacaagcacaagggcaaggacaagaagtccaagagcaaggccttcaacttctactccggcaagccggacgtcgagaactgctacggatggagcagatcgatgaccaaccgagacctcgagaccttgcggggatccaacattggcatgttcatggtgaacctgaccacgggcgccatgatgggacctcactggaacccgagagcgaccgagatcgccgttgtgacccagggcgcggggatggtgcagatagtctgtcccagcatcccgtccggcgagagcaagaagcatcaccacgatgaggagggcggccgtggcgatcacggccacggcggcggcggcgtccggtgcaagaactcgttgttcagggtgaaggaaggcgacgtgctcgtggtgccgcggttccaccccatggcgcagatatccttcaacaacgactcgttcgtgttcgtcgggttcagcaccgacatgggccacaaccacccgcagttcctcgccgggaggcactccgtcctgcaggtgatcggcaaggagattctggcgcggtcgctcggccaggacaactccaccaacgtcgggaggctgctgtcgtcgcagcgcgagtcgacgataatggcgtgcacctcctgcgcggaggagctggagaggaaggcggaggaggaggaagagggtggtggagggaagggggagaaagagcgggaggaggaagagaggaggcagcgggagaaagaggaggaagaaaggaggagacaagaagaggagaggaagaggagggaagaagaagagaaggaaaggagagagcgggaggaggaggaaaggaggcagagggagaaggaagagaagaagaggagggaggaagaagagcagaggagagaagaggaagaagaagagcggaggagagaggaagaggaggaggagcaagaggatggaagaggagatgagccaaaaccgaggagggaagaggaggaaggagactggggagagcggcagattcgtttgcccaggagcttgaaaaaacgcttcatcggaatcaagggcaggctctccagtggctaagcaagtgagcagagagggacatttggaggtgaacgcgtccagctacagtagtttctgcgtaaataatgctggtcttgctcgtgtagaggccggcctgcatactacgtgcgtactttcgtttcttccactgtgtcgtgatgtagctgagttaaataagctgttgatgtgtataatcgtagcctcctcccttccaagaacccgcctgtaaacggttaagtaagctgttaatgtgtataaacgtagctttcctctcaacggcaaaaaaaaaaaaa

SEQ ID NO: 73495 - DNA, 110 bp, Oryza sativa
  Clone ID: PAT_MRT4530_73770C.1
ttgtttgatacatggacgctataacaggatttagtgaactagttgctactctgattgtatcaaacataaacattgacatatatgtaaatggatgagttgtgtataaattt

SEQ ID NO: 73496 - DNA, 610 bp, Oryza sativa
  Clone ID: PAT_MRT4530_73771C.1
ctcttcttttcttcacccatttctcgctttctcctttgttctctcatctgggttcttctcaaagcctcttcctttttatgccatggtgggtgcgtcttcctcttacgcatctccgttatgtacctggtttgttgctgcttgcatgtccgtctctcacggtggaggagatagccgtcaggctgttgctcttcaatctggtgggcggagtcggcgaaggaggcagcttagcaaatgctctgtcgcttctggatccgctagcattcaggctctcgtcacttcttgtttggattttggtccttgtactcactacaacaacaacaatgcattgtcttctctctttggatcgaatagtgtttctttgaatcgaaaccagaggagattgaatcgtgctgctagctccggtggagccatggcagtgatggagatggaaaaggaagctgcggttaacaagaaaccacctacggagcagcgtcgagttgtagtgacaggcatgggagttgaaacatcattgggtcatgacccacataccttctatgagaaattgctacaagggcacagtggtattagccagattgaaaaatttgattggtctgaaattcctacgcgaatt

SEQ ID NO: 73497 - DNA, 687 bp, Oryza sativa
  Clone ID: PAT_MRT4530_73772C.1
gagaatcacatccacacccatggcgaaagcaggacagagagagaagggggagggactcgtcggcgcaggcgaggagggcagcgcggcgacgaccacgccggcggtgacgaagccatgaccacggccatccttgcgccgcgccccgacgagccgtcgccacgtggacgaggcggcggcggcggcgcgcgaggaagacgcggacgaggcggcggggacacgcgagaggagacgtggccaagcccgccgtcgccgactgttcatgtcagcgcggctgacgctgcttgagccggatctggctgcccggccgccgctgcttgagccgccgttgcttgagctcgaggtcgatccgtggaaggtggatggccgcggtggagaccggatctggctacccagccgacgctgcttgagccgccactccgcccgagtccggtcggcggcgacctccgcgaggacgaccgtgctcccacccgtcgtcctctgccgcccgagctccatgtctaccgccaccggagctccggccatccattagtagtaactgcactgtgggatgagttgatttgtaggagcttcatcccacgtggcactccaggctgagcaaaaattcgagacgcactgtcaatagccttagcgtcgttggaaaggctcccgtgagctggttcgttcgttccgtaaaaaaaaaaaaaaaaa

SEQ ID NO: 73498 - DNA, 4116 bp, Oryza sativa
  Clone ID: PAT_MRT4530_73773C.1
atggccggtgccgtgaaagatctacagacttcagatatggatgatcaggagtgtggcggtccaagcggcggcgtcggcaaacaagaggatggagaaatgaatggcacggaaaatgaggttgacgatgccgatgacatggttgaacaagaggaaagctcaggcagcgcgccaagcccattgctcttaggcacacggcccaaaaggctccgatcaaaggtgtgggatgacttcacacccatcttcgtcgatgggaaggttgcgagggctgagtgcatgcattgccaccgagtcttcaacagtggcacaagcaatctgctaaagcatcaggccaaatgcagcccccgggcacagaagaggcccatgcaacaagagcttccagtatcgctgtcagtcgagaataggtcccctaaggaacttgatgcagttgagcaggacattcctacagacaaaaatacaaagaacctggaggttgaacaggctgaaactaataagctcgtcagaacattggcaatgtacggagatattccgttgagggtgagcaaccatggtgaattcagtcggtttgttgcttccttaaaccctatggtcgaaattccacctgcagataacttgtacttgtacttcacgggattatttgaagaagaaaaggccaagcttaagaagcggttagcatctttaaatagtcgggtgtccctgagtgtttatgtttggcactatgacacactcttgccatttttgtgcttgagtgttcattacatcgatgatcaatggcagaaggacaaaaagatcattgcattccaggctgtcgattcttcttgccacgcaaaagaattgagtatggtcatattaacagctattagagattggggtctctttggcaaggttttcagcattgcattagatgatgcattcattgacgattcagtggcttcagatgtgaaggatatccttcaaaaatggaactcactgcatgcagatgaaaacttatctggaaaccagagcttgtttgtggtacgctacgcaactcatctacttgatcagattattcagctctttgacaagatctgggatgtcaagaaggatttgcaccgtgaaccagtttactatagtgacgaagaaagttcgtatgtgcgggaaaagatgcaaaggaagttcaaggaacaatggaaattcaattgcttacatatttgtatgcctatgatcatggatcctaaataccgtctggaaatcatcaagtcacgtattatgtataattttaacagtgatatggaagattatattgaagaagtaaatgacatgttgcttaggctcttcagggaatattctggtcagactgaagaccctaactgcacttccagttttataactagtggctggaattatttgtataaagatgacaggttgttggatcattatcattattctgaatttccagagcggaagcgaccgatgactgaatttgatcagtatttggaagatccatgtctctcaaatgatggaaccagtgttctcaaatggtggaaggaacatagtatgatatatcctacaatcgctcggatagcacgtgacatattggcaataccttaccgtactgattgtaaggtagcaacaaggaccacaagagttgcaattgctaagtcagatggtaaccactatgttgaagagcgcgtatgtactcaggattggctcagatcaggcggtctgcaggattcgacaatgcgtgtactcaggttcagaaatgttgaggataatatgcttagttcatttggcaactatgttcaacccaatcgatctcttacaacacagattcttgtgcagcatgatgcagtacgcaaggaacagagactgaactacagcaaaagcacacaagttcagaactggagttctagcgccagcttgttgggccgaaccaaaatggttaaatgggctctaggttttcaggcttgggctccctggaaaagtggggcccagacaaagagagaggaaaaatcctcgcttcccaagagggtagcggcggcggcggaggtggcggcaaggaatccagcgttgcgtccggggatcggcatggaacaagattgtgatgatgctgcaaaccaagtcggcgcaggagaggaaaggatactgaacgttgtgctcctcaagacatgtgtgaagcacaattttattggaatgggagataatgttgacaatgccaatgacatggctgaacaagaggaaagctcaggcagcgcgcctagcccattgttcttgggcacaaggccgaaaaggctccgatcaaaggcgtgggatgacttcacacccatctacatcgatgggaaggttgcaaaggctgagtgcatgcactgccaccaagtttttgtcagcaacagcaccagtggcactagtagcctgctaaagcaccagtccaagtgcaacccccatgcccagaaaagggcaatgcagcagaagcttccatttctgccatccagccagaagaatctgacgacactcaattctgatccgagacagaagaagctcctattcttgccaatcagccaaaagaaatgctctgacacagcagatgtgatgcctcacaagaaggatcctgccttgcctaacagtatgaatgacacaaatcggaagagtcaggaggtcgacaagagtgggtctcgtgaggaactcgcaacacctgaacagaagaatcttaccttgcgtcatgtacccacgaataataatgaccaatctcatgatgaacatccagtgcctgaacagaagaacaatcctaccggcacgaatatgaagaatcctgagactgatcagaacgggtcaaatggacttatccagacaatggcaatgtgcggatacctaccattgatgatgcacaatgataggtttagaaagtgtcttccttgcttcgattctatggtcaatatgccagccaacattaacatctatcttgactttatacaactgtttgacaaagaaaaggctaagctgaaggagaggtttgctgctttaagcagtcgggtttgcttgagtgctcatgtgtggcactatgttcaacaattggccttcttgtgcttgagtgttcattacattgatgaagaatgggagaggcaacagaaaatcatcagattttgtcacgtaggtccttcttgcgatgcaggagaattgagtagtgttatattgggagctattgaaaaatggggtcttcgtgataagttgcttcaaatgtcaaagcccatctccagaaatggaattttcactgtgcaaaacagagcttccaggaatcgaattcacactgcaaaacagagcttgtttgtgatacgatatggaactcatttacttgatcaggtcattcaagtgggcctggatgaactcgacaaaatcatggagaagtcagtgatgtgttcaaagttcatggagggcctcacctcttcagcagtaaaatattcaaacaacaactatgcagcatcagggaaggactggacctgtgcacgtcgtatttgtgataccttggaggattttcatcggtgtatagacataatgccaaattttccctgtcctgtggacctattttacatggtgtggaaagtcaaacgtgatttgcaacgcgaagttgataacaacagggatgattcattttccactgtggtaaagaaaatgcaagagaagttcaagaactgctggaaactctgctgcttacatttctatttggccatggttgttgatccttcgcaccgtctggaacacatcaagtttcgtgttagactgcacactgacacagattatattcactatatgcatgatatatttctgaacctcttcgatgaatattctggcaaggtggaagatactaactgtacttccgagactagaacagaagttggtgtggatggaggtgatgatcggttgaaatattaccgtcggtacgaaaatccaatttgtgaacgaccaatgactgagcttgatcagtacttgcaagagccacgtctatctggtggtgagcgtgatgttcttcgctggtggaagggacataacctgacctatccaacagttgctcggatggcacgtgatatattggcaataccatgccgtacatatctatctatctattatatactaaaagtccattaa

SEQ ID NO: 73499 - DNA, 576 bp, Oryza sativa
  Clone ID: PAT_MRT4530_73774C.1
atggaggaggaggtcgagcagcgccgagatctccgccgccataccgcggagacggggatctccgatcggcggcggagccctagagagacagcgtccgtcgccgctaggcctggctcccctccctcccttcgctgcgcgccggcctccgccaccctccctgctgcgcacaccgacgccgccgccgccttcgcctcccttccgcacagtagcagccgccgctgctgcccctactccctcccttccccccacggcagcaaccagcgctgtcgcccctccgcgcggcaacagccccactgccactccttccctctgctccgagcccggcagccgccgccgctccctcacttcgctttgagcgcggcagccgctccctcctcccgcgtgcggccgcccccggtccctcctcacgcggccgccaccggtcctttgcgcttggccaacgccgacgctgccgatgcagccgctgctccctccctcctcgcacggccgccactactgctccctcgacgcgcggccaacatagccgttgccccctcgccgccgccacccccacagatctccgccgccgcacgatag

SEQ ID NO: 73500 - DNA, 483 bp, Oryza sativa
  Clone ID: PAT_MRT4530_73775C.1
atggcaggagccggtcaagagctgaccatctacgtcctgccacctgcgtctgcactggcgcgccacgccgtgtggtgcgccatcgggggtgggggtactcgcgtcgggagcgaggccttctcctccaactccggcaacctcctcgtcttctcccgcgccggtgataccctagacttcgataaaggaccctacagcccggcggtgggcggcggatcgggcgggtggcaaggcgccgacggcagtgccggggccgcggggctagagaaaggcggtgggccggcgtcggtggcaggggcatctcgcagccgacggctcgaggaggaaggagggggtagggggagggggaggaggctggctagggtggtctcgccggtgccgttgacatcctccggccaaccggcaaggcgggcggcggtgcggtgggacggtggcggcgggggatcgggcggaggaatagcgatgggaggagggggttacgggtaa

SEQ ID NO: 73501 - DNA, 405 bp, Oryza sativa
  Clone ID: PAT_MRT4530_73776C.1
ccggccggaaaaccctagccaccttccccctacccctctcgctgccgtagccgcggtggcgacccctgccccgccgccgccaatatgcatatttccgctgcacgaccctgactgggaagaccatcatgctggaggtggagtcctcggacaccatcgacagcgtgaaggccaagatccaggacagggaaggcatccttgcggaccaggactggctgatgtttgccgtcatgaagatcgaggatggcctcaccctctgggactacaacattgagaaggagtttaccgtacacatgatgctcagcctgcgtggtatagccgataatcgcaagtggaagacgtacacttatctggagacgatcatgtacaggtgcaggacggtgactgtcgctgagcttgaggtctaca

SEQ ID NO: 73502 - DNA, 398 bp, Oryza sativa
  unsure (1)..(398): unsure at all n locations
  Clone ID: PAT_MRT4530_73777C.1
aaaacgatttttgattctcttcagccagaaattgtatctggaatcattttggatgccatttgatttcatgggagtgtgagaggcaaagttgtggtatgcctaatttttcatgtagtgtgtgcagtgtgctatttgtttgttgaattgggaaaattggttacatcatgccatgtttcatcagttttggtgcagtattatgctgtgtgactgatgactcttccatcatatcatgaacagatggaatatcacagaaatattcaaacctcatgtaacaatctggcgttccaagccatgattgaacaaggaataatgttgtattgcataattatattattacccccgtccccaaatgnannaaagcaantnncaactattacaacanattaaatggacaacaa

SEQ ID NO: 73503 - DNA, 5142 bp, Oryza sativa
  Clone ID: PAT_MRT4530_73778C.1
atgggatggggcgtggcatgccacacgccgcctgacacacgggcagcaagtgggcatgttgccgtcgtcctatcaatcacttggccggtcacagaccggttctttgttattattgatgacatatgggataggaaatcatgggaattaatcagatgtgcagtgcaggatagtaagcttggaagtagagtagttgtaactactcgtatttttgaaattgccacacatagaggagagaaggagaagaaagaaatgtcttcagtggttggaaaggaggttgtagatgcttcctcacttatcactaagggtgatatgaaggatttgctagaggatttgttgaagatgggcatgataggtcagaggaatgtagcaggagggtctaaactgaaactagaagtgatgccaagtgagttgaggttggaagggagcaaaaattatttgagttggtgtaggagagctcaactaatgttgagagcaaaaggggtggatcattttttgcaagagggttgtgaagagccctctgataaggagagccaagcatggaggacatggaatacaacaaatttaacagttatgctattgaagcatgaggaggacattgtgattggaaataaatggatgcagaggcgaagagtcattcatttcttgaaggggctgaacaaggagtttgaggatagaagagcggctatgttccaccaggctacattgcctactatggaagaggttatttttgctatggtgcaggagatgaggttgaaactgatgagaggcacaaatcttacaagatcagcatacactgtggctgataatagggaatgctacaactgtggacaagtgggtcatgtgagctacaattgtcccactcctcggaacattggcggcagggggttaattcgaggagggcatggtggatttggtggaacccgtggtggatttggaggagaccgtggtggctttgggggaaaccgcggtggtagaggaggtgactggagaggtcgcggtggaggtcgtggtaggacagaggttctcctcaggccaatgcagccattgaggagggagaagggactgggaggaggattgggactggagtcaggcgtgatgggttgtggtacatcaatcatgaggaactgtaaatttcggcattggctccacctctctcctcccctctccgcgtgggacggtgtccgtggcgtcgcggcatcggccacgggcgggacaactgttcctgtgattaatccgggccgtttccgcggcggatccagcatcagtggtgggcgagaaactgaaggcggccgttcttgcagcgaacccagtgttggcggcatcggcaatgggcgggggagaggagctttctcgatcgcaatcatggagctggtgatgggggcaatggaaaacctgatccccaagttgggtgagctgctcaaggaagagtacgtcatgcagtcgggcgtgagagagaagatccagtctgtctcacgggagctcgagagcatccacgctgctctccgcaagatcggcaaggtgccatgggagcatcttgacgatgagttgaggctttgggcgcacgaccttagggaggcgtcgtatgacatggaggacatcatcgactccttccttgtgcgcgtcgacggccatgaggcaagtgaagttcactggttcaaatggttcttggagaagatgaccaaccagttcaacaagatcaaggctagccatgaaatcggtgtcgcaatgaaagaaatcgatgagaagctccaggaggtggctaccaggcatgcgaggtacacaatcgacaatattgccatcaatcctgcaggccccagcactgtcgatcctcgtctcttgagtatgtacaaaacattggcagagcttgttggaattgaggggcccatggatgagctcatgaagatgttggatattgatttgccgaccaagaagaggaagatcgaaatcgatgtgtccgttagaaaaccgaagatggtatccatctttgggtttggaggacttggcaagaccactcttgccaaagcagtctacgacaagcttaaaccaagttttgattctggggctttcattccggtcggtcagaatcctaatattaggaaagtttttagggatattctcatggatcttgacaagcagtcatacaatgacttaaatctaaagctgctggacgaaaggcaactcatcaacaaactccaggaattcctccaaaaaaagaggtgttttgtagtcattgatgacatatgggataaggattcatggaggttaattagatgtgcactacaagacagtaaccatgaaagcagagtagtcacaactactcgtatttatgaagttgccacacaagtgggcgaagtttacaaaatgcatccactttctcatgatgaatcaaaaaaattattgtacacaagaattattagcggtgaaggtgagtctctccgtagtacatcggttgaggcatgtgacaaaatactaaagaaatgtggcggtgtgcctttagctatcatcataatagctagtctgttggccaataaaccaagggaatactggtccgaagtgtataactctattggtttagaacatggatacaatgatgacgtagataatacaagaaggatattgtctttgagctactatgatttgccgttgcatctgaagccgtgcttattgtacctaagcatatttccggaagattattatattgagaaaaatttgttaatatggaagtggatagcagagggttttgtacatgagaaacaagcagcaaagttagggttatttgaaaccggggagggatatttcaatgagttgataaacagaagcatgatccagccagttgagcatgaatactcagggtacatgtgtggttgccgtgttcatgacatggtacttgatctgatcctcttattgtcaggtgaagaaaactttgtcactgtagtagatggcagtaaggaacatgaactttcatggaaaaatgcccgtagattagctctacaacattggagttttgaagagaacaggaatcagttggctaatatgggtgtgaagcaaacaaggtcccttattatgactgagtgctttgataagaacatgcaattaccgagcttccaagttttacgtgtactagaaatacaaaagcaaggccgttggtggaacattgatggtaaaattaacctgcagcatgttagaaatttacttcaccttaggttcctccatctagattgtattgattctattcctctcatagagcaattcagaaatttgaggtttctacaagtacttcatctgaaggaatctaacatacaagagctgccagagtcagtgggcctgctaacaaaattgctgtccctacgtgttgatattgatgtaagggtgtcgcctggtgtgatcgagaagctgacgtccttacaggagctgtatttgtggccttatagtgatgatacgttccagttcgtgaaggtcctaggcaagctgagggaactgagggtgctgcatgctaaaaaccttaagcttgatggacagggcgagacatcagcactgctggagtccctatgcaatctgcacaagatccaaactttggacattgacctaaatcttaatccaaatgagggtgtcacgtgggatgcaggattcacttcccctcaatgcctccgatacctctgcttggtgtctttgaggtttcatagaatgccagagtggattaattggtcgcttcttccaaacctctcttatcttgaattgagagtgaattttttggaagagctagaccttgaaacccttgggaggttaccaaaactacgatacctccatctgtttatacactgcgacaggatagtaagcatcgggaagattgccggtgctggtgatgcctgcttccaagagttgagatttttgaacacaccctacttgtatgtccggtttgatcagcatggcatcatgtgcagcaaagacgaaaaagctgtcatgccaaacgtcaaaactctcagtttttgtgtttatgtgcggatcctaaaagataccgacatacttggatttgacaagctgtttagcttcgctcatcttggaagaagttcgctccaacaagtccaagttaacatccaatgtcgtggtgctcgtgccatggaagtcgaggaagcggaggcggcgttggcacacgcagccgccatccatcccaaccgtccaacccttcaaatccataagttttcggagggagaaatgcttccccctcacgaggagcctagcagcttctttcctaaagttgttgtcgaaaatctcaatgcgcatgagagaaaggacgacgatcttcgttttgtcctcggacagatgctccagcgtaatccatgcgtaaagaaattcagtgtctccatcaactgtgaaaatgcatgtcttgaggaggtggagaaagcagaggcggctgcgagatatgcagtcgacttccacgcaaaccgcccgacacttgaactggtaaaatatggtgaagataagatggtgttgtctggccaacaccaacaggtcttaaagagaaccaagactggctttcacccggcagccacactagagggggtgagacggcacggcaacgccctcaggaggctcgaacgccaccattgccggcccggccaaggccgggcttggttttcacccgtcgtccaccgcctgctgatcaaaagctgttctccattgctccaactaccaacccttcaccgtcagtacgtgaacatcgctgcaccaacgcccctagttggccagcctccactgcctccatgtaggcctcccactcgccgccaccggatagctggcaagccactgccaccacctgtcgtgcctccttgcgccgtactggcttccgccgtcaccgaccacacctcctcgtgccgtgccaactttcacgaccactgtggcacagccggcagcctccgctgccacctgcacgcgctgccttgtcgtcctccaccgttgcctgcatgtgccggctgtgccttgccgtcctccgccgcccctgcacgcgtcggtcgcccctcatcggcctccattgccgcctacatgcccacgtcggcctccgccgccacctggacgctcgcccttgctgcgagccgtttgtcaatgacaaaatttggtaatatcagcatcggagatgaagattag

SEQ ID NO: 73504 - DNA, 352 bp, Oryza sativa
  Clone ID: PAT_MRT4530_73779C.1
gggtaaaacttgggtgacatttttattcaaatttggttcaccccggggtttaaacttgggggggggggggatgcatgactttatttttttttccgggactactatacgggtccaattaaaaaccagataccccccacggggggaatgctacagggggcaggggtggagcttggggagataccccatattgacgggatgtttagggccaaaaaaacttgggcttgagcttgactttgatcgaagtaaatgctaacaaactgttgtagccgtaactggtgcacaaaagcctgaaaactgttaatggcctggcaaggaaactgttgggcgaacatcctgagctgttggaaaaact

SEQ ID NO: 73505 - DNA, 2109 bp, Oryza sativa
  Clone ID: PAT_MRT4530_7377C.1
gaatgatcttttattagcctcaacatttgttcttttgtcatttcatacaatatccagtgtattctcaaatgaacaaaataataactattatgctgcaagatgtaaaccacctgacacaattcatgtacgtgaaccggttattgagcttaagaatgacaagatcatcaagtctgaaatatgttatttatatacacaactatgcctaacttcctattggcgaaaaacttgccctacgaaactcacacgtgcgcacaaagaaactaaataaataaaaactgggtgaaggattacacgtacttcatttcattgctcactcatgtagcagtgttgaatgtgtgaattgtcaagatctacatacttggaccagtagggcttgtacttggagatagcaaggtctagccagggcttgtaattcccattgtaatgaactactgctgcattctcaatctcggcaaggtcaacagatggatcatagccaaggcccaacacatgccaagtgcgattcaatgggtatgtcaggttgtagaaagtaatcagtcctggaggcaatgtatccagcttccacagcttacgatcctcattcagatcttgccaataatggtatattccagtgatattttgcttcttccactctttcaggtcaaacatgttcatcccaaaagcccacccacaagcatgtggatcaaagttctctgagatctttgggtgtgagaaattgaggtatgtgttgaagcgatggaaactttctttgcaggtttcaactgcaccatttactatccctttaagatcaacatcccatagcggtgtcaagtccttctgcacaacaacatcgtcatcgagaaacagtatcttgtcaagcttggggtgtatttctggcatgtagaaccttagatggttaagcatagacagatatttggggttcctgtacttcagattttcatttccatcagagagtgacgatggatcatgtgctttgaaatagtactctttgagccgagctgactcaagttgtcgtagaactgaacagtatgacgaattgagccacttgaagttgtcaatgttttccacatggacagtagcaggtagaggaggattgcttatgaaccacattgtcatagctgcaaaattaagtctatcagtgacaatgtggaatacatgcttctctggttccttggcatgtgtcaccgttgatctaacaactactgaggctgcaaggacgttatctgaaaatatagcgtagtggtatagagaccgatcctcacgctttgccttatcttcttcctccttcaaagcagcatcacgaaaatattccttgaccacaccatcacgaaaatgataatcggttgtcagctgcatatgcagacagtgcaaaggcatggggactgtctttgcagcatgctgcaccaggaatgagttctgcttcttaacactatcgatatttagttctgtagactgtagcataacacgcaatcgtctggatacttcaccagagttgtacagaacatctctagctgaagacagggcatgccccattgcttttgctcgctctaaagcactcaaatcaagtttgtaatccatgtgtgcatccccaataccttcttggctttgttttatgcatgtcatgagcaacacgtacaggtcaggttgcttctgggaatgtgcaattgtggcatacaccttggccattataatctgatctttcatgagtctgagggttgaatctgtgttagtatggtgaaaccccggcctccatatgttgtagctggctcttactttattactgaagttccttgatctgtctgtggccacatttctcatgttgagttcagcctccctgtccacctgaagcaactcctgggtcctatcctcctttcttttgcgtcggaatacagtttgagctagtggttgggtatctttcggttgcaaaggattcttccagatagaggacgagaggaattctgtcatggtaactttgaagagcttgatccgaccatcctggtccgtgtaagcaatcgtcttatcggcatcatccatgccctggaaggagaggaaaaggaggaggagaaggacgacggcgaggaatccggggcggcggcggagcgggaacat

SEQ ID NO: 73506 - DNA, 309 bp, Oryza sativa
  Clone ID: PAT_MRT4530_73780C.1
atgctgatattaccaaattttgtcattgacaaacggctcgcagcaagggcgagcgtccaggtggcggcggaggccgacgtgggcatgcaacggtggaggacgacaaggcagcgcgtgcaggtggcagcggaggctgccggctgtgccacagtggtcgtgaaagttggcacggcacgaggaggtgtggtcggtgacggcggaagccagtacggcgcaaggaggcacgacaggtggtggcagtggcttgccagctatccggtggcggcgagtgggaggcctacatggaggcagtggaggctggccaactag

SEQ ID NO: 73507 - DNA, 4515 bp, Oryza sativa
  Clone ID: PAT_MRT4530_73781C.1
agaggagagaaggagaagaaagaaatgtcttcagtggttggaaaggaggttgtagatgcttcctcacttatcactaagggtgatatgaaggatttgctagaggatttgttgaagatgggcatgataggtcagaggaatgtagcaggagggtctaaactgaaactagaagtgatgccaagtgagttgaggttggaagggagcaaaaattatttgagttggtgtaggagagctcaactaatgttgagagcaaaaggggtggatcattttttgcaagagggttgtgaagagccctctgataaggagagccaagcatggaggacatggaatacaacaaatttaacagttatgctattgaagcatgaggaggacattgtgattggaaataaatggatgcagaggcgaagagtcattcatttcttgaaggggctgaacaaggagtttgaggatagaagagcggctatgttccaccaggctacattgcctactatggaagaggttatttttgctatggtgcaggagatgaggttgaaactgatgagaggcacaaatcttacaagatcagcatacactgtggctgataatagggaatgctacaactgtggacaagtgggtcatgtgagctacaattgtcccactcctcggaacattggcggcagggggttaattcgaggagggcatggtggatttggtggaacccgtggtggatttggaggagaccgtggtggctttgggggaaaccgcggtggtagaggaggtgactggagaggtcgcggtggaggtcgtggtaggacagaggttctcctcaggccaatgcagccattgaggagggagaagggactgggaggaggattgggactggagtcaggcgtgatgggttgtggtacatcaatcatgaggaactggataggttggcatttttgggacggagtagtggtgatggtaaatctatcatcatttttactattaccacctaataactacttaaattatccgcattggctccacctctctcctcccctctccgcgtgggacggtgtccgtggcgtcgcggcatcggccacgggcgggacaactgttcctgtgattaatccggccgtttccgcggcggatccagcatcagtggtgggcgagaaactgaaggcggccgttcttgcagcgaacccagtgttggcggcatcggcaatgggcgggggtagtatcggtcatgttggcggcaggcgaggcggtcgttcttgtgtcagatccggtgtcgacagtgggtggggcggcctatttaatgctatagatactattctaattattgggagaggagctttctcgatcgcaatcatggagctggtgatgggggcaatggaaaacctgatccccaagttgggtgagctgctcaaggaagagtacgtcatgcagtcgggcgtgagagagaagatccagtctgtctcacgggagctcgagagcatccacgctgctctccgcaagatcggcaaggtgccatgggagcatcttgacgatgagttgaggctttgggcgcacgaccttagggaggcgtcgtatgacatggaggacatcatcgactccttccttgtgcgcgtcgacggccatgaggcaagtgaagttcactggttcaaatggttcttggagaagatgaccaaccagttcaacaagatcaaggctagccatgaaatcggtgtcgcaatgaaagaaatcgatgagaagctccaggaggtggctaccaggcatgcgaggtacacaatcgacaatattgccatcaatcctgcaggcccagcaactgtcgatcctcgtctcttgagtatgtacaaaacattggcagagcttgttggaattgaggggcccatggatgagctcatgaagatgttggatattgatttgccgaccaagaagaggaagatcgaaatcgatgtgtccgttagaaaaccgaagatggtatccatctttgggtttggaggacttggcaagaccactcttgccaaagcagtctacgacaagcttaaaccaagttttgattctggggctttcattccggtcggtcagaatcctaatattaggaaagtttttagggatattctcatggatcttgacaagcagtcatacaatgacttaaatctaaagctgctggacgaaaggcaactcatcaacaaactccaggaattcctccaaaaaaagaggtgttttgtagtcattgatgacatatgggataaggattcatggaggttaattagatgtgcactacaagacagtaaccatgaaagcagagtagtcacaactactcgtatttatgaagttgccacacaagtgggcgaagtttacaaaatgcatccactttctcatgatgaatcaaaaaaattattgtacacaagaattattagcggtgaaggtgagtctctccgtagtacatcggttgaggcatgtgacaaaatactaaagaaatgtggcggtgtgcctttagctatcatcataatagctagtctgttggccaataaaccaagggaatactggtccgaagtgtataactctattggtttagaacatggatacaatgatgacgtagataatacaagaaggatattgtctttgagctactatgatttgccgttgcatctgaagccgtgcttattgtacctaagcatatttccggaagattattatattgagaaaaatttgttaatatggaagtggatagcagagggttttgtacatgagaaacaagcagcaaagttagggttatttgaaaccggggagggatatttcaatgagttgataaacagaagcatgatccagccagttgagcatgaatactcagggtacatgtgtggttgccgtgttcatgacatggtacttgatctgatcctcttattgtcaggtgaagaaaactttgtcactgtagtagatggcagtaaggaacatgaactttcatggaaaaatgcccgtagattagctctacaacattggagttttgaagagaacaggaatcagttggctaatatgggtgtgaagcaaacaaggtcccttattatgactgagtgctttgataagaacatgcaattaccgagcttccaagttttacgtgtactagaaatacaaaagcaaggccgttggtggaacattgatggtaaaattaacctgcagcatgttagaaatttacttcaccttaggttcctccatctagattgtattgattctattcctctcatagagcaattcagaaatttgaggtttctacaagtacttcatctgaaggaatctaacatacaagagctgccagagtcagtgggcctgctaacaaaattgctgtccctacgtgttgatattgatgtaagggtgtcgcctggtgtgatcgagaagctgacgtccttacaggagctgtatttgtggccttatagtgatgatacgttccagttcgtgaaggtcctaggcaagctgagggaactgagggtgctgcatgctaaaaaccttaagcttgatggacagggcgagacatcagcactgctggagtccctatgcaatctgcacaagatccaaactttggacattgacctaaatcttaatccaaatgagggtgtcacgtgggatgcaggattcacttcccctcaatgcctccgatacctctgcttggtgtctttgaggtttcatagaatgccagagtggattaattggtcgcttcttccaaacctctcttatcttgaattgagagtgaattttttggaagagctagaccttgaaacccttgggaggttaccaaaactacgatacctccatctgtttatacactgcgacaggatagtaagcatcgggaagattgccggtgctggtgatgcctgcttccaagagttgagatttttgaacacaccctacttgtatgtccggtttgatcagcatggcatcatgtgcagcaaagacgaaaaagctgtcatgccaaacgtcaaaactctcagtttttgtgtttatgtgcggatcctaaaagataccgacatacttggatttgacaagctgtttagcttcgctcatcttggaagaagttcgctccaacaagtccaagttaacatccaatgtcgtggtgctcgtgccatggaagtcgaggaagcggaggcggcgttggcacacgcagccgccatccatcccaaccgtccaacccttcaaatccataagttttcggagggagaaatgcttccccctcacgaggagcctagcagcttctttcctaaagttgttgtcgaaaatctcaatgcgcatgagagaaaggacgacgatcttcgttttgtcctcggacagatgctccagcgtaatccatgcgtaaagaaattcagtgtctccatcaactgtgaaaatgcatgtcttgaggaggtggagaaagcagaggcggctgcgagatatgcagtcgacttccacgcaaaccgcccgacacttgaactggtaaaatatggtgaagataagatggtgttgtctggccaacaccaacaggtatgcaccccaggttgcctatctgattctaatccctag

SEQ ID NO: 73508 - DNA, 681 bp, Oryza sativa
  Clone ID: PAT_MRT4530_73782C.1
ccccccccttcgagtcgaccaacgcgtccgaacacaagaattcagctgtacaacctgatcaatcttacacaagaattcagccatagctagccctgatcgatccaattctgagttcttgaccgacaaccatggcgtccatgaccgccgtcgccgccgtcctgctcctggtcttcttgctgctgacatcgtcggctccgttcttgcaagccaggatgatgccgggagacggcggggagattgttcaggaggccgtgacgatgatgatgggatcctctgccggcgccgccgccgccgccgtcgcaggaagaagaagcacggcgtcgtcctcgccgccggaggaggagatgctgctcccgaggagaccacctctgccgctgtcgccgccggcggcgaccaccggagctcgcagcagcaggatgctcgggtcggtgcccagccccggcgttggccactagcgggacgacgccggctgatctatagttagttaatacagtagattcagagtgtcccttttttttatacatatttgactttctttaaaatatttatgtaaatattattttttagttgttttataaaatatagtttaagtatgatgtatttgtaggaaaaagttaaataggaggaatgatcaaacatgtgtttaaagacgttatttatttaaaaaaaaaaaaaaaaaaa

SEQ ID NO: 73509 - DNA, 1807 bp, Oryza sativa
  Clone ID: PAT_MRT4530_73783C.1
gtctttccatttggatctgttccgttgaaaacttatcttcctgatggagatattgatttgactgcctttggccattcaagtgatgaaattttagcaaaacaagtacaggctgttttagaatcagaagaggcaaggaaagacgctgaatttgaagtcaaggatgtccaatatattcatgcagaggtcaagttggtgaaatgcattgttcaaaacatcattgtagacatctcattcaatcagtttggtggactgtgtaccctttgttttctcgagaagatctatctcggtctgatttatcacaagctaggtccgttgtacttccttgtggttcaacagttggtagatgatttctttaaggttgatcaaaaatttgaaaaaaaccaccttttcaagagaagtataatgctgataaaagcttggtgttattatgaaagccgcattcttggtgctcaccatggattaatttctacctatgcattggagatattggtgttatatattttccatctcttccatggaacattggatggtccactagctgttctctataggtttctggactactatagcaaatttgactgggacaataagggtataagcttgtatggccctatttccttgtcttccctgcctgagctagttactgactctccagacacggttaatgatgattttactatgcgagaggactttctcaaggaatgtgcacagtggtttactgtactccctagaaactctgagaaaaatactcaggtctttccccgaaaatttttcaacatagtggacccattgaagcagagtaacaatctagggcgcagtgtcagcaaaggtaacttcctccggatacgcagtgcatttgattttggtgcccggaagcttgggaagattcttcaagtgcctgacaattttactgtggatgaagtgaatcaattcttcaggaacacattgaagagacactgcagtagggtaaggcctgatgtgcaagaaatagctctggacttcaatggtgaaagagccgacaacgatagttcgcctttatacagtaataattcctttggtgatctatctgatgagttcaataacatcagcatttcagattccagcaaccatgggtcgctaaggcaaaatggatggaattatgtggctgagaacaaggaaaggaagtctgtttctggtggctggctggcaagcaaagcaacaaatcctgcagctactaattcaactggtatgacgaatggcagtgactcttgtgagcctgcatcaccatcaattaccggagcacatagcttgccatctgaggaaggtcatgacgcactggatctctttaatgagtcagaaagtggtacgaaggctggcataaagtatgacacaaacccatcacaccatggaatgtcaacagtgagttacgcaggcagatcccaccagtcctttgaagaggtggataatgatgatagaggtaccattgatagcaattggtcagatctcaccggagactacacaacaaattttaataatcttctctatgctcaagggttccaccaagattatccaatgaaccaatattatccatttggtccagtgtactatcaaatgccttccccaccacctgcacgatatcagaataggcgatcatcaaatggtcatagcagaaataatgtgtatggatatgctggtacaaatggaataggccctgctccttgtccaccaggttatttaattatgaggacatatagtcaaatagatgattcacatcgagctcgtggaactggcacatacttccctaacccaaacttgtccaaagacagat

SEQ ID NO: 73510 - DNA, 249 bp, Oryza sativa
  Clone ID: PAT_MRT4530_73784C.1
atggggagggggaaggtgcaggtgcggcggatcgagaacgaggtgagccggcaggtgaccttctccaagcggcggccggggctgctcaagaaggcccacgagatcgccgtcctctgcgacgtcgacgtcgccgccatcgtcttctccgccaagggcaacctcttccactacgcctcctcccacaccacaaatttgacaggagcactagatggtgctagggatgaaaacggagcggatacggacggataa

SEQ ID NO: 73511 - DNA, 333 bp, Oryza sativa
  Clone ID: PAT_MRT4530_73785C.1
atggagggcaagggagcagctgcagcagtggctctctgctgcattctcatcctgctgtcaggtgatcagcttcatcaggtggctgccatgtccaagttctgcagatgctacttgcagtgctaccctgactgcaggaagagcctgcctcggttcatctgcgtgctcaaatgcatcgatgattgcagccccaacaagaagaggatggccgtcggcgactgcaacaaattttgcctgctcgccatctgcggcatggcgttgaatgggcaagctgatgttgcatcttgcgtagatgactgcaccaagaacccagatctacacaccaagttcctttaa

SEQ ID NO: 73512 - DNA, 267 bp, Oryza sativa
  Clone ID: PAT_MRT4530_73786C.1
atgggggcgctaggagtagccaccgggctcgccgcgagtggggaggggaccgggcgaccgccgcgcgaggcacctgagctcgcctcgcccgcgtccggccattgccgcgagccagctaggaggctcgtcgccgccatgaccggagaggcgccaggctgctgggctcctcgcgagtggggaggggaccaagtgaccacgcccaaggtcgaggctggggccctgtcgtgccaccacgggcggaggcgcgtggaggcggccggccgctag

SEQ ID NO: 73513 - DNA, 463 bp, Oryza sativa
  unsure (1)..(463): unsure at all n locations
  Clone ID: PAT_MRT4530_73787C.1
cccacgcgagcgatacattgcccttatgtactggtggattgatacttctctgatagctggtcatactggaagcagggagctgcctgcctccatctactggctggcacagatatggataacagtactcctaaaggagatcgcacaagaatctcaccgtggtggcgatctagttcagtcatcccgtttatccaagccaagcacaaatgctgagcctgacctgaatcagcgcctggattatgctctagatgactaccagngcgacatgcatgtaccatcagatcccactagcacggtgaagtcaaatacctgccttgtgtacaaaaatgcgcctttaattacataccagacccttacaccagcgaagcacgcccaacctatcatcctggagatcaacagtagctgatcaaatgcactggcttcgcaaccattgcatactatactatcacaccatacacatggccat

SEQ ID NO: 73514 - DNA, 371 bp, Oryza sativa
  Clone ID: PAT_MRT4530_73788C.1
atccggtagcgctgctgattggtttattcttctgtgttagcctagatgggtcttcccacctgttttcaccgatgagaaacactctattttcagacaaccctactcctgagacaccatttcctttcacaacagtttgttgaatctctgcaatttctgttatggagggaatggctgctccatttatgccatcctacaagagagttggattagaatatcatgccatgactacaggtactgcttatcgcttgaactttctttatatgcaaagtaaggaggccctatatatgggagcaactgctgcagaattgtagatagcgaattttttgttcagaaaagataattgtgttttcttaaacacagaatggtgtcat

SEQ ID NO: 73515 - DNA, 1572 bp, Oryza sativa
  Clone ID: PAT_MRT4530_73789C.1
atgtgcgccatgagctcggtgctggcaacgcatcaccacgcggcgaggtgcggcgccgtccgccgggagaacgcctggattgcgccggcgagggtcgggttcagccaggcgcgtcgcggcggcgggagggacgagctgagcgccgccgggctcggccggttcctcggctacgccaccgccgatcacaagaacaagaaccatgaggtggacgacctcgagccggcgaggctgttcgtggggttgccgatcgacacggtgacggacggcgcgacggtgaacagcgccaggggcgtgacctccgggatgcgcgccgtgaagctcctgggcgccgacggcgtcgagctgccggtgttctggtcggtggcgcagccggagtcgccggaccggttcagctgggcggggtacagggccgtcgccgacatggcccgcgacgaggggctcagcctccgcgtcacgctccacttccacggctcccccggcggcgccgtccccttgctccccgtctgggtctccaccgccgccgccgacgaccccgacatcctcttcaccgaccgctccggcggccgccacgacgactgcctctccttcgccgtcgacgagctccccgtcatccacggccggtcgccgctcgactgctacgacgccttcttccgcagcttcgccgacgcgttccaggacctcttcgactccaccatcaccgacgtgacggtggggctggggccgaacggcgagctccggtacccgtcgtacccgccggggagcgacgggcaggggttcaccggcgtgggcgagttccagtgctacgacaggtacatgctggagcagctgcggcggcacgcggcggaggccggcgagccgctgtgggggctgtcgggcccgcacgacgcgccgcggtacggcgactcgccggacgcgtgcggcttcttcaacgaccacggcgggtcgtggcagagcgcgtacggcgacttcttcctctcgtggtacgccggtcagctggtcgggcacggcgaccgcgtgctcgccgtggcgaacggcgcgctcggcgacacgccggtggaggcgtcggcgaaggtgccgttcatgcactggtggcacggcgcgcggtcgcggccggcggaggcggtggccggattctacaagagcggcgggaagaacgggtacagcccggtggcgaagatgttcgcgcggcgggggtgcacggtgatcgtgccggggatggacgtgtgcatgaacaagcagcaccggatcacggggtccagccccgaccagctgctggtgcagatcaagaacgcgtgccgccgccacggcgccaggatcgccggcgagaacgcgtcgctcgtcgtcacgcacaccagcagcttctcccgcatccggagcaacgtgctcaccgccgagcggatgaggccggggcacttcacctaccagcggatgggcgaggccttcttctcgccggagcactggccggccttcgtcgagttcgtccgcggcgtcgtctgcggcgagtggcccgacgaggacgaggaccgcgacgtcgccgacaatcccaacgccatggaggcgcagccagtataa

SEQ ID NO: 73516 - DNA, 1652 bp, Oryza sativa
  Clone ID: PAT_MRT4530_7378C.1
ccacgcgtccgcagacgtaagagttaagaacagccacagcgttctccgtcccattgcacttatttaagattctaactttgatgttactatcttggggtcttgaaatggcattcccctccacctcgtcggtggcgtatcccagaagtctgtccccactgcgccgctgccccggattcctcgccctccttgttgccgtcctccttttcctctccttccagattggcagtgtccggatggctcttctccgatcaccagactgggcacaagggtcccgggagctgtcctggatgccacaatgtacagtttatctgatatcttctaatgacatatatgagggcatggataatgccgataagactattgcttacacgaatcaggatggtcggatcaggctgttcaaagttaccacaagagaattcttgtcgtcctctatctggaagaatcctttgttgccgaaagataccgagccggtagctgaaatacaagagattgcggaggagcagctactagccactgggtcagaagtctccaatctttcaagcacagaaactttggaaactagaactgatccaattaaattaaagagagaggtgttccgacgtaaaagaaaggagcataggattcaggagttgcttcaggtggacaaggaggctgagctccatatgcgaaatgtagcgacaaacagatcgaggaacttcagtaacaaagtaagagccagctacaacatatggaggctgcagtttcaccatactaatacggattcaaccctgagacttatgaaagatcagataataatggccaaggtgtatgccacaattgcacattcccagaagcaacctgacatgtacgcgttgctcatgaagtgcataaaactatgccaggaagctattggggatgcacacatggattatgaacttgattcgagtgctttagagcgagcaaaagcaatggggcatgccttgtcttcagctagagatgttctgtacaactccgatgaagtatctagaagattgcttgttatgctgcagtctacagaactaaatattgatagtgttaagaagcagaactcattcctggtgcagcatgctgcaaagacggtccccatgcccttgcactgtctgcatatgcagctgacaaccgattattactttcgtgatggtatgatcaaggaatatttccatgatgccgctttgaaggaagaagaagataaagcaaagcgtgaggataggtcactataccactacgctatattttcagataacgtccttgcagcctcagtagttgtcagatcaactgtgacacatgccaaggaaccagagaagcacgtgttccacatcgtcactgatagacttaattttgcagctatgacgatgtggtttatacgtcatcctcctctacctgctactgtccatgtggaaaacattgacaacttcaagtggctcaattcatcatactgttcagtcctacgacaacttgagtcagctcggctcaaagagtactatttcaaagcacatgatccatcatcactctctgacggaaatgaaaatctgaagtacaggaaccccaaatatctgtctatgcttaaccatctaaggttctacatgccagaaatacaccccaagcttgagtattctatagtgtcacctaaatag

SEQ ID NO: 73517 - DNA, 465 bp, Oryza sativa
  Clone ID: PAT_MRT4530_73790C.1
atggataagctgaccccggagcagaaggtggaaatcaagaagatgaaagaagatctgcagaaccgatttctacattcgtttgcaccaactcgctccggtgctatgattcagaaatacaagatagttctgtcaaacaattacgatacagaaatgagtgccggtaatagtgacaaagccaaaggagacaatcaagataaaatcgaagcactcaaactcctacctcagctgcaacatgctgggcactacattccacgggtctccccaaaccaagtcgcgtccatgttcagaccaaggcagccgatagttgagccgattccacagataaccatgggacaacattcgcctatcccacagccgcagccaaatatcagcacccagctcatccccgaacaaaacatggtgcaccagagccctcaacacatcgggggcaacttgaattttcagtaccagccctactctccttag

SEQ ID NO: 73518 - DNA, 1021 bp, Oryza sativa
  unsure (1)..(1021): unsure at all n locations
  Clone ID: PAT_MRT4530_73791C.1
ctgaaaagaatatgatgggggaactaacaatcagcatgcaaatatttcaagcctgatttgacaaagcagtcaacctttcgttaatatttcctatcctattatacaaaaacaaaattgtctcaaacgtgactaccttttgtatagggcactaacactggccatgtgaatactattcttcaactgttgtgaaaaagaacttgaataattggcaagtatctatctacataaactgttatagatgttcacaaatgaaacagcatgttggtccagcacgttgcttagttcgtggctactgtcttcccttcacaaacatcacatacaattgaaccaaggccttcacagtatggacacttcgtatcttcaccgacccactccaaaaactgtggttcaatgttcggctcacctgttccatcacattctacgcacatgaggcggccttcaccccgacaagagatgcacttcttagttgatgcattggtagcgctgctgattggtttattcttctgtgttagcctagatgggtcttcccacctgttttcaccgatgagaaacactctattttcagacaaccctactcctgagacaccatttcctttcacaacagtttgttgaatctctgcaatttctgttatggagggaatggctgctccatttatgccatcttttgttttcacatcctgcccaacttgtcctgtaaataacatgtcaagcagatctgatgtcataattccactctccgaaacccgtactgttgcctgccatgtcttcacagctcgttcggtgccngatgagaagctggagaactccatgtcttcttcgcccgaatngtaacccngcttttccaatagagttggattagaatatcatgccatgactacaggtactgcttatcgcttgaactttctttatatgcaaagtaaggaggccctatatatgggagcaactgctgcagaattgtagatagcgaatttcttgttcagaaaaagataattgtgtttccttaaacacagaatgtgttcat

SEQ ID NO: 73519 - DNA, 2013 bp, Oryza sativa
  Clone ID: PAT_MRT4530_73792C.1
atggtggtcgtccatggacagcgggctgaagactcgtttggtgggtttttctccttcgatgaggacgctgccagtgaggatatgtcattggatggtttggatgaggaacttgaagagcacaaggattatgatgtattgataagtattctagcgaatggtgaaaaacagagagatatggcaaccttggttgaaggcaacctaggccatgctgaacaggatctgattcaagattatgttgaagatagtgacaacctggtattattgcatgatcagattcatgactgtgacattattttgtcacagataggatcacttcttactggattccaggttcacattggttccattaactcagaactaagaagtctccaggagagatccttggatataagtgtcagactgaagaaccgcaagttggttgagacaaagcttgcaaaatttgtcgaagagattgttgctcctcctagtttggtgactgttattatcgatggagagataaatgatggttatgctaaaagtttggaaattttgagcaaaaagttgagattttctcaagttgatcctatgattaatgcatcaaattctctgaaggatattaaaccagaactggaaaggcttctacaaaaggcattatgcaaggtgtccgactatctcactgaattattcttttccatgagaaagcctggaactaatatccagatactgcaacaaaatatggttcaaaaatataggtatctcatcctctttcttagagagcatggatccaaggtctacactgatgttcgtgcaacatatgctgatacaatgaacaaggtgctgagtgcacattttcaagtgtacatagaagcattggagaagctcaagcttgacattggcgtatcaagtgatttgactggatatgacactaatatcattgaccttatatcaaggggaagagagcatttaagaaatcaccgtttcatgttttctttaggtgaacgggcaagcattttgaaggagattgatcgacctggcttggttcctcatatatctgaagtcaatcctgtaaaatacccatatgaagttatttttaggagtatctttttatcaaggcattctttggtgaagaatcattgttttatcaggtttttcaagatgatgtggaaaaattacttactttcaggaccttttaaagttattaatggacatttggatcatactcttcgaaattatcatgacgcggtatgcctaatgctcatgatctgcataactaggaaacaccaggttctcatctatctctggccacgcttcaagactgtttttgacatgtatcttcaaagcttgtaccggtgtgatacaaaattgttatgggtagatggctcccatccacaccatattgtaaggtgctatgttgagttcacagcatcccttattcaacttaatgctgaatgcggagatggtcagcttgatatgaacttggaacgcttacggctagctgttgataatctacttggtagacttgctgaaaattttgcaaaccccaagacgcaacacttgtttcttctgaataattatgacatgaccatttctgttctgaaggaagccggtgatgaagcaaataaactgcaaagctattttgaagagaagctagaaagtaacatgatatcatttgcggatgaattgcttatggagcatttcaaggatttgataaaatttgtgagaagccgtgtctctgaagaccttattctttatactgaatgcccaagcattgccgatgttgagccaattgtgaagaacttcgccgtgacatggaaaactgctctagagctcatgcacaatgaagttgtaacttcttgcagtaaccttttagctgggatggagattctaaaagcagcaatggttcagctactcaatgactacaacagactctcagaatgtgtgaagataatcccaggaggatcaactctgaacaggaatctggtttctattacatccatttcatatgagatgaggaaatattcaataacactctag

SEQ ID NO: 73520 - DNA, 244 bp, Oryza sativa
  unsure (1)..(244): unsure at all n locations
  Clone ID: PAT_MRT4530_73793C.1
aagagggcttgctgctcccagtgctagttcaacacaagatatttttattgggcagcttggtgggttaatttcaactaccattgagcatgttattgctcctgatgtcaggtttgaaactgttgacatggcaatgaggttacttgtacctataattntnctgcagaatcacaatcggtacaacattcttcaagcaggtcacaactacagcatagatgttcaagctattgaaagagaggttaaaaga

SEQ ID NO: 73521 - DNA, 630 bp, Oryza sativa
  Clone ID: PAT_MRT4530_73794C.1
atgcggcgcctcctcgccgcctccggccgctgcgctccggcgacccgcacccaccatgggctcttcgcgcgcgccatccagatcttggcgccgccggatcccgtcagtctccacaagctctcggcacccgactgcgaaatcgtagagctgaggctggagcgtccggaggtcaagaacgccatcaactgggaagccatgaggctgctgcggggtgtggtcgagaaggttgaggctgacgacaccgtgaaggtcgtcctggtcacgagctccgtgcctggagttttctgcgcaggcgccgatctcaaggcactatctattccaacaattgctgtcattgaaggagctgctttgggtggtgggctagaactggcactttcatgcgacctgcgtatatgtggagaaaatgcaactcttggactgccagagacaggacttgctatcattcctggagctgggggcacacagcgtcttcctaggattgttggaaggtccagagcgaaggagatgatattcaccggccgtagatgtaatgcaactgaagctgtaatgatgggactcgcaaactactgcgttccagcaggggaggctcatgaaaaagcccttgaacttgcccgcgagatagcccagaaa

SEQ ID NO: 73522 - DNA, 463 bp, Oryza sativa
  Clone ID: PAT_MRT4530_73795C.1
ctggctttattatcccccccacctctatgcccagtggtgaaagaaggccccaagagaaggatgggctgtcacctgggcattgcaagcacccaatgcctgaacttctatgggtaaccccccttgccaggaaagagtgtgccactgctgtcccgggctgctgccccaatggatggtgtgctgacgccaatagcatgatgccgcatgtctccacagagaagaggcttcagaggctcaagcatgtaaccgaggagatgagttccgggcgcattgcactcccatcccataccagagctacccagacgtttataatgcggcagaatcctcttaggtcggcttgcggataaagaataactaaataaataaattgccacccattgttttggctgctatgtactgtgcccagtctttcgactaatgatgataaaccctttctttatccctttaaaaaaaaaaaaaaaaaaaa

SEQ ID NO: 73523 - DNA, 531 bp, Oryza sativa
  Clone ID: PAT_MRT4530_73796C.1
atggaggggacggcgcattgcgaggtggtctgggacggcagcaggaggcggccggaggcggcaaatgcggcggcggcctcaggttggcggtggggcggtagcacaagaggattcgcggtggaggttgtgtttcgggggtggattggaggagtgccggtgtgcggcgtggcatggcacagctttcgggggcggcggcgcagtgcggcagcgacgggagcggcgggaagcggcggctggaggcacggcggtgagtggcggagcgcgggctcgagcggggagcatgtgagagggcgcgaggagctcggggaggagggggaaacggaagaggagagcacggggaggctttttatagcgcgagggagcaatggggaggccggggagtggcgaatttggggcggcaacggccggcgacgtggagctcagcgtgggcggagtggggactcgatttggcgccaaaagttggggaaaagtgggggatttagtggaggtggaggggaaccgattttatgcggtttgggtgcgagggcgtga

SEQ ID NO: 73524 - DNA, 605 bp, Oryza sativa
  unsure (1)..(605): unsure at all n locations
  Clone ID: PAT_MRT4530_73797C.1
atggatcatggcggcggcgagaggaggagcgccggcgcctacgaggcggcgctgagggcggtgcagaggccggcggcgaagccgtggcgcggcggaggaggaggaggaggcgcggggggatcggcgggtgccgcgggggcggcgccgcccaaggtgtaccgcgtggcgcccagggacttccgggagcgcgtgcagaggctcaccggagccggtccggcggcgccggcggtggccatgggcgcgagccaggctgtgcctgcgcccccgccgccttacgcgggtgtcccggcgcacgggcagagcgacgcggcggcggcggcggacatgttcgactacgcgtcgtggttctccgtgccgctgctcagcccggcctccatgccggccgccggctacgacggccagctccaccatggacatggtgctttactgtagttttagtatagtcgctgtccttgtaagatcgagccaaattttgcagttcgatcgcttcttcttcctgtcgtagaacgcttgtattagtttcttcaaaaacaacaaattcaaagaattcgatgaataaacacatgaattagttctcggcggcatanaanataataaacaacaaa

SEQ ID NO: 73525 - DNA, 455 bp, Oryza sativa
  Clone ID: PAT_MRT4530_73798C.1
aaaggttaagggagggttttttaatatttatccaaaaaactggccattccttaccacaaaaccaatggctggcaattaattaattaagtttttcttaacccccagcccgccctaaaaggattttccccattttaaaccgtttgggaaccctttgatttgaatgggaggaaatcccccaacccaatttccttttttttcctgaaccctttaaccctttttttttaaaatccaatttccttttcttaaaccatattttggaaaaccccggaaaatggacccttttcctccaagggggttaaccataaaataagaattggcccgaccccttggctcacccctggaattacccaccaattcctgaccgcgacccagatgcccaccaagttagcctaaatagagcctgactaaagcatggccatagcatggtcctaggtgaaacctgtatgcaatcacaa

SEQ ID NO: 73526 - DNA, 1337 bp, Oryza sativa
  Clone ID: PAT_MRT4530_73799C.1
cgatcgggaggagaccatggcgacggcgaggctccgatccgcctcctccctccgcggggtcctcctccgccactgctccatgtgttatagtaattcaacagggcgcatggttgaagtccaatttaccactgctcctggatgtattgcatggaagcatttctcaacattcaagcctaatcctcttccaaaacttgatggccttggttcagtcacttgtttgtacagtcaggcaagatgggcttctcaagctgctgctgttaaagaaactgaaaatagtggcagcaagataagcattgggccaaaatccaagcagatcaaggaagatgacaaagatgacaggctagtttaccagggacctatatcatcgaccataagaaaagtgaagcttctttctctgtccacctgctgtctctctgtgtcgcttggccctgtgataacattcatgacatccccagatatgaatgtaatcctcaagggcgctgttgcatccactgtcattttcctcagtgctaccacaacggcagccttacactggtttgtgagcccgtacattcacaagctcaggtggcgaccaggttcagatagctttgaagcagagattatgtcatggctggctacacccctcacaaggacaatcaagtttgctgatgtcaggcctccagagaccaacagaccttttgtcacttttagggctgaagggaacttctattttgttgatgccgagcacttcccgaacaaggctttgttggcgaggcttactcccaagcaccctaatgagtctgcattcaagaacttgtgattgaaggttgcccaatgacctcatggctgcactcgcgttcatgatcatttgttggcagtttacatttttattgtgatacctccctgctaatacttccagaagaagtagtatactatgttattagcgttcctttaaatccatgtggaaatcagtaaatgctggtgtcatactacgattttagttaagacactgagatggcgtgctgactgttcttaataagtagcggtgacttttgcttaggacacctcccaacattctgttgtttatgatgttgcaatgctacacgcccgtgtgtgcttggcagtttaattacatgaaaaaaataataaagcgtaaaaaacctaggccccacgcctgctgccccggttagagcgctgcgtgtcgtgacacctcgtgtctcccgctcggtggcatgggaggtatgcggttctgcctccaggatcaacctcctagccaccacaccccattagcgaccgaagactacgtaggtcgcgtgtgcttgacggcgcccagggacgtattgtgcacccgtactatt

SEQ ID NO: 73527 - DNA, 627 bp, Oryza sativa
  Clone ID: PAT_MRT4530_7379C.1
cgacaagcaccacaagttcagattctgaattcgcagtacaaaaaaaataagatcctctcctcaccttcctaccatctactaccaacaaaaaaactttactgtgttagtaaaggctatcaccaaagctacagttttctgtagcttcttcttcagcgaacacactcacgcacgcacgcaaatcagagtcagactataccaaagctgattgccttgcatttgcagatcatcacaatctcacaggcaagccgtagttgtggaaagacctgatcacaccgtctcgacttgcagtcacgatcaccgtgttccaagcaggcgagatcgtggagagacagtcagacagtcgtggggcatcagcggcttttgcaggtggaagcttctcctcccgccatgtcggagtacccttcatgccgtcagcgaaacaccgcgctgcgggggaacggcgttccccgtggcggtgcaaaatggcccgggccatggtaccgcggttgtcacgtccttggagaagaatttctcacaggagcgaaccgatttagcttcgcctttatgatcggcgacacttggaatgtcaaagttccagatgtagacattggaatccaatccggcagatatgagatatcttccatctga

SEQ ID NO: 73528 - DNA, 519 bp, Oryza sativa
  Clone ID: PAT_MRT4530_737C.1
atggtgagcggcggcggcgcgcggttgccggcaacggcaaccggcagcaggaggcggcggcagacggcgtggaaggcggtggcgtcggtcgaaggcgacggcggcgcacgcgcggagaacggcggcacacacgggagaaaaggaaagagggaggagaggggaacctcaccggcgggggttgggaggaaacccatggcggctaccgtggccggccggagaagggaagggcggcgaaactcaacggcgcacggggagagaggcgttccggcggcgggattggatagggaagtggcggccggggtagctttggcggcggtggcggcttggtgcggcggcggctctagcggcggcggcgcgcggccggaggtggtggcaagcggcggcgccagcagggagcggcacggcggcggtagagagcgtgcgggagcgcggcggcatgggagtgcgaggtggagcggcggttgcggcgtgacgtggggaggtggggcgccggcgactggaggtgggggaaagggctag

SEQ ID NO: 73529 - DNA, 573 bp, Oryza sativa
  Clone ID: PAT_MRT4530_73800C.1
cggacgcgtgggactcgatcggaaggagaccatggcgacggcgaggctccgatccgcctcctccctccgcggggtcctcctccgccactgctccgtgggaaccacctcgccgccgcaagttttctcccgcgtctcagatcttcaggctcctggatgtattgcatggaagcatttctcaacattcaagcctaatcctcttccaaaacttgatggccttggttcagtcacttgtttgtacagtcaggcaagatgggcttctcaagctgctgctgttaaagaaactgaaaatagtggcagcaagataagcattgggccaaaatccaagcagatcaaggaagatgacaaagatgacaggctagtttaccagggacctatatcatcgaccataagaaaagtgaagcttctttctctgtccacctgctgtctctctgtgtcgcttggccctgtgataacattcatgacatccccagatatgaatgtaatcctcaagggcgcttttgcatccactgtatttttcctcagtgctaccacaacggcagccttacactgggtttgtgagccccgtacattcac

SEQ ID NO: 73530 - DNA, 882 bp, Oryza sativa
  Clone ID: PAT_MRT4530_73801C.1
atggatcggcatgaggaggaggcaggagagtctccatgtgtgccgccggggttcaggtttcacccgacggaggaggagctggtgggctactacctcgccaggaaggtggcctcccagaagatcgatctcgacatcatccaggagctcgatctctacaggatcgagccatgggatctgcaagagcgttgcaagtacggtgggcatggcggcgatgagcagacggagtggtacttcttcagctacaaggaccgcaagtaccccagcgggacgaggaccaaccgcgccacggcggcgggcttctggaaggccaccggccgcgacaagccggtgctctcgtcgccgtcgacgagggtgatcgggatgaggaagacgctggaggaaggttgggtggtttgccgcgcgtttcagaagccgatgcccaaccagcagcagcacaggctgtcctacggctgcatccccggcagctacggcgccggagcctacgccgccgtccccgacaactacagcttgctgctgcaccacgacaaccctagcttcgccgggcggccattgatgagcgccgctgcctcagctctcttcgccaacaacaacaataacagcgtcgtcgaccacagcaacattctgagttcagagtccaagcttcacttctccgacatgatgccgcctctggagagccccaccatcgtcgacggcgagggctacgtctcgcaggctagcagctgcgtcgacgtcgatcagcaagccggcatcgtcgactggaacctgctcaccagcttgctgccgccgccggcgcatcagctcttccaccacctgccttccgcttctagctccaagaacagcaacaacatttcttcgtcaggcttcatcgatgaccgagactga

SEQ ID NO: 73531 - DNA, 539 bp, Oryza sativa
  Clone ID: PAT_MRT4530_73802C.1
gtaaatcaccactgatcatctcaccatcatcttcaacatctcatattaaacaacttcacttcctgccaacatgcagttcaccaagcttactctcctcgctgtcactgcgctgttctccatgggagaggcgtgcaagtgttacggaaccaagggaaacctcaacaacggcgcaactcacaagtgctgcaatgactacaagggcgtctactctggaaacgactgcaaagccggctctatttccgagcacctgagcggattcgaccgctgctgcaagggacagggctcagactgcgactttccccgccttgcctcaactgaggccaagatggtcaaggccgttaagcacgtcgaaatcaagactgcctattctggttaagaaaccacggtttgatgattcgactacactgtcaacttggatgatgataagcaagtagtaggattggggcggatatactaagtacaataaacaacatagatgtatagtactattatagtgacaatgccgactatcgtccttgaccaatctcagttggttcacc

SEQ ID NO: 73532 - DNA, 303 bp, Oryza sativa
  Clone ID: PAT_MRT4530_73803C.1
atggcgtcggggagcggaggcggaggcggagctggagggtgggccgcagggagcgacagagatccgacggaggagaagttggagcgctccatgggcccccttcgccgccacggcgcccggggtcgacgccgcggcctcttcctcctcctcgagttcaacccagattctgatttcggagtccatataagagggttgatgatttgggagcgaactctaaagcatagagatgcagcagataagccattgctagtagagcagattacaatgggagaaattaggaaaacagcttacatggaacattag

SEQ ID NO: 73533 - DNA, 418 bp, Oryza sativa
  Clone ID: PAT_MRT4530_73804C.1
tggcggatccggaggagccgtcctagggaaggccggatccgccgccctagggaggagcttggctctcggcggcgggcggcgggcacggcgacagcctgctccggcggatctggcgacgcgtcctcgggaaggccgaatccgccgccctaggggctctcggcggcaggcggcgggcacggcgacggcctgcggcggcggatccggtggcgccgtcgcagaggcggaggacagcggcgcgtcagaggcggaggacccatcggccaggccggcagcgagacggtggcggagctgcggaggcgggccggcgtggatggggtcggtggaggtggcggcgacctgcggcaaggtgctcggcgaggaggagaaggctgccgagaacatctacatcaaggtatatccaccctactcgcttccctaa

SEQ ID NO: 73534 - DNA, 339 bp, Oryza sativa
  Clone ID: PAT_MRT4530_73805C.1
atgtcgcgggagcggacactgccatcctgcgtacttgtacgagtaggtgcagcaagtacgtataggcgcgcatgccgcggcggacgccagcagctgctgcggtccacactactcgacgactctcgcgactgccgttgttctcgccgtcgtcgacatgggagagggcggaagcagcagcagccgaccgggccggcgtcgcggctggggctcccatccttgtcgtatactcgtctgcggtggcttgtgccagcgcgcggcttctgctggggcggcacgctcgcccctgcacggctgcaccggctggagctatgccaaattggccttggaagttctgagtaa

SEQ ID NO: 73535 - DNA, 852 bp, Oryza sativa
  Clone ID: PAT_MRT4530_73806C.1
atggccgaccgctgctgcgtttacatgcacgagatggatgacgtccaccggtggctgccgtcggaggtcctcagggacatcgggatcgcagatgccgacgagcgccgccgcctcgccatcgtcgaggatcgacctcgccaggcccagcgccctctcttctcttgtcaccatcgaccacaggtgacgggcggggatggtggtgaaatgcttagggaccatcacgccctcgcgggcgccggccgtccaagggtggccgccacgccgccgctgcaactgcgacttgttgggaatagtcgactgccattgccagcgccggccgcgccgtggcatgtcatgacgggtggcccaaggaacaccatggttctgcgcccagcgccgccaccggcgatgaaccacccacacccgctactccgtggcggcgccgtcaccggagcagctccgccggtgacgacgcggcgcagcagcggcacaggcttcttcttgccgcgcaccacggccgccgacccccgccacgcgaaccaccacatgacggcggctgcggcgaggcccccctactaccaatgttccaccgaggcagtgtcgggcacaaaggcaccggcgaggcaacgaggcagcggctgcggcgacgaccatggcgaggaggcagcaagagctcacgcgagcaatggcggcaaacatgcagcagctcgccggtgctccagcggcaaccaccagcccgtgcccagagctcgctctaccacaggaatggactcattagggcatggacatgacgcactcatgcaccagcctgcagtgatcacacactacaactacatgcacggacatttatgcgcaccatatcattggtgttag

SEQ ID NO: 73536 - DNA, 490 bp, Oryza sativa
  unsure (1)..(490): unsure at all n locations
  Clone ID: PAT_MRT4530_73808C.1
gggtgcaggattcggcacgaggtanagatggtggacatcccggcgatcgacctgcggntggccngagcggcggcngcnctgatgaaacggcnangctgcgcnacgcgtgcncgcngctgggctgnttccgggtgtctgggcacggtgtnccgccggggctccacccgacatgaatgtcgcggtgcgcgcgctcttcnacctccccgacgacaccnancnccgcancgcctacatnatcccgggtnncggctacctccctcccggctcntccaatccgctctactangccttcggnctctgttattgccanctcccccgnctacntctactccttctgcgccncnctngacncnccatccccacntcannggaacaccgttaaagcnttatccaaanatnatgtctccgctgatcgtggacgtccccggcgaggtcgcccgcgtagcctggggctncncnggctcctctcttccaagactggccntgccnn

SEQ ID NO: 73537 - DNA, 2554 bp, Oryza sativa
  Clone ID: PAT_MRT4530_73809C.1
ccattcatcattattctatttattctgacctccatacttcgatcgagatattggacatcgaatgccactctttaaaatggaaaaaaaggagtaatcagctgtgacacgaaaaaaaacgaatccttttgtagctcatcatttattggcaaaaatagaaaaggtcaatatgaaggaggagaaagaaacaatagtaacgtggtcccgggcatctagcattctacccgcaatggttggccatacaatcgcgattcataatggaaaggaacatatacctatttacataacaaatcctatggtaggtcgcaaattgggggaattcgtaccaactcggcatttcacgagttatgaaagtgcaagaaaggatactaaatctcgtcgttaactgaattcagaatagaaagattcaaaataaaaaaaaaagaaataggtaagcggggaataaccttatttatgacaagtttcaaactggtaaagtatacccctaggataaagaagaagaagagtgggccaaagaaactcagaagaaaagtataccaaccgatcgtctacttaagttcgaacgggttttcaaagcacaaaaacgcatccacatgtccgttttcaaagtacaaagagttctggatgagattcgttggcgttactacgaagaaactgttatgatattgaacctcatgccttatcgagcatcttatcccatcttaaagttggtttattcggcagcagcaaatgctactcattatagggatttcgacaaagcaaatttattcatcactaaagccgaagtcagtaggagtactattatgaataaattcagacctcgggctcgaggacgtagttctcccataaaaaaaaccatgtgtcatataacaattgtactaaatatagtaaagaaatcgaaataatctttagatccatctaagatttgattcccggtaaaaaaaatagaatagaaaaatatgggacaaaaaataaatccacttggtttcagacttggtacaacccaaaatcaccattccttttggttcgcacaaccaaaaaattattctgaaggtctacaggaagataaaaaaatacggaattgtatcaagaactatatacaaaagaataggaaaaagggctcgaatagaaaaatagaagcagactcaagtttcgaagtaattacacataataaaaaaatggactcaggctcaagttccgaagtaattacacatatagaaattcaaaaagaaatcgatacaatccacgtcataatccatattggattccccaatttattaaagaaaaaaggagcaatcgaagaattagagaaagatctacaaaaagaagttaattctgtaaaccagagacttaatattgggatcgaaaaagtgaaagaaccttatagacaacctaacattcttgcagaatatatagctttccaattaaaaaatagagtttcattccgaaaggcaatgaaaaaagccattgaattaactaaaaaaacagatataaagggagtaaaagtaaaaattgcaggccgtctcgcgggaaaagaaattgcgcgtgccgaatgcatcaaaaaaggtagacttcccctccaaacaattcgcgctaaaattgattattgctgctatccaattcgaactatctatggagtattaggagttaaaatttggatattcgtagacgaagaataaccaaccctgtcttcccattctgttcagtaatagaataaaaaatgacaagagccttattttccctaaaatccctgaaaaaaagaagaaattctacctctttctataagatttaatgaaaattgagaaatcttttaataaaattgctatgcttagtcccaaaagaaccagatttcgtaaacaacatagaggaagaatgaagggaaaatcctaccgaggcaattgtatttgttttggtagatatgctcttcaagcacttgaacccacttggattacggtgaggcagatagaagcaggacgaagagcaatgacacgatatgcacgtcgtgttggaaaaatctgggtacgtatatttcccgacaaaccggttacaataagaccgaccgaaacacgtatgggttcgggaaagggatcccccgaatattgtgtagccgttgttaaaccaggtcgaatactgtatgaaatgggcggagtatccgaaactgtagctagagcagctatttccatagctgccagcaaaatgcccatacgaagtcaatttcttcggttagaaatataaccccccaaaaaaagtagtattgaaaataaaaaaccaggttcttctttctgggaagacaacatttctttcatcctttttcaatgtaagaacaaattgtaatcaaattaataggattcaacctcagaccctttttaaatttagcagataacagtggagctcgaaaattgatgtgtattcgagtcataggagctgctagtaatcagcgatatgctcgtttttggtgatgttacttttgctgcaatcaaagtcgcagtgccccaaaatgcctctagaaagttccgaagtatttcgagctttaattttccgtacatgtaaaggggtc

SEQ ID NO: 73538 - DNA, 1863 bp, Oryza sativa
  Clone ID: PAT_MRT4530_7380C.1
atggagctggagtttgaccgcaacaaagaaaggtttggtttccttaaatgggcatccactgcttttcacaagatgcaggttttccctcctggttctggtattgtgcaccaggtaaatcttgagtatcttgcccgagttgtgttcaacgcagatggcatcatgtatcctgacagcgtggttggcactgactcacacaccactatgattaatagtcttggggttgctggttggggagttggtggtattgaagcaattgttgcaatgcttgggcagccaatggacatggttttacctggtgttgttgggttcaagttgtctggaatgttgcgggatggtgtcactgctactgaccttgttcttacaatcactcaaatgctaaggaagcatggtgttgttggcaaatttgttgaattttatggtgtgggtgtgggtgagctgtctttgcccgctagggccacaattgcaaatatgtctccagaatatggagctagcatgggcttcttccctgtggaccattacaattacttacgaaaaatatcaagcttccatacgaggttaattaaacaacacaacttagctatcacgtgcacctatgacataaccaggtgtatgcacaacaaaaaggtgtcaatgattgaagcatatctgcgagctaacaatatgtttgtggagcaccatgagcctcatacagaacgagtttattcttcatatcttgagctcaaccttatagatgtggagccttgcatttcaggcccaaagaggcctcatgaccgtgtccctttgaaggaaatgaaatcagattggcatgcttgcctagacagcagagttggtttcaagggttttgcagttccaagggagtgccaggataaagttgtgaaatttgactttcaaggacaacctgctgaaatcaagcatggcagtgttgttcttgcagcaatatgcagttccacaaacacatcaaatcctagcgttatagttggtgctggccttgttgcaaagaaagcctgtgaattgggccttgagggtttaccttttcgatttcgaagtaaaaaccgctcctcgccggtttaccgaaaacaagtgaagccatgggtaaagactagctttacccatggatctgcggttacccgtgaatacttgaaacacagtcaccttcaagattatttgaaccagcaagggtttcatcttgctgcatttggctgtgccacctgcgtcggcaactctggtgaccttgatgaatctgtatcagctgccataacagaaaatgatattgtctctgttgctgtgctgtcggcaaaccgtaactttgagggtcgcgtgcaccctctgactcgggctaattaccttgcctcgccacctctggttgttgcctatgcccttgctggcactgttgacattgattttgagaaagaacccattggacatggaaaggatggcaatgaagtttacttgagggacatatggcccacaaacgaagaaatcgaacaggttgtgaaatccagtgtgctacctcacatgttcacgcaaacgtacgaatccatcaagagatgcaaccggaggtggaacgagctgagagttccaggcgaggcagctgccctctacccatgggacccgagctcgacctacatccgcaagccgccctacttggagggcatggccatgtccccgcccagccgcccacgctcggtgagggatgcctactgcctgctcaacctgggggactccgtcaccacggaccacatctcctactccgggagcatcacgcccggcagcgccgccgctgagtacctacgcgccgccggcgtcgcggatcgggagaggctcggctcctacggtggccggcgtggcaacgatgaggtggtg

SEQ ID NO: 73539 - DNA, 4212 bp, Oryza sativa
  Clone ID: PAT_MRT4530_73810C.1
atggaggaggagataaagggccgcgtcgtcgtcctcggcgccgatgccgccgccgacccggagctcgaggccttccatctcccctccgccgaccagcccccgcactcgcacctcctccaccaccaccattctccacaatcccatcctcaacctgatgcaccagcagcagcagcgccaccgccacctgctccccttactcctcctcctcctaagtcgccgccgccgcctccccacatccaaaccaccgaccttccaccgcccaagcccctcccgccggccccgctccgtcaactcttcagcttcgccgacggcctcgactacgtcctcatgaccctgggcacgctgggcgccctcgtccacggctgctccctcccggtcttcctccgcttcttcgccgacctcgtcgactccttcggctcccacgccgcccacccggacaccatgctccgcctcgtcgtcaagtacgccttctacttcctcgtcgtcggcgccgccatctgggcctcctcctgggccgagatctcctgctggatgtggaccggcgagcggcagtccacccggatgcgcatccgctacctccacgccgccctccaccaggacgtctccttcttcgacaccgacgtccgcacctccgacgtcatccacgccatcaacgccgacgctgtcgtcgtccaggacgccatcagcgagaagctcggcaacctcatccactacctcgccaccttcgtctccggcttcgtcgtcggattcaccgccgcctggcagctcgccctcgtcaccctcgccgtcgtcccgctcatcgccgtcatcggcggcctcagcgccgccgcgctcgccaagctctcctccaggagccaggacgcgctgtccgacgccagcggcatcgcggagcaggcgctggcgcagatacgcatcgtgcagtcgttcgtgggcgaggagcgggtgatgcgggcctactcggcggcgctggccgtggcgcagcggatcggctaccgctccggcttcgccaagggcatcggactgggcggcacctacttcaccgtcttctgctgctacgcgctgctcctctggtacgggggtcacctcgtccgacgcgcccacaccaacggaggcctcgccatcgccaccatgttctcagtaatgataggcggcctggctcttgggcagtcggctccgagcatggcggcgttcgccaaggcgcgggtggcggcggcgaagatattccggatgatggagcacaagccgagcatggagcgggagggcggggtggagctggaggcggtgacggggcgggtggagctgcgggatgtggagttctcgtacccgtcgcggccagacgtggggatcctgcgggggttgtcgctgagcgtgccggcggggaagacgatcgcgctggtggggagctccgggtcagggaagagcacggtggtgtcgctgatcgagaggttctacgagcccaacgccgggaccatcctgctggacggccacgacctgagggacctcaacctgcggtggctgcgccgccagattggtctggtgagccaggagccggcgctgttcgccaccaccatccgggagaacctgctgctggggagggacggcgccacgcaggaggagttggaggaggccgccagggtcgccaacgcccactccttcatcgtcaagctccccgacgcctacaacacgcaggcaaggccaggcggcaatcaatgggttgctttcgaacgctgttccgagttggtgcaagttggggagcgcgggctgcagttgtcgggcgggcagaagcagcggatcgccatcgcgcgcgccatgctccggaacccggccatcctgctgctggacgaggccaccagcgcgctggactcggagtcggagaagctggtgcaggaggcgctggaccgcttcatgatcgggcgcaccacgctggtgatcgcgcaccgcctctccaccatccgcaaggccgacctcgtggccgtcctccagggcggggccatctccgaggtgggcacgcacgacgagctcatggcccgcggggatggcacctacgccaggctcatccgaatgcaggagcaggcgcacgaggccgcgctcgtcgccgctcgccggagcagcgcgcgaccatccagcgcccgcaactccgtcagctcgcccatcatcacgcgtaactcctcctacggccgttccccctactcccgccgcctctccgacgccgacttcatcaccggcctcggcctcggagtcgacagcaagcagcagcagcagcagcactacttccgcgtgcaggccagctccttctggcggctggccaagatgaactcgcccgagtgggggtacgcgctcgtcgcgtcgctgggctccatggtgtgcggctccttcagcgccatcttcgcctacgtcctcagcgccgtgctcagcgtgtactacgcccccgacgccgcctacatggaccgccagatcgccaagtactgctacctcctcatcggcatgtcctccgccgccctgctcttcaacactgtccagcacctcttctgggacaccgtcggcgagaacctcaccaagcgcgtccgcgagaggatgctcgccgccgtgctccgcaacgagatcgcctggttcgacatggaggacaactccagcgcccgcatcgccgccaggctggcgctggacgcccagaacgtgcgctccgccatcggcgaccgcatctccatcatcgtccagaactcggcgctcatgctggtggcctgcaccgccggcttcgtcctgcagtggcgcctcgcgctggtgctgctggccgtcttcccgctggtggtggccgccaccgttctgcagaagatgttcctcaaggggttctcgggcgacctggagcgggcgcacgcgagggcgacgcagatcgcgggagaggcggtggcgaacgtgcgcaccgtggcggcgttcgggtcggaggcgaagatcgtggggctgttcgaggcgaacctggcggggccgctccggcggtgcttctggaaggggcagatcgccgggagcgggtacggggtggcgcagttcctgctgtacgcgtcgtacgcgctggggctgtggtacgcggcgtggctggtgaagcacggcgtgtcggacttctccaagaccatccgggtgttcatggtgctgatggtgtcggccaacggcgccgcggagacgctgacgctggcgccggacttcgtgaagggcgggcgggcgatgcaggcggtgttcgaggcgatggaccggaggacagagatcgagccggacgacgtggacgcggcggcggtgccggagcggccccggggggaggttgagctgaagcacgtggacttcgcgtacccgtcgcggccggaggtgcaggtgttccgggacctgagcctgagggcgcgggcggggcggacgctggcgctggtgggggcgagcgggtgcggcaagagctcggtgctggcgctggtgcagcgcttctacgagcccaactccgggcgggtgctcctggacggccgggacctgcgcaagttcaacctgcggtccctgcgtcgcgccatggcgctggtgccgcaggagcccttccttttcgcggccaccatccacgacaacatcgcgtacgggcgcgagggggcgacggaggcggaggtggtggaggcggcgacggcggccaacgcgcacaagttcatatcggcgctgccggaggggtacgggacgttggtcggggagcgcggggtgcagctgtcgggcgggcagcgccagcggatcgccatcgcgcgggcgctggtgaagcaggcgcccatcctgctgctggacgaggccaccagcgcgctggacgccgagtcggagcggagcgtgcaggaggcgctcgcctcctcctctggctccggccgcaccaccatcgtggtggcccaccgtctggccaccgtccgcaacgcccacaccatcgccgtcatcgacgacggcaaggtggcggagcagggctcgcactcccacctgctcaaccaccaccccgatggctgctacgcgcgcatgctgcagctccagcgcctctcccactcccacgttgcgccgggcccctcctcctcaacaacaacacacggcacctagtattcgttttgatacaacaacatgttcttcttttgctgtgtgttcttgctgctgctgctgctagatgttctaagaatgaattaatgaaatgaattactatactgctagctaaaaaaaaaa

SEQ ID NO: 73540 - DNA, 704 bp, Oryza sativa
  unsure (1)..(704): unsure at all n locations
  Clone ID: PAT_MRT4530_73811C.1
ncgacncnagaggaaccacacagcagganacccggccccagcacgcgagggggagacaacgcncccgcgcccggaagaccaggaacccacaaagccggaggaggacgggcgagaagacaagaacagcggcccgggagcgccagaaacgaaggccaacctcctccgggccccggaaccaccgcaaaaaccccaggagagccgccaagggagaaacgcgaggaacaggcaaggagaggcacacacggggagccgaaaaagaaacgcccgggcgggggaaagggaggaaccggagggccccagcaaaggcacaaaaaaccggaggagctgccaccggcgcgccaacaggggaagaaagcnnggcccaaggggcaaccggagcggaacaggggacacaaacagcaaagccagcacgctggaggaagaagagaccatactaccgccggggcaagagaaggccagaagcccggcgggggacgaagaagcccaccaaaggaagggaagcaccaagggcccncaaggagaacgaaaaccacatagaggagaagggccactggaggagcttatcaaaggaggcagtgagtgcgaagtcctctacgttgaaccaggaaggacacttatccagaagcacaatggtggacaaacaatgaagtgttgaaactgggtctaaaaaaaacaatggggcaaaagaaaggcctaaacctgtg

SEQ ID NO: 73541 - DNA, 2247 bp, Oryza sativa
  Clone ID: PAT_MRT4530_73812C.1
atgcggacaccggcgctcctcccccgcggcgtggaagccgtcgtcgtcacctccggccacctccgccgcctcgacccgcacgtccatgcgccgctgctcctcgccaacaccctcatctccgccttctcccgcgcctccctcccccgcctcgccctcccgctcctccgccacctcctcctctcctccccgctcctccccctccgccccgacgccttcaccttcccgccgctcctccgcgccgcccagggcccgggcaccgccgcgcagctccacgcgtgcgcgctccgcctcggcctcctccgcggcgacgccttcgcctcgggagcactcgtgcacgcctacctccgcttcggccgcgtccgcgacgcctacagggcgttcgacgaaatgcgccaccgggacgtgcccgcctggaacgccatgctgtcagggctctgccgcaacgcgcgcgcggccgaggcggtgggcctgttcgggaggatggtcatggagggcgtcgccggggacgcggtgacggtctccagcgtgctgcccatgtgcgtcctgcttggggacagggcgctcgcgctggccatgcacttgtatgcggtgaagcacgggctggatgacgagctgttcgtctgtaacgcgatgatcgatgtgtatgggaagctggggatgctggaggaggtgcggaaggtgttcgatggaatgtcgtcgcgggatcttgtgacatggaattcaatcatttcagggcatgagcagggcgggcaggttgcttctgctgtcgagatgttctgtggtatgagggacagtggggtctcccctgatgttctaacgcttttgagcctggcatctgctattgctcaatgtggggatatctgtggtgggagatcagtgcattgctatatggtaaggcgggggtgggatgtcggtgacatcattgcaggaaacgctattgttgatatgtatgccaagctatcaaagattgaggctgcccagaggatgtttgacagcatgccagttcgagatgctgtatcctggaacacgctgatcacagggtatatgcagaatggacttgccagtgaggcaatccatgtatatgaccatatgcagaagcatgagggtctgaagccgattcaaggaacctttgtcagtgttttgcctgcatactcacatcttggtgccttgcagcagggcacacgaatgcatgcactctctattaagactggattaaacctggatgtatatgtcggcacttgtgtgatagacttatatgctaaatgtgggaaattggatgaggcaatgcttttgtttgaacaaacgcctaggaggagtacaggcccctggaacgccgtcatatctggcgttggagttcatggacatggtgcaaaggcactcagtctcttctcgcaaatgcagcaggaaggaatcagtcctgatcatgtcacatttgtttcactattggctgcttgtagtcatgctggcttagttgaccaaggccggaatttctttaatatgatgcaaactgcatatggtattaagccaattgcaaaacattatgcttgcatggtagacatgtttggaagagctggtcagttggatgatgcttttgatttcattcggaacatgccgattaaacctgattctgctatttggggtgctctgctgggtgcttgtaggatccatggaaatgttgaaatgggaaaagtggcctcacaaaacttgtttgaacttgatccaaagaacgttggatattacgttctaatgtctaatatgtatgcaaaggttgggaagtgggatggagttgatgaagtaagatctttggtcagacgtcagaatttgcaaaaaacccctggatggagttcaattgaggtgaaaagatcagtgaacgtattttacagtggtaaccagatgaacatccaccctcaacatgaagagatccagagagagctacttgatctgttggcaaagataagaagtctaggttatgttcctgactatagttttgttctacaggatgtggaggaggatgaaaaggaacagatattgaataatcatagtgagagattggctatagcctttggcattataaatactcctcctagaactccgctccatatatacaagaatttgcgggtgtgtggtgattgccataatgctaccaagtatatatcaaaaataactgagagggagatcattgtccgtgattcaaatcggtttcaccactttaaagatggttactgttcatgtggggatttttggtaa

SEQ ID NO: 73542 - DNA, 1921 bp, Oryza sativa
  Clone ID: PAT_MRT4530_73813C.1
ctagttaaggagaatgccatctctgcaactgcaagaagcggcggcggtggatgaggcggtgagcagcatgatgagcctgctcggcgccgccatgtcgtcggagaagaaggggtcggcggcggcggcggcggagcagagggtggagtggctccggtcgcagctcatcggcaaggacgccgagttcgacacgccgttcggccgccgcctcctcacctacgccgaccacacggcgtccggccggagcctccgctacatcgaggactacctcctcaacgaggtccttcccttctacgggaacacgcacacggaggacagccatgtcgggagcaagtcgacgaggctggtgcacaaggcggcgaggtacgtgaagcggtgcatgggcggcggcgccggcgacgcgctgctgttctgcggcgccgggacgacggcggcgatcaggcggctgcaggagagcctcgccgaggtcgtcgaggtcggcgtcgacggcgacggcctcgtcgacgtcgccgcgcgtccgccgcgcgctcgcctcgccgcgctacgccgaccgccccatgctcggctccttctcggcgtgcagcaacgtcaccggcatcgccgtcgacacccgcgagctcgcccgcgtcctccaccagcacggcgccttcgcctgcttcgacttcgccgccaggtggtcctagaacctgtgcacatcaccgatcacatttgttttttaaagacgtccctatcagacattctgccattgatatcaatatatctatctcatccaaacattcaagcatatgatctcatgatgattgacttatgtgaatatattgtctatatatgcaaaagtggcccttatgtgaagatagacatgaagtctggcgaagttgatggttatgatgcagtcttcttgagtccgcacaaatttgttggtggcccagggacaccaggcatccttttgatgaacaaatcgttgtaccgactcaattctcagcctccctcaatgtgcgggggtggaacagttgcctatgtcaatggcttcaacgaagaggataccctctactatgacgatatcgaggagcgggaggatgctggcacaccaccgatagtgcaaaagatccgtgcatccctagcattttgggtcaaggagtacattggatatgaaacaatggaactacatgagcgagtgtactctgaaatggcaatgaaaaggctccttgataatctgaatataaaggtcctaggcaacacaacagttgatcgtcttccaatcttctcgttcctcatctaccctccagtggaagattcactttttcttcgggttgagcccggttgctataattcattggaaaacaagacaaacaagagactacccctccatgggagatttgttacaaagcttcttaacgatctttttggcatccaagcaaggggagggtgtgcttgtgcaggcccttatggacacattttgcttgatgttaataacgaactctctgttcgcatccgttctgctattcttgaggggtacagtggactgaagcctggatggactaggctgagctttgcttactatctctcaaaggaggagtttaaattcatcctttccgccattgagttcatagcggcatatggtcaccgctttctcccgctatacaaatttgactggatcaccggtaactggactttccgtgagcaggcaatcaaataccatgttttgagggaggaactctcccttgccactagtgtgcaatatgcagaaaatattaagtcaagaattgcaaagaatttggacaagaagcctgagcccaaccatatgagatttgaaacctatttggagaatgcaaggaaaattgcacggtccttgccaaatatcaaccagcagattgtcagcatcccaaaaggcgtagatcctgacatggtcctttttcatatatag

SEQ ID NO: 73543 - DNA, 191 bp, Oryza sativa
  unsure (1)..(191): unsure at all n locations
  Clone ID: PAT_MRT4530_73814C.1
annnaaaaaaaaaaaaaaaaaaaaaaaaaaaaaaaaaaaaaaaaaaaaaaaaaaaaaaaaaaaaaaaaaaaaaaagcttttctttttaagctggtcatgatgaactttctcgatcacgggttttacataatcgactttgggctcgctgctcgactgctcgtcgggaacaagcttgcaaagttgaacttggc

SEQ ID NO: 73544 - DNA, 553 bp, Oryza sativa
  Clone ID: PAT_MRT4530_73815C.1
ataaagcccacgtggtctcgggttcgacttgtattacgagacatgccgtatgtcacacatgtggggtgccagcgtatgttcgtcaacttaacagtacctacattcctcccgaatcgccgtgattagcgtagacgtcagcgtgtttcgcatgggcgaaatgaactgccaagtatcgtaagccgcagcaatgcgccatgcgtaagaacgttaatttcccccatggctttgatcgagtatgctgccgatgtggatcgaaggccctgacgcgtctaaatgcaatgagatatggtgcaagattgagattggccgcttttacgtccatcggtttccccccatgaagaagccatgcgggcgttcaccaagtctcccttaacctacacacggcctctgctgttcaatctgagctatagtatataactcattagtatttatggagtaactatggcaagcataaaatacataaagcatatcaagcttactgtggatactttgcaatatttttatgatactttgttttgccaagaacaatatattaaaacaaaaaaaaaaaaaa

SEQ ID NO: 73545 - DNA, 834 bp, Oryza sativa
  Clone ID: PAT_MRT4530_73816C.1
atggcggcgtcggcgcctcagccgcatgtcccgttcacggacgaggacctggagtcggaggagagcatgtggagcctctaccagaggtggcgcggcgccgtgcacacctcgtcgctggacatggatgtcgccgagacggagagcaggttcgaggcgttcaaggcgaacgccaggtacgtcagcgagttcaacaagaaggagggcatgacctacaagctcggcctcaacaagttcgccgacatgacgctcgaggagttcgtcgccaagtacaccggtaccaaggtggacgccgctgccatggctagggctccccaggctgaggaggagctggagctggccggcgacgtggcggcttcgtgggactggagacagcacggagctgtcactcctgccagggagcagggtacgtgcgagagctgctgggcgttctcggcggttggcgcggtggagggcgcgaacgcgatcgcgacggggaagctggtgacgctgtcggagcagcaggtgctggactgctccggcgccggcgactgcatcggcggcgggtcgtatttcccggtcctgcatggctacgccgtgaagcaggggatcagcccggctggcagctacccgccatacgaggccaaggatcgggcctgcaggaggaatactcctgcagtgcccgtggtgaagatggacggcgcagtcgatgtgaccgccagcgaggccgctctcaagcgcagcgtctacagggctccggtcgcggtctccatcgaagccacccaaagcctccagctctacaaggagatgaacgtcttgtgttgctttgttagaaaaaacggctggaaaatgccatag

SEQ ID NO: 73546 - DNA, 482 bp, Oryza sativa
  Clone ID: PAT_MRT4530_73818C.1
gggacccaatttccctctggctttgctttctttgcccattccccaaaccctctaaatctcgccctttctcacattccaccccccccccccttgttttaagccagtccccccgcccccccttcaaaaacaagtttggcaggcccacccccccaagttcccccaaagttcccccatcatcatcaagcctcccactttgttccctttattaaaaacctttgggcttgtcatcccccccctcttgttccccgatgtcccccaaaaaatcacccctctcatgttgagggatgggctgatgaacccccttattggatcccagcaaactcttataggctgcattccaacccaatattggttcgcgaatctgtttcctcccaggtatttgccttgttttcgcaggccagtccttcctaatctccttccaaagaacaagaccctggttgaccaattcagtggggccctgactgctcccccccccttgctga

SEQ ID NO: 73547 - DNA, 448 bp, Oryza sativa
  unsure (1)..(448): unsure at all n locations
  Clone ID: PAT_MRT4530_73819C.1
gggattaaaatccggcctctacaatgtacttgaattctttatattacatttgatttttcgccttacacatacgcgatgatccatcaattgagatcatatctcaagctcacacaatctttcgaaacccggacagatactctaagacgacgtaaacctatacaaactctgtataaacaattaatggaattaattaattcaacgatcggaccctgtatatgacgcgtatacgtacgtacgtacgtacgcaaaataaatttgtttagtgccgggatcgatcaattccaaccctgcgggaacgacctgatgcctccaagaacactcgccgtgtcgtcgagctcgaagcccaagtccaagtatgtcccaaacccgtactcgtntgctaccccgccgccgncgccgaactccttcgggaacccgataaccgcgccgccgtattggtaatgtggca

SEQ ID NO: 73548 - DNA, 2280 bp, Oryza sativa
  Clone ID: PAT_MRT4530_7381C.1
ttaggtccggttggcacaactacagatcacataggccctgttcggcaggtatggctgctgcagccgctgcggctgcggtagttcaaaatcgttgtaagctgcagtaattttgaaatgttgcaaccgtagccgcagctgaaaaaatggcagccgaacacacccatattcacaaatagcagcactcggttgatatttgtcaagctcccaaaaatagctcccttttatcatccactttggcgtttcagctataaccaccacaaaggtaccattccttgctttttcgtctcgacttgcagtcacgatcaccgtgttcaaagaaggcgagatcgtggaaaagaagtcagacagacggggggcatctgcggctttggcaagtgggagcttcgcctccgacattgtcggaggaccgtccatgccgtcagcgaaacaccgcgctgcgggggaacggcgttccccgtggcggtgcaaaatgggtgaactgacggattcttcagtcaggctggaagaattcttcacctgctgtctttcttgatgcagcccgggccatggtaccgcggttgtcacgtccttggagaagaatttctcacaggagcgaaccgatttagcttcgcctttatgatcggcgacacttggaatgtcaaagttccagatgtagacattggaatccaatccggcagatatgagatatcttccatctgatgttaaagatggtgaagaaagagccttcaaattccaaggcccttcaaacttttgaatgatatcaacaccatcggcaactcgaattttggaacccgttgatgttattgtaatcctagaggaatcacttgaacgtgactgcagactgttgacccgatggacagcagacttcttcccttgcataaacaattctttgtctagttggatgttttcacctgattgatcgtaaaagcggcattctccagaagtagtgccaacaataaagccctttccatccggttggtaactaagagcagttatgatcttccgtgtatcagtccagtcaactactctcttatccaaagcatcccaaacacgaacttttccatctattgaaccactgatgaagtatctttcatcgataggattgaattgaacacatgtcacgtagtctttgtgtttaaacagtccaagacaaccatcacagccaactttccacaaacgcaccatcttatcttttgatgaggtcaagagatagacatctgactctgaccatgccatatccaggatatcatctgtatggccttggaattcatgtaatggagtctctgaaatgcggaaacccttctttggcactactgcaagggcatgattcttccctcttcctagttccgttttgatgattgtaattttatcatcatagttctgagggttgtctcccccatgcaacttcgaagatgcttccacttccataatctgccatatccgtacaatgcagtcctcaccaccagttgccaaataccagcctgacgggctgaatttcatgactttaattaaacccttgtgagcttggatttcttgacccagatggacagcagaaaattccatagtttttttctttcgatgttgaacttttgttctggatggtatgcctattgtgcagttttttacattgacgtcgtgcttgcaaattccaccaaaactcctgtttttcatgaagctcttccacaagctcttgacaccctttttcttattaaacacattctttttctcttccatagaactgctatacaccttgcgcaacaacttttgaacagattgagaaaggcctggtacgccatcaaactccagaagagacaccaccttatgtgatgccacatccttaagcatgctagtcaattcgccgtatccatcattctgaactgtgtatctctcgccactgtcaatatctcctatgcaacaggaggcatcagaaactgattcattctcaggaacagatgaattcacggaagaaatgtcactggtagtactctcctccaaccccaagtcagcgaaaggaccaacagttgtgatttctccctgtggttgagaaaaatccactctggtagcaagaaattcatcaaaccccattcccttcaggaacctttgccgcctttcttcaacactcattggctcgtttccccaaatatcatactcaaatctccttgatgctaatccttcgtcacttgtgctgcaatcatctgacaatgaaggctcccttgttgaagtaacatcatcaaatgcatcaaagaagatatcatccctgtctgattcggaacttggcat

SEQ ID NO: 73549 - DNA, 984 bp, Oryza sativa
  Clone ID: PAT_MRT4530_73820C.1
atggcgctgccggtgccggacgacgccctcgccgacatcctccgccgcctgccgccacgcagcctcgccgcggcgcgttgcgtctgcaagccgtggcgcgacctcgtcgacggccgcgcgctgctcctcccgcgcctcctgccccactcggtgcacggcgtcctcatcaactacatcgaccacgaccgcccccacctcttctcccgccgccgatcccggtcccgatcccggtcctcctcctcgccggcggcgtcgagcggcgggggggatatcgacggcaacctctcctcggtgccgcccaagggcgacatggactggtggcacgtcatggaccactgcgacggcctcctcctctgcgccgtcgagtgggggaatcgtctctgcgtctgcaacccggcgacgcggcggtgggcgacgctgccccgatgcccggagtcgccgaagccgatccgctacggcaccggcggcgcgtacctcgcgttcgatccggcggccgcgtcgccgccgcactacgaggtgttcttgatccccggcttgccggagaagcccccgccgccaccaccaaagcagaaggcgaaagcaatcaccgcgccgccgttctgcctggattcgctgctcgcatcgctggacggcgcctgctggactatggaggaggtggagccgccgccgccaccatctccaccggcgtcctccatgggtgatgctgacctgtaccgtttgatggaatggccgccgtcgccgtacaaggtgtacgtgttctcgtcgaggagcgggcggtgggaggagagggccttcgtcagggaaggcggtgagacggcggcggcgacgacgacggtggatgacatggaaccatgggagtgtcctcttgaaggccctcgccaagggtacaccggtacagcgtgtcctggcagggagcactgtatgtgcattctcgtggtacttctgttaccaggttttcactgtcaaatgacaagtaccaagtaa

SEQ ID NO: 73550 - DNA, 657 bp, Oryza sativa
  Clone ID: PAT_MRT4530_73821C.1
atggggtccgacgccagcagcgccgtcgacacgaggggagtgctccgggcggcggtgcccctacagccggacaccgacctcgtcctggctaccggcggcggcgagcggggatatattgaaagctacacaaattggtcacatcatggagagatcccaagcaaacaagttcccaaccaggtgacagtacgggatgaagtggtcagtagggacgaggatttcatggtcgtagcagaagaagaagaagaagaagaagaagaagaagaagaagaagaagaagaagaagaagaagaagaagaagaagaagaagaagaagaagaagagcccgctgatgatgatgttgttagcgacgatggtcagcacagtacagttgatgatgtcgatgatggtaatatcagcgtacatgatggtaattttgatttggaagagatgttatgtcatgctgaacttgagcttgtagctgggtccgctcatgggttggagaacttcgaagcattacgaaagacaatgaaggatcttttgtacgatgaggcaaagggttgcgataagtatttcacattgttgcggatgatgcttgaacttatgagattgaaggccagaaacggatggagtagaagatacgtgggtgtcgattgccatgtcggcagcacaagtcaatga

SEQ ID NO: 73551 - DNA, 486 bp, Oryza sativa
  Clone ID: PAT_MRT4530_73822C.1
atgcgtctgcatcgcgtcctgtacggttccacacgcatacgatggcatcaccgcgcgcacacgtcgctctcccaagctagtaagccgatgcacctcgcgacgagccgctaccgctcgctactcgtcgcgattgcggcgcccccacgacgtcacgcccccgcgcatcctccccgtacgtacacgcaatcctcccgcgcgcgcatcttatcgcgtcgcgtcgcgtcgcggaaacgtttcggcgatttggggcggcagaggcgtgtggcctggtgttattacctggttaatctccaccacgtcgtaacgtggcgccgcccacgcgagaacggccgctttgctcgttggattagtagctggagcttaccgcgctccactaattaccagccgggccggcccggccggtggtcagaggttgacgccgctgctccgctgccgccacgtgtcgccgtggccgctaattcgcgagatcgtgcgtgtggtttctga

SEQ ID NO: 73552 - DNA, 519 bp, Oryza sativa
  Clone ID: PAT_MRT4530_73823C.1
atgtacgctgatattaccatcatcgacatcatcaactgtactgtgctgaccatcgtcgctaacaacatcatcatcagcgggctcttcttcttcttcttcttcttcttcttcttcttcttcttcttcttcttcttcttcttcttcttcttcttcttcttcttcttcttcttctgctacgaccatgaaatcctcgtccctactgaccacttcatcccgtactgtcacctggttgggaacttgtttgcttgggatctctccatgattgtgagctaccgccacggtatccccttcggccgctgggtcgccaccgccagatctggcggaggggagtgcgccaccgctgggccatcggaccaccgccgtctcccctcaagccgccgacccaccgccaccgcatccccttcgccgtcgggccaccgacgccacctcccctcccgccatatttggcggacggctcacgtgctacacctcaggcccaggcacgtcccaccagcagtcgggcaggtccttgccggctag

SEQ ID NO: 73553 - DNA, 216 bp, Oryza sativa
  Clone ID: PAT_MRT4530_73824C.1
atgagcaagctgcgcgaaaaaccgcttctttttccggttccgcaacaacttgggcgaaatggggttctaccgggaaaccatggtcgagttttcgaccttggttactggtcgagccactggataagaatctctggagatctttcctctccacttactcgtaacaggctttccctctgtataagacttcttccgaatggcataattgtcctgtcctat

SEQ ID NO: 73554 - DNA, 1052 bp, Oryza sativa
  Clone ID: PAT_MRT4530_73825C.1
aaaaaagaacatctttctattggaggaagtacgcactgagaataatcaatttactgaacaataataataataagtgacataatacaaagatcaattaaaacacaccccacgtatgcatctcgtgcggctaaattaattaagctttttaactagctagattcattctacgagttgatgacgtagcacttcttcctgatctctccttcctccccggtgagcacctggacgttgcccatcttggtcatggactcgccgaagtccctgaagaactcggcgtcgaacttgccggtggcgatacgctgcacgtagcccctggtggtggcgtcggtgaggagcgaggcgtcggaggagaagagccccctccgcttggcgacatggcggtagtagctggtgtcgaacgtcttgtagctgccggggtccatctcggacggcatgcccggacgaagcagtcgtcgaaatggaggcggaggagcgggccggcgaggctgggggcggcgccgatgatcttctccatctcgtcgcggacgatggcctcgacgttcgggcacgtctcgcggtagtagtcgacgcggagctggtcagccgccgcggccgcagagcccgcggcgacaagcacgacgagcagcagcagcgcgacacaacacctggcgatcgccatggccacgacacacgaaatcaacaaccaaattaagcaaagaatgtttggctgctcgatctgctgatgctgctgctagctgctgatcggccagaacgacggcgtcgcgcgccatgagcgcgagcacgtcggcgcaggagacggtgcccgggcacgccgtctccagcctcgccttcacccgctccacggagccgaatccccggaggctcttgttcggcttcgcgtcccgctccgccgtgttgccgccggcggagctcagcagcacagacgcgtcgcaaccgatcgcctcgacgttcgggcacgtctcgctgtagtagtcgacgcggagctgatcagccgctacgagcacggcgaccaacggaacaagcagcaatacacagcacttggtgatcgccat

SEQ ID NO: 73555 - DNA, 933 bp, Oryza sativa
  Clone ID: PAT_MRT4530_73826C.1
atggagtccggaggggtgatcgcggaggcggggtggagctcgctcgacatgtcgtcgcaggccgaggagtcggagatgatggcgcagctgcttggaacctgcttcccctccaatggcgaggatgatcatcaccaagagcttccttggtcggttgacacccccagtgcctactacctccattgcaatggaggtagctcaagtgcatacagctctaccactagcagcaacagtgctagtggtagcttcactctcattgcaccaagatctgagtatgaggggtactatgtgagtgactctaatgaggcggccctcgggatcagcatccaggagcaaggtgcagctcagttcatggatgccattctcaaccggaacggcgatccgggcttcgatgatctcgctgactcgagcgttaatctgctggattccatcggcgcttctaacaagagaaagattcaggagcaaggcaggctagatgaccaaacgaaaagtaggaaatctgcgaagaaggctggctcgaagcggggaaagaaggcggcgcaatgtgaaggtgaagatggcagcattgctgtcaccaacaggcaaagcttgagctgctgcacctctgaaaatgattcgattggttctcaagaatctcctgttgctgctaagtcgaatggcaaggctcaatctggccatcggtcagcaaccgatccccagagcctctatgcaaggaaaagaagagagaggatcaatgagaggctcaagattctgcagaaccttgtaccaaatggaaccaaagtagatatcagcactatgcttgaagaggcaatgcattacgtgaagttcttgcagcttcaaatcaagctcctcagctctgatgaaatgtggatgtacgcaccgattgcttacaacgggatgaacatcgggatcgatttgaacctctctcagcattga

SEQ ID NO: 73556 - DNA, 975 bp, Oryza sativa
  Clone ID: PAT_MRT4530_73827C.1
tcgcgatctaggtaaatcacatattcttctcatttcaacgcctgcggtcctcgagttttttcatcaagaaacagatgtgctatttttatgtagaatcatgtgcagaaaccaaacgacttgtgctatacccttcggccaacagtttatggaatacggacttcaatgacagataacgaatcggccggaaaaatgtgtcattccagcctccaacctgaacccaccagaattcgactgcgaagcgattagcataaacatgttattgtacctctaaatggtcgcattgctcccttgggacagaattgcaggccaactacagggaataaaccatgcgatcagatagctccttccctacaactttcacgtatttgctcaattgcctttctagctgttcgaggtgcctcctctcgattcgtccaacgactcccagaagatccttatatttaactcgagaaccattcagatccatcatgacattttcaaaatcggattctgatcgaaccatctcttcatcaaccatcatgtctgagtcatcataggacaaatcttcatcatcctcatcgatgggagactcacaattgtcattttttgataactcagtatcaagatgagaattctgtggctgaggcatctcatcttgtatttgggcaaaatcagataggacagaatacaggctcttatctagtaaacgtttggcactgtcatagcacacccactcgaaacggactggacagagaagttctgatggtcgatacgcagctttgtatctcatcttattgcaggaatgtatgtaataaccaagataataatattgaaggttggggcagtgctcctgtgttgtcttgacccaatctatctccttcagagctgtatactttccaagagataggaaagcaaagtcaggatcccagaacaaatacttgcttgacaggcacttaggaaggatatcaactacaccaactgccacaagttttccat

SEQ ID NO: 73557 - DNA, 244 bp, Oryza sativa
  Clone ID: PAT_MRT4530_73828C.1
gccagccggttcggacgacatgctggtcagtgcgagcgatcacccacattctgggaggcatctacagggagctcggcgcaccccagatgtcgggcaaccccatggtcacgaggtgttccgcgctgcacggagaggggacttggagcgcgcagccaggcgagcactcccggcagttcatgcatatcagtggacaatcaccaccccgcgcaggatgggtggttgtcttctactgcctgcgagatct

SEQ ID NO: 73558 - DNA, 2172 bp, Oryza sativa
  Clone ID: PAT_MRT4530_73829C.1
atggcctcgcacctccgctccccgctggtgcttctgctgctgctcgccctccaccggctgtgtgccccgtggctggtggtcgccgacgacggcgcctcggtggcgaggtcggccttctccatggacggcgacgtggcgtgggtggtgcaggtaagcgacctccacatcagcgcctaccaccccgaccgcgccgacgacctcgcgagcatcctcggccccgccctgcgcgccatccgcccccacctgctcctcgtcaccggcgacatcacagatgcaaagaataggagaaaaactacgtcaagacaagatgagagggaatggattacatacaaaaaagctattgatgcaattgttggaataggtggtattgataagagcaggatatttgatattagagctaatttatttggccatcctactgataagaggatagacgctgttaattcagaacttcaatactggtccaatcattccaatgttccaataacaaaagtagtttttggacattaccctatgtcattcactacttcatctcaaaaaggacaacgttatgaaagtatatttgcaaagcagtcaatttcagcatacctatgtggccatctgcacgcgaaaattagtaagcagctttggcggtttcatgaaatgagtgcaacaacacaagagcagaaatcaagctattgggaatgggaacttggagactggaaagagtcaagactgatgaggattttagcaattgatggaggtgcaatctctttcatagaccacacactaaaacaggcatttcaaacttccatcttgatcacatacccaacagattcaagaagtatgaatacattggaatcaatgaattggtcaacgagaaatgatataaatgttcttgttttctctaatcaggtgatccgcaatgtgagtgcaagagtttttgactctcataatgagtttaagatagttgaagaaatacccctgcagcttgttgccacaccatctgttcacaaacctttgttccatgcggaatggaatgctgaaaactacaaaagtccatcccctactcgctactggttgcaagtttttgctcaggattctcagggtgggaagacatcaagcgagcgacgaccattttcagttgagggtaaagtgcaaattcaatcacgtccatgtctgaactacttgatttttgaagtccaatgggaagacatgtatcaagttcttctgtggagtaattttgccttcataattgtactattgtttgctcccaaattgctgtatcattttatgaagaaaagtttgacataccaaagatggaccgtgtcagttatgctatcccctatccagccgaggaaagcttacttttggttggtctggtttctaatggagggtgcaaggagtagacccatctggttttctttgctcatatatgttatttggcttattgaaatgccatggttttggggtcatgcgacatctgagaaaggagaaattgctcaaatgtacttatccggatggagcatcccatctcttggtgaagacttgacctggaacaaatcgagcaacccagatgtgctggttattacactgcctttcctatacctggtggttgtccctgttgtagttgtaatatatagtttgtttgcagagaaggctgttgcttgtttgcggcacagcagaagaacagaaaacacggtcaacccaacaaattcaaaccctgagtcaggatatctactgccaagtgcttcagtgtctttagcgaacctctcagacaagaaaattctctcaatggtaatgaaattctgtggcggctggacaaggagggtgctcctattgttgtgctgtatcattgcggtgatacatttgaagctttcctcaaggctaatgtcagcttatggagccaaaccagtagccttttctcctccagtaacgtggatgccgttgttattattaagtgctactgcctattgtacaatgcccaacacatattagtgctgtcagctatttttgaagcacgagtatattagataagggcgtgaaaggtactgtccttttgttgtacttgaacgtggtgtgaatcgtttatcaccaaccaaaaagctttgtacagttactcgatgtttcagttaataaagtgtcaatttcatttcaaaaaaaaaaaaaaaaaaaaaaaaaaaaacctcgtgc

SEQ ID NO: 73559 - DNA, 591 bp, Oryza sativa
  unsure (1)..(591): unsure at all n locations
  Clone ID: PAT_MRT4530_7382C.1
acaatacacctgtattgggttacggtntgggggatccaatgacccttggatcatccaggatgaatcaaagggagtccattatgagagctcttcatgatgctgtttcattttcaaaactttcgtccttttgcaacctgatggtccccataggaccgccttcattaagtagaagtggtggcctgtgcctgaactccacgattttagtttatttttttattcttttttgaaaactttccattcgaacacttttaggtctgaggagttctcgtaagttggctaaatacacaggaggatactaaattgcgatgctattgttattctgtgattttataggacttctttccggtggcctagttttgcctttgattgctttcatgtatactgatcttgtgccttaagatactgcacttgattgcgtttccattaagagagaatcaactccttttgttcatgctgtatattcacatttgatttccatacaaaattactttcatgaattcccttaaaaaatttttcgtgaatgtacagaaagcttattccgaatgagatttttttattttttttttttcactctggttcatcaagttacat

SEQ ID NO: 73560 - DNA, 739 bp, Oryza sativa
  Clone ID: PAT_MRT4530_73830C.1
ttttttttttttttttttaacccatacaatagcagcaacttaacccagcataaatatgtcatagccacaagctgtttgtgaaaacgacttcatttggtcttacataagagttaattggtctaacataacacggcacaagcacatactgtaagctagagtgtgcgctagctagctcttgcaagcattaccccaaatcacatgccatacgccagagtcaaacattattacatggcaacaaaaggataagtgagctggatccccaacccaggctactcaggcgaagatgttgaatacggcggcatccaaacgatcgggttgtcaaaatgctccttgagggccttcctgtagctacgagtataccaggcacaagcgagacctccaaggccgaacccagcaaacacagacccaattaaacaccgcttgtggagcctgttgtaccttgttgtctcctcgatttccagtcttaacttttcaagtttagctatttcttcccgtacccaacccagatcaccatccatattcctcgcaacattctctgtagttgcattgctgcgtcctccctgggaggcgttggcggagagggatcgagggcgacggagagcggcggcggcgggggcgggggcccgcagcttaccggcgaggtagcgcatcgccatagtaggcagcagctaggagattgatcggcggcggcggctagggtttgctcaattggggacgaggcgaggcgacgatgcttctc

SEQ ID NO: 73561 - DNA, 1290 bp, Oryza sativa
  Clone ID: PAT_MRT4530_73831C.1
cacggatcctcctccgccattaagccgagggcgctcgtcgtagtcatgcacgggttgaacgagcacagtgggagatacgatcatctagctaggaggttgaacgacatcggtgttaaggtttatgggatggacgggtcgagtcatggtgccggtgatggtcttcatggttacgtgcaatctcttgaccatgctgtcagtgacttgaaaatgtatctcaagaaaattttagctgaaaaccctggtcttccatgcttctgttttggccactcaactggtggaggcatcattttgaaggctatgcttgatccagaggtagattcttgtgttgagggcatcttcctgacatcaccagctgttcgtgttcagcctgcccatccaatcataaaggtcatggcccctgtgtttgccctcatagccccaagataccagttcacggcttcacacaggaacgggccaccggtatcacgtgacccggaagccctgaaggctaaatattcagaccagcttgtgttcaccggttccatccgagttagaacagggtacgagatcctacgcctgacgtcgtatttgcaacagcacttgcacagaatcactgtcccgatgctggtgatgcatggtgccgatgatatggtgaccgatccccaaggatcacagaaactgtacgaagaagcttcatcctcggacaagtccctcaatctgtacaacggtctgcttcatgatctgctcatcgagcccgagaaggagaagatcatggacaacattgtggattggctgagcccgaggatttgacagctgatatccattcataggacgcagtctgatcgtccgcggagcgcgggggcaggatgagcatcccggcctcccgatggtgatgacgcggtctttgatcatctgcagagccgaggagggcgagcgttgctgcaagcctgcgatgctgctggcctcccggcgttggtaacatcataccacgagcattgcttctatctatattacgtgttgctgtagtaccaggcgatgatgggtcggcttactactgtcgcctccccttggtatcccggaatcctttttgtttgcagggatacgcctatgtaagattgttcgtttcgccctgtgtggctgcatgtgtggtgtccaataatttagatgccttttaccctccgatgagaggagacgttttctgcgttgcaatgtaatcagattttgcagcagaatatatttgcctggattgtctgatgtgtaaaaaaaaaaaaaaaaaaaaaactatagtgagctgcgtagaatcgtgagccg

SEQ ID NO: 73562 - DNA, 296 bp, Oryza sativa
  Clone ID: PAT_MRT4530_73832C.1
aatggcactgaatcatttgtattgcctcatacttattatccattcctcccagagagacggatccatggaagatttctttgcaccatcaggcaagcagagcacacacacacggcggcaggggaagtgctatgaacaggacgctaatcaacatgcagggctacaacaaacgggggggtcagtgcacatcccggataaaaaacacaggggaaagctcacatctgcttctcgagcccaactcctccgtgtcaccaccacgggtcgcggatggacatgtaccctgatctataggctcaggc

SEQ ID NO: 73563 - DNA, 621 bp, Oryza sativa
  Clone ID: PAT_MRT4530_73833C.1
atgtcggtcctcaacgtcaaggcattggtccccgtcgtcctcgatctcggcgcggtgaactacaccaagtggtgtgttctcttcctcatcactctcggcaagtacgccctcaacgaccacatcctctctgacacctccttccctgaccgtgcatcttgggctcggatggaccgcgtggtgctcacatggctttatggcaccatcgccgccgacctcctggagtcgttccacaacttcttccaaggcgatctctccgccaacgactactaccggcgcctcaaagctatggcggacacacaaagcgaactcggcaaccctgtcaccgatcggcagctcgtcctcgccatgctgcaaggggtaaaccctaaatatgagaatctccgaacaattcttcctctacaacgcccgttaccgtcgttcatcgaagctcgcagtcaactcatcctcgctgagatcaacaagagctccaaccgctctaccaactccaccgccctgcttgcttcaaccggcagcggcaaccgcaacggcaccggcggcaagaacccggcgcacgctacggggtacagcaaccccaaccaatctcaaggcggtagtggcaactctcaaggcggcggcaactag

SEQ ID NO: 73564 - DNA, 306 bp, Oryza sativa
  Clone ID: PAT_MRT4530_73834C.1
atgaaacagcacatttgcaagactcgaaaacagaataacaagcacccgcggcaagctatacgagtagcacgcaccggcgtgtggacctacaaccggaagatgaagggccgagcgtacaaacatgtacgcggcgacacgagcataaggagaaataacttaactcaaacgcggcaccacaacatgcggccggccgacttcgactgggttgtggcacttgatgatggggcttcagatccagaacttctcacgattcatatcttcggcgtcaacctcacacaagttaccacttcatgtcatgcgtcgtaa

SEQ ID NO: 73565 - DNA, 623 bp, Oryza sativa
  Clone ID: PAT_MRT4530_73835C.1
gcacgagggcccctggcagcatttgcgatttctctctcagcttaattcgcatcaagtcaaccatgtcttcggcgacggcgacggcgtccggtgggctgcatgccgccggcggcgagtggctcggcgagctctccgccgcgctgcaggggaagtggcaggccatggtgagcacagaccagcggcggcggcggcagaggggagatgaggcagacgagaagaagggggtcgccggcgccggcgccgccctcggcgtggagacgaggaggaggaaagaggagggagacgtcggcgcgtgcggcggcgccatgtccgacaccaccgtcttcctcctcctcgaccacttcgcgcccagctgatcgtccgtgacgtcacccatggcgcgcccccgagctaatcgtgacgtcatagacgcgtttgtaaagagaagagtagtagacgatgacgcgtatccccgggaggaaatggcaagccacgctgtatatatttgacttgtcgctgctgctactacttgcttcagttcactctcatgtgtaaataaaaaataagaatgcagtatttttcctacccaaaaaaaaaaaaaaaaaactcgagactagttccctcgcgccctcgtgccgaattcc

SEQ ID NO: 73566 - DNA, 300 bp, Oryza sativa
  Clone ID: PAT_MRT4530_73836C.1
atggagttgttgccggagtggtcgaacgcggagtcgaagccggtggacatgggctgcgacaacggccgggatggagcagttgtcggacaaatgtggagcgaggatgacaaagccaccggcgacgagctccggtgtgacgtggacggtggaggacgtgctcgcggcagcagctggcgatgagctctgatgtggcgcgtggatagtggaggacctactcaatatggaagacatggccgctggcgatgagctttgacatgaggcacgtggatgttagaggatgcagccaccgacgatgacctc

SEQ ID NO: 73567 - DNA, 251 bp, Oryza sativa
  Clone ID: PAT_MRT4530_73837C.1
atgccgaggtgggcgtcggcgcggttcttgggctacgacatcgatctctcccacgccggcagcgacgacctccgcgcgctgagacgaggagcgggtgatggtgttcacgacgcgccggcggcaaggagggcgtgggcgcagctgtattgcagccgggtcggctcgaccggacctagtcgggataacatgttccggttccctgaaagattactaaccgggagtaaagctctcttccccagcaatgtaactgg

SEQ ID NO: 73568 - DNA, 237 bp, Oryza sativa
  Clone ID: PAT_MRT4530_73838C.1
gttccggtttaggtgttgtccatggtccggcgtcccgtgtggagcgacgtgtcttgtcgcgtttgtctgtcacttgagttggcctccccgttcccccggtttttggcccttttttggccccttggttttttgttaaaaaaaccccggcccttttgttgcgtctgttcatggcggaataacctaaaccgttccggaattggaatgaccaaccttttttgcgtaaaaaaaaaaaaaaaa

SEQ ID NO: 73569 - DNA, 549 bp, Oryza sativa
  Clone ID: PAT_MRT4530_73839C.1
ctatggcacacggagaagacgcatggtcgcgcttcctctctcggattcgtcgcgcgggccgaggatattagcgctgggtagggggatacccaggccgcgatggacacggtgcgacggatgcggcggggcctccgctgcatgaagcagatccagccatcgaatcagcacgccgtctccgccgctgaaccgggtggaggggatcaacagccggcgcagaggcgacgtgaaaggacttggcttccaccaaatccatgggggaggggaggcacccatggagggccactcgaggtggtggacaagcctcccgatctgctcgtcgtcgagctcgccgccgccgggaataggctgtctccgtcgtcgaaccaccgggagccctggatgccaccgcatctgccatctcctacctccgcctccacctaggccgccgctgttgccgtctccgagcgcctccacctccttctcccccctcgcgtcgctatcgtcgccgagagcggacttcgatgcggacggggagaaagtgacgaggcgaacgctcctctcctcttccat

SEQ ID NO: 73570 - DNA, 195 bp, Oryza sativa
  Clone ID: PAT_MRT4530_7383C.1
atggccgatgacagggtgcccgaccttcttgaccccacgaccaccctaacttgccctcaccgccgtcggtcggcaccctcctctactgctccgaagctcaggaagaaggtgtgcctcgccgttgctggccttggcttcatcgctccatgcgctgatgatacaactcaagtcatcggcgttggcagcacacagtag

SEQ ID NO: 73571 - DNA, 139 bp, Oryza sativa
  Clone ID: PAT_MRT4530_73840C.1
ggagggagggggcacgtggcaaggcgccattggaccggccgggctctggctggctgccccggcggctttgacctggaggggtgggggtggctgcggcctacggaccggggagggaaccgtgcgccgatcgcgtcacgtg

SEQ ID NO: 73572 - DNA, 169 bp, Oryza sativa
  Clone ID: PAT_MRT4530_73841C.1
gcgaaattggccacattgaaccaagaatgaggcaatttcttgttgccattcatccattctacctttaataacacattcctgtaaattgtagtgtttgagttgctcatgactacacttacaaggttgataaacttcattcactgtaccacacacatataaagatcctacc

SEQ ID NO: 73573 - DNA, 2067 bp, Oryza sativa
  Clone ID: PAT_MRT4530_73842C.1
ctactcgtcgtcgtcatctatgtgggcgatggccgccggtattggggaggatgggggaaagcggcggaagttggggacgagacgcgcgatggccgccggtcttggggaggattgaagggagacgcgcggtggccgccgatcctgcgcgaacaagctagctcgccgaccgcgctcaggtgcgctcgcgaccgcgtcgtcgttccaggcggcgttccacatctgcccggcattggcggcggcaggggcgcgctcacggcggccctcgaggctcaaccgcgccctggcgcctccccccggggccggcggcgacgacgccctcggcgccatgctctccgccggcgtcttcgactccgtcctccgcgacgcgctccgcgtcgcccactgcttcacccgctcgctcgccgacctcctccaacgccctcgtcggcgccgccccgcccgcgactgggcgccgcccctcccgggaccgggcgacgccctcgacgcatcgagccgccgaactcgcctcgccagatcaccgcccagaacaagtccagaacgccgtgcaattgctacaccataaatgttgtcataccaaccgtaacgcacggttgatgatccctgaccatctggcagagtccaccatgttcttggctgcctcgaggaagtggccagcgaggacgacgcagctgtaagggtagagctttggagaagctccggtggtcggcggcgaggatgcgcgtgaaccagccgccggaccatgagctggtcaatgaacctcccgatcgatcgaggccgggtcatggcctcgatcggcgctcgactcgaacggcggggcgaacctccagacgtagcacacccgccttcagcaactggcctgtacgtcgtctccacaaggtccaccagatcgctcacatcacatgcatggaacaccaaacatgtcctcttgttcatcccgaaggcgaggagtcggcggtgacgcaggggtagtccagggagcgcgccggaagacggcgtaggcgtctgatggatcgatcgaaccgcgaagggattacacgcggcggccaccggctgcagcttccgccgtgtttgtaataaattgtaatgtacccgacgcagcccagtcggcgcgcgctcaggtgcgcaccttaacagacttgcttcaccaaaagtcagagttgtgtgttgccttttagggtcaatatcttcctcaggtgctagttcttccctttgatgtttccttggaatgaaaccctggcaataattctcagtgtggcaatcttcttgactcgaatgcatatatgtgcctgcatttgtcaatgatgagaacccatagtttttttcaggacttgtcatgttgccaaacttagtctgcaagactatactgtcatgaacgcctttcttctcacttgatcgaagtggataccgccattgatggtgttctgaagactcacagccagcacgtaagcttgaatccagacttaacccctgatcaggctggcctgaagaaggcacacatctcttcatctcaagatagagctgggcaatagtatatgctcgcggccgtctttgttgtctcacgtgacgcttggatcggaaaccgaagccaatggggagcacgttatgcggcttcaccatgccgcccggcaagtccaagaatccggcgagctctggagtgtcgtgaaccaagcgtcggacgacccgcaccactttctctctcacgcgtccccaatccatggactccctgatcttgtccgacaggacgaaggtttggataatgcggcggatggcgatggcgtgggaggagatgccggtaacacgggcgaggcagtagcggcggcggtgcttgtcggaccaggcggcgccggtctcgttgccggcgacgacgtcggcgaagcacctgtgcatgtggaggaataggaggagggtctgggcctccgcggtgaggtgcgtccgctgcgcgggcagcgacggcggccgccgcggcaggaagcggcaggcgtagccgatggcctcgccccacatgccgcgggcgatgagccgctccagccgcggcagcgacagtagcaccttcgtctcctccgccat

SEQ ID NO: 73574 - DNA, 2130 bp, Oryza sativa
  Clone ID: PAT_MRT4530_73843C.1
atggcgggcggctgggacggaggcggaaaggagctcttcgatgcggccgccgcgggtggcggcaacgactccttcctctcctcccaccacaaccgccgcgcagaccacgcctactcgtcgtcgtcatctatgtgggcgatggccgccggtgcgctcgcgactgcatcgtcattccaggcggcgttccacatctgcccggcattggcggcggcaagggcgcgctcacggcggccctcgaggctcaaccgcgccctggcgcctccccccggggccggcggcgacgcacgccctcggcgccatgctctccgtcggcgtcttcgactccgtcctccgcgacgcgctccgcgtcacccactgattcacccactcgctcgccgacctcctccaacgcccttgtcggcgccgccccacccgcgactgggtgccgcccctcccgggaccgggcgacgccctcgacgcatcgagccgccgaactcgcctcgccagatcaccgcccagaacaagtccagaacgccgtgcaattgctacaccataaatgttgtcataccaaccgtaacgcacggttgatgatccctgaccatctggcagagtccaccatgttcttggctgcctcgaggaagtggccagcgaggacgacgcagctgtaagggtagagctttggagaagctccggtggtcggcggcgaggatgcgcgtgaaccagccgccggaccatgagctggtcaatgaacctcccgatcgatcgaggccgggtcatggcctcgatcggcgctcgactcgaacggcggggcgaacctccagacgtagcacacccgccttcagcaactggcctgtacgtcgtctccacaaggtccaccagatcgctcacatcacatgcatggaacaccaaacatgtcctcttgttcatcccgaaggcgaggagtcggcggtgacgcaggggtagtccagggagcgcgccggaagacggcgtaggcgtctgatggatcgatcgaaccgcgaagggattacacgcggcggccaccggctgcagcttccgccgtgtttgtaataaattgtaatgtacccgacgcagcccagtcggcgcgcgctcaggtgcgcaccttaacagacttgcttcaccaaaagtcagagttgtgtgttgccttttagggtcaatatcttcctcaggtgctagttcttccctttgatgtttccttggaatgaaaccctggcaataattctcagtgtggcaatcttcttgactcgaatgcatatatgtgcctgcatttgtcaatgatgagaacccatagtttttttcaggacttgtcatgttgccaaacttagtctgcaagactatactgtcaagaacgcccttttttgtcgctgaagcagtcccagaattttcactatcagtttttatggtgctaaacatagtctgagtgattgcagcaaccggagcacctttcttctcacttgatcgaagtggataccgccattgatggtgttctgaagactcacagccagcacgtaagcttgaatccagacttaacccctgatcaggctggcctgaagaaggcacacatctcttcatctcaagatagagctgggcaatagtatatgctcgcggccgtctttgttgtctcacgtgacgcttggatcggaaaccgaagccaatggggagcacgttatgcggcttcaccatgccgcccggcaagtccaagaatccggcgagctctggagtgtcgtgaaccaagcgtcggacgacccgcaccactttctctctcacgcgtccccaatccatggactccctgatcttgtccgacaggacgaaggtttggataatgcggcggatggcgatggcgtgggaggagatgccggtaacacgggcgaggcagtagcggcggcggtgcttgtcggaccaggcggcgccggtctcgttgccggcgacgacgtcggcgaagcacctgtgcatgtggaggaataggaggagggtctgggcctccgcggtgaggtgcgtccgctgcgcgggcagcgacggcggccgccgcggcaggaagcggcaggcgtagccgatggcctcgccccacatgccgcgggcgatgagccgctccagccgcggcagcgacagtagcaccttcgtctcctccgccat

SEQ ID NO: 73575 - DNA, 570 bp, Oryza sativa
  Clone ID: PAT_MRT4530_73844C.1
tcccatttctacggcttgtctggttcgaaactcgacgaagaagacttctactatcttgaggaattacaccacgctagtgaagcttcagctttatgatgcatataatggcaagagctgtctttccaggcaacatcatttccaaagctcaggatactgaagatctggggagctcctcacctcagtctgatcaagatagaaagaggggccatgtcaagcatggttgatcttaagctcctgctctgccctgaattgaagttgttgcctcgcggcacttgagcatgtgaccactctcgaagagatgactttggattctacagcacgaggagcttgtgggcacgggttaggaagaagaatgaggccacggatttctcatgtcaagagagtttatgttgggttcatcagaaatggtgagctggctgcagaaaggatacaataaatcgatgtctatctagacaatgtcatgtatcttttcaactatgattttcctattttgtacatttataattttgtattggtcttatgatgtaatccagacatgcccttttccttttcagaaaaaaaaaaaaaaaa

SEQ ID NO: 73576 - DNA, 256 bp, Oryza sativa
  Clone ID: PAT_MRT4530_73845C.1
atggtgggttgtgagcacatggtttcgatggtcgtgctcatgacaattaaggaccggttcacgagtttcggttgtgaaacattaaccgtgccaaccacaagccagagtgggcaacggctagacactttgtataacaaggctcattgcggagcaccagactaagaagtggcggagataagcccatggggatcgctggggagtccatgccttgtttaagggggtgattatgatccaggaacggtgcactgctttgagt

SEQ ID NO: 73577 - DNA, 423 bp, Oryza sativa
  Clone ID: PAT_MRT4530_73846C.1
atggagctgatcagggtggcaaaagttgggcaaccacaagatagacaactaggcggtggcaggaggtgggcggcggcgcgaaaggcagcggcgggcgcggttggctgcgagcggcggcaggcgcggctggaggcgaggaagccggcgttcgtcgagccgccgccgcttggccacggcgatggcgaggatgaccaccgccggtggcatgaatctttcctaccactgagtgagctcgccggctccgacgatgagccacgcctcgtccactcgtacaccaaggtggtcagcagcttcgccgcgaggctcaccgacggcaagctcgacgtggtgtccaagaagcatccagaccgtagaatgcgggcctccagcatcaccgccgccgccgtctccaccatccctagttacctccgccaccgcgactaa

SEQ ID NO: 73578 - DNA, 1411 bp, Oryza sativa
  Clone ID: PAT_MRT4530_73847C.1
tccggcaaaaagaaaatgctactaaatctgaacttgaccctgcagcaaatgtgcctacaatgccgacgaaatttgccccctgcctttagtctgcttggagagttcgtgttcattattttttttatctttcaacccaaactcacttttagcagacagggagaatggatcaatgaattcttgtaacaaggaatgttcacatctagggcattctgcccttttattagaagggacacactcggcctcaccttcctgataaggtaggcaaggcatatagatagagaataaaaaccggctttcactaaagcgatctagtccgtgtagggtaaactagaaaaaataatggttaaaagcctcagctgcagttgaattctacgtttgaagagttaaaatcaggtcataactctgcgtgtttccggtgcatgatgtgcttcacaacttcatatgacgagacgacgatgcccactgaaggccctgcccgtgccattcgaggacctgcacctctgaatatcccgctgatgccttccttactccatacttcatgcaatatgcgccttgtgtgcatgtggtcatcgagagtcaagcttgcctctatttgtctgcgtgtcttggcaacatcgagaggacaggtagcaccagcagagataactccagcaatgaagcctgcggagaagtttgcccccaatataacagctgcattgctttgctcgccaactattcttatcagatgccttctagttggttcaagaactgtccagcatatagctgagaaggggacgtcacgtgcaagttgtgctccaagaccagtccatagaaggtggtatgaccgaatattttcaggatgattgatgctctgtctcaatgcaagcacaccaagcaaagtcttccacattccagggggttttcctccaacatttgatactttaaaggcctgcatccgtgttcttgccaactcaataggggaacaagttatgcatgccaatgatcgggcaacagagccagcaataagaggagcatatggtctcagtttaggaaaactatgatctgaatattcttcaatccaattgcgcaatagatcgtatgagggcagatatatcccaaccgttggcactgccaatgctaggcttgcagcagtacctctccatagtctaaaaactccttcctgtttagtgaccttataaaacacatccattgtccctctgtattggaagcattcagaactgcatgatggccctaaaccattcattccagggttgcaccacggatagcacctaaaatctgaccatatcggattatagacaactccggccgcctgtgcttgtaaccttgtcttggcgacgtcgagcgggttgacgaggacggcggagacgacggctgcgccggcggccgccacggcgcgctcggcgaagcccat

SEQ ID NO: 73579 - DNA, 1290 bp, Oryza sativa
  Clone ID: PAT_MRT4530_73848C.1
atgctctgccaacaagcggtgccaatccaccgcgggcgcaggagcgcccggcggcggtggccgctggccgtccggcggccgccgtcgccggctgcccggctgcttccggagtcgtcctcaaccacagcaggtgcccttgacctccttcgctacgggcggaacttccgtcgagcctcgccgccgccgcgcccaccgcagcgttcgttctgggagattggagatagattgcacatcgttttccgcgtgcacgcttccaaactattaaacgggattaatgtaacaaattggttggtaaattctgctgagccttcgtctgcacaagtgctgcgagaaccagatgtttccttctctgtggggttgctcagtaatacagcatcgaaagaaccgataactgcacacacctcttcctcttcctctccacttactgtgcagcatgacgacactgaaacttcgacgccatcacagtgctgcctgtggtcatctcctgggtcatccattttggtcaggagacctcgtggttggtattttgtattctacatcaggatggatcctggggggtgtttccacatgtatcccgatgtgggttgtgggccatatcagagtctgtcagaagttgatgatgctataaaccaacatcttcatgacctgcggattccagaaatgggtgaggagcttgataggctccctctaatggagaagatgatacggcaagcgatgtactggcctgacggcaagcggaaacgttgcaagtcagctgggtattttgaaaaagacaagtgccatttgatccaagctttagtggagaagtataatgaggatcataatcttttgggggattttgcgtatgaacttaaggattttttgcaacatggagtaatttatgaggatcaaaggcagtaccaccatttgaatttcactgcgaaggtgaaaagagctgatgggtgtggtgtggagaacctattctttgctgaaatatcacatatgcaaggagaatatgaatgggtgcaaattggtcattgctatggctgtaggaataatggttatgttggcatgaagcaccctaacaatgatgcatacagtggtggtcatttggatggatatttaccttttggggtcaattcctatgcgcgcaataatgatgaggaactcagtgtcaaggatgaggaagatatgctaagacgtatgtacaagggcctagataagccaggcggattcaagagacccatccctaaatttgcaacacgaattgtgtggaaaactgaggaggaagctggtgtggaagctggttga

SEQ ID NO: 73580 - DNA, 373 bp, Oryza sativa
  Clone ID: PAT_MRT4530_73849C.1
ggcatgttagagacaaatattattacatctagtctactgtacaatactaattttatttattaacatatttttaagttgactattatgcatcattttgatattaattatttaatatttataaatatattttatcaaatagtgaattatatatcattggaaagcttatgaattttgatgaatttaggttcaagtttcactcaaatcggagctaaatatcgaacgaaatcctagaaatattatatgatttaatttagtctatgactaaatgattaaatataatacacgggctaaaatccctgataattacaatccgaattctctaccgccgaatcaatgtaccttatagtggttttacccgagagaaataatgcta

SEQ ID NO: 73581 - DNA, 868 bp, Oryza sativa
  Clone ID: PAT_MRT4530_7384C.1
atggtggaagcaacaaaaggctggacggaggtggttgtgggtagatgcacctgagtccgtgtaccactcgggggttgtcaggggcatcaacgtggaggtgctgaaggagctcgcgagtgcctgcgggtcccactgggaggggccagcccaagcatgtggagatggcgtagccgtcggggagggagcggcgctagcccggcgtgctgaggagctccatgggccgcgctgcgacctggcttggatgaagctagggaagggatgctgcataggaagaagaaattgcatgaccatatttagtgctaaggccattgatgagcatgcggtcggactgcggttcgccgaggtcagcgaggttgtccgccatagtattgagccgacgacaatactcgaaaatggagatatcgccttgcgtgaatccatggaactcggtggagaggttgatggcacgaagctcacaattttcaagaatttggaactccaaatcatgccaaatggagcgggtggtggcagtgggcgacatcacctcctgaagcaggtcgtgggagatggtgcgccagccgaggacgacacagtccatctgtgcccaatcggcatgattaggaagaggagcgtcatacaagacgtggtccgtcaaggcatatttgccaagaaccacgaggaagagaccgcggcagcgtgcatagttaccggtggcgaggtccaatgtcacggggatgagggccttgacattgagcatggcaaccgcttgagcgtggagggcggcatgggtgtcggcatccagaggaggtgccgaagccggggcgcggcgccagaaggtgggggtgcggcgggtgcaccagacgcgccggaggccgggatggcgagctag

SEQ ID NO: 73582 - DNA, 257 bp, Oryza sativa
  unsure (1)..(257): unsure at all n locations
  Clone ID: PAT_MRT4530_73850C.1
gaaaaatttttttgggccaangggttcaaaaccccccggctcccaaaangttcgggnaaaaaaattgggnaaaatttntaacccggggtccanaaaccccctttggattttcccngatttccaaaaaaatttaaaacggaggtcttaggttaaaaaccccctgatggtccatcccctataaatgagaatgatccatctttgatatgagggttatataaggctaattncgattgttaatttcaaaaaaaaaaaaaaaa

SEQ ID NO: 73583 - DNA, 600 bp, Oryza sativa
  Clone ID: PAT_MRT4530_73851C.1
atgggccctacgcacattaacatccggctattctctctcgttgttgcacgcgaccgcacggccgtccgcggcctccgtcgcccgccgcgaccgccgccgccgtccgcgttgtcgccggccgcggcctccgccgccgcagtccgcgccatcgcccgccacgaccgtcgtcgccattcgcgtcgttgccgaccgcgacctccgccgtcgtccgcgagccccgccgccgtctgctccgtcaccggccacggccacgccgttgcccgccgtccacgccgtcgtccgccacgcccgccgccgccatccgcgttgtcgcccgccgcggccactgccgccgtccgcgccatcgccggccgcggcctaagctaccgcagtctgcgccgtcacccgccacgaccgtcgctgccatccgtgtcgtcgctgaccgcgacctccgccgtcgtccgcgagccccgccgccgtccgcggccacaccgtcgcccgccgcgaccgccgctgcagtccgcgtcgtcgcccgccacgaccgccgccgctagcacgagctctgcagaagaacgagcagaggatgggagaaaaggggaggaagaagaaagaggagaatga

SEQ ID NO: 73584 - DNA, 455 bp, Oryza sativa
  unsure (1)..(455): unsure at all n locations
  Clone ID: PAT_MRT4530_73852C.1
ttcacccctctctctctctctctcgccccacccggatgcctcgcgctgccggaggctgacctcgccgccggcgactccgctcggccgccggagcagccagcgcgcgcgggtaagtcgactctcccccctccgctacgtgctgtcggacgttttgtcgggcggttttggttttggcttctgcgtcgagcagcaagggtgggtgggtgctcgatctgcgcgggctcgagtcgcggggagacttgctcgtggggagcgctctctcaccggaggaggaggaggaggagcaggngggttcctcctccggagcggcggccgcgtggtctgcggattctctccctggtgggaattatgaactacgcggcgctaccccaaactgctgaaacccacgcggatttattcgtttggtggtttttccccgggaatgaccttggtggggattcgtatggaaaagcccc

SEQ ID NO: 73585 - DNA, 1125 bp, Oryza sativa
  Clone ID: PAT_MRT4530_73853C.1
atgggcgcgggcgctctgggcggaccagacgcgctgcgtctcctgcttgccttcgccgggaagagccccctcgtcgacatcctcatcgccgtcttcgtcatcgccgcggtcaccgcgcccgccctcggcaccatgcttctcgcgcgcttcttccgcaaaccgcgcgctgtgcccggcgcggcccgtgccgggcgcggcgcagcgggtgcggcggtcgctgatgacccgttcgcgcagatgacgctggtggtttccctggccgtcgcgttcctcgtctccgcgtccctgctcgtcctgccattgttccagtccgggcacctcgtcccgctcgccttcgccggagtcgccctcgtcgtgggcgcctgcgcctcgcgcgtccgcggcgtgcttcttccgaatgcgcacggtggagccggcgccggcgccacccctgccgcgaccgccacggagcgcggtatcaagccgaccctttcggtgtccctcgccgccatctgcctcgtcctcgttgccccttggcgcctcgcggtcggcatcctcgacgcgccatcgcagcgcctccttgctccgctcgccaccgtgcccgtcgtcggcgtcgccgctgccaccgtggtcggcaccacgatcctcgtcctccgcttccgcaaggcgaaacatgcggccgcgacgccggacgctgccacgacgccggccacggaacgctcccacaagatggtggtggtggtcgtcgccggcgaggccaccacccgagctcgacgggtcgccattagcggcgaggacacctccggagccggcaagctcgatccgcccaccgacgtcgatccccgccgccgcgagctcgacagccgccggaagcgagggggaggggaggggactgaagaagttgaggacgtcgccggcctcatcgagctcgccgccttggtgtcgactatggcaggcagcgtcctcggcgcgccggccaggggaggaaggcgtcggccgggggaggagggcgtcgaccggggagggaaggacggcgccggaggcgccgactcccgtggcagggctcttgagaacggcggcagcggaggcgccgactcccgcggcagccgtgacagcgagtccgaccaccttggcgaccggggatga

SEQ ID NO: 73586 - DNA, 936 bp, Oryza sativa
  unsure (1)..(936): unsure at all n locations
  Clone ID: PAT_MRT4530_73854C.1
ctgcaggaatcggcacgagggtttttttttttttttttttaatatcatatcatccctttttatttgttttttggttttgggcacaaattctgccggtgcctttgctttgaaagactactaaatattttataaattcaaaacaacaactactccgtagtagtgtactactccacaagcgattgaaagccaaaaaaaagatactactaattgattgattggttgattgattgattaaggggatatatgtgaatgaagaatcaggcccagactctcttcttggggataaggtcgaccgtcttgaccttgtctatgcgagccgcgacgatgaagtcattgacggtgaggccgccggcggagggcgtctgcagctcggccctgacctggttgggggcctcgaagacgacggtggccggggcgccgtcaaccgcggcgttgatcctggcgacgagctcgtggccgcaggcttcgtccctgaccttccagacgcactgcagacgcatgccgtcggcgtcgtcgaggaggcgccagccaaccaccttgtggaggaggcggcgggcgtcggcagcgtcgacgggcgcggggttaggctcgagggggaggcgcgcgatggagagcacggagagcgtggggatgaggatgttgtggagggtgtcgacgttgcccagcaccctctcgccgaagttgctctcgatctcctccgggaaggggtcgcgcgcgccaaagtcgcccagcaggtcggccatggccaccaccacgctcttttgcttcctccgcacggcgagctgatgaggcggcggcagaggaacccgccgtccgaagcagcaggctgctgcggctgccggcgcgaggatgtggttggtgagcgccattggattggattggaatggcgatgaggaacagctgcagccaccagtctaccttgcctgnctcgaggta

SEQ ID NO: 73587 - DNA, 2312 bp, Oryza sativa
  Clone ID: PAT_MRT4530_73855C.1
atgccggcggtgtgcccatgcgaggacatctcgcccgggacgctgctggcgtcgctcgccacgctttcggccgacgtcgccgacgggtgcgacgtggacaggctgccggcgctccggggcggcgtcggcgtggccgtgcgcgtcgccgggttgctccgggagttccttgaggaggtccggtgggcggcggcggcggagctccccggtggctctgtgctggggatgtccgagctgcacgtggcgttgcagaagatgcggttcttgctagaggattgcgggaggaagggggcgcggatgtgggtgctgatgaacgcggaggctgtggcgtcggagctgcgggtggtgctcggctcggtggcgacggcgatggacgtgctccccgccggcgtggtcgcggcgtccgacgacgccagggagttcgcggcgctggtgtcgcagcaggcgtggcgcgccgcggtgcggccggacgaggaggactcccgcgcggcacggagcgtgcggtcgatgctggcgcggttcaggagcggcgccacgccggacgccgaggacgcgaggctggtgctcggccgcgtcggcgtcgccagctggtgggactgctcccaggaggtgtccttcctcgaggccgagatgctcgagcggctggaggccggcggcgagaacgacaacgacctcgtgctcatcagcggcctcttgacgttcctgctctactgccgcgtcgtcctgttcgaccgcattgattacggcaaggctgatgagccggcgccggcgccggcgccgagggcggcgagctacttggcgcgaatcaatccggaggggctgcaatgcccgatcacgctggagctgatgactgatccggtgacattggccaccggccagacctacgaccgcgcgtcgatcaagcggtgggtgaagagcgggtgccggacgtgccccgtcaccggcgagaagctccgtagcgccgacgtcgtgccgaacgtcgcggtgcgcgggatcgtcgagcagctgctgctcagcagcggcgtctcgctccacgagccgagcagcaagcaccggtgcgcggtcgacaagacggcctcgccgttcggtgccgcggcggccggcggcgcgcgcctcgccgtggcgttcctcgtgtccaagctgtgccgtggcacgccggaggagcagaagaaggcgacgtacgagtgccggaagctgtcgaagcggaacgtgttccaccgggcgtgcctcgtcgacgccggcgccgtgccatggctgctccacctcctctcctccccggacgcctccgtccaggacaatgccgtggctggcctcctcaacctctccaagcaccccgccggcaggagggcgctcgtcgaggccggcgggctgggcctcatcgtcgacgccgtgagcgtggccgccaaggtggaggcgcagcagaacgcggcggccatcctgttctacctctcgtcggacgccggctactgcgatgagatcagccgcatcccggaggcgatcccgacgctggtccggctcgtgcgggagggcgcgtaccgcggccggaagaacgcgctggtgagcctctacggcgtgctccagcgcggcgcgggcggccacggcagggcggtgtccgccggcgccgtggcggcgctcgcgtccctgctgcccggcgaccgcgacgacctcgccaacgacgccgtcgcgctgctggcgaggctcgccgagcagcccgccggcgcggcggccgtcctctccagctcggcgctcgtcacgcggctcgtcgacttcctcggcgcgtcggcgtcgcggtcggccaaggaccactgcgcggcgctgctggcgtcgctgtgccggcacggcggcgacgcggtggtcgccctgctggggaagacgccggggctgatgccgtccctgtacgcgctcatcgccgacggcggcgcgcaggggagcaagaaggcgaggtggcgtcggtgaacgaaatccaccggcattacgagcagcggcagccgccggtggccgcgccgccggccggcgaccgtgtcattcgagtatagtacacgaatccttttttttttttgggagaatcgtatagtacacgcgcgagctttgtggtatatgcggtgtacatttgaatttggattttttggggatgtaaatattttctgtcccggcttgaatttttgaagagcagggatggattttgatttttcgttttactccactgtgatacacgcacgcatgtacatttatttatgtgtgtatagttgtacagacacaataatgtataattgtacgagtgactaaagtggtttgcaactctgcatttttcttct

SEQ ID NO: 73588 - DNA, 317 bp, Oryza sativa
  unsure (1)..(317): unsure at all n locations
  Clone ID: PAT_MRT4530_73856C.1
atggagcgtcaaggatcattggcattgacctgaacgncaacagatttgaagaagctaggaaatttggttgnactgaatttgtgaaccnaanggnccatgacaaagncagttnnagcaggtactntntnnngatnancaaatgnngggngtttgacccncaagcggttgcattgcacntngcaacatcaaaccgccatgatccaagnatttgaatngngttcatgnntaagctggggncnttgctntntntggtcggcgtgncacacaaggncgcccgagttnaagtccnacccgntgaacnttncttgaaccgagag

SEQ ID NO: 73589 - DNA, 330 bp, Oryza sativa
  Clone ID: PAT_MRT4530_73857C.1
atggctagagctcctttctcctgctacacctaccctcctgttccgtccccctcaccatcaacgagccaaggagagggctgccagcaccagatctggagatatctagggcctccccgtgctagatttggagtttcaattgacaatcgacgtggtgttgcagacatcgtgttgctcgtcgacgttgtgcgcagggctggtttcaaggctgatacctgtggtatcatggttgatactcacaagtttcagacctgggaccaactttgccacctaagccactactggtactgtggccttctcctagcgcctcgcgcgtgctcctccgccagctag

SEQ ID NO: 73590 - DNA, 1312 bp, Oryza sativa
  Clone ID: PAT_MRT4530_73858C.1
atgtgggtcccacatgtcagcctctcgttcccttcccctcccctcccctcccctccccaactctcttcttttctctcaaattttctcctcggttgggcagcgcagccggcggggtggggaggaggccgttgggggaagcgggagtccggcggtgacgacgcggcgatgggcgacgaggtggcggcggcgggcgacgaggcgacgatgctggataagggagacgctctgcattcgtcgcctcgccttcgcctcctagccccgcgggtctcctcgactcctccgccttctgccgaatccgccgaccgcggcctctctgagctcgtcgtccgcctgcaccgcagcgggttccttcccaagaacctcctctccagctgctctctcaccgtggtctccctcgactcatgcgcgttgcctcaccgtgatcacaccgccgtgttgccggattggggaagaaaaggaggcggggagattggggaggaggagaaggagaagtgggtcccggccgtgctgctcggccacgtgcagccgtcgagggcggcggggagaccggcggcgagagacagggaggtaggaggcggggttggcgaggaggaccgggaggccggcgagctgtggcatgaactagacaaggtaaatcatctacacctcgccgtgcttggagagcaaccgacggagacggacgtgcgacgggttcatgttgggagggacgcggctgaggtagcacaccccgcgcttgccgaggctgtcgagccgcttcagtgcccattccctcgtctcctcctcgccttcgcttccgagaccttcctcctcccatcccacctcctcctccgagtagtactcgctctcgctgcttcatgccatcatggcgccatgggaacccacttcgcatgtgcctctgctggtctcgatcgccggtggggaggtgtcgttgtcgtcgtcgtcggcggcggcggcggcggtgtggtgtaatggcaacagcggcgtgtcccaaacatcgccaaccccatctcccgtggggctgggaggcgaaagcgaggcggcgggatgcaggcgtttcccttctccagcatcgtcgcctcgtcacccgccgccgcctcatcgccagccgtcgccgccggactcccgcctcccccaccggcctcctccccaccccaccggctgcgctgtccaactgaggaagaaagtgagaaaagaagaggagagaggaagagaagtggagaggggaggggaagaagaggctgacatgtgggaccgtcccacgctgagtcagctgtcacgtaaggcaaaaccggagtcaaacccgccgagggat

SEQ ID NO: 73591 - DNA, 385 bp, Oryza sativa
  Clone ID: PAT_MRT4530_73859C.1
taagagaagcactgcatgacacttttcttgatccagatcacttgtacacaacacatccaagacacagcatatatagtagctagatttgcagtaaccattggcattattacacactgacacagtaaggcaacccaactcaactcaactactgctcttctgtgataccttcgcaaacgctggcgactggcaatggcaatggaaggccaacggcggcgacgcttgcggcggcggcggcggcaggaggctgcacggcctggagcaacccgtcgcgtatctgcgccacggcgtcccgcgccgcggccgggccttacggaaggaacggtaccaccaccaccaccaaacacccgaacacgaacgcgacgacaatctccctcacaatttccaa

SEQ ID NO: 73592 - DNA, 201 bp, Oryza sativa
  Clone ID: PAT_MRT4530_7385C.1
atgaccgacgagctcatccatgagaggcgacatcgacggtgggaggtcggtgacaaggggtgtccacatggacagaaaaaccacggcctaatagacccagacgccatgttatcagagacgagcgacatccgccaagcagacaagggtgggagtgaaaagagaactagtgaatcaactactataaagcagcaggttttatag

SEQ ID NO: 73593 - DNA, 554 bp, Oryza sativa
  Clone ID: PAT_MRT4530_73860C.1
atcatccctgctacaatggaggctatcgcctgctactgatcctgtgataatatcagtagttctgtttgatatacttaggaggatgcatacaccaccaagagatgagccctgtttcggctctaaagtgctcttgtatggacgcgtactctactgttaccaccagtatgcatgaaattgccagatgcattaggccagagctcaccacggatccgactccgccgaacatgatgccaacgcaggacatgggtaggtccacagtcatgttcatataacagccaatgtctgccctgcggaagcaactgagcatgcagttgcaacgcatgatgcctaagcgccactgggacaccagataccagatgatgccaagcatgctacaagttatttgtgctggactcgtgcggcatcagatgatgaggaacatggcgatgcagatgccatacatgtgcaacatggcccggtgaaacttgcaactctcttattgtggatgctgctgatcaaacgttggctacatgtactgtagcaagaaggggttgaatactatcgtgtgcaagcac

SEQ ID NO: 73594 - DNA, 366 bp, Oryza sativa
  unsure (1)..(366): unsure at all n locations
  Clone ID: PAT_MRT4530_73861C.1
tccaccgcggtggcggccgctctagaagtagtgnatnccccgggctgcaggaattgtggcnncnggagctccgtcaaggagcgcgtccagatggcgcgcgcgcgctgccgccagnccatcctcntcgcgctctctnttgatctgacgntcgctccgcntggtgcccgtgnngtaattctcattcctncncttatttctngcanancccctnttcncagttgcngctggtcttcagntntttcgtgtatgtatacctgggtttcngtagcatttncaatcaaacgcncnatccatgnntccgnngaatgnatgnnatanncaantacgngcacttcttatgctgcataaaaaaaaaaaaaaaaaaaa

SEQ ID NO: 73595 - DNA, 354 bp, Oryza sativa
  Clone ID: PAT_MRT4530_73862C.1
atggctgatttggacaaggttggtggaggggttgctggacaaggttctagaggagccttgtgctggacagaacacatgtctgcctttatgctaagaaagatggttgagctcatagcacgaggaacccaagtgtacaaccatctttgcaaatgccgttcaaggtgggtgcgtatcgctaggctgaaagatctaagtggggctctatgggatgatcagaacaacatgattgtcctagaagaggagcactacatgggccatacaaaggacaaatctaaaggtgttgagttcctgaatgtgctcgtagagaactacacaccgatgtctatcatctttggtggaacccaagccacatga

SEQ ID NO: 73596 - DNA, 501 bp, Oryza sativa
  Clone ID: PAT_MRT4530_73863C.1
gcgattggtacttcgaggccggccagttcatcccccccccccccccctcttcctcctcctcctctcccgccgccgccgccgccatcgcgtcgagctgccccgcgagatcccgccgttgacggaggaggagggagtgagtgagtagcaagaggaagaggaagaggatggcgtcgggacggtacatggcgtactcgccttcgccctccaccaccccgcactccccgcgcatccccggactccgcgccgcctcctccgccgtcgccgaccaggagaagtacctcgcggagctgctagcggagcggcacaagctgagcccgttcatcccagtgctccctaatagtgtacggctgctgaatcaagaaattttacgtgtttccacactattggagaacgcgtcccttttaaatcaaagtggccttgaacatggtagtccactaacaactggaggattatattcaaatggagcagcagctgatatgaatgggtggacatcagcatttc

SEQ ID NO: 73597 - DNA, 839 bp, Oryza sativa
  Clone ID: PAT_MRT4530_73864C.1
caaccatctttccatctccaccccgccgatttccctcccccaccgccagcaacgtcgagccctctgccttcccggcgacgagtgcgtgtgccggcatgtccagtccagtccgccgcgtcggcagcgacctcagcagcggcatctactcagcagctgcaagccacggccaccagcagcaaaccacgagtgacaacggccacgggtcagccaacgacgacgacgacgacgacgacgttgccaaggcgaagcagaggctctcgtcgcttctcttctccggcgtcggcacgtggcggagaagcgtggacggcagcggcggcgacagcaagcggcaggtgaaggggaacagcagccgaggaggaggaggtgggctggacattgcgcagctggtgaagaagtacgcgtccatggtggagcgtctcttcttcgcgtcgtccttgtccaataatcgccgccgtggcggcggggatcagagcgggaggaggacggagctgcggcggaggcggcactcgttcatcatctccggccttcgtcgcggcgccgccgccgccgctgccgccccgtcgaagcgtcacgaggggagctggctgttctcggcgcccgcgtcgctgcgcgggtcgccggtggccagcgggcacctgtcggtgaaggtgtcgacgtcgtcggaggagagcacgatggaggagctgcacagcgccgtccaggccgccatcgcgcactgcaagaactccatcgccgccgccgcgccaagcagcaggccggcggcggcggcggcggcgaccacgccgaccggtgtaaatgctgacgcggtggtggcgtgtacgtcttctcgtgcgtcgtaa

SEQ ID NO: 73598 - DNA, 2091 bp, Oryza sativa
  Clone ID: PAT_MRT4530_73865C.1
tctgccggccttcagagatatcccacgcatcctccagacggcgaccaataaagacagccccaagctacacgcccaccaccttcccaccgcgcccccgcatatccccccagcgtggtacacatagcactatacccgccccagcaccatctactacccttctatcacgccccacaagcccacggtacccgagggctccccctccttccgccgcagcacgccctcacggaccaagggggcggccagcctcagcgaatgccgccccctttgctgctgggtgaactacttttctggttttttttttttttttttttttttttttgctcaacgattagtgtgcgataaacagtacaaccacaaaaatgttacaagttacaaagtctcttcaatccgagttatcccaattatcatccttagatcgaagtcttaaaaaagctcaaaaatacaagctcagggcctttatatcaaaaccccagatatcagttcatagcaatacacaaaccacatagctaccaccaaaccatgcacaacccaatatatagcccaacaccctacgttgccataaccagacccctcggtaggcggtagcaggaatacacaactccagatatatggtattatcaagtacgggccgctccgatgctggcggtgcgagaccgtttttgggccatcagccagcaaggcaaccccataggcatacttcagcatcggtctcagaatagacgattggtcctcccatcatgaacacttgctcacttacccccttgtcttcgccctcttcattccaaggctgttgtggaaaggggaagctgagccagatctttgcatcccttcttcacggagggtgccattgagcatggcgagttcccggagctgctgcttcttgaagaagtcctgagactcgtccacaggcttcagcagatcttcaaggatatcacgggcttggatcagacgggtatcaataatttcaacaggcagttctgcctcaaccaatatgtgcaggggttcattcagatgttcataacctggtttccctcgcatcatgtcctcccgagctggatctttaatgcttccccgacctcttataagcacacggcagtcggtggttgcttccactcgcttcaaagaatttcctctaggaccaaggatgcggccaacgaaattgaatgtgggatatttgtctactgggatatcaaccttcatggttttcttaacaattagtccagaggaactgccttgagaacctccacgccagctataagctggtgaaccttctgattgaaatgctgatgtccacccattcatatcagctgctgctccatttgaatataatcctccagttgttagtggactaccatgttcaaggccactttgatttaaaagggacgcgttctccaatagtgtggaaacacgtaaaatttcttgattcagcagccgtacactattagggagcactgggatgaacgggctcagcttgtgccgctccgctagcagctccgcgaggtacctcagcaaacgctgaatcgagcatcccacttgttcgacacagtcaaaatgaagtggagctaccacaaacgggagatctcgccgcgggggaatcagatccgatgctaaaaattccttaaacccgacatcagattcacgccacaaaaaaaaccttggggggaatctcacagcacgtagaatccacgctggaaccggccgaatctgccacgatcgcagccgagccgcacgccttccgaaggccgccacggcggcggcggcggaggctcgtccccccatcccccgacaagcgaaacgaagcagtggaggaaggtggcgttgctgagcttacttctcctggtcggcgacggcggaggaggcggcgcggaggccggggatgcgcggggagtgcggggtggtggagggcgaaggcgagtacgccatgtaccgtcccgacgccatcctcttcctcttcctcttgctactcactcactccctcctcctccgtcaacggcgggatctcgcggggcagctcgacgcgatggcggcggcggcggcgggagaggaggaggaggaagagggggggggggggggggatgacatcctggcccg

SEQ ID NO: 73599 - DNA, 1071 bp, Oryza sativa
  Clone ID: PAT_MRT4530_73866C.1
atggcgtccaggactagtgctactgccggcatgctgctgctcgccgccgcggctgcgctggtgtgcagctcggcggcggcgaggatgccgccgttggcgaaggggttgtcgttgggctactacgacgcgagttgcccgcaggcggaggccgtcgtgttcgagttcctgcaggacgccatcgccaaggacgtcggcctcgccgcggcgctgatccggctccacttccacgactgcttcgtccagggctgcgacgcctccatcctgctcgacagcacacccaccgagaagagcgagaagttggcgccgccgaacaagaccctccgcaagtcggcgttcgacgccatcgacgatctccgcgacctgctcgacagggaatgcggcgacaccgtcgtgtcctgctccgacatcgtcaccctcgccgcccgcgactccgtcctcctcgccggtggcccgtggtacgatgttcccctcggccgccacgacggctccagtttcgcgtctgaggacgccgtcctgagcgcgctcccgtcgccggactccaacgtcaccacgctcctcgaagcgctgggcaagctcaagctcgacgcccacgacctcgtcgccctctccggcgcgcacaccgtcggcatcgcgcactgcacttccttcgacaagcgcctcttccctcaagtcgaccccaccatggacaagtggttcgccggccacctcaaggtcacctgcccggtgctgaacaccaacgacaccaccgtcaacgacatccggacgcccaacaccttcgacaacaagtactacgtcgacctgcaaaaccgccagggcctcttcacctccgaccagggcctcttcttcaacgcaaccaccaagccgatcgtcaccaagttcgccgtcgaccagtcggccttcttcgaccagtacgtctactccgtcgtcaagatgggcatgatcgaggtgctcaccggctcgcaggggcagatccgcaagcgctgttcggtgtccaacgccgccgccgccggcgaccgtgcttggtccgtcgtggagaccgtcgctgaggccgccgagagcttggtgctgtag

SEQ ID NO: 73600 - DNA, 1788 bp, Oryza sativa
  Clone ID: PAT_MRT4530_73867C.1
atggttgaaagtgcaagcatggtgaacgagaactcggagaatccatactggaaagcaataggatacagagtggaagagccccgacgtgatcgagcagagtcgatgccgtcgccgtcgccatcgccggtatcgcggcggccactggacaacggcgtcgtggagacgagggcgctgacggacaccaccctcctccggtcgctcgcggcgaagggcctcgccgtgaggcccggcgcgtcggacgagcaccacacggtgcggtgcgacgccgtcatcgtcggctccggctgcggcggcggcgtggccgccgcggtgctcgcgtccgccgggtacaaggtggtcgtcgtcgagaagggcgactacttcaccaaggaggattacagctcgatcgagggcccgtccatggagcgcctcttcgagaggggcggcgtcttctgcacgtccaacgtcacgacgatgatattcaccggcgcgacggtcggcggcgggtcggcggtgaactggtcggcgagcatccgcacgccggcgggcgtgatgcaggagtggtcgcgcgagcacgggctggcggtgttcgcgagccccgggtacgcgcgggccatggacgcggtgtgcgagcgcctcggtgtgaccgacgcgtgccgggaggaagggttccagaacaaggtggtgcgccgcgggtgcgacgcgctcgggctgcgcgccgacgccgtgccgcgcaactcgtcggaggggcacttctgcggcagctgcaacttcgggtgccccaccggcgacaagaagggcaccgacacgacgtggctcgtcgacgccgtcgagcgcggtgcggtcatcctgaccgggtgcaaggccgaacacttcatcgtcgagagcaacggcggtggcggcggccggagcaagaggtgcgtcggcctggtggcgacgtgcatgagcaacggcatcaccaagaagctccgcgtcgaggcgaaggtgtccatctcggcgagcggcgcgctcatgacgccgccgctgctgcgcaacagcgggctcaagaaccgccacatcggccggaacctgcacctccacccggtgtccatggcgtggggctacttcccggacaacacgccggagccgcacatcccggggaagtgctacgagggcggcatcatcaccagcatgcaccgcgtcacggagcgcaccatcatcgagacgccagcgctcggcccgggcgccttcgccgccctggtgccctgggagtccggccgcgacatgaaggagcggatgcgccggtacgcgcgcacggcgcacgcgttcgcgctggtgcgcgaccgcggcgccgggtccgtcgacggcgagggccgcgtccgctacgccccgagccgcgacgacgccgaggagctccgcgccggcctccgccgcgcgctgcgcatcctggtggccgccggcgccgccgaggtgggcacgcaccgcagcgacggggcccgcctccgatgcaagggcgcgcgcgacgcggacgtggaggcgttcctcgacgaggtgaccgtggagaaggggccgatgcactcgacgacggacaagtggtcggtgctctgctcggcgcaccagatggggagctgccggatgggcgcgagcccccgcgacggcgccgtcgacgtcgccggcgagagctgggaggcggaggggctctacgtctgcgacggcagcctgctcccgacggcggtgggcgtgaacccgatgatcaccatacagtccatcgcctactgcgtcgccaagggcatagccgactcgatggcacacggcaaggagcagcgctag

SEQ ID NO: 73601 - DNA, 151 bp, Oryza sativa
  Clone ID: PAT_MRT4530_73868C.1
gcacgagggttgtggataacatgaagaaaataaccaaaaggaagcccctcttttttcggctagacggctatagtgagtagccaaatatgagctggcaagccaggcagctttcgctgtcctcttgtttgacatcgaacgacagagtgctaac

SEQ ID NO: 73602 - DNA, 129 bp, Oryza sativa
  Clone ID: PAT_MRT4530_73869C.1
tgcggatttggaagcggagaagttggagttggaggtggcgtgacggatcaagcggagtcgcgatcgctcgccggagccgtgcggattccggtgctagcgaacaacggcggcaccgtcggcgttttgtag

SEQ ID NO: 73603 - DNA, 435 bp, Oryza sativa
  Clone ID: PAT_MRT4530_7386C.1
atggaaaccatcgagcctcgggtgcagatcccctggagttggtgccaaatccaccggtgttcatcatcaatgttcaaagcaaggcttccgtatgtccagttgccattagagctacttgaagaaccagtggcatcaccggagttgaagctagcgcagcggcatgaacggcgcccagagatggcaacgccaggacgcccacgaattgaattgaaggagccatcgagtactacgatccatctactcacaattgagaggagaagcacgtacatggtgcacaggccatcggcgtcgtcgatcatcttcgccaagtccctacggcaagcagctgctacctcctctctacatcacacgtttctcattgccgacactttgcatctggctgctacctcctctagctacatttgtcaatgccgacactgccgcaggctaagctac

SEQ ID NO: 73604 - DNA, 507 bp, Oryza sativa
  Clone ID: PAT_MRT4530_73870C.1
atgggtggtcggtgcgtgggggcggcagtgaaatgcggggagggcgcggcgggtggcgccgaggagggtgttggagacagcggatggcgttgcgccctccccgatctcgctgcgcgcccttccctggcggcaccgcggcaggcgttcggcaggcggcggcggcagcgcaggacacggtgggtggcgatgcgggacatgaaggcggcggcaggaagcaacgtctctgcagggacggcactcagcgtcgtggcgctggctgccgccgccgactggatccacatagccgactgccgcccggttgaccggttccccctcccatcccgcccgagcctaccgccggcgtcacgggcgccgcgtcacccccatgaggtaaggaaggcagtcgtgtcggaggcgctcccactcgagtgtccgccactctcgcttccgcgtccctcaccgccgtccgtcgttcgccccagcgcgccacagtccgccgcccgcccctccacgccgccgggcgtttag

SEQ ID NO: 73605 - DNA, 349 bp, Oryza sativa
  Clone ID: PAT_MRT4530_73871C.1
ggatttttgtcctggcaatggttggaatatgtgctcgatttatagctctggaactgaatgtccacatgaagcagtgtgttgaatactgtaagatctttgatcgagctttctgattctattctatacttccctcttatgttaatgtgggagctttctgattttgttctaatacttgcctcttatgttagtgtgaggatatgtaaatgtgacaccttttatgcttattgcagcttcacaaaggtgtatcccatgccttccattgattaccttcattggtaacacatccatctagtcatgttgatcatatgtaatgccaatatctcttgcctcttggaagttgggactcaat

SEQ ID NO: 73606 - DNA, 373 bp, Oryza sativa
  Clone ID: PAT_MRT4530_73872C.1
agagaccgaaattcacgaatatacccacccgtgctaacaaagaagaagaataggatgccgaccggtgctatcattgtaaggggatcgacctccatattcacccttgctgtgaaggggcgcagcctcgacattcaggctcctcgccgtgttgcgttgcacgcttcggcggtggactacagctgtaacatctgaggctgtccaggtggactacacctctaacatctcggtgattccgacagaggcgcagcatatctcatcaggcgcgactcttacaacgtgctgatgtacctagaggctcaagctctcatcatcgaatgctgcagctgctacttatgctacgacggaggaacccaacagggactacctatggtac

SEQ ID NO: 73607 - DNA, 455 bp, Oryza sativa
  Clone ID: PAT_MRT4530_73873C.1
ggtagcaacccgccccggggggggtaccaacgagcagctctccgctgtgctaagggatttcggccaggggatcatgcggctcgagaggcggcgcatggagatgcagtgggagatcgatcgtgggtggaaggaaaccgaggcccgccacaacaggatgcttcttgatgctcagcgccacctccacgaggctctcgccgccacgccgccgcccctcaagaaggccaggagggagcacggcggagacggctcgtaacaaaccagcagctgattgttgcagctgattgttgcggacttgcagctgcttagcttaatttggtggtgtgatggtgagtgagggggtgtctcctagtatgttcaggatgcattcagtagcaggatgtatttatcaggctgtacttaatcgttagtatatgtgctaatttgccttagcaaagttgacaaaaaaaaaaaaaaaa

SEQ ID NO: 73608 - DNA, 556 bp, Oryza sativa
  Clone ID: PAT_MRT4530_73874C.1
cccaggcccaaaacattttttatgttctccaaccaaggtgtccgtaaagctagaacccagctgggatttccagccaagttttttgacacctgagtaacccttggtggacacaaacccacacccacactgagggtttgaggcacgcccacactggcatgagccatcacacgggagggacgcttgatttattaatgaggaagccgggcgggtgcatcgacaatacagaaatagaaggcccgggccttaacacatgcaggggttgcccctcctgctggagccacagcagcagccaggggccacctacccagattcaattgctttggcaaccccctgagagggccccttattgggtgcaccaactgggacaggggtggcagccagggtggggggggggaattacatcgcaggctgtggtcccaggtgaccggagccaccgatgtatcggaagcaaccgctgttgcgtccgggagatggcgacatccggtgggacagggtgaaccgaaaagggttgacccagtagagtatggggacaagggcgggcggctgggttaacacc

SEQ ID NO: 73609 - DNA, 119 bp, Oryza sativa
  Clone ID: PAT_MRT4530_73875C.1
atgacgtcctcccttacaaatgacacacatgaagagtgtggccgtgggcgtcaaccctccgctgtgatcacatcgggcctcccctggacaagccacaagtcctcagagaatatccctcg

SEQ ID NO: 73610 - DNA, 315 bp, Oryza sativa
  Clone ID: PAT_MRT4530_73876C.1
atgaggtccacgagcatgagcagaacgagcgacgcggccataaaacacacggacttcactagcccgaccccattccgcaacctccctcgacggggcatcgcaacctcagacagcagcggcggctttgcgagcaggggttactcgtccgcggggttccctttgccgttcgtgatcctcctgcaccggaagcgcgacaagaagacgaggttggcaccgacactggccacgtcatcgcaggctgagagcagccgccgccacgtgctctggtacatctccgacaacatcacgccgccgccagagaaatccatcgcaacg

SEQ ID NO: 73611 - DNA, 337 bp, Oryza sativa
  Clone ID: PAT_MRT4530_73877C.1
gcaaaataagagaggtcccatgagccaacgcattccactaggattaatatcctcgacattgatatgcaaactagattcacacagaaccgatcactagaaaaaacaccatcttcttgcaccacgacctgaacaaaatgactaacaggccttatgctaaaaaaaacacataaatcacattgaatgaaaaaaacctttgcaacatagggcatgggctatactgaaattgacccaaaacaaaaagaatcttccctcaccctggcctctgcggtttaaacaggcaccattccctccagggggacactgcccagctcataataccccttcaacttcaccttaa

SEQ ID NO: 73612 - DNA, 404 bp, Oryza sativa
  Clone ID: PAT_MRT4530_73878C.1
gcgggaggcagcggcgaggacggcggcacgcccggcgcggcggggcgggacggggcgcgaggaggcgacgcgacggcggcagcatgtgggcacgccgcacgcgggcgcggggtcaaggcgacgatagcgacgggcgacggacaacagcgcgggtgggactcgaggggagatggcgacggccagaagaggttggtgatggcgttggagatggcgagcgcggtgcagacgcccttgccgctccccgacatgtcctcctcgagcagcagcttcgcggagcagtcgccggatgtctccgactcactgacttccgcgctcgggctgtagctcccgcagcaccgctccgagccaccgttgtcctccgacgcgctcgccattgtagtcgtaccaccctcccctccgacctt

SEQ ID NO: 73613 - DNA, 2138 bp, Oryza sativa
  Clone ID: PAT_MRT4530_73879C.1
cgagtgcggccccgggccgcgcccccgcggccgccctcccccccccccccccccgccgccgcgtcccgcccgccgccgccgccgccgccgccgccgcgtcgtgcgacctcgctcgcgggcccgtcggggggcgtcgcccgcccgcaatggcgagcgcgtcggaggacaacggtggctcggagcggtgctgcgggagctacagcccgagcgcggaagtcagtgagtcggagacatccggcgactgctccgcgccgacgaccaccaccaccacccgccgcttcgcctcctcctcctcccgcggcgtcgcctcctcctcctcctcctcgctcctcccgacccctcccccttcctccgccgccgccttcttcctctccgccaagcccgccgccgacctctccgaggtggacatgatgaaggagcgcttcgccaagctgctgctcggggaggacatgtcggggagcggcaagggcgtctgcaccgcgctcgccatctccaacgccatcaccaacctcttcgccaccgtgttcggcgagctgtggaggctggagccggtggcttcggtgaggaaggcgatgtggacgtgggagatggactggctgctctccgtggccgactccatcgtcgagctcaccccgtcaatccaggagctccccgacggcgggggacagttcgaggtcatggtgccgcgcccccgcagcgacctctacatgaacctcccggcgctcaagaagctcgatgcgatgctcctcgccatgattgacgggttcaaggagaccgagttctggtatgtggatagggggatcgtggttgatgacagcggcgggccgttctcgtcgtcgtcatcctcctgcgggcggccgtcggtgcggcaggaggagaaatggtggctgccatgcccgcgggtgccgcccaaggggttgtcagaggatgcgaggaggaagctgcaacaggacagggattgtgcgaaccagatactgaaggcggccatggcgattaacagcgatgtgctcgcggagatggagatcccggaagtgtacttggagtcactgccaaagagtggtaaatcttgcttgggtgagataatttaccgatatataacagctgaacaattctcaccggagtgcctcctcgattgcttggatctgtcatcagaacaccacacacttgaagtagctaacagaatagaggctgccatccatgtgtggaggttgaagggccaaaagaaatccacgcctcaagcaaaatcaaagaaatcttggggtggaaaagtgaagggacttgttggagatacagaaaagagtcatgttttgtcccaaagagctgatgggttgttgcaaagcttaagattgcgataccctggtttgccacaaacctctctcgacatgaacaagatccagtataacaaggacgttgggcagtccatactagagagttactcaagggttctggagagcttggcatttaacataattgccagaattgatgatgtaatttatgtagatgatgcaacaaagaagtctgccgctgctgactctgtttccatcttcaatcgtggcattggcgtaccagttcagaagaggatctccccaagcccgttctcaattcagcatacaccatatgcctctccatttgctacacccactttctgctcctccactccagttacaggcagccctggaagagtacagcctccattgaacaaagacaacttaccgacaaaacaagaggttaaagttgagaagctgttttctggtgatatcgagaaggtctggacgtatgccgggaaccttagcgcaaggaaagacgcaggagatgcccctgaaagagactgaaaggcagtgaagaaagttcttcagatctttagacgtgtctcagcaaggtcaacaggtttcaacacatcctgttctggtctctagctagattttccctgtacagaagcaacatgattcatttttttgtgctttcttagcgagccaagggtcgtctagccctacttacaacaagtaagggaatgactctttgagtcttgatcgcatctgaacaagtcatagtttcacgtagctgcctctgtcggacatgtactcttcttgttcatgtttatactagctggtttagttagcagcaaaaaaaaaaaaaaa

SEQ ID NO: 73614 - DNA, 474 bp, Oryza sativa
  Clone ID: PAT_MRT4530_7387C.1
atgtttatgcatttgaggcatctgaagtgtgaggtatatgtcttaactagtgctccgaatacttgtaagggagttgttcaattggcgcactacttggaattcactcctctactggaggtgctagaatggcatatgtattattacaagaagtacaaatgtcgggttcgcaagaccaaggtagcaagggaggactatcgcttgagccgccatgatcacctcaagacggtctacatgagcgggtttcggtgttaccgtcctcaggaggagctggtctatttcatccttgagaatgccgttgccctggagtttatgtccattgaaccccacacaatattggctgatgatgatcactgtgatttttccgacattgctgaagacaagaagatcagaaagtgggcacgccggacgtcagcgtgcttcggtaaacaagtacaggtcaagaagaagaagctcgcccagtattttacaatgtaa

SEQ ID NO: 73615 - DNA, 1239 bp, Oryza sativa
  Clone ID: PAT_MRT4530_73880C.1
atggatagcagcagctggatccatggctacacaaacgccaacgccaccggcgccaacagcggcttcatgtgcggctacgctgccagcccagtagagtttccgcagcagcaacagctgatcagcatgcagatgggcatggatgacgagtcggcggtgtacgacggcgcctccatggtgggcgacctcctcatggcttcctcgtcggcgcaccacgccggtgccggcagcttccagtactcctcgtcgacgacgtcctcctccgcctccttccgctccgcctccgtctcgtgcaacccggagagctcggcggcggcggcgccagagttgccggcggcaaccggcggcgcgttcagtcgctacgcgcggcacctccgcccgaggaggccacccaagccgggagcgtgcgggcagaggatgttcaagacggccatgtcggtgctcgccaacatgcacgtggcggcgacgtaccgccgccagtactactaccagcaagcggcggcggcggcggcggccgaggcggcgccggcgccgccgtccgacaaccagctgcagcacatgatctcggagcggaagcggcgggagaagctcaacgacagcttcgtcgccctcaaggccgtcctccctaccggctccaagaaagacaaggcgtcgatactgatcagggcaagagagcacataaagtctctcgagtcaaagctgtcggagctggaggagaagaaccgggagctggaggcgaggctagccagccgccccgccgccaagaacgacaaaggcgagacggcggcggcggaagccggcgacgagacgaagcgagaggacctagtagagatcgaggtgacgacgacgagcggcggcagcggagcggcggctgcggcggcgacaggaggagatcaagagacttgttgcacgctcaacgtggacttgcgcggcggcggcggcggaggcatgagcacgacggacgttgtgctccggacgctgcagtgcctgagagagcagatcggcgacggcgccagcctcgtggcgatgagcaccagcgccggctccggcggccgccctcctagtgcaaacctaacattacagctcaagagcccaacatatggcagatgctcctacaagtatgagtttactctttttcttgtcaaccgtcaaaagccaaccatcaaacatattagatatggttctagaaagatcagcatgagcttgagcatggatgatgtgacgatgatcagtccgcggtga

SEQ ID NO: 73616 - DNA, 260 bp, Oryza sativa
  Clone ID: PAT_MRT4530_73881C.1
atggatgaagtcgttatgatgaatatctctgaggcaaatgtaggctacacgggctgcggttcggcagtcgagatatgtaggcaaatgaaggctacacgggccggtgtccgggctcaatcctggcctgcctgtcccgggataccggtcgtaggcagggttgggtcggtgcttttgttcacggctaggatgggtgaagggttatgtcacgttttttatgatgggttccacttgcaagggaatgcagagtaaaggcgtgtctt

SEQ ID NO: 73617 - DNA, 4637 bp, Oryza sativa
  Clone ID: PAT_MRT4530_73882C.1
atggccacgccgagcagctcgtcaccgccggtgccgcccatccggtcggtgaacctcggcggctggctcgtgaccgagggctggatcctgccgtccctcttcgacgacattccaaacaacgacttcctcgatggaacaaagctccagttcaagtcggtggtccacaacacgtacctctgcgccgaacatggcggcggcgacatcgtcgtcgccgaccggacggccgcatcgggatgggagaccttcaagctgtggagggtcgacgagaacacgttcaacctcaaggcgatcgacgacagcgccgtgcacttcgtgggcgtcgacggcaatggcgtggtcgtcgcgacggcggccactccggggccgtcagagacgttcgtgatcgtgcgcagcgaccgtgacaatagcaggatccgcatcagggcgtcaaatgggaaattcctgcaggcgaagaccacggtttcagtgacggcagaccatggtgagggtacaagctggggtgatgatgatccttcagtatttgccataaaccggggggagaaacttcaaggagagtatcaactatgcaacggctatggcatgaagaaggccacggaagtactcagggaacactggagcacatacatacttgagaacgacttcaagtttatctcatcaaatggattaaatgctgtaagaatccctgttggatggtggatcgccagtgacccaaaccctcctgcaccctttgttggcggatctctagaagcattggataatgcatttcgatgggcagagaagtacaatttaggtgtcattgtggacttgcatgctgcacctggatcgcagaatccatgggaacacagtggtagtagagatggttcacagacatggggcaccaccgatgaaaccatcatccaaactgttcaagtgattgatttccttgcatccaggtctgccaaaggccccagtctcctggcagttgaactactaaacgaaccgttggcaccaaaagtatcagctggaatgctaaagaaatactaccaagatgcgtacaatgctgtgcgaaaatatacatcagatgcatatgtgatcatgtcgaatccaattaatgcagactactcgaatgagattctccagtttgccggtggcttctttggtgctgtgtttgatgtgcactactataacatgttcaatggatcgtttgacaacacaacagcggagtggaatatacagtttgtgagaaatgatcgttctgctgagctcaggagtgtcacaaagcagaacgggcctctcacatatgtaggggaatgggtggctgagtggaaagtgaataatgcatccgaggaagattacaagaggtttgcgcaagcacaattggatgtgtacagccaagctacctttggatgggcctattggagcttcaagcatgtccagaaccattggagcttggagtggatgatcaagaatggttacatctcactaaatcagcctaagttacccatccgagcagtgaaccttggcggctggctcgtgacggagggctggattaagccatcactctttgatggcatttccaacaaagatctcctggatggcacccagctccaattcaaatcggtcaccaacaatatgtaccttgccgctgagaacggaggtggcagtgctattgttgccaaccgggagaaagcgtctggttgggagaccttcaaactgtggaggatcaacgagactacattcaatctcagggttttcaacaaccagtttgtgagcattggtggcaatggggcagttattgcaacagcaaccgtgccggggccgaatgaaacatttcagatcattcgccttgacagcgacaaaagcaggatgcgcataagggcacccaatgggaaattcttgcaggtgaaggccatgggttcagtcactgcagatcatggtgctagcacaaattggggaaatgatgacccatcagtctttgtagtaaataatatttatggcttgcaaggggaataccagatttgcaatggctacagtgcaggcaatgccacagaggtgctcagggagcactggaacacatttatagttgaggatgacttcaaattcatctcatcaaatgggctaaatgcagtgaggatcccagttggatggtggatcgccagcgaccccaaccctcctgcaccttttgttggtggatctctacaagccttggataacgcattcaaatgggcagagaagtacaacataggtatcattgtggacttgcatgcagcaccagggtctcagaatcggttggatcacagtgcctccagggatggctcattggagtggggcacctctgctgcaaacatcgcacaaactgtgggtgtcatagatttccttgcatccagatatgccaaaagttcaagcctcctagcaatagaattactcaacgaaccactggcaccagatgtacctgtggatacattaacaaaatactatcaagacgcatacaatgctgtaagaaaatacactttgcaagcctatgtaatcctgtcaactcgaatgtcaggggatccaacggagtttctctcagtagccagcagtctctttggtgcggttatcgatgtgcattactataacctgtataacagcatgtttgataactacactgtggagcagaacatcaattttgtaaggaataaccgttcatcagatatcaacacggtcacaaagcagaacgttcctctaacatttgtcggagaatgggtggccgagtggtacgtggataatgcatccaaggaagactaccaaaattttgcgcaagcgcagctagacctgtatgggaaagctacttttggatggtcctattggacattcaagaacgtcaagaaccactggagcatggagtggatgatcaagaatgggtacatctccctcaataatctgcctccatcatcaccacccatccggtcggtgaaccttggcggctggcttgtgacagagggctggattctaccgtcactatttgacggtatacccacgcgtccgctcctggacggtaccactctccatatcaagtctgtgatccaggacaagtaccttgcagccgaacagggcggcggccaaaccattgttgccaaccgagtagtggcctctgattgggagagcttcacactgtggagggtagacgagacaacattcaatctcagggtgttcaaaaagcaattcatgggcattgacagcaatggaacagtcatcgcaacagcgactacgcctggtctgtcagaaacattccagatcgtgcgcagtgacaccgataagaatagggtgcgcatcagggcaccaaatgggagcttccttcaggcaaagactgccaattctgttacagcagattatggtgaaagcacaaactggggcaatgatgatccctcagtgtttatcgtagatatggtaggtggtccacaaggggagtatcagatttgtaatggctatggtgcagagaaggcctcgcaggtgcttagggaacattggagcacatacatagttgagagtgacttcgaattcatctcatcaagcgggctaaatgcagtgagaatcccagttggatggtggatcgccagtgaccccaatcctcctgctccatttgttggaggatccctccaagccttggataacgcatttaaatgggcagagaattacaatattggtgtcattgtggacttgcatgccgctcctgggtcacaaaaccattgggagcatagcgccacaagggatggatcactagaatggggcaccactgatacaagcatcacccaaacagtgcaaatcattgatttcctcgcttccagatatgccaatagcccgagtctgctggcaattgagctactcaacgagccatggggaccggatgtacccctagaaaagcttaagaaatattatgaggatgcatacaacgtcgtgaggaaatacaccgcgaaggcctacgtgatcatgtcaaaccggctggcaggggagtccaacactgagcttcttgatttcgccagtaggttcccgggcgtagtcatcgacgtgcactactacaacctgttcaatgacgacacattcaaaaatttaaacgtagagcaaaacattgaatttgtgaagaacagccgcaaggctgagttcagcaacatcacgaagcaaaagagccctctcacgtttgttggagaatgggcggcagagtggaaggtaaacggggcatccaaagaggagtaccaaaggtttgcgcaagcacagcttgatgtatatggaagagctaccttcggatgggcttactggaacttcaagaacgtcaataaccattggagcttggaatggatgatcaagaacgggtatatctcactgaaaatatagaaatagtgccataattctgtctggtgggtgaatacacattacacctaatgcaaaggccagaagcccagaactgtaataatgattttccattatctaaaacgaagtatcaatcgggttaacacgaactagaataagtctgtaaatcttgtttaattacggccaataaatcagttctgttagccaggtggaagcatgcatccagatgcatgcttgtattataagacttatattgtgtattgtaacattcacatatttgaatatgtatgatctttgcttttatttggccc

SEQ ID NO: 73618 - DNA, 859 bp, Oryza sativa
  Clone ID: PAT_MRT4530_73883C.1
ccccctcccaccgctggccgcctcccccgcccgacgccgcctctccccctccctcccaccgccgccggctctcccctctaccttccagcggtggcgcttcccctcccctcccctctcccatccggaggcgccgctccctctcccccaatccctcccgtctcgccggcacggcgcggagaaggcgggcgcggcggagacggcggcgacagccgtcccttcccctctccctctacctatcgacctcgacggccgtccatccctctcggcgatggcgccctctccaccctcaagatccggcggcgccgtcccaacggcggcgtcgacagcgatgacggtgtcggtggcatccgcgggtggatccgtcggccgtggtggcaaccgcgggcggatctggcagcggcggctccctccaccgcctcttttctcaatccctccggtggcggtggtggcgtcggcgacggccgcggatggatctggcggcggtggcgacgaccaaggggatctgacgagcgccccgtggacggatccggtggtggcgacggcgttggtggcttcccgatctagggcttccggtgccaagaactactccccactcggcggcggcctcctcatctcgggcatgcagcgagagctgcgcagggacggctggatcgggctggcggtcttctcctccgggcggatctggggtgtcgccggtcatccagctccggcggcctgcctcaccgcgtccggcgctggccctcccatcccgggggattccgaggtgaaagtcgtgctctgcttgctggtgctagcaattgcgacgccctcgggtgtcgttcaccttcttgaagacattgctattggagcccttgtttaa

SEQ ID NO: 73619 - DNA, 1985 bp, Oryza sativa
  Clone ID: PAT_MRT4530_73884C.1
tttttttttttttttgttactatcaaatatcaatatattagctgagaattcaatgtattacattacatgttacatgaaggaaagtccaaagccatttcctattgaacaacacgcagtgcaactgactgtattccaattgtaagatacaaacagaggaatctccacccttacccatttcccacggtattcatacgatccagaagacatacaaaagttgaactatatggcaccttgccttgttctatgtaatcaatatgacgggacggggtatgacttcctatgagaaacctatctgcttcaaaaacaatgcacacacagggaaagagtcatcatgcatgcttattgattgtcaccagggagagaaatgtcaatttatatggaataaataacaacaacattgtgtgcagaccgttccatttgtcaagccttggacgtcttctgatttggcttgaaaacataccttaccagagaatccttgattgacaaaagttctggaaattccgccttcagcttggtacaatcaagctcattattgcttctcggtgcaactatgaccttggcttgctcctccagggtaaagttcttccaagaaaaattcggatcaatgtaatccctatacatttccaatatttcattgtggctcaccacgccaggattagtgaaattccagatcccagtgaggtttctctttgccatttcgattgagataggaagaagctcatccaatattgtcattgaatttggtatatcaaccactttatcataccgggcgattttagtgatgaagttgcgaggattggatagatcggatgaaataggcatccttacacgaagtgtacatacattctcgtagttttttagcagttcctcaaccatggccttggttttggagtagaatgatccgacgaagttgggcgtgtcctcctccttgaacccgatccctgtgccgagctggtggccggcgtcgtactcgaagatgcagcccgtggcgtagttgatgagcacgaggccgcgggcgcggcagacgtcggcgagcgtaagcgtgccgcagacgttggcgcggatggtctcggtgcggtgggtctcgcaccagtcgacgttggggcggccggtgacccccgcggcattgaacacgtgggtgggcgcgacctcgtcgatgtcggtctcgagctgggcgcggttctcgaggcgcccggcgccgtaggcgaaggggatgcccgggacaaaaacagtatgatacttttatcactataagtatatgtcaaacttaagtgatggtcagcaacattagtgaacagtgatacagaactaatatatatgaatttagatacaaaaacctaggcgatgaagataaatactacccttagcctgacagaacaatgtcctcaacaaaatacagaaggcctcaggttgcatcacactttgatgttccacttgtgtgctgaccgtggaccacgagtgatcccctcataatattgggatggaagctttcctttgttccaagttttcacaaacttctcgaacagatcacgagcagactccgaagaaagatcagagaaaaatttgcctttttcttccttcaaccaggttgcgaactcattgttctttgcgaaatagtcatctttggatatttctttgaaatcatcatccttgtgctttcgcttgctcttctccttctccttggaatgcttctcctttgaatccctctctttgtctttgcccctgtcgccatgcttcttcttcttcctcctgcgcctctcctcctcctcctcctcctcggcttgttcgtctcggctgctcctcctgctctccttcttgtccctcctcttcttccgctccctctcctcctcctcccctgacgagggtgacgagcgccgcttcctcgacttgccctcgccgcccatcgtcgccgccgccgccgccggggagaagaatcgaagagggggttagctcaggtgaggtctcgggacgggtttcccggccgg

SEQ ID NO: 73620 - DNA, 444 bp, Oryza sativa
  Clone ID: PAT_MRT4530_73885C.1
atggaggagtggatcaaggcggtcacacaggtgctgttgatgaaatcatgcattaggacccatcaaggtgtggttctcaagcctggtcctcttcccaaatacgtctttgatgataagatgcatattttagtgcttattttgacaaaaatatgccgattccaaaggaaccagttatacaaaaagcttagccaatggtcagaccgcgcatcacgccggtcagactgcactctttgccggtcagaccgcgcccgccatagccggtcagaccgtgccctatctccgcaagatagtgcctcctatggccggtataaccgcatcattgaccaccagtcagaccgggccattggccggtcagaccaggtgcttggccggtcagactgggttatgcatagccggtcagaccagcaccctggaacctcttccagagttttgtcccatgactaa

SEQ ID NO: 73621 - DNA, 465 bp, Oryza sativa
  Clone ID: PAT_MRT4530_73886C.1
atgccgccggcgacgacgagcagggcggccggcgtgaagtctcgtcgaggagttgcttcgccaccgcaagcccgtcgccgcctcccggagccgctcgctgcctccttgcacgcgcccgccggaccgccgggcgccgccgccaactccgagcgcgcacccgccgcagccgcgccccctaccccgccacctcctcgcgcgtgcccgacgctcgccctaccccgccgctgccgcctcctcgcggccgccggtgagtcaggttcgccgtcggctggcgccttctccaccaccgccgccgcctcctcgcgcgtggcctctggagttttgggatcgccgtcggccggctcctcctcgcgtgcgcccgccggggagctgtggtgggttacggcactacgcagtacagactccagggagacgcatattacatatgtatccctcttctctggatcaaagagtgcagagttttag

SEQ ID NO: 73622 - DNA, 142 bp, Oryza sativa
  Clone ID: PAT_MRT4530_73887C.1
ggaaaaaacattatttccaattaaataagggtccagtttttggggtttgatcgattaccggcagtacggttttacatgaaataaacttgatcaagcccgcacactttggacccttgggcggacccttgggcggacccttggg

SEQ ID NO: 73623 - DNA, 392 bp, Oryza sativa
  Clone ID: PAT_MRT4530_73888C.1
ggcggcgtgcgcgtctccccggatgtagctgcgccttccatcacgactgcgtccaccggtggcacaccatctcgccgcgctgcctcgtctgcaacgggtgggttatgccgccgttgccaccgcccgccaagcctgctctggattcttgagatggcagcgttgccgccctaccgatcatggctcagttcttggttcttgacgagttcttgatgaattctcggcgattgtcatcgtcggtttctaggctctggacagcggttcttgccaatttcttgttggctatcttgttctcttaagtatgctgccttttagaacttgtgctttctggtcatggacttctataagatgattgatttgtatggacaggtgagttgttctataaatctgacata

SEQ ID NO: 73624 - DNA, 2319 bp, Oryza sativa
  Clone ID: PAT_MRT4530_73889C.1
tttttttttttttggtgcaatttcagattcgttatgaaacaaagatggcatatatagcatcatatacaaaattttctttcgaatttctcctcaaattgcactccatgagcaaatgggaggctcataacatacaaaaattgatgcttaagctctgaccaaaaaaaaaagcatcataattggtcccgctgctctaatgacgccgtagagaagatgaagttgtgtggtgagtgcagttttgctttcagatagctacaatgttcaaaactatttgatcttgagcatcacgctgtcgtgcaacatttccaagagcatagcacttactcaagaatatagcctgtgtttggaaactcctgtaaccacttcaccaaaaagaaatttcaatatcttcagctatctacttttaagataacagagatcttgtagccagcctactttgcgacaacattctgctcctctaaacctccagttgccttggcatgggcaacagagctaccaccatctgaactcccattgcactttggcttagcttcagccatatcatctttccttgttggtttggaagaaacactaccattagccttatgtgcacgagcacttacaccagatgaagaggcagatgattcttgtggaaaaaatggtttagcatcagcatgttttacgcccaacttctgagctgggggtggattgcctgatccaggaggaaggaatacccctgtaccctgaagaggtaaacgaggtgaagcgggcctgggagcagcttctgcgatccatgcggctgtactgtttggcaatgtgacagctgatgcaaatggaacagcttttggagtgataggaagtggtgcaacgaaaactgtctggatgccattggatggaatatggtgaagtccaggggttgaaactgcaggtactctattgctagggttgtagacaagctgtttaggacttgagggatgaattgctatgttccctggcctcaatggtgcagcccaaggcatcggaggaggtgtcaatgggggagtgataagcaagctgctttccgactgaacgtgcttccttgacacagacttcccaaaacttagtaagatacgctgcttacttgtagcagggagtgcccgttttgctatatcagcgctctttccctcaaaaactagaacagaccctgtagagagtgagagtttcagtggacctgcatgatcgcctcggctatctgctgcaataacatggccaaataccatgtcgcagtcagtcaggcagagtgtacaaatgggtctaccataccaaggaggatgatgatgagggtgagaataatctccctcattgaagatatcgataacacagtaatctggactggaagggacaactttctgatgaaccaagctatcaaacagattttgaagcacaccaggaataggatccacctttacctctcttaaatgttcatcttcaggagggccttctgtgatgggaagaccaagctgaataatttctcttccatgacccttcattggccttttggcaactacaactgtttgcccttccagtcctggtttacgccgcatagtcttagcttcattcacaaaagaaagaacctttcctatctcagttagatctacataccctttatacaacttaagcccctctagaacattcaccatcctgccatcaattacttcattaaccacaaagcaagttgggactggaaccacattactgattacatgaagtcctttctgaggttgggcttctgtagcatgtgaaatatgagaaaccaactgagaattctgagttgcttcagccgatgtctccacttccttcacacctccactggcaatcgcagcatcatctccctcggcaccggcgctaccgctcggggggcgcggcggcggaggaggaggcggcggcccctggcgcgcggcggcgtggtgaagcgcgagggcgacctcggtgacggggaagtaatgctggaggtggaggacgggggcccagtggtgccgcctgcgctggacggcggcggcaacggcgtcgaacccggcgggatcggcggcgtcgcgggcgtgggcgaggaggaggtcgatgatggcgttggccgccgcgaactcgccgcgcagccacgcgacgaggccgtcccggccgtccaccaccaccgcctgctgctgctgctgcggctgcggctgcggcggcggcggcaccacccaccccggccccggcgcggccatcgtcggcgggctcagagcatggcggggcaatctgctgctagggtttcgccaattctgatggaatgccggatgcgatggatctcaccttgcttctcgcctcgtg

SEQ ID NO: 73625 - DNA, 725 bp, Oryza sativa
  Clone ID: PAT_MRT4530_7388C.1
ggcaaaataatggtctgtgccccttatgtcgggagacgaacgagacggcatcggaggagtgggaggtttccatggctgggagctcttgcctgtttgatgaaatgccgcgcagggcaatgctgctgcctgctggacctgctacattaccactccctgacgcaagctgcagaccaaagatacaatgcgaacaacctggcaggaaacctcatgacaaaacagatttatgatgcgttgctaactgggggcgaaacctctccaaactggaccttcatttggaaaagcaaagccccgatgaaagttcaaatcttcgcgtggtttcttagcagagagcggttatcaacaaaacaaaatatcttcaagaagaacattgtcagctcggcggttttcgccatttgtgaaagctcggctgaaacggctagtcatctgtgcatacaatgtccttttgcaacaaccttctggaacaagatagggctccatcctacgatataagatgtgaagatgctgcacctattgaagccggggcaagggctgcccagaaaacattttcagctgttctatctcctatgcttctgggcttcagaaatcaaactccatcgctcagcagatgcctaaggaagtgtgtggacgaagccggcctatgggctgaaagactgaagagttccgatagacctgtagtttcgacttggaaagaactcttctgtacccctctacaaactctcagtact

SEQ ID NO: 73626 - DNA, 419 bp, Oryza sativa
  Clone ID: PAT_MRT4530_73890C.1
ctgtgctgctgacgctgcccttgattttttttcttcaatcatatcatacatagtagggcgtgattttataaaaatcactggtacatggcttgtgggtgcatttggccgagtgatacagagatccagctgatataatgacactgtatacaaaggtgagggcttctcatcagtcctgaattaggatctgctgttggaccggtcatgacaacagagtacaatttactgtgtacacaagagctagttagctaaatcggtgttgctgtccccgaccacttggatcacgcagagtagcttcaatcccatctgcggcggatcagcgaaaacgaatgatcgcgcatctgggaaaatgaatggatggttatctagtgtaaacctatactaatgtacatggctatagagtgttcgtctcaagttaattg

SEQ ID NO: 73627 - DNA, 245 bp, Oryza sativa
  Clone ID: PAT_MRT4530_73891C.1
ggtttggttgctgggcggtgaacgcacagtcaactgtgagactcatcagaagacgaccgtggtgagagaagatcgaaacacacagtctattctcacgatgattgccatgatacacacgacactgctagcagagtcggaatgcacaactcttattcaaaggacggcatgcacagcgtagacactataaatggcgtatgcgactgcatagggtcctaagaagtatctggctgaaatcgatgatgatt

SEQ ID NO: 73628 - DNA, 1413 bp, Oryza sativa
  Clone ID: PAT_MRT4530_73892C.1
atggcgaccaacctccaccttctcctcgagctaggattccgcttcaacccctcaccggaggaggtcgtcacctactacctcccacgcctcattgccggccacccgcccaaggacaccgagtcctgcatccaccgagccaatgtctacggcgccgagcccagggagctcgcagcccagttcgcgcccgtggcgaggagctccaatggcgaccggttcttcttaaccgagtgcaagcggatcaaggggaaggtctctcgcgtcgcaggcggtggcagctgggtctctcagaccagcaaggatatcaagaacagggaggggatcaaggtcggggaagccaagaatttccgcttcaagaaagatggcacgaacacggattggttgatggaggagtaccacctctgcctccgacaagccagcgatctcgagcccgtcctctgccgggtgtacgtctctcccagggcggccaaagattcggcggcgcaccaagaatccgccgctctcacgccccaagaacctgcgccgccgctggctcatgctcccgcaccggctccgattcaagaaccagccgctctgcctcgtcaagaactcgcgcctgcgccaccacgtctcgaggccgtgatcacgcagcagcaagcgaccatgaagatgggaggttctgtcccggcaagcaaggcgacgcgccagagttgcgtgacggcgtccgcgccaccaccgcgacgtgtggctccgcaaccggcacctccgtcactgcgtactgcaccggcggctgttgcgccgccacggcaagtgcccgtgatcacgcagcagcaggcgcctcccctgaagaggcccgccccgccggtcccctcgccgccgtgcgccaagaagatcagaggacctgtctcggcaagcccggcggcgcgccagagctgcgtggcggcatccgcgccgccgccatggtgtgtgcctccgcctccgcgaccggcaccaccgtcaaggcgcgtcatggcgccactgccgccttatccgatggatccgttcgagacaccaccgtcgcctcatgcacccaggcatgatccgttcgagccaccaccgtcgcctgatccacccatccagagctatgcgatcgatccacccatccagagctatgcgatggatccattcgagcaaccgccgtcgccatacgcaccacatggcgttgatgacatggacgagtttacgagatcgctggaagctcagctagaagaagccgatggtgatgaaattgctgcagcgactgttgctcctcccatggcacaaaacgttgcgcccgatgacgacatggacgagtttacgagatcgctggaagctcagctggaagaagcagatggtgatgacaagattgatgatgatgagattgacgaggaaattttccaaattccgctgaaggactaa

SEQ ID NO: 73629 - DNA, 663 bp, Oryza sativa
  Clone ID: PAT_MRT4530_73893C.1
atgacgaagacgaggatgatgggttccttggatcaggagctcggcttctcgagtgatgatcgcgtcctcgatctcgactcgggtgaggagattgggagttttgatctcgtcggttgtcaccgtccctctcctgtcttcggcgattattctcctgatcttgattgttgtcgttatcgtgtcgatcattatggggccgacgatctcgatctttgttgggggtattccctcggctgtcgtctctttctcgccacgagggagagcgatgacggtgttgtcggtgcggagtacagtcctcgcgatgagaaggggagtgatggtgatgacggtcgttctcgtttcgatctctcctattcagccggcgtccgtttagatgtttgcgaagatcgccatcttcacggcgcggcggtgctgctcttcgtccctgcgcggctctgggccgcctgctgcttcggcaaatgcggcattgaggacaccaagttctcggttttagggcagttatccttgtcggctttgatctttcacatggaaggtgaaattcagcctcctgagggttcctccctggtgttagggccgtcgatgttccgttctccacctgagtgggaggaattgtcggcggggcgtcgtttctctcagtcgttgtcgtacctctctcactcccgatga

SEQ ID NO: 73630 - DNA, 300 bp, Oryza sativa
  Clone ID: PAT_MRT4530_73894C.1
aaaaaccaaaaacggacgggtagaattattttcccatcacatccaatccaaaaacttaaaaagccctataagttcaggcaacaaaaaacggggatggggtgacagcaaaattataagggggactcaggaggcagccaaatgacaaccctgaaacaaaactcaaaattttaacgcgaaccaccccccaagaggggatcgattataggcgccaagccttaaaacccagaaatccaagggggagggggggccccccactgagctaaaccttggggggaccagaaagggataccctttttcccg

SEQ ID NO: 73631 - DNA, 243 bp, Oryza sativa
  Clone ID: PAT_MRT4530_73895C.1
atgatgcgctgggttgagggttctgaggaagattctgcagtttgtgagatcatgagctttaaatctgtggatcggacagacaccaagttctcggttttagggtggttatccttgtcggctttgatctttcacatggaaggtgaaattcagccgcctgagggttcctccctggtgttgggactgtcgatgttccgttctccacctgagtgggaggaattgtcggcggggcatcgtttctcttag

SEQ ID NO: 73632 - DNA, 271 bp, Oryza sativa
  unsure (1)..(271): unsure at all n locations
  Clone ID: PAT_MRT4530_73896C.1
tattcggccgatntgccctgacctgtccgcctacagcagaagccgggcccgtagaaccagactacagantanatatggctttggttagaggagtttctagttgattcagctataagaagttgtagttgtagaataaaaaaataaactagcagccagctactactcagaatcttaagctcccaaacaagaccctatgtacgtttggaggagtttctgtagcttctccnngaatcaaaaactctcccaaacgaaaaangnnnnnnnttaaaaa

SEQ ID NO: 73633 - DNA, 1129 bp, Oryza sativa
  Clone ID: PAT_MRT4530_73897C.1
acaagatccatggatatcctggagcatccgtagccctccaaaaggtggaacacagatggctcatttgccccgacgaaccccacaaaccgatctagaaccggtgccgcatctggttccttggcaacgcacggggtatgaactcatggttgttggacacgatgatgcgctgggttgagggttctgaggaagattctgcagtttgtgagatcatgagctttaaatctgtggatcggacagtaagtagttcccgttggtgaagtgcgctggattcctcgttcccaacaggcgtagagttcagcttgcacgtggagtatcaccgggtagtcctcgagagtgtgcttggttgtcttatgcacaggacaccaagttctcggttttagggtggttatccttgtcggctttgatctttcacatggaaggtgaaattcagccgcctgagggttcctccctggtgttgggactgtcgatgttccgttctccacctgagtgggaggaattgtcggcggggcatcgtttctcttagccgtcgctgtacctctctcgttcccgataatgattgggccagccgagattggtgtaatggtgtagaccggaaagataatagatccgacttgagtccacaccagcggtgtcgaggtagaaactccttgattgacgctggcgatgggactgttgttgggaagtcctgaagtcatactggtagatccttgagcaccaagtccccctacctggcgcgccactgtcggcgagggatactcgcggaccggatgagttgagtattggggtacgttggaacgaggatgagatcgttgtcgatgtattcgacgagatctcccggcgacttggctccgcgtacttcggcttcgtaaactatggtgggtgtgttgacgatgagattcaatgccctgtacccctccctaggggtctcttttatatcgtggatcatcttgatccccaagtagacttctgagtaggattttggaaatcacctatctcgtggagatattttccataatttataacaaattccaacggcgtatacgaaaacgatccgtatacgtgaaggtataccatatctgtgtattccataagtcgtagagtatgaggtatgtcttatccgtaaccctga

SEQ ID NO: 73634 - DNA, 1845 bp, Oryza sativa
  Clone ID: PAT_MRT4530_73898C.1
atgacttcaggacttcccgacaacagtcccatcgccagcatcgatcaaggagcttttacctcgacaccgctggtgtggactcaggtcggatctattgtctttccagtctataccgttacaccaatctcgactggcccaatcatcatcgggagtgagagaggtacgacaacgactgagagaaacgacgccccgccgacaattcctcccactcaggtggagaacggaacatcgacggccctaacaccagggaggaaccctcaggaggctgaatttcaccttccatgtgaaagatcaaagccgacaaggataactgccctaaaaccgagaacttggtgtcctatgcataagacaaccaagcacgctctcgaggactgtccggaaccagatgcggcaccggttccagatcggtttgtgggatttgtcggtgcaaacgagccatccgtgttacacctcttggaaggctatgaatcctcttcgcagtcacccagagatgtgaacgtggtcgacaataatgagacaagcgcgtccgcagctgcgagaacaccggctcaccaattgcggaacctggatgagatattgagggagagtccttttgatccagcaacaaacccaggcgccagccaatgggcagagcgactacgggagactgtgacgaacctcaatgccgcatttgccgaagcagcaggcggcccagagccgcgcagggacgaagagcagcctaccgaggacgcggatggcgaagacctcgtcggaagacgtacctccggagaccgttcacctcgaagaagacgagatcctacaccgccgcgccgtgaagatggcgatcttcgcaaacatctaaacggacgccggctgaataggagagatcgaaacgagaacgaccgtcatcaccatcactccccttctcatcgcgaggactgtactccgcaccgacaacaccgtcatcgctctccctcgtggcgagaaagagacgacagccgagggaatacccccaacaaagatcgagatcgtcggccccataatgatcgacacgataacgacaacaatcaagatcaggagaataatcgccgaagacaggagagggacggtgacaaccgacgagatcaaaactcccaatctcctcacccgagtcgagatcgaggacgcgatcatcactcgagaagccgagctcctgatccaaggaacccatcatcctcgtcttcgtcatcctcttcggatcggcctccacgacgacgtcgcgaccacgggccacaccctaacccaggcaacggacgcaaggcattcacgcccacatttcgcaacgtgcgatggcccgagaagttccaaccagaatcgattgagaaatatgatggaagcatagacccagaagaatttctgcaaatgacaaacgccctggctaattatttgccagccgcgttgaaaggttccgctcgttcatggttcgtccatctcccgctgaactcaatctcttcgtgggaagatttgtggcagcagttcgtcaccaacttccaagggacatacaagtgctacgcgatcgaagacgacctgcacactctaactcagaacccaggcgagtcattgagggactatattcgacgctttaatgagtgcggaaatatgatccccgagatcaccgatgcttctgttatccgagcattcaaatcaggcgtccgagatcggtacaccacccaggagctagcgacacgccgaatcacatctgcccgaaagctgttcgagatcatcgataggtgcgcccatgcagatgatgcactgaggcgcaaggaaggaaaaagcaaggtgggagatgagaagaagatgtcgaccgacaaggatgcaccagagtag

SEQ ID NO: 73635 - DNA, 296 bp, Oryza sativa
  Clone ID: PAT_MRT4530_73899C.1
gcacgagggttccactgcagcttggggattcttgaccaaggtagagagtactggagctgaggctggcacttttggtgaattcttccatgacaactccaatttatgcctagtcgaatgtcgaccaagctcgactctgtaacgcgaaggcgacaatgatcttgtgtagagggttctgacgatcgacaaccaaattgtattcgagttgctgatcctgattatgcatgaaagttgcaccatcaacattgtaaggttcaacctgttcttttgttctgctctgattccttctctgttactgt

SEQ ID NO: 73636 - DNA, 364 bp, Oryza sativa
  Clone ID: PAT_MRT4530_7389C.1
ggatcctatagagcggacgcgctttcttgtttttcttttatagcttaaccatgcctcttttcatatgaacacaacctattaggcaacatcaccacactttcttaacgttcaacagaccaactaaacacagcaggcaaaattgacagcatcttacacctagatatccaagtggggctccttagcatcctgcagatccatgctcatttgtttgatattgatatggggactatggggaggttgcacgacctacccaaactctacatgcaaacgctggctgataacagcagagggaatgggaaccacaacacctcgtcaagagtacatagtcatcgtctgaaaactaaaacagctggacctttatatc

SEQ ID NO: 73637 - DNA, 897 bp, Oryza sativa
  Clone ID: PAT_MRT4530_738C.1
atggagtggacggcggcagagctggcggaggcaaggtcggtcatcgctagggtcagcgacgcctacaactccggcgtaggcagcagcagcagcgcctgcgacaccaagcacgaccgcattatgagggagctccaggcgaggttcccgtcgaggaccatggtccaggtaatcgatctgtacgttaatctcacggtggagacggcggcgcagccgcaggacgccggcagcgccggcgacgccgccgccgtcgtccaccctacttttgccggcggcatgcccgttgtgaacaacaacgacggcatggtgcatggtggtgctgctatggaggtgggggcggtggcggtgaacggcggggacggtgaggtggtgaacccggacaatgctgatgacgatgtgctttggactgattatgagcacaggctgtttctgactgggatgcgtgtgtacgggcgtggcgactggagaaacatctcgaggtacttcgtcagaagcaagacgccggagcagatctccatgtacgccgacaactacttccacatgatggagatcgccgcggccatggaagccgacggcggcgacgacgacgacggccaccatgaaatcaataacaacaacaacaacttgggcggcggccagctgcacgccgtcgtcggcgccgtcgggcacggccccggtgccgggcacattgctccggcgaccccctccaacaacaacaccgccgccgccgccgtgaacaacaacgtcgacacaccgttctgggttccgctgctgtacaaccccgagatagagcagcggatgatggagatgcaggcgcagtcgcagaaggcctgggatgatcagcagatgaagatggctgaagctgcaactccaaaggaggagggagcagctgataagtga

SEQ ID NO: 73638 - DNA, 2724 bp, Oryza sativa
  Clone ID: PAT_MRT4530_73900C.1
atggctgaggaaatacccccaacgaaaaccgagaccgttggccccataatgaccgacgcgacaacaacgatcgagatcaggagaataatcgccgacaacaggagagggacgaagttccggccgggatcgattgataaatatgatggaagtacagacccagaagaatttctgcaagtctactccatagttctctatgccgctggtgcagacgacaatgccctggctaattatttgccagtcgtgttgaaaggtttcgctcgtacatggttcgttcatctccctccaaactcaatctcttcgtgggaagatttgtggcagcagttcgtcgccaacttccaagggacaaacaagcgtcacgcgatcgaagacgacctgcacactctaagtcagaaccctggcgagtcattgagggactatattcggcgctttaatgagtgcaaaaatacgatccccgagatcactgatgcttctgttatccgagcattcaaatcaggcgaccgagatcggtacacaacccaggagctagcgacgcgccgaatcacatatgcccgaaagctgttcgagatcatcgataggtgcacccatgcagacgatgctctgaggcacaaggaaggaaaaagcaaggtgggagatgagaagaagaagtcgatcgacaagggtgcacaagagtcgagcaaaaagagaagtcgcaagagtgggaagcgcaagtcctcgggagaagtccttgccacagagcaagtggaatcgtccagacgctccaacccccagaacgaagactcgtgcaaggcatggttcccaatccacaagacatgcaatcatgccatggaggattgctatgtcatcaaaaaggagctcacgagacaactagcgatcgaaagaaggaagcgagtacgagtcgtcgaaactgcagaagaggccgccaccgacaaccctgactccacctttctagaatacgacctacatgtctcccacatcttcggcggatccatgtcgtacacctctaagagggagtacaagaaagcggaacacgaaatcacctttgatgtcgcagagttcgacaccgcatacaatgctatcattgggagaactgcactcgcaaagttcatggcggcatcgcattacgcatacgaagtgctaaaaatgccaggaccaaaagggacaatcactatccaggggaacgccaagttggcggtacagtgcgacaaacggagccttgacatggtcgagcatactcccaacccgcccgccacaaccgagaaccccaagaaagaactcgcgctcatcaccttcctccgagacaatgcaaacgtgtttgcttggcaaccgtcagacatgccgggagtacccagggaggtgattgagcacaaactcatggtgcgacccgatgccaagccagttaagcagaaactgcggagatttgcgcccgaccgaaaacaagccatacgagaagagctcgacaaacttctcaaagctggcttcataagagaagtcctctatccagagtggctcgcaaatccagtaatggtacgcaaagccaacgggaagtggaggatgtgcgtcgaattcaccgatctcaacaaggagttccccaaagaccacttctctcctcctggaatagaccaattgttggattcaacgaccaagaagagcgactcactaatcgattatctcagggaaacgctcgacaacctccgaagataccaaatgaagctcaacccggagaagtgtacgttcggagtaccgtcaggaaagcttctcagtttcttggtttcaggacgaggagtcgaggcaaatcccgagaagatcaaggtgatcgagaacatgaagtcgcccacaaggctcaaggaggtccagctgctgacaggatgcatggcttcgctaagccgatttgtcgtgaggataggagaacgaggacaacctttcttcgccctgctcaagaagcaggataaattcgagtggaaccaagaagccgagaacgcatttattgcgctcaagcgctacttgccaaatccccctgtactcgctgctcctcacatgaatgaagaattattcctgtatatcgctgccacaccttattctgtgagtacggttatcgtcgtagagagggaaaaagtacaacatcccatgtactacgtaagcgaggccctccgcgacacaaaaatcagatacccaccgatccaaaaattgctctatgttgtagttatgacctcgagaaagctacgccactacttccaggctcacaaggtcaccgttatctcctcctctttgggtgaacttgtcaggaataaagacatggtcggccgaattgccaaatgggtagtcgagttaagccaattcgatgtccacttcgtgcctagaacaaccatcaagtcacaggtcctcgccgacttcgtagctgactggactatcccagaggatagaccagccacccatatggacaacaaaacctggacaatggcattctacggagcactgaacagccaaggagcaggagccggattcatcttgacattccccacaggggaccaattcaagcatgcaatccatctaaatttccgggcaacaaacaacatggccgagtacgaaggactactcgcagggataagaacaacagccgcactcggcatcaagcgactagtcgtgaagggagactccgagttggtcacaaaccaggtacacaaagactacaagtgctccagccccgagttagcgccaaatatctag

SEQ ID NO: 73639 - DNA, 457 bp, Oryza sativa
  Clone ID: PAT_MRT4530_73901C.1
gctttgatgagtttgcccttgcccaccgcttacgcctacgacgaaccccatccctcccgcgagcaggagcaggagcaggagcagggctagccgtcgctcctcctgctgcttccgccgaattcaatcctgaaaccagatgtgccgtcaccagccaagggctcggctctctaccgatgagcagcttgccagctgcaagaaagccttctgcatttatacttgctaagcccggtaccgagtttggcaataaataatcattttcaggcggccgaatccaattaaaaaatcgctggcttttatcttgcaaaggatgccctttcttttacaaaggatttcaacgcaaagaccggaaagaaagaggagccctgaaaaacccatattcacttttctgggagggaccaaaaataagaaactgcggggcaccaaaaatatcttttcctactttaagttcctggtagcc

SEQ ID NO: 73640 - DNA, 281 bp, Oryza sativa
  Clone ID: PAT_MRT4530_73902C.1
gtgctaaaacatcatggctggcctttcattttgataaacactgggcctcatcactcaccacgaccaaacctaactccttacatcttgagttcccttatattctgcaaaggaactcatattcttactgcctcacataaatccaaccactcatttattaattacctcaaccatgttgacaatggttatcaccatggatgctttccctaatattcctcacatatgtatactttccaccttgaactttcaacctgattttttctctttgaaaacatcattaatat

SEQ ID NO: 73641 - DNA, 246 bp, Oryza sativa
  Clone ID: PAT_MRT4530_73903C.1
atggcgagccaccatgctcattgccggagtgtgtgcaagtatgttgtgcgatgtatcatccacagtcggtaccccataggtaccaagtttgatacatgtggtattaccgctgatacccaggtattaaacctgatacctggtacctgtgaggtatcaagtatcatggctggctgcgaggtatcgcgtgtggaggcgcgtgagaccgaggaggatccgtgtaacgccccgattttcgttcaggattaa

SEQ ID NO: 73642 - DNA, 283 bp, Oryza sativa
  Clone ID: PAT_MRT4530_73904C.1
gaagtgttttgtcgagaagagagagcagagctgaggtcgctcatagtgagtagcgtgctgagctagctgacgggagcggcgatgtctaaggaggtgagcgaggagcccgagcacgtgctgcccagggactacaccgacccgacgtcggctcctttattcgaactcagagagctccggatgtgggcctttaccgggcactcattgctgagttaatgatcacgctatcagttttatacataaccgtgaacaccgtgagtgggtacaaggtgcactcgaacgtcgt

SEQ ID NO: 73643 - DNA, 1084 bp, Oryza sativa
  Clone ID: PAT_MRT4530_73905C.1
aggaaaagggatttattgcgtcagcggctaagggttttgcggtggaccgggcaacacggcaacgggttcacggggaaacgaaacggccaagatcgatccatccaaaacggacggccgagatcgatcgggtctaaggcggctcacgagagacgacgacgatgacgtcagcggtgacgtcacctccggcggcggctcggcgactcggcagctcgggcgcacacgctcgccggcgaacgacggcgcggcggcgcgaacggagggcacccacgggtagcggactgcacgacgaactcaccggcgaccaaagcaacggtggaaaatcaacggacggcgacggcgtcgaggaagaagcggcggcgaccttcggcttgacgacggcgacggtgctccggcggtcaacagcgacggcggaggggcggacgagaacggcggtgacttggcgaccacgatggcgacctccccgagcgacggcgacggctggagcgacggcgaagcacggctggaccgacggcgacgacggcggctcgaggttacacggcgctagggctcctaggtcgacggcgacgacgaaaaaggctgtcggagcggaggaaggcggcggcgcggctcgggtcgtcggggtcgacggcggtccggcggtccgcgggctcagcgaggggttggacggggtcgacggcagtgcggcgaagccggaggaggcgacgccggggcgggagacggtccggcgagcggagaaggccggccggaggtcgtaggcgacggaggagagagagagcgacggcgcgagctcgattccggcagggagacggtgcggcaagggcggaaacgggcgagggaggcgcggggagggacgggatgcggcggattcggcggcggcggcggcggcggcgcttggcgcgggcggagaggcgggagcggcgggaggaaggggatgacgggtgggccccacccgtcagcgagggtggtgggcgggcccgcccgtcagcggcgcgcgcgcaggaagaggctggatgggccgcgggggagaggagaaagggggagggagatgggccggattcggcccaagagagggaagagggatttt

SEQ ID NO: 73644 - DNA, 404 bp, Oryza sativa
  Clone ID: PAT_MRT4530_73906C.1
gcttaaaaaaatcatattagtccattttttttaaaaagaatagcagatacttaattaatcatgtgctaatggatcgctccgttttccgtaatcactgttgacaagaagaaagaacgcagccttactcccaatcctatgtacagtcttggcatgcagcagcacggtgacggcaaccaccgtgtgctcatggtcacgagggcttggagtcaccggcgcgttcggagctcatgcggagctccaccaacgaagcgtacacgccatccttcttcgccatcagctccacgtgcctccccgtggccacgacctcgccgtccctgaggacggcgatcacgtcggcgcccctgatcgtcgacagccggtgagccaccacgaccgtcgtccggccgaccatcaccgactccagc

SEQ ID NO: 73645 - DNA, 180 bp, Oryza sativa
  Clone ID: PAT_MRT4530_73907C.1
atggctgatgtctcgctcgctcgctcgctgctgctcgctgtgctgtgtgcggtgctctggtctgcattttcgatttttgaaacactagaccgacatatcctcgtcaatcatgaacgtctcactatcgatgattacgtcgcctgcaccgaaagaatatcacccatcttaagcctagaactt

SEQ ID NO: 73646 - DNA, 940 bp, Oryza sativa
  Clone ID: PAT_MRT4530_73908C.1
ctagtggatccccgggctgaggttccaaaatacccccgagccctaatcccctcttccccttcctcctcgctacggcggcggcggcgacggcgacggccggagccgacccgatcccacccgagtccttccctgtgcgcgcaccgctccttcctctacttcccgaccgccgcttcctcccctgttggtgtgggcgcgggcggctagaggaatcgaattgaagattacggaacaactctggagacatggcagaggggtccctagttgttgccatttgccagtatggtggagaggtcacttctggccccaatggcaatttgatctacaaaggaggagaagcacacgctgttgacgtcacacgagagatgtcactagataacttcaaggatgaggtgtccaaggtgtttcatgttgaggttgcagatgtgtcactgaaatactttctcccgaacaataacagaactcttatcacaatatcatgtgatcgagatttgcaacggatggtcgattttactgctagttctgcacaagtggatgtttttttgataagtagagtggagaacaggtatttccttttttacctttttgtgcagccttttggagtaacttttgcaagcctacagaaccttcgacaaagttatcttagaagtacagattcaagccgtaattttgcgataccatggcttaaacctatagttttcttataaattgagtgttaaatctatactttttttatactatatcttaaatttctagttttgcaaaatttactattttttgagtaaatcattcatgttctgttttgattagtatgtttctcttgctaggagtataactcagactggagcctccactgctaaacctgggtctaatgcacgaggtgataaaaggaaaacgccaacttccaaaaataaggcatcaaaaaacaaggagaagactccca

SEQ ID NO: 73647 - DNA, 2361 bp, Oryza sativa
  unsure (1)..(2361): unsure at all n locations
  Clone ID: PAT_MRT4530_73909C.1
tcccggcctnncgacccacgccgnntccgcttagtttatcnnnatagtagtncgggcccctagtgctcgtgtaggnnntcgggttttttttcacacgtttnctttcgtttgctattggcnnngatggaanngttgaagaaaccggtggcgnnngtggcgcccgattgggaggccgnngtgacggtnnggaggcgacnnaaggttgnngcgacggaccggcgccgccgccgcgatgacggacgtgcagatgagcgactccgagccgcaggcggcgcctcccgcggcgccggcggcctccgccctccaccatctgaaggagatcgcctcggtgatcgaggccggctcgctgtccaaggaggtgcgccggatctcccgcgccgtccgcctcaccgtcgccctccgccgccgcctcgccgcccgcgacgtctccgccttcctcgccttcgcgctcccgccttcctccgaggcctacacccgcctcacctccctcgtccccaaggaagatgacactgagatggacattgacatggcagctccagcaactcagatttcgatcaagcatggcctccctgagattgaaatatattgctatttgcttgtcctgatttttcttattgaccagaagaaatacgacgatgctaaagcatgtgcaaatgcaagcattgctcgtctgaaaaacttgaacaggagaactgttgatgttctggcatctagactgtacttctattactcatatgtgcatgaactcaccaacagccttgctgaaatccgtgggaatctgctagccttacacagaatggcaactcttcaccgcgatgaacttggccaggaaactttgctcaacctgcttcttcgcaattacctccattataatttgtatgatcaagcagagaaacttaggtcaaaagctcctcgttttgaagcccactccaatcaacaattctgtcgatacctgttctacttgggtaaaatcaggacaattcagttggagtacactgatgctaaggaaagccttctgcaagctgctcggaaggcacccattacagctcgtggctttcgtattcagtgcaacaaatgggctattatagtgagactacttctcggagagattccagagaggactgtgttcatgcagaagggaatgaaggaagcactgacaccctacttcgagcttacaaatgctgtcaggatcggtgatcttgaattgtttagggctgtcgccgacaaatttgtgagcacttttagtgctgacaggactcgcaatttgattgtgagattgcgccacaatgttattcgaaccggactgcgcaatattagcatttcatactcacggatctcccttgctgatattgccaagaagctaaggctcgactctgataatcctgttgctgatgcggagagcattgtagccaaggcaataagggatggcgcaattgatgccaccatagatcatgccaacggctggatggtgtcgaaagaaactggcgatgtctactcgacaaatgaaccacagattgcattcaactctcggattgcattttgcctcaacatgcacaatgaagctgtgaaagcaatgcggttccccccgaactctcacaaggaaaaggaaagtgcggagaagcgccgtgagaggctccaacaggaggaggagctggcaaaacacatggctgaggaagatgacgatgatttttagactggctggccacttctttggcactttgggctgccaaattgcaatgttgagttggttgatctgagagaccgtaacacacctatacatgccactcacaaatgatatttgagtcatgcaaaaaccctttgcttcatctgccggaaatttatgtcgatgagaaatttatgactccaaaaaaaaaaaaaaaaaaaaaaaaaatgtgtgttctcgtgaccagcttccnngcggcaacgnngcggcggcttttcgaaccgcggcnnccgnntggcgacgnnngcggtcggcgcccggattcccatgtcccgnncggcnggcngcnncggcnnggctttcggaccgcttgcncnncgtggcnngacggcgnnngcggcgccgtgatccccagtccnnngcggcggcngcnncggcggctttcggacgcctttgcccgtggcnnngacggcggtgnngcgcggattccttgtccgcggncgnngcgccggcgggcttcggaccgcttgcctgtggncgtnnctgcggcggcgcggatcccagtccgcagcgggcggcagcggcttcggtcgcggccccgtggtgacggcggcgtcgccgatccagtctgtagcggcggcgatggtgtggacgcggcctgcggcgacagtggcggcgcgagggctgtctcccacgtc

SEQ ID NO: 73648 - DNA, 117 bp, Oryza sativa
  Clone ID: PAT_MRT4530_7390C.1
atggcgcaggtccaaccagggttcccccaaaccgtttttgcggtggttaccgccaccccacggtttggccgtggttaccgccaccccacggtttggccgttactggccacgatctag

SEQ ID NO: 73649 - DNA, 633 bp, Oryza sativa
  Clone ID: PAT_MRT4530_73910C.1
tcacctaggccgaatcaatgcttgaacaccatcagcattctccgaaaatggagaatccacttccgaaccaccatggtcagcctcatcatcggtctcgcagcaagagttcccaaatgaactcgagcattccgtggtgtccccgtcttcctcgtcgtttgcgggatcagcactcgccgcatcgatgtcatgcgaggaggatgctaccgccaaagggtccgcgccagtaggcttgttggcaggggcgagaagggcaccgtcacccacggggtcatccgccgcgcacgcgtgctcggatttcaccaccaggctctccccggcgctgctcctgccctgaacatccgtggctcgtccctcgccgtcggaggagtccaacctctcgccggagccacccccgccctgaacatcagcggctggaccatggctatccgaggagtccagggtggtagaggctgcagctacacgaacaccgtcgggcttgagggtgttgtggctcttccccccgccacactccccctccgcatccacggccggcgccggcgccatggctggtagatgcacctcgcaacagcccggaaatcagaattccgctaagaaatccggaattcctctaagcaaaaccgcgccagaatcgag

SEQ ID NO: 73650 - DNA, 627 bp, Oryza sativa
  Clone ID: PAT_MRT4530_73911C.1
atgccggccgcgtcggtgggagagggggagagaggcgaccggcgtgacatcgttggcggtgagaaagcgcagggaatgagccataaggaggtggcaacagcggcggtggctggagggggcaaggcagcgggtgcggagggatcttcatctgcaggcgacagcggcggagctccgccgccgcaagcaccctgtcgaggccgacggttacccacaaccatcctccgatctgctccgtcttcatcgtcgatgccgcccccacgcgccaccctggatctgcctcgcccggtccgcccaaggaccttcaccacttcctccgtcgcttccgtcttggactcctcccgatgcgccggccttggctctccaccgatggctgctccgcccctcagccctcctctttctcctctcccgtcggcgcggtcggccgcctctcccctcgctagctactccgcacgccgccgctaccacaacccaggagtacaaaaccatggtggatgtccgcgcggggcggcggcgggcgagcgtggtagcgggcagtgggaaagggggcagagagatggccgcagtggcatgtgcgcgttggtgcggcgacagagctcgaccggctgcctcgccccaatttgccactga

SEQ ID NO: 73651 - DNA, 2053 bp, Oryza sativa
  Clone ID: PAT_MRT4530_73912C.1
atgacggacgtgcagatgagcgactccgagccgcaggcggcgcctcccgcggcgccggcggcctccgccctccaccatctgaaggagatcgcctcggtgatcgaggccggctcgctgtccaaggaggtgcgccggatctcccgcgccgtccgcctcaccgtcgccctccgccgccgcctcgccgcccgcgacgtctccgccttcctcgccttcgcgctcccgccttcctccgaggcctacacccgcctcacctccctcgtccccaagggctcaggacctggaagcctaactttgttgtttcattgtgtatacaatgatataataaggagagaagatgacactgagatggacattgacatggcagctccagcaactcagatttcgatcaagcatggcctccctgagattgaaatatattgctatttgcttgtcctgatttttcttattgaccagaagaaatacgacgatgctaaagcatgtgcaaatgcaagcattgctcgtctgaaaaacttgaacaggagaactgttgatgttctggcatctagactgtacttctattactcatatgtgcatgaactcaccaacagccttgctgaaatccgtgggaatctgctagccttacacagaatggcaactcttcaccgcgatgaacttggccaggaaactttgctcaacctgcttcttcgcaattacctccattataatttgtatgatcaagcagagaaacttaggtcaaaagctcctcgttttgaagcccactccaatcaacaattctgtcgatacctgttctacttgggtaaaatcaggacaattcagttggagtacactgatgctaaggaaagccttctgcaagctgctcggaaggcacccattacagctcgtggctttcgtattcagtgcaacaaatgggctattatagtgagactacttctcggagagattccagagaggactgtgttcatgcagaagggaatgaaggaagcactgacaccctacttcgagcttacaaatgctgtcaggatcggtgatcttgaattgtttagggctgtcgccgacaaatttgtgagcacttttagtgctgacaggactcgcaatttgattgtgagattgcgccacaatgttattcgaaccggactgcgcaatattagcatttcatactcacggatctcccttgctgatattgccaagaagctaaggctcgactctgataatcctgttgctgatgcggagagcattgtagccaaggcaataagggatggcgcaattgatgccaccatagatcatgccaacggctggatggtgtcgaaagaaactggcgatgtctactcgacaaatgaaccacagattgcattcaactctcggattgcattttgcctcaacatgcacaatgaagctgtgaaaagcaatgcggttccccccgaactctcacaaggaaaaggaaagtgcggagaagcgccgtgagaggctccaacaggaggaggagctggcaaaacacatggctgaggaagatgacgatgatttttagactggctggccacttctttggcactttgggctgccaaattgcaatgttgagttggttgatctgagagaccgtaacacacctatacatgccactcacaaatgatatttgagtcatgcaaaaaccctttgcttcatctgccggaaatttatgtcgatgagaaatttatgactccaaatgtgtctagttggataacttacttttaccttcaccttgtatcatggattcgagaatttcttttgtaccatgcgaaattcggctgcttcattcatgtattgtggttcaaaaaaaaaaaaaaacaacaggcacaatataaaaaaaaaaaaaaaaacaaaaaaaatgttagagcaaaaaagtcgtgcgctttatgcatcctacttatgtagtagtggtagtagtaattttgtcatgtttggcgcgtctcttggtttttcttccaggaagtgacccaagaacgttaattttagttgaaccctaaaagctatattaaggagaagtcatgcgcttaaattagttaacccttccttctca

SEQ ID NO: 73652 - DNA, 573 bp, Oryza sativa
  Clone ID: PAT_MRT4530_73913C.1
tcgcgcgatgtgcgcgcgcgacgggcgaggcggcttggggtgactaaccctcggggttccccgcgggagacgatcccgtggacagtgcgacccggcgacgcgcggcgaacaagcagcgtgcatggacgctgtgccacctacggcggatgccggcgcggcggcgatgtgcgtctccctcggcttcggccccaggcacggggatgccacctgcaagtgctagcagtctgaactgagctgatgctgatctctgatctgaactgaactgatatgctaatcaggttgagccaagtagtagaagccgtaattaggagagaataaattaatgagcgctaagctgctgtttgtagatgctcgcttagctactgtcccgttgctggctgccttgctagttttcccgccctctctcttgttcctctgttttttcctgatcttcgtgtttggcatgagttggtagcacattaggtttgcttttgtccagcgctgcctctctgtaccaaagcctaaggcgtgagctttgaaaaatgaaatcgccaggtcccttttgttttcttccaaaaaaaaaaaaaaaaaaaa

SEQ ID NO: 73653 - DNA, 682 bp, Oryza sativa
  Clone ID: PAT_MRT4530_73914C.1
ctttcaacaagtcatcccctatttccgatatcttaatggcacaagagattttggactttaatgggatataataacgttggctatctatttgatccccacaacgccagatcacaaataagatttgtattattataatgtggaattgctatttcatggaagtattctaagcaaacactagtagccacgtcctccaaccattctgaaatatttgcattatatgaggcatcacatgaatgtgtatgtctttgcagaatgatggaaattggttatatcgagagcaaatcactaagaatattgctcctaaattgtcttatcctcacgagctttagcagcatggagacaaacatcttgcaaactaagtcatgtgataatcttgctgatttattcacaaaacctctatgatactacatattatttaaatgtgtcaaacgaattggtacgagacatcttaaaaatttggaggattcagagagagtatttctctctaaaaaatatctttattaccaatttcaagaaaaagaagtgaagttgccggagcacttggttcataagttagcatcgcaagtgaagaagctccgcaaggagaacattgagcttagggaccgaaatgcggaactaggggtagagcttgctgagcttaggaataattttgatacccttagtcgcagattgtgcgctaaaa

SEQ ID NO: 73654 - DNA, 617 bp, Oryza sativa
  Clone ID: PAT_MRT4530_73915C.1
gagaacagaagaggcagcgacaccggcgccgcttaccacaccactgcatcgccgccactgcctatctattccagccgccgcggcgcgcctcaccggtcccgccccccaacagctgcgccgccgcctctccccggtgagtctcctccccagccgccgcctatcctcagcgaaaccctaggcaccgagccggccgcatcgacgcgtacggccgtgctgtgtccgccggtgaggtgctggcggcgcaccccaaccacgtgcttagccggcagtgctcgtcgcagcagggggcgatgggccggatacacatcgtgtcgccggagtcgaagctggagtgcggcgagatctacttcctcatcccggccgcctccgtccccgacgccaagagaaggacgagcaccggcggcgccgccggccacgggcaccacgtccgcagcaagtcggagggcaacgccgccgtcgccgattggttgggcagccagtgcagcgcgtcgccggagacgacaaggatgatgagggtgcagaagcaacaccaccaccaacaccggcggcgcatgagcaccgggagccatgcctcgccgtggcagccgcatctctcgtgcatcactgaggacccctga

SEQ ID NO: 73655 - DNA, 169 bp, Oryza sativa
  Clone ID: PAT_MRT4530_73916C.1
gacgaaggaaaagaggccgagcataacgaacgaatggatgatcaaagaagtttattggggaccaaaccaagaccttctccaagtctacttctacctcaccacgtcacttttggtccatagaagacaagggataaagttctacacgttttggattcggattcgggcctcc

SEQ ID NO: 73656 - DNA, 219 bp, Oryza sativa
  Clone ID: PAT_MRT4530_73917C.1
atgtcgaaacaagatttcggcaatactaaaaggggtggcaatcaagctagaaaattggatgggttagaagaaaaaggtttcgtagctgaaattgcatggaacgagatcgatcaatgtcgaaacaagatttcggcaatactaaaagggggtggcaatcaagctagaaaagtggatgggttaggagaaaaacgtttctataggttcgggctttctcgatga

SEQ ID NO: 73657 - DNA, 9486 bp, Oryza sativa
  Clone ID: PAT_MRT4530_73918C.1
atggaaccggagagggaggcatcgtcggagtggtgagatggtgtcggggtgttggatttccgggtgaaggcgtcttcgtgcgagaagacggcgcagaaggcggccaatgagccgtacctcctctcccacttccgcatctacaaaaagaccgtgatcaaaaggctgatgaatgtggtgctgccatcaacgtaggagatccacattctccggcggcttcggcgctctggcacgaggcatcgcccactgctcgacactgactcctagacctcatgctcaagcctggtcatagcagatcggcgcgagcgtcgagtagggaaatgggtgatgaagcatttttgaatccgtagtgctcaaattgaatgcgacttcgaacgacctgtatccaatatctcgtgatttaccatttcctacactcaactctattatatttgtgtcctccaagcggccaatgaaaatggctgtttcgaaccaccatttctgtacaaaattgaggcggaccttttctgtgtgacagatactccagacagtagtctacaccttttggcttttcttgctgggcgattttatcccatcctccaaattacaaaagaacgggattttactaaatcattaattagctctgctgattcagatgctctgaaaagtagtttggcttctactccaacgatgttagtacacttacctataaacttggtcaaacttgaagaggcacaacctaggagatcacggagtccatcttctgttcagcctgcttgttttctggcatttcgatctgaaacagccgtactgctcttaaggaaagcacacagagacagagcccttggaattgtttgcctgaaagcatcaaaggtcctgcaagaacttctggagcccgatccattgttagatgatgcttctgaccaagtactttgtacagactactctagtttgtttggagatgaatttagcttatcggagaatcgctttgatgcctctattctgaacattttggatattgctgctgttgaagaaggcattcttcatatactatatgcagcttcatcacagcctctgttatgttgcaagcttgctgagaaaggttcagacatgtggtctgtcttaccacttgttcaagctctgcttccagcacttcgtcctccacttagccctggttctactgaacagattgatggttgtcttagccaatggaatcatccaaatgttcataaagctctctctcaggcaaaagcagcctgtgttttgcttgacttatgcaggggaccattatcaccatgggtacccatgatcacagcaaaggtagaccttgccattgaacttctggaggatctcctgggtattatccagggagttggtcaatctcttactcgttctcgtgcagcactgaagtatattgcattggccatatctggccatatggatgatgttctcacagaatataaagtacattcatttttcctcctgaaagacgtcaaacataagttacttttcattctggagatgctagatccttttattgatccttctgtaagtgttatgacagatgcaatggcatttggtgatgtgtctgttgtgcatttggagaagcaagcaagcgcttgcaatatttcgttaaatattatccgtacagcagtgaagaggcctgctgttctcccttctttagaacttgaatggcgtcgtggtgctgttgccacaagtgttattctctctaccttggatccgcatatgccactccctcctgacatagatctctgcaaaagttcaatgcctgagattgatcaaatatctctgatagttccaaactgtccaccgcactcctgcagtgctgaagatgctgatgggcgtgatacatctgaaacaactcccagggcagatattcttgaacagtgcaattctttatttgctccagaagaattagagcaatctgagttgacaaagactttggaagaaaaaaagcatgagaaaataagtacagatttggaccagaacttcccagaggacacaaaaagtaatggaaaattaccagctggcctttttcagttagataatatttttgctactgattactatgatgcacatgctgattatctgcagctggtgaactatcaggactgtgaattaagagctctagaatttcagcgcttagcactgaatctatgcacacaacaagaacctacagttgaggggcataatgctggaatagatgcttttctgttagctgctgaatgctatgttaatccactctttctcttggatttccattctaattcggagtcttcggatgaaattgaacgtattcatgcagaattgatccaaggaaattgtttctctgaggcgaaacatctgcgtgctaaagatattgatctcatgaaaatttataatttggagaataaacgagataaagcggtcctggatttactcatgcaagctgcaagatatgattttgaataccagggaaagatacctgatgggaaaccttttccagatgatgttgaagatggcaagcaatatatagaaatttcaccagaggctagacaccttgctgatgctgtaactttggtcagaaagaaccaggctatgctttgtcactttatcatgaaacaatttgaaaagaaaggacactctcctaacgaaattctcctccagagcttgttgttcttgttgcactcagcaactgatctattttgtccaccagagaatgtgatcgatatcatattgaaatccgccgaagatctcaatggaaaacttgtatgtctttacaattccgttaatgcaaggaataataaattggatagaataaaactacattatctacgaagacgttgggcactgctccagaagctggttcttgcttcgtctggcagtgataatactagagaacttgtcagcattaaaagagatggtttccgttttaaaagtctggttcctccatcagcatggatacataagatatcagatttttccaggtcttttagtccactacctcgattttttggatggatggcagtgtcccgttatgccaaggaatatttaaatgagcagctatttcttgcctctgacttctcacagcttacatctttgctgtcaattttcaccgatgaactttctttgatgggtggtgttactactcagaaggccaagtctgctaaaattgaacaatctggttgcaataactatgtgcttcttaagaaggaacctttgctgtcagaccaaccaagcatgagattgtttcagattttacttcctgaactgcatttcttctttccgagtatgagcaaaaagtttgatgcatttggccaaagcattttggaagctgttgggttacaattaaaatgtctcccaaaaagtgcagtgcatgatgttctttgttggttttcagaaatgtgcctgtggccttatcttggaaatattagggagcatcttgcatttgcaaacggagttaatagtttaaaaggaaacattgcagctaaggcaaaggctgttgttttctacctacttgagtcaattgtcgctgagcacttggaagttattgttcctgaaatgccacggatggtgcacattcttgtgtcactttgtagagcttcttacactgatgtagctttccttgattctgtgctgtgcctaatgaagccaatgatctcacacttcttaaggaagagtactgataatggaaatgtatcaggtgatattactgaatgcagtgattttgagttactttgttttgaagagttatttgaaacaatacagtttggtaaacaatcagaggatacacctggcaataagaaccagaatattgaattatttggtatgcatgtcctttctgagagaaaccagtctacagagtttgctaactccgcaagtccagatgacaccatggataacaagaaagcacaggccagtgtagcacagaggttagtgtcaaaccttgcaccatctattgagggcagttggaaatggcaccttcagttggcctctaggttatctttatcgattgcaaaatgtttgctgtatgcaaaatgcctaaagtctattgccgaaggaggatatcttggaggcttcagacagagaaatggttatcaatattggtttcttatggaattgaaggccttaagaacaaaaccacgatttgtgacgaagcagacggccaaaatcatggagaatgaggctaagcttgaccttctgttgaagaaaatggaggagacagagcgcaagcgagaggagggtgagaagaagcagagtttggagatgagggtcttcaaggaggcggtagaatcgtggatccctgcggtggagaagaaggtggatgtccttcagtccactgtggatatgctacaaacccaagtagcgaaactctctgctccacctccaacaaattcggcgactccttcctcttcgtcgccatccggagcggcaggtgttcgagcaattgactctaccggcttaaatggccaaggcgctgcaaattctacacgggaggaggctgatggggtattcaataccccaaagccacccccgggcaatggtacgcttgcgtcacaaaatttttctccattccattgtcgagttgatgcttctgccatgaattctttccaatctggaacatctgttgggttgactggtggggtagctcctatgacttgcccaaaatttgatggagataacccaatcatgtggaaagttaactgtgaatcttattttgatctctatggaatccatccaattaactgggttaaggttgccactcttaatttcactgggaatgcagctttttggttgcaagctgttagatcacaattagagggggtgacctgggaggagctatgtgatagggtgtgcactaggtttaacaaagatagacaacaggctcttatcagacaatggtttaaaatttgtcaaactggcacagtagctgattatgtggaaaaattcgattccatcatgcaccagttaatggcttatgaccccactttcaaacctgtttactttgtcaccaagtttgtggaaggcttaaaacatgaaatccggtctgcaattcttcttcaacgtcctggcgacctggatgctgcttgtatccatgcgccttcgcctctcttgccgcctatccgtggtttgggtcgaatccccaagataagtttggggtgtgcatatggatccctttttccgcagagcttccagtgaccccttgtgcttggaagacatctccggtccaacatggaattgaaagatgcccattcctaaggaacatcaatgagcctcacaagtttttcattctcgtccgttaattttcctgttcctgcaagaggagacaagggtccaatttttgaagatggacccaaattttgacatggcaatttggagttttccatggccaagatgggttttgttccactttcacatggatcatttgagcgatctgagaagcctaatgccgaaagcccaatcctgaatttaaccccttggctggctattgcagctcccatcattctctctgcagttggaggtttttttattagattgaggggctggttacagggtattgaggtgcttatgttggtggattctgacagtacccactcttttgttgatcatcagcttggattgaagctaactggagttaaatctatggcttctcctgcaagagttaaggtggctgatggtgggcatctcaattgttctctgtatgtgaataactgtgattggttaactcaaggcattcatttcaagagcaatttcagattgctgtctttgggcacctatgatgtcatcttgggtatggactggttagaacaatttagtcccatgaaagtggactgggttcaaaagtggttagaatttcagtttcagggatctactgtcagattgcaagattccttacttcctggatccaaggcagtgttcattcgtccatatcgtcataccccagctcaaaaggatgaaatcgaaagacaagttaaagaaatgttgcagaatggcattatacaacatagttccagtcccttctcttctcctgccctattggttaaaaagaaggatggctcttggagagtatgtatcgattacagacagttgaatgccattactaagaagggaacctacccaatgccaataattgatgagttactggatgaattagctggagctaagattttttctaaattggatttacgagctggatatcaccaaattagaatggctgagggtgaagaatttaaaactgcctttcaaacacacagtggtcactatgagtataaagtcatgtcattcggtctcactggagcccctgctacgtttcaaggtgctatgaatgataccttgagacccttgttaaggaaatgtgccctggtcttttttgatgatattttgatatatagccctgatatgaattctcatctagaccacctcaaacaagttctgcagttgttagacactcatcagtggaaggttaaactgagtaagtgtgactttgctcaaactcagatttcttatttggggcatattatcagtggtcaaggagtctcaactgatccttctaagatacaaagcattgttgattgggcagtacctactacactcaagaaactcaggggttttttggggttggccggatattataggaaatttgttaaagattttggtactctcagcaaacccttgacacagttgctcaagaaggatgccccttttgtttggtcagctgaagtgaaccaagcttttcaagctttaaaacatgcccttacttcaactccagtattggctctccctaacttccagcaaggtttcaccattgaaacagatgctagtgacattggcataggggctgttttatctcaaaatcagcaccctgttgcttttgttagtaaggctcttggtcctagaactcaaggtctttccacttatgagaaagaatgtttagcaatcatgatggcagttgatcattggcggccatatttgcagtttcaagaattcttgatcattacagaccatcatagcttgatgcacctcactgaacagcggctccacaccccttggcagcagaaagcatttaccaagctttcgggattacaatttcagattgtttacaggaagggtaaacataatgctgctgctgatgcattgtctcgacatgttcctgaggaaacctctgaatttttaggaatctcaacttgttctccagtctggttgcaagatatccttcatggttatgatcaggacccattggctctttctttacttactgggttggctgttaacccctcttcttatcctcactactctctgtctaaaggacttattaaacataaaggcaaggtgtgggtcggtaacaattccaacatccaacaacagatcatttctgcccttcatgatagccctttaggaggtcattctggatttccagtaacttacaaaaggatcaagtctcttttctcttggccacatatgaagctcactgttcaaaagcaattagcttcttgtgctgtttgccttcaagccaagcctgacaggtccaaatatcctgggttattacaacctcttcctgtgcctgacggtgcctggcagataatatcaatggatttcattgaagccttggatgttgctaaagtattcatgctgaatgtttataagcttcatggattaccacagatcatcatttctgaccgtgataagatttttactagtgcattatgggagcagttattcctgaggtctggcactaaattgcatttatcttcagcttatcacccgcaatccgatggacaaactgagcgagttaaccaatgcttggagatatttctgcgttgttttgttcatgccaccccagctaagtggtctctttggttacaccttgctgaattttggtacaactcttcttaccattcggcattgaataagactccttttgaagtcttgtatggttatcctccttctcactttggtattcgagctgatgcctgcgtcatttctgacttggattcttggctgtctgaaaggcatttgatgactcaactgcttcgacagcatttgaacagagcacagcaagttatgaaaacacaagctgacaaaaagcgcagttttcgctcttttcaggtgggggattgggtttttcttaaactgcagccttatgtgcaatcttcggtggcaaaaagagccaatcacaagctctccttccgttattttggtccttatcaaatcttgtccaaagtgggatcggtggcttataaattgcagttaccagcagatagcatggttcacccggtttttcatgtctcgcaattgaaaggaactcagaactttaagcactccattcagtctcaattgcccaacattacagatcatattcagtatcctgttcagatcttggatacaaggatacagaagaaagtggaagccacctgggaagatgaagaagagctcaagcagcgtttcccttctgcactgccttgggggcaagtcgtaaaagaacttctcacggaatctactgcgaaaccagtcgaaactgattttaagggcatccgtgaatcgattcttcaggtgctgtcctctttgagttctgttgaatcatactttgagttcttctcaacaagatctgatcaggaatatcaggaacttgaagaagcagagatcgaattggagattgttaaaaatgagaaagcacgtcacagctttattgtacatccccaggacaccatgattccggacatgtcatcatactataaggatggtaatgaggttaataagcagctccagcaaattcaggaagatatacggtccttggaaaggtccaaactcagggaggaaattatagcacgcagacaaaagaagctgcttatccgacatactcgtgaaaaatacttggaggagactagttcaagggaaatggagcttttgcaagaacttgacagggaaagggctcatgagatggaacgtgaaatcgaaagacagcgacaactggatcttgagcgcgttaagtctagggaactgcaatttaacctcgatatggaaagagaaaaacaaactcccagagcgcttcaacgagaattggatcaagttgagttggggcggtcatcaaggcgggagttttcagccaatactaacagccggtctagggagagataccgtgaaagggataacggtaggggacagcaggaaggaaggagccgaggtggaggaggaggggtggaggccggtgggtctgcgacaagatcattttcaggcaaccttcccacaatactgcagcaacctcgagagcgtactacgagtgacgagcgtactagcacaggaggaaattattatgaggagaatgctgagggaagtggtgacgccagcagcgtcggagatccagaatcagcggtggctttggaagctggcacgaggcatactccttctcggggcagcaagtcgtcggcctcaaccttaacctcaacctctaggcagggtgtagtacaacgcagggagcgtcgagaagggaaatgggcgaggaagcattcttga

SEQ ID NO: 73658 - DNA, 370 bp, Oryza sativa
  Clone ID: PAT_MRT4530_73919C.1
actcgctcctcctctcgtcagcccatgtcgcactcctcttcccgctgctcccactccacccgcgcctcgtcccagcgtctctccctgcctctctcttcatctcccctcgcctcctcctcctcggtgcactcgcctccgctacaaacggtgccagcccgcacctcctcccagcgtctctccccgcctctctccccgtatcccctcgcctcctcctccttggcgtactctagccatgccatggcaattcggggagcacagaagcagagaatctcggcggcggcgacagtgatgagtccggcgatggcgccactacgtcgcgagccgcacggtcgctgcaagcagtgccattgagggagagagagaggggaag

SEQ ID NO: 73659 - DNA, 526 bp, Oryza sativa
  unsure (1)..(526): unsure at all n locations
  Clone ID: PAT_MRT4530_7391C.1
ccacgcgtccggttctagatcgcgagcggccgccctttttttttttttttttttttttttttttttttttttttttttttttttttttttttttttttttttttaaaaaaaaaaaaagcaaacataggaatatctataaaggggcaacccccaaaggaagggaaaatgggggggaaaaaaaaaaaaaatgggggaaaaagggaaaaaggaagctggacgggaggagcggggggggggggacccccttttaaaaggggcaaaaaaaaaaaaaaatccctctggggtataaaaaaaaataaaaaaaaataaaaaaaaaaagaaagaaagaaagaaataaatatatataaaaaaaaatataaatgatttgaggggggggaggcggaacagaaggtggaatatgagaagaagaaccggcacgttggataccaggtgggngaatgggcgatattncgtctgcgccagtgggccatcaggtaggtgntttagtgggggacgggcaagttgaaggcttggttttatgggccat

SEQ ID NO: 73660 - DNA, 344 bp, Oryza sativa
  Clone ID: PAT_MRT4530_73920C.1
gaattctttgattccctccagacacaacctaggagatcacggagtccatcttctgttcagcctgcttgttttctggcatttcgatctgaaacagccgtactgctcttaaggaaagcacacagagacagagcccttggaattgtttgcctgaaagcatcaaaggtcctgcaagaacttctggagcccgatccattgttagatgatgcttctgaccaagtactttgtacagactactctagtttgtttggagatgaatttaacttatcggagaattgctttgatgcctctattctgaacattttggatattgctgctgttgaagaaggcattcttatatactatat

SEQ ID NO: 73661 - DNA, 6201 bp, Oryza sativa
  Clone ID: PAT_MRT4530_73921C.1
atggctttgttgactggtgtcactgatagtatgctttttctctctcgtgttcctgtagcacttcgtcctccacttagccctggttctactgaacagattgatggttgtcttagccaatggaatcatccaaatgttcataaagctctctctcaggcaaaagcagcctgtgttttgcttgacttatgcaggggaccattatcaccgtgggtacccatgatcacggcaaaggtagaccttgccattgaacttctggaggatctcctgggtattatccagggagttggtcaatctcttactcgttctcgtgcagcactgaagtatattgcattggccatatctggccatatggatgatgttctcacagaatataaagtacattcatttttcctcctgaaagacgtcaaacataagttacttttcattctggagatgctagatccttttattgatccttctgtaagtgttatgacagatgcaatggcatttggtgatgtgtctgttgtgcatttggagaagcaagcaagcgcttgcaatatttcgttaaatattattcgtacagcagtgaagaggcctgctgttctcccttctttagaacttgaatggcgtcgtggtgctgttgccacaagtgttattctctctaccttggatccgcatatgccactccctcctgacatagacctctgcaaaagttcgatgcctgagattgatcaaatatctctgatagttccaaactgtccaccgcactcctgcagtgctgaagatgctgatgggcgtgatacatctgaaacaactcccagggaagatattcttgaacagtgcaattctttatttgctccagaagaattagagcaatctgagttgacaaagactttggaagaaaaaaagcatgagaaaataagtacagatttggaccagaacttcccagaggacacaaaaagtaatggaaaattaccagctggcctttttcagttagataatatttttgctgctgattactatgatgcacatgctgattatctgcagctggtgaactatcaggactgtgaattaagagctctagaatttcagcgcttagcactgaatctatgcacacaacaagaacctacagttgaggggcataatgctggaatagatgcttttctgttagctgctgaatgctatgttaatccactctttctcttggatttccattctaattcggagtctttggatgaaattgaacgtattcatgcagaattgatccaaggaaattgtttctctgaggcgaaacatctgcgtgctaaagatattgatctcatgaaaatttataatttggagaataaacgagataaagcggtcctggatttactcatgcaagctgcaagatatgattttgaataccagggaaagatacctgatgggaaaccttttccagatgatgttgaagatggcaagcaatatatagaaatttcaccagaggctagacaccttgctgatgctgtaactttggtcagaaagaaccaggctatgctttgtcactttatcatgaaacaatttgaaaggaaaggacactctcctaacgaaattctcctccagagcttgttgttcttgttgcactcagcaactgatctattttgtccaccagagaatgtgatcgatatcatattgaaatccgccgaagatctcaatggaaaacttgtatgtctttacaattccgttaatgcaaggaataataaattggatagagtaaaactacattatctacgaagacgttgggcactgctccagaagctggttcttgcttcgtctggcagtgataatactagagaacttgtcagcattaaaagagatggtttccgttttaaaagtctggttcctccatcagcatggatacataagatatcagatttttccaggtcttctagtccactacctcgattttttggatggatggcagtgtcccgttatgccaaggaatatttaaatgagcagctatttcttgcctctgacttctcacagcttacatctttgctgtcaattttcaccgatgaactttctttgatgggtggtgttactactcagaaggccaagtctgctaaaattgaacaatctggttgcaataactatgtgcttcttaagaaggaacctttgctgtcagaccaaccaagcatgagattgtttcagattttacttcctgaactgcatttcttctttccgagtatgagcaaaaagtttgatgcatttggccaaagcattttggaagctgttgggttacaattaaaatgtctcccaaaaagtgcagtgcatgatgttctttgttggttttcagaaatgtgcctgtggccttatcttggaaatattagggagcatcttgcatttgcaaacggagttaatagtttaaaaggaaacattgcagctaaggcaaaggctgttgttttctacctacttgagtcaattgtcgctgagcacttggaagttattgttcctgaaatgccacggatggtgcacattcttgtgtcactttgtagagcttcttacactgatgtagctttccttgattctgtgctgtgcctaatgaagccaatgatctcacacttcttaaggaagagtactgataatggaaatgtatcaggtgatattactgaatgcagtgattttgagttactttgttttgaagagttatttgaaacaatccagtttggtaaacaatcagaggatacacctggcaataagaaccaggtgccctttctcatattcattctgggttcgctatttcctgatctgtcctttaagaggaggattgagatattaggctcattattagtatgggtagacttcggcagttctgatccatcatcattgttgtgtagttatctacaaggctttcaggcatttattgatggttgtgaaactatactagttcagaatattgaattatttggtgtgcatgtcctttctgagagaaaccagtctacagagtttgctaactccgcaagtccagatgacaccatggataacaagaaagcacaggccagtgtagcacaggtacagaggaggtccacagaatatcatgagaatggtgaaaattcaaagggagttgattccccacatactgtttgtattaaagaattttgtggtgccctggagaggttagtatcaaaccttgcaccatctattgagggcagttggaaatggcaccttcagttggcctctaggttatctttatcgattgcaaaatgtttgctgtatgcaaaatgcctaaagtctattgccgaaggaggtatgatctatagtagcatcaaacaagaggttggtactgaaatatccactgatctttcccaaaaacactgggagagtgctctccaaggcctcgcagaaaccattttagtaaatcagaagaagcagtgctggcaggtggcatcagttatgctcgattatatgattaagcttccaaatattcttgcttgggataatgttcttaatgtcatgtcttctgcaatgaaacacctctgctctcatgcacccaggatatcttggaggcttcagacagagatatggttatcaatattggtttcttatggaattgaaggccttaagaacagtgagaattcattgattgatcttttctgcacattgttgagtcatgctgaaccagaacagcgctctgttgcattgcagcaacttgggaggattattatgagcacaactaaagttgattctgaatatactacttataagcaaaattcactctcatctggttcaacagtaacatcccttttggttactcatacctgggaccgagtagcagcattggctttctatgattcttctatgttattaaggaagcatgcattggctttgcttactgaatacattccatttgttgatagaaatcatctacagtcctttcttggatccagtaacagcatccttaatggtgcggaacaattttcttatgcaatagaacaggggtatttgacacgaatgtctttgctgttgctttcaagggcgtgtctctattctgctcctgaagatattgctttaatacctgaatgtgtttggagaaaactggaaaatatgcaaacatcaatacctggatgctttggtgatatggagaaagatctctgccgagcactgtgtcaactaagaagtgaatctgatgctaaaactgtcgtaaaagaacttctcacggaatctactgcgaaaccagttgaaactgattttaagggcatccgtgaatcgattcttcaggtgctgtcctctttgagttctgttgaatcatactttgagttcttctcaacaagatctgatcaggaatatcaggaacttgaagaagcagagatcgaattggagattgttaaaaatgagaaagcacttcacagctttattgtacatccccaggacaccatgattccggacatgtcatcatactataaggatggtaatgaggttaataagcagctccagcaaattcaggaagatatacggtccttggaaaggtccaaactcagggaggaaattatagcacgcagacaaaagaagctgcttatccgacatactcgtgaaaaatacttggaggagactagttcaagggaaatggaacttttgcaagaacttgacagggaaagggctcatgagatggaacgtgaaatcgaaagacagcgacaactggatcttgagcgcgttaattctagggaactgcaatttaacctcgatatggaaagagaaaaacaaactcagagagagcttcaacgagaattggatcaagttgagttggggcggtcatcaaggcgggagttttcagccaatactaacagccggtctagggagagataccgtgaaagggatgacggtaggggacagcaggaaggaaggagccgaggtggaggggttgaggccggtgggtctgcgacaagatcattttcaggcaaccttcccacaatactgcagcaacctcgagagcgtactacgagtgacgagcgtactagcacaggaggaaattattatgaggagaatgctgagggaagtggtgacgccagcagcgtcggagatccagaatcagcggcggctttggaagctggcacgaggcatggcccacgggggggcagcaagtcgtcgtcctcaagctcaaggcaggagagaaggtcagtttgtggtgttcatatggatccctttttccgcagagcttccagtgaccccttgtgcttggaagacaactccgtccaacatggaattgaaagatgcccattcctaaggaacatcaatgagcctacaagtttttcattctcgtccgttaattttcctgttcctgcaagaggagacaagggtccaatttttgaagatggacccaattttgacatggcatttcgagttttccatggccaagatggggttgttccactttcacatggatcatttgagcgatttgagaagccaatgccaaagcccaatcctgaatttaaccccttggctgctaaagcagctaccatcagtctctctgcatttggaggttttttcagctttggtgatttctcaaataagcgcaataagaagaatagtaaccaaaagaagcccaacaaccttccccagaacggaggtcagcctaataaccatgaagcactgagcaatgagtggctggaaatgggtcaatgccccctggcaaagtcgtacagggcattaagtggtgtcgtgcccctcgtcgcaaagatgatgacacccccggctggtatgaaactgagatgcccacctgcagtagttgccgcccgtgcagcactatcacgcacagcctttgccaaggggcttcgtcctcagcccctaccgacgaaaatactggtgatggcgttgcttggtatggcagcaaacgttccccttggcatctggagggagcacacggagaaattctcagtgcagtggtttgccgcagtccatgcggcggtacctttcataggcatgctcaggaagtctgtgctgatgccaaagacagccatggcgcttaccatagctgcctcaatattgggtcagacaattggttcgagagctgagcgtatcagattgaagagggcagcaaaggttgctgctggtagccagggtgatgctagcaccagaatgagcctgaaaaccgggagatacactgatgatgtccagttctgggatccgcttgccctcagagttgagagtaccataggaacaggaactccggttcttgttccaactttccattga

SEQ ID NO: 73662 - DNA, 203 bp, Oryza sativa
  unsure (1)..(203): unsure at all n locations
  Clone ID: PAT_MRT4530_73922C.1
gcggcggcgagagggctaggctggggggagagggctaggttgggcggcggcggcggtggctganagggtggttggaggagcgaggcgatcccgtcnacntcgcngcgcnatccctcgntgccgcnaagcagatccatgcgcgggcgctccgggccggtntgccnacntcccacccgttcttcgcaaagcacctcctcttcaaa

SEQ ID NO: 73663 - DNA, 182 bp, Oryza sativa
  unsure (1)..(182): unsure at all n locations
  Clone ID: PAT_MRT4530_73923C.1
actcccgcaatggtgacaaggggttcagtcgttttccggaacaacaagaaggcccngcgagaggcggtgttttccggatgcgcccgggattcttacgtgcaccagagcggatacgtgttcgcgccaacgcaacaacgccaagtgcttctcagattcttaagctcaccaacacagaccctaag

SEQ ID NO: 73664 - DNA, 763 bp, Oryza sativa
  unsure (1)..(763): unsure at all n locations
  Clone ID: PAT_MRT4530_73924C.1
atggcgtcgcagagcaccaagcccgcgcaggccgccgccgagccgtccccgccggcggccaccgcagcagcgggggaggcgccgccggctccgaaccccgcgtcggccgccacgccagcccaaaaccctaccgctgccgcgggggcggccgctggcggggccacggatctggagaagaagatgcgccgcgctgagcggttcgggacggccgtggtgatgtccgaggaggagaagcgcagcagccgcgccgagaggtttgggactggatcttcaaatgaaaaggcggaggaacaaaagaggaagtccagggctgagagatttggccttgcctcatcttctgctgacgaagacgctaagaaaaaagctcgtttagaacgatttggtcagagtacaaatgttgacaagggggaagaagagaaaagaaaggcacgagctcttaggtttgcagaaacatctagtggaccatctcaagaaaatggcaaagacagctccaagccggacgcggccactgtggcaggcacggcataatggaagcactccctgccttttgtgagatctcggacatggcccttacttttggggtgaagccgtagtttgtacaacactaacgacatcagtggcatcatgttttctcctagccatgttgagtgctatttactgtgttgacttgcttacggtacttccctagcagtgtagcttgacttgctgcttggtttgggataatactgtactttngnnaccccccctctccaatgaccatggt

SEQ ID NO: 73665 - DNA, 285 bp, Oryza sativa
  Clone ID: PAT_MRT4530_73925C.1
gctgtttttctattcttggaaccctacaagactaaggggatgggtttaattgaaaagggagggaggcaacccaacatcaccattggaattctggtctccatcggtgccctctttgtgactgcgctcttcaggatcctgctcggcggcaagaagccagcggcttctgtgaagcccgcagcccaggtcaaaaaaccaaagtctaccgggtcccaagcagctggaagcaactgtggctaggaggaccagaaggaagaggaagagaatgatggatcttttgccccacgc

SEQ ID NO: 73666 - DNA, 1914 bp, Oryza sativa
  Clone ID: PAT_MRT4530_73926C.1
atggggattaggaagccaaggggaaagtctgctaaaaagctaaaagaatttgcaggcctatgttttacagttatcatgttacaagggtctgtaatctgtatgctgtcaaagttgctttaccagaattttatcctgtcagcatgtcaacactgcatgtatggcccatgcaatgggcctgaaagaccagactttgtgggctggttaaaaaacatccagatcgatgctcaacagaactggctctttctaggggactttaatttctacagatctacttatgacagaaataaagtgggagccgatatgaatgatattttcattttcaatgagattattagctccctgggactgttggaaatcccattaaaagggagaaggttcacttggagcaacatgcaacaaaatcctttgctggaaaggcttgattgggtattcacctctgcttcctggactttaaccttccctaatacaacagtgatccctttgaccaggaatatctctgatcatgttccttgtgtagtaaagattgatacaaaaatccccaaatctccaatttttagatttgaaaatttttgggtggaagctgagggtttctttgatgtggtgcagcaagtttggctgctggatcctggttttgatgatccggctaaatgtatatccttcaagttgaaaattatgaggaaaaaactcaaactctggagtaaaaatctatcaagaatcatgcttctcttgaacaattgcaataaagtgattgattttcttgctctgttggaagaagatagaagcctctccttatttgaatggaatttcagggaggtagttaaacatcagatcctcaaacttctagaatacaagaaaatttactggaaaaaacgttgcactaacagatggatgctgctgggagaagagcacaccaaattctttcaatctattgccacagaaagatacagaatgaacatagtttcacaagtttcgaatcaaagtggccagatagtttacttacatgaccagaaggcaaacttgttctatcacagcttcaagaacaggatgggtatctcttgctccccaacaatggatttcaatttgactgagctttttgtacctagaacagatttggagtgcctgatcgacatgttttacacgcaagaaattgacaacctcatctctataatccctgctgacaaggcccgtggtccagatggtttcaatggttttttcatgaagaagtgctggcatatcattgcacaagatttctacagacttgtagctcattttcatgctgagtctacagatttacagcagtcaaaaagagaaataatcatcctcaagctagactttgaaaaagcgtttgatacaattgaacacacagccatcctatctgtaatgcaaagcatgggattcccacaaaaatggctcaattgggtgcaaatggttttttcctcagcaagcactgcagttctgttgaatggggttccgggtaattcttttacctgcaagagaggagttagacagggagaccctttgtctccacttatttacgttctaggagctgaactcctacaaagaatagtaaacagggctttcaaccttggattaatttcaaagccaatcaatgcgaatgatggaagtgggttcccaatcatccaatatgctgatgacactttgattttgttaaaaacttcacaaaaggaaatcttctgcttcaaggcactactcaacatgtttgctctgtcgactggcttaaaggttaattatgcaaaatcaagcctttacccactcaatctatctgaagaaaagactgatttaattgcaggacttctgcgatgttctgttggaaaattgcctttcacctatctggggcttcctctaggaactacaaggccaagggtgattgattttgccccccctggtggatag

SEQ ID NO: 73667 - DNA, 122 bp, Oryza sativa
  Clone ID: PAT_MRT4530_73927C.1
acggcacgaggcatagttatatatgcgacaggtatctattctactacgtatccgcagtacatttcatagggctaggctagccaaacaccagtagtaccaataatacatataatagtacagca

SEQ ID NO: 73668 - DNA, 364 bp, Oryza sativa
  Clone ID: PAT_MRT4530_73928C.1
aataaagctaaaaatatcctggatcgggacacacacacacacaacataggcacatacatacatgcactcttgcaacagcaactgcaaggcaccagcgcgactactacaagtagacacatggcacccagactggcaccatcttgagcgcgtggatgcgctcaatctaatgaaacgaacctggcggactatgcccaagcctaggatacgaccaaaggcatcacgtgaggcaagaggggcctgatggagctcttggcgcacacgaggggcatcactacaaacccacacatgcagaacatagataggccaacacctttgatctcattaaccttgagacctgcgaatgtgacaggggactaatccaagc

SEQ ID NO: 73669 - DNA, 269 bp, Oryza sativa
  unsure (1)..(269): unsure at all n locations
  Clone ID: PAT_MRT4530_73929C.1
gangccgttnagangacccacccaggtgctcaaggagctngaggangcnnngaaggcgtcgcngcacatcnncatctccttcaccttctctttccccaccctcacgccgccgcccaccacgccgtcgtcctcctcctcctcggtcgcgcttcgatccccatcgccatggccttgggtggcgtgtccatggccatcatcnccatggccttgggcggnggnggaagacgccgangcnggatccttnangggaagnacntcntccnannccc

SEQ ID NO: 73670 - DNA, 789 bp, Oryza sativa
  Clone ID: PAT_MRT4530_7392C.1
atgcagatcctccggcggaaacttctggaagcttcccgccgcctccccttctacttcccctccgcgcccaccgcccactaccgcggccacgcccatgccgtcgccaccctcgccgccgtcctgcgggaccagaccgccggctccctcgccgccgccccgtgggccgccatccagcgccgcggcgcgaagatgctcggctccgaagtgaagcttggaaacgtaatacagagaagagtattgtggattactacttatcccatccctttggtcaaccttcaaggtcgcatttatcaggtgataaaagcacaacattcacatcaaggtagaggaggagccactatacaggtggaattgagggatgttgacactggcaacaaaataactgaaagatttcgtaccgatgaggctcttgagagagtttttgttgaggagaagtcattcacatatctttatcaggaaggagacaatgtgactcttatggagcctgaaacgtttgagcaacttgaggtctcaaaggaactgtttggcaaaactgcagcatatctgaaagatgaaatgaaggtgactctgcagtactttgatggccgacctatgtctgcatcagtgcctccacgcgtgacttgcacggttgttgaagcacaacctcattcaaaagggataactgcacagcctcaatataaaagggtattgctggataatggtcttacagtgcttgtaccaccctttgtagaagccggtgagaaaattgttgttagtactgcagatgattcatatatgacgagggcctga

SEQ ID NO: 73671 - DNA, 344 bp, Oryza sativa
  unsure (1)..(344): unsure at all n locations
  Clone ID: PAT_MRT4530_73930C.1
ccggccgggnacggttcagattatacagcaaaaagaaagatcangtgtcccatcgcaatgaaggtcnattttctttctttgctcttctttgctattgctgnctngcacggccctctggcgcagtttggatggttttaggtcaaagttataaggcaatatcagctgcagntcgccttctcctgctacnagcaacaggtgcttagcccactataatgagttcgtaaggcagcagtatggcataacgggcaagccccttattgcaatncagtggcgtttcaactggaaaacaaccaagtcaggcaacagctttaggctggtggcacaacagtctcactatcaggata

SEQ ID NO: 73672 - DNA, 275 bp, Oryza sativa
  Clone ID: PAT_MRT4530_73931C.1
ggggggaaaccccccaggggtttgaaaattttttttcccggggggggggttttcccacaaaccccaaattctggggagttttttaaaccatttcccccctttttttaaaaaattggttttttccctttccagggtttaaaaaggtcccaaaaaggggtaaaaatttccccgttttaaagggtcctttaaaaaaattcccccaaaagaaaattttcccttttccgccccaaggaccctttttataaaaggcaagaccctccggaagtttttttttt

SEQ ID NO: 73673 - DNA, 312 bp, Oryza sativa
  Clone ID: PAT_MRT4530_73932C.1
atgacgaaggcgaaggggatccaggaagaggacatggagctggagcaaaaggacggcccggcgggtgacaatggcgtcattgagctccatgacatggcaacagttgtaaatcttgagatcgaggcagaagctgagagaggtagaataggtttgttccccattaggagcggcatggaggatatgagggttgtgagcaaagatgaccatcacaatggtggttggagccagcaaagcataggaagaagaagctcgagcactaaggaagagacctcatggaaatcgaacgacaacgacaacagagaacataaataa

SEQ ID NO: 73674 - DNA, 151 bp, Oryza sativa
  Clone ID: PAT_MRT4530_73933C.1
tagctttggagctcccatgggcgcacgccccgggcgctagctgaagcagccaggctggggccccacccacgcagccgccggcgccggcgccgccgtttcccatgaggcagccggacctgctctcgacgcagcagctctccccgtacccgga

SEQ ID NO: 73675 - DNA, 2171 bp, Oryza sativa
  Clone ID: PAT_MRT4530_73934C.1
aataaaaacctgtgtgatcatgtaccacacgttataatacctatagatttttacaacttttataaaacccgagtgagagataacactacacgaaaaacaaacaacgcaatgggcagaacttcgatttcctgttctttttaacttccattattctctttcttcagatcagatcctaggaggctaggactaacataagaacaatcaacaaactgtactcctacaatgctaattctcattgctagcatagaccaaaatgaagaaaacccagtaactcaactttctagaaagtctgcatcttcaaactaccatctttcctcattttcatatcagcatctggttttgagcttcagttggggcctaatgaccatctgctaccaaacggaaccatccaggagaatagtttttttttttttttaccaaacattatccattcttattattgcacatgattttcactgtattgacaaagtttatacgaagaaacacagtatcaatgattaaaaatttcaagatacagcacagaacattggtaactggggcttgaatcattccgaaccacctagtagtattgctcgagtaccccagtgcaggaattactcaaatgtcaaggaccaaattggattcatgctctattttttcttcctgcccttagctcttatactacctaactaagctctttattcaagaaacaagccgcaatgaagcaggaaaacccatctatctaccataccacacctatgatgatattgtagggctgtcaactgcaagccccattgtattgagtccattgtcaacgtaaacagtcgagccagtgatagcggaagccaatggagacaccaggaatgctgctgtgttccccacttcgtctgccaacagttctttctgcaacggtgcattaacataagagtattctatcatcttctcaatgaatccaattgccttggcagctcggcttcccaaaggacctgcagatatggtgttaactctgatcttccctttccttccagcttcaaaagcaagtacttttgtgtcactctcaagagctgctttagctgaactcatgccaccaccatatccaggaattgccctttcagatgcaatgtatgttagagagatggaagcaccacctggattcattataggaaggaagtgctgaagcaaagagacgaaggagtaactcgatgctgacagtgcagcaagataccctcttcttgatgtctccaatagtggttttgttacatgtggaccattggctacagcatgtgcaaaaatgtcaatgctgccaaagtcattctcgtctgactgagcaagtgccttaacagaccaatctgatgacccagcagaccctttttttccttgtgcaggcacccatgtaccaacaagaatttcagcaccagcagcagcaagagcctttgcaattgcccagccatagccattgtcatcagcaactccagcaatgaacgcccttttacctctaagatcaattggtaggccttgggggccactttcgcttgacattgctctgatggcgacaccgctgcgcttggaagaaccaagagggctggagtagcagattctgggacaggttgcaaagccagtggtggtgctgagtgcgcggccaatccgggagaccgccgccctggaagtaagcattccctgggaggctgagatgcaggggcgtgcagccaccatctgcataccggtagctgcagaagcgcccatcgtcctttttggtattgcccagccatagccattatcatcagcaactccagcaataaatgctcttttacctctgagatcaatggggagtccctgggcagacatcgccctcacggcaaacctcttgtggttcagagaaacaaacggccctgctgatgctgtttttctgcagctcgcgaagccagtttgggtactaagcgcccttccaaatgaaggaagtgctgctcttgaccctagcaggcgttggcaagctgggatacaagggcgtgccgccgccatctgcaagccagtagtcactgatgcgcccatcggccgacgtcaggctcgccggaggattcgggacgggacgcggcagcggcggcgcggggtgggttgggatccaatccgatccgattcctccctctgtgtgttcgttggagcctcgtgccgcctccggctcgggcctcgtgccg

SEQ ID NO: 73676 - DNA, 418 bp, Oryza sativa
  Clone ID: PAT_MRT4530_73935C.1
acacaggcgaaaatttcttggcaaaaaagatgcagtcccccaagggaaaattacaagatgaaagtcgcgccgcgcttaaccccggacaaataggggggggcgggaaggaactacaggtggccaaaaacttctttaaacctcccggaaaaaaaagggccaagctcaaggggggatttttaaaggctcgataaggaagggggcggaaaaaaaagggaaacacctttggttaaaacccttgggaaaagcttttgtgggggaaactttcgggttttgtgggggggcaccgaaaaaaatagcctttttttgcccccgggttttgacgaaactttccggtcccaaatattgccaaataaaggggggtttatgccaggggcctcggaaaaataaaggcccccttttccaaaaaaaaaaaaaccca

SEQ ID NO: 73677 - DNA, 532 bp, Oryza sativa
  unsure (1)..(532): unsure at all n locations
  Clone ID: PAT_MRT4530_73936C.1
caaatacattgtattgaacagcattgcaaagtgttggcagagatacactgggctagaagaactaattgttgcgaggcttgccagcggatgtgatacctaatgcttaccgcatatggagggagcaagcacgaaggctcaagaaaatacgggagaatagctcctgccttcactcctggtatatcaacaactgacctacgtactcttctctaatgaatatgggaacaaggatttacagtgatgtactaatgaactattttaggtgcctcaaagaagaatgaatgccacacttatgtgaagctgtctggcagctctcttctaagagtatgaaggactaatgaaacgctgcaattgcttttttgacaggtggtgtctgctactggctaggttatcctaggaccccgagaactggtcactaggctactaaagctagctgtgtgtatgactctgtggggttgntaaataactagtggtttcattttttaggaagcattttttcttatggttgattaggctttaactttatttttttctc

SEQ ID NO: 73678 - DNA, 165 bp, Oryza sativa
  Clone ID: PAT_MRT4530_73937C.1
atgggccgcggggagaacagatccaccgtcgtccgctcgtgggggcacggatccgccgcttctaggcttctccaaccccctcccctcacccaggtttggcaagcggcgggtcaggtcgtggactttggcgagcgacatcatgggccgtggatctggccgctggag

SEQ ID NO: 73679 - DNA, 652 bp, Oryza sativa
  Clone ID: PAT_MRT4530_73938C.1
ccccccgtacgcgcgcgatcgcggctcccaccggtgagcgcgcgggacagagcaggagcggagcagcgctctgccggaggcgcgctgccgcgccgggccggcgccggctttctttcgggctctggaccgtgagctcggcgtcggaggcgacgacggtgttcgctgtcgctcggcggcgcagcgccagagcaggaggagcgacgccgcgaggatgccggcggcgagggcggcgagcgccgccgcgacgacgacgagctcgacgacagcctggcgtctcattgccagcagctaatcactctgctggaagctcgatcgatcgagacgatgaagtgaaatgtgtttttggatatatggccaacgagatgactcccttcctgtgagcaaagagaatttctgtctcttcttttttgattttttgatgtctttaacgttggcttctttagctttaagtcgaatatttcccaggcgatggttagtgggagagaaaggaggagggggtacttttgggatttcgactttgcgtaatcagagtggggcccagttgccagcgactcgtatccagaatccggctgaaaaagatcagaggatatgttgtgtttgtttagcttgattgatgtggtgttttgccaactcaaaaaaaaaaaaaaaaaaa

SEQ ID NO: 73680 - DNA, 273 bp, Oryza sativa
  Clone ID: PAT_MRT4530_73939C.1
aaactatgatcattttggagccacgtacacattgaaaagaaaagtcacaatgaatgttcaaataattccgacggatatatattagctgctatgaaatctgcaagctaagggcaaataaggaaaaaataatgcatatacatacactgctaaggcaatgaaatgtgtgtacatgcatatagatcgatgcagtagcaagctagcaataagtaagcaaagtgcagcttaattaattattggctagggacatgcctattgtggcgatgaaaaatgcct

SEQ ID NO: 73681 - DNA, 2573 bp, Oryza sativa
  Clone ID: PAT_MRT4530_7393C.1
gacacaaaatccgtttcatagcacaagcgtgggcagcatataaaagcacgataatgtcatcattaacttgatccagatattaagtagagatcataagattgatcagcacaactacaagatgcacaatttaactgctaaaactgcgtttaaaccaccaaactgaaaatgtgcctgtccaaaatgcagcagctgactgctaacctgaacatctccattcaacagcaaaaaatcatacgatccctcacaggagcacatatataatagtattaaaggattttttttataacttgattttcacatacttagatcccgaacttgctcttcttcttcttctgcttcctcctctgcttctagactttaaaaagcacctagaagtctaccaaaattacaaaccccctcatcaccatttcaccacccaaaaaaaccacaaaaaaatcacgagtagtgatttcaaaaacaaaataaaaaacacaacacaatctgatcacccaacaaaaacgacagagaccagaaaacgacgacgacgaacgctagcgctagctgtacaatgttgttcccgattccgatcgatcgatcgattcaccgccgcctcgtgtgcctcaccggagcaggtcggagcgcgacgccgagagctcgcggcggaggcggtgggagaagagccggcacgcgtccatgctcaggtcgacggcggcggcgagcgccacgaacgccgccgcgtcctccgcgcacccgacgttctgcacgcccacctccaccgccggccggctgcatttcccctccccctgcaccgccgccgacatcacgaacccgcggcagctgccgaacggccacatcccgtagtcgccgctcccgcacgggctgcacgccggcgacccgctccgcccgaactgttgcgttgccgtcaggtcgatcgcgaaccggccgcccttcgacgccgggatggtggactccgccacggacacgcccacgcccatgccggttgggtcggggaggacgagctcgaaccggtacccgaggctgtcgccggcggcggcgcccgcgccgcgctcgcgccagcattccaggcgaccccatggcttccacgtgccgtcgcccgggcggagcaccagccacgcccccgggttggatttgctcaccctgtccgtccccggcgacgccacgaacggcgtcaccattgatgccagcgccaccggggagcctgacaggtcgtgcaccgtcaccgaccaccccttcctctccttccccgcccgctccctgtcggagccgaacgccgtcagccagttgcgcccgccgctccccatatcggccggcattgaccgggagcggaggtcgctgttgctgcggcaggagaacttgcaggtgaacatgggctgcttcatgctcccctgcacctggagcacctgcgggctgcactccggctcgccgtcgaactcgaacacgaacctcgggtcgggctcggcgcgcaccgtgatgttgagctgcgcgttcgccgccgacaccgacgagggcttgcgcccgcgcttcccgatgcagatccagctgctgtggtacaccaccggcttcgccgaggcgcccttgaggtcgagcgggatgaccaccttcccgagcagcctcccggagccgccgccgacgccgcacgtggtgcccctccggccagcgtacaccacgatcttcagcctcgccgtgcgcgacccgaacagcgacggcttcgcggtgaggcggtcgaggtcggccttggagaggtggaacgcggcggcgagcgcgcccgtcgccggcgctggcgccggcgccgccgatgcctccggcgagggcggcagcagcagcggcgcgtcggcggtctggtacggcagcttgttgaggcggatcttgcagtagcacggcgaggtggatgggtgcaccccggccccggctccggcggggcgcggcgccaccggcatcttcagcgagaggttgccgaccagcacccgcacgaacgggcacgggtccatcgagatcgctccactcgaagcttctcctcttcctcgtcggcggcaatggcgatgctgacatgaagaatgacaggtttcgaaaggcatgcaggctattcaccatcatgcgtttccaactattctgactgtctcctaagagtaagtcctcagcttggtatctcacggatggtatctctaagtccagtggtcctagtgaatcagcccaatataagtcagctagagattgatcctttaacccagaatcacttttacttcgaggtggagaattggcacaaagtgcctccatatctttggcatcatccatacaaggattatcagcaacctttgctcctgctaagtcctgaagaaagccttgaaacccttgtgaggttgaaggaagaacaccactatcactaccaggacagctgctagctgaagtgtttgaactttcttgcttcctagatgctgccaagttaaaactgaactcatcacaggtttcttcagcaccccagatggttgaatgggatgcaagggctggctgctctactgttttatgacgagaagcgtgaagagcagcagcagcatcaaatgaatcgtacgagtcgc

SEQ ID NO: 73682 - DNA, 222 bp, Oryza sativa
  Clone ID: PAT_MRT4530_73940C.1
atgcgcagcgaggacagcagcgtcccgtcatcccccgagccccccgaaactgacaaggccgcggcaaccgaagaaaaacccgaccataccactgccaatcaccgtggagcaatagagactggtattaaagcctctgcttccttccgccccggcggcttcgcaccgctctccgtcttctgcctagtcgtctccactgaagaaggagggacccgcaggcggtag

SEQ ID NO: 73683 - DNA, 433 bp, Oryza sativa
  Clone ID: PAT_MRT4530_73941C.1
gtgaaacagcaaccgataattacctatgggctttcgctacgttccagtttgctttcctaatcctatttgctcatattttctacaacttggtatggagcttttgccctcaataagttttttttttttgccctcaataagtttttttttttttgacgtaagctcaataagttttctagataatatcttcagcacattgcttattacaattactaaacatgcagttaaaaatgggggcagtccttgcaatcctacttgcatcgttcactggtttcggcatcgctattagtctaaatgcaatgctaatagaatacctgaggtggagactcctgcggaatcaacggttaactcaacgtagaaatcacagacatggtcaatctggaaacaatgcttcaaacgagaacactgcaagtaatgctaggcagcaaggcagcgg

SEQ ID NO: 73684 - DNA, 3797 bp, Oryza sativa
  Clone ID: PAT_MRT4530_73942C.1
atgggcggcgcctccaagctgctctcctccctcctcctcacctcctcgccgctccgcctccgcccctccgccggcgccttcgcgctcttcctctccccgcccgcgtcccgccgccacctgctgctctcctccccggctcccctccgcaccctctccaccgcctccgcctccgccgccgccggcggagcctcttcggattcgtacagctcgggctcgtgccactctccttttcccgagtggtcacgcctggtcgaccgcctctcggcggcgggctacggcgcgcgcgcaccttcccccgccgatgagctcgacctcgaccccgaatgcggcctgtcgtccgacgctgaggccgcggtgtcctccttcctcgccttcgcacgcgaccggcctgacctcctcaggtctctgccgaggaaggacgtggaggtcttggtggccaacgcggcgccggctctgttcaaggacggggaggcatcagagctgcgtctgcggcaataccttgccggggaagggagcgatgtgactcagtcagagagagcggaaaccatcgatattgttcggtacttattaagttacgcatacggttctccggtcagctatttgaaagataaggaactgactgattcagctgtgagaaatatcttggctgagtttgtaagttttagtggatttcctcaaacctccagttacgccgaatcaacagctaggcaaaatacattgggctctaggcctccaggacaaaatattgaaatgaagcgaggtgactggatctgtacaagatgtagctttatgaatttcgctagaaatgcgagatgccttgagtgcaatgagcatcgaccaaagaagatgttgactggtggagagtgggaatgccctcagtgtgtgtattataattatgggaggaacatgtcatgcttacgatgtagttgtaaaagaccaggaacaataccaccaaatcctgctggtgctggtttagatggagtggcacagtttcttaatacatccattgttggtaaatctgaaattgagagaaaactcgctgaaaatgaccagaaggcagaaaggtggttgaacaaagtatcccaacttgatgattctgctgatttaagtagtctagcagccgacgaggattttcctgagatcatgccgattaggaagggggtcaataaatttgtggttagcacacgcaagacaccattggagagaagactggcaaatgcacagtacagcagtaacaatagcccccaagatggatcatctgactccaagataagtaaaacattagacaggattcttgggcgttctacatctacttcggtgcagaacaatcaatctggtgatggagatgtaaatactagttcaaataaaacaacaagcaatcttggtggcattgatcctgttcctttcgtgccattatctgcagatcagtttgctaagccacaaaatagttttggtgatggacaatcagacacccaaataagtacagaggctgattccatggcaaaaagccaaatggattcaatggagaggagagatgacaagcgatcatttgataccactgagaatgactttcctgagattatgccaatgaggaaaggtgagaatcggtttgttattagtaagaagaaagaccgctcactgacatcgccacagtacaaaaggcgcagtgtgctcgagcatgctgataattccaatttcatcccatttgtcccattccctcctgattactttgccaagaaaaataagcctgtggagaattcatcagatgcaggaatagtgccagaaggccctccatcagctgaaaaattaccagaaacaaaatattcatctggaaatctgggaaattttcagaacagctcacaggtgatgggcagtcaggcagcaaacaacatgaacaatgagaacaggaacggaaattatccacatcaaaacttgagtacaagtggttatgggtatggtgaaagcatcacttatcagcatcaaccacaatctcaagggatggtcggtcgttctggtggtgcttctgaaactggcactcggaatgcaaacaacaaccagggaagctttagcgaaagcagagatagatctacttacaacaggggaagccattccgcacagccaccttataagtcaggttatggtaacaataacaatgcttggagcagtaacaacaatggcagcaataatgcttggagcagcaccagagattatgacaatggtggtcggagcgacaacaatccctattacaacagcagtacttggagcagcaacagcacctatagcaacaacgctgcctggagcagcaatagcagctacaacagtaacagcgcatggagcagcaatagcagttacaacagtaacagcgcatggagcaacaatagcaacaacagttggagtggctcatactctgataatggcggcaccggtagtggcagttccgcatctagacctaaccaaacagcaggctactcaagttacggagaaagtgcgaatagaggatatactggaaagagcttggaaggatctgcagtgaaggatcctgatccattggatatgtctgaggaagctaaggccgagagatggtttaggagggcagcacagataaaggacatctccgagctcgccaacatccctgacgaggacttcccggagataatgccgatgaggaagggcgtgaacaggttcgtcgtcagcaagaggaagacaccactggagaggagattaacatcacctcagtacagaagaaacctgcctatccccggcatcgatgaagtttgtcaaaagaaaaacgaaaggagaaaaaagaaaaaaactccagagccgacccagcacttggtcaccatgctagctgaagtcgtgtggtggcctaatcttattgctgtgcaagatggacatgggtgcacagtttgcagcagtgacttctttgtgtctctgctgttagtagttacccaacaatcaatcagtctttggcttgaagggactgaactttgccgttttagtgggcagaagatatacccaggcaagggtatcaggttcattcgtgctgattcccaggtttttctgtttgccaactcgaaatgcaagcgctacttccacaaccgcctgaagcctgccaagcttacctggacagctatgtacaggaagcagcacaagaaggacattcatgctgaagctgtcaagaagaggcgtcgcaccaccaagaagccatactcacggtcaattgttggtgctacactggaagttatccaaaagaagaggagtgagaaacctgaagtccgtgatgcagccagagaagcggctctccgtgagatcaaggagcgcatcaagaaaaccaaggatgagaaaaaggcaaagaaggcagaggtggcaaaatctcagaagacacagtcgaagggtggtgctacccagaggggtgctaaaggtcctaagattggcggcggtggtgggaagcgctgaaagtctcttgcatcatagggagagttcttctggcttagccttctctccggccatatcgtagaaacagtaccttggtcaagttagcctgccgtcttgaattttcacctttttctgtgagatgacttgtcctgaatgcttcgggtattttgttagtcaatttacaattgcacttatgtttggctattataaaattatcaagttttctgcattgacaattgcgcagtaagtttgatggccttaatttatttgccatctgttttgatgtttcaatcagtcagtgtgttatcatgttcttacaccgtatggtggcaggtgccatcgctaaagacgtaactatcgat

SEQ ID NO: 73685 - DNA, 258 bp, Oryza sativa
  Clone ID: PAT_MRT4530_73943C.1
atggtggtggccgagcggtgggtgccacaggcggacatcctggtgcaccgcacgttcctcaacgagacgttcctcgtcgacgtgctccgcgttggtgtgcgggtacgtgaggctgccagcaaggcggccacggaggctgtggcgagagcggtggtcaggctgatgaatgacgacgacaacgacgccgccgcggcgaggaaagtgagggtggccgagctcaacgtcacggcgcgcggcgcggtggccgagagccgataa

SEQ ID NO: 73686 - DNA, 726 bp, Oryza sativa
  Clone ID: PAT_MRT4530_73944C.1
agtacagtacttgcataatttcagtttgaaaaaaataaaaaaggaacaaaatgtaaacacgatgtgaagttgtatataactcctacttttctacatagtacacaatcttaccaaaacataatgataccaaagggatatataactaattaattaacctccttagcacttggttaggttgaaaagaaggcgttgacactcgacgactaaacgagggcaacctgcgaagaacaccgaggttggcaagctgaccatcaagaacacggtgatccccacggcgacgcccggccgggatctcatcaagaagtccccaagcacatggaacagctgtccatcgccgccaccaccgccgccggccgccgtctcccaaacggagtactcctcctcctcctcctcccactccggcggcgcctcccggctggagtactcttcctcctcctcggtcgccgccgccgccgcctttatctccgagatcctctgacgtagcacgggcatcccctcgtccaccagcccagccccggcgctgccgccgccgccgctgtcgctgtggagggagaagcaccgcaccgccgccggtgatctcctcctggttagcgcccccgtcgtggtcagtggtgatggacgtcgccgccgggagcagcggtgcaactcgacggcggcgctccggcggctgatggcgtgatggcatggagagctttgagacgagtgtctcatcatcatcatggccat

SEQ ID NO: 73687 - DNA, 366 bp, Oryza sativa
  Clone ID: PAT_MRT4530_73945C.1
atgggagcgtcgagcgagcgccgtcgcggcgcctcgggcaaggcacgctgtggtgcgccgtacgccgccgccagcctcctgaagcttggtcacccctcggcaccgccgtcgcgctgccggtccgccacctcccccaacccaaaccagtggaccatctcttttgactactccattatatgcctgatttggcctgtctccactgcatgcactagacatgccggaatcgtcgccggaggcccagcatctaggcacagtgaaaacgtcaaggcgaagcatcaaccggaggagaaccaggtcgccgtgcgctgcgggctcatctccgcacccaccattgccggctgcggctgcttccggggcctcagctag

SEQ ID NO: 73688 - DNA, 2221 bp, Oryza sativa
  Clone ID: PAT_MRT4530_73946C.1
atggcgggctcgtccaggctcaattctagcacggccgacgctgccaaaagcagcaagagcacgccacatgtggccgccaccgctaggccggtggcctgtggcatcccacgtcatgcggcggcgcgtgccgagaggtccccggcgttggtggagaagacgccgtcgccgtcgtcagccgaccaccgctcgcccaagatctcctcccggatcagtacactgccttctgccgagaagcacaggactgccgtgaagaagcagtccatggaacagctcgcggcgatccaggaggatctcaggagggcaaaggaacagctggcaaagaaggagacggagcatcgtaaggtcgccgacgacgccaggaggacggccgatgaggccaatgccaagctccggtacgccctcgccgagctcaagaaggcggaggaagcctccgagaccgagatgttccgagccatcgagctggagcagactaccatcgagtccacgcagaggaaggatgagctccagcggaggctggaggcaacgcggcgccagcaggaggccgacgccgcggcgctgcggtccatggtagcgcagctggaggaggcgaggctagaactggctgacgctattgacgccaagaacctggcgctcagccacgccgatgacgccatcagagccggcgaggcgaacgccgcccaggtggagctcctcaacgcggaaatcaaccgactcaaggattcgtttaattctgagctagagagcaaggtaaaagaatccgctgagaaaaccaggaagctggaggccgagacgtcggtactaaggatcaagctcaagaaagccaaggttgccgaagagaaggtggctgaattggaaggtgccgttgaaggtctcagagctgatgttgccaatgccatcaaggccaggagagaagcagatggattggttggtgaatggaagaagaaggctcaactttttgagatcaaactggagctagccaaccagtccagcatcctcaaggctgaatccatgagttcggtgatgaaggaattggatgcggcgaatgctttgttgcaggtaaaagagtctcaaattgctcttcttcacgacaagatagagtccttggaacatgaagtggtgaggcagaatgaagatatcaatgcatcaggtcagcgcgtcgatgccgcgcagagaggagcattagccttaaggacagagatccaggagcttaggtcaaggcttggcgcgatggaacaagagaagaggggtactatcaaggatggaagctttacaagctcccaaattgaggccatatgtgaagagaaggataagctagctaaggaactagaatctagcaaatatgaatgcgagaaagttagaaaagcaatggaggatatggcctctgcattgcaagagatgtctgctgaggcaagagagtcacaggagaattacctgcacaaagaaaaagagatcgagcacaccagggcaaaattacaagagctcaacatcagcctcaacaacaccagggataactatgaggtaatgcttgatgaagcaaactacgagaggatctgcttgaagaataaggtggaacagctggaagcagaagccaagaccacatctgaggagtggcgatccaaagagcttagctttgttagctctatcacaaaatcagaagaagagatcatgtcaatgagaactcggttgggtaaagcactagagacggcaagagacatggagaacagaaatgctcaactagaggagaaggtaagagaactggaagctctgatggacaaggataataattacagaggaggcaaagacacaaaagcgtacaaagagaatgatggcctgcatctgcatgtcaaagaatcatctggttcagagaaaatcaaggacttgtattctctgataggaaatgacgagggaaacacggagaaagatgggccagttttgctagtttctaagatgtgggagaacagctacaacttatctaaggagagggacgacggtgaaccggaagttgatctgttggacacagacagagacattgctgctgatggcaatggcagtaggttgtccacagagaagaccaacagtaacaccaaattggtagtcaagcagaaccagcaaaagaaggctttgatgaagaaattcggtggcttactgaaaaagaaaagccaacattaggtaatccttatcaaataacaggaaaaaattgcttgatctataacacatatga

SEQ ID NO: 73689 - DNA, 258 bp, Oryza sativa
  Clone ID: PAT_MRT4530_73947C.1
caaaagcgcgggcgagaaacagaaggggagaaagcagcggcggggaaaacgggagcaccgaagtcaacagagagcagaggcggggggataacgaaaacgggggcaagagggggagacgaaaacgagccacggggaaaggggagggaaaaaaccaggccgggcacgggtgaaaacggagggcaaggtaacgggcggaagacggaacgggaagaagccgggaagcaaacagcacaaaccggaccggcgaagggcaactaa

SEQ ID NO: 73690 - DNA, 3183 bp, Oryza sativa
  Clone ID: PAT_MRT4530_73948C.1
atgaggaagatgagggataagggagagggatcatcggcggccaggaccgagggccggaagctcgtagtgagggccagagaaggtgaggccgagctagatgaggtggagcatatcgacgttggccttgagcgtgtggagtggggcatcggcagcggaggcgaggagccggtggagatccgtgaggtgtggacggacaaccttgaggtggagctcgcgttgatccgcgacgtcgtcgacgagttccccttcgtcgccatggacacagagttccctggcatcgtgtgctacccacgccgccgctccgctctgtgcgccgctgttgacagaaaacacgaggcctgggagatctgcttaactccagtgcaggtccaaagcttgccttcggcgctcccgccgccggccaccgccaccatcgcatcctccagcgctgccgacctgtacgggctccaggtgctcaccgacggcatccaggacgacgacatccagcgcaagagagagatgaagagagggagatggggagagaggaggaagaagaggaggggtgaggatgacatgtggcgacgcggccgcccaaaaccccgccgcgtcggcccccggatggcccccgccgcggcggaccccgacgccgacgacccccccgcgcgcagatccgacgccaccgacgtcgccggcaacacctgggacctcgccgcgctgccgcccccgccgcccgcggcgaggggcggcggcggcgaggtctacatctaccgcaacacgtacaacctcgtcccccgctccatcggcgggtgccgcgggagcgtcaggtcgctcaagttcttcggcaacgacgtggaggtgctcccgccggaggctggcgagctggaccagctcgagagcctgcaggtgaaggtgtccgcgcccagggtctccggggcgccgctccgccggatgcgggcgctcaaggagctcgagctctccattgtcccgcccaggccgtccgcgtgctccatactggtcgaggtcgccgcgctcaagtgcctcaccaagctaacaatctgccatttctccattaggtatgttcaggccagtggcctaattggtccgggcagtgttcttttcagcaaagttcttcaatttgttcataacggtgtcttctatgtaattgagcaacgctatgcaatgtacctccctcctgaaattggctccctaaggaagctgcaagaacttgatctttcgttcaacaagttgaagaacttgcctaactgtataactgagttgggtgccctaaagagcaagctcaatgatgattatgttgatgaaatggctgtgaatatgacagaagatgagagcccgttgcatgatatggaaaacaacattgatgatcatctaccagatggcttctatgatgcaggacgagatatgcctttcatgccattagaggagtatgagcggagtattggactatatgcacgtgaagttattctcttggaccgagaacaagatgaagagttggatgcaatcgcgtcttcagcacaaatattgctgtctaatttgaaaatgccaagctgttttgtagctgatgaagatgcaggccaggacttactaagggcatctgtgcttgctttgtttgtttctgactgctttggaggttgtgatagaagtgcttctctcagtagaacacggagagctattgttagcttgagaaaggagcaaccttttgtttgcacttgttctgctgggagcatatgtgacagcactgaagcatctaagcggatcaataatctttacggccactttgattttactggcctgcaccgagctgtcctaatgaagaccctccaattccttgtgagcttgtgcgggggcatcttgactacacacctcatgcttggaatgttgttcctgttagaaaagggaatacatgggtatgttccactcagtcggcttcagatcatacttgatgatcagggttatactccacggtctccctttccttctgtctcactgtgcaaagaaatagaaactacagcttctagttcagtctactactgcaaaattggtgctgttgatgcggcagcaaaggtaagatatctagacactcgatgtgcttctagtgatgaagttaaaaattttgaatacaagcttctcgcggaagtaagaatgctgggtgccctaaggaagcaccaatccatagtggaaatatatggtcatcagctttattctaaatgggttcaagctgatgatgataaggaatacaagatattacagtccacaattatgatggagcatgtgaaaggagggtctctgaagggttatttgacaaaattgctgaaagagggcaagaagcatgcacctattgacctggcattctacattgaagttgatatctggtcatttggctgttttttattggagatgcttacacttcggataccctaccagggcctacctgattcagaaatatatgatctcataatgaggaagaagcaaagaccaagactaactcaagaactagaagcgttctggacgttagacaagccaattacgaggctggagttgggtatcacatctgatgctcatgcagaaaaactaagactgttgatagatctcttctaccagtgcactaaaggaattgcatctgagcgcccaaaagctgaggcggaacctgttgatgagacagccagccagatcggcctgcgccaggatggcaagttatgctgggtggttttagcaggaaggcggctagctgaggcttcttctgagtacgtgatggaggaagctgctgccacccgatccactctcagccagcgccaccgccaccggatccacacgcggtcgccgtccccgctgtcagatccaccgtgggagggaggagagagggggcagagggagccgtcgccgctggatccgtcctcatccgccgccggatccacccgcggccgccgccgacgccgccatcgatgccggatctaccgcgggagggaggcgagatggagaggaggagatggcgagcgaggcgaatccatccgtggctcactcggcctccccgtctccgaccactctctccgcctcaagctgctcgcctccgaataccaccaccgcctccacgtcttcgccctccaggaggacctccatggtgatggcatcgtggatctggccggcaactcgagggaaaaagaaggcctgcgacgatgttgtggatag

SEQ ID NO: 73691 - DNA, 786 bp, Oryza sativa
  Clone ID: PAT_MRT4530_73949C.1
cggaatcccgggtcgacccacgcgtccgccgtccgcgtgctccatactggtcgaggtcgccgcgctcaagtgcctcaccaagctaacaatctgccatttctccattaggtacctccctcctgaaattggctccctaaggaagctgcaagaacttgatctttcgttcaacaagttgaagaacttgcctaactgtataactgagttgggtgccctaaagttcctcaaagtgactaataataagttggtggatctaccatcaggaatctcttctttgagatgtcttgaaagccttgatttatcaaacaacagattgacttcccttggatcagttaaactcatttctatgcttacactacagtatttaaatcttcagtttaataggatctccaattcttgtgttattcctgcatgggtatgttgtgacatgagaggaaatggtgaaaacaatatgaagcctggcaaactaaaatctatagctgttgtgagcaacacttcagcagaatctagaagtatgaatcatacttgcaatgcttcacgtttatgttcacatccagaagcttccgcaaatttaaaagttcatcccacacagaaaacaaagaaaggttggaagcggcgggattgcctgcaacaacaagctcgtcaagagcgtttggaatcaagcaggagcaagctcaatgatgattatgttgatgaaatggctgtgaatatgacagaagatgagagcccgttgcatgatatggaaaacaagtcagagatgaaaggcattgatgaagaagcttcattaca

SEQ ID NO: 73692 - DNA, 3280 bp, Oryza sativa
  Clone ID: PAT_MRT4530_7394C.1
ctcagtctccacgcctccaccactctcgtcctccaagcttgtgggatcacctctgtcagtcatattgccaccttcgcaaataagggaagcttgctactcaagatagcatataatcgtcttctattacagcactggaacatgcgcgatcacatgaaactgcccagaggtagctgtgcgggccatcagcccctgactgccgtcctcagcaatttcaatcatcagcaacaaatcatacgatccctcttatgtgtacatatataatagtattaaaggattttttttgatgcgcgattaattcatacttagcatccacatcattcaaatagcatcagaaacataaaccactttagtctgcagagtaccaaacaaacagctaaattactggaactgaaattaagccttccattaaatgctccatctcttcacccagcagtagggctgaggaaaccaagatgactttagcggtacttgatgaagccgatgtccttggcgttgctgcggaagcactgtctgcagcacatgagcccgtacttcctgatcagtccatgagggttcccgcacacccggcagacgcgggagcccggcccgtagttcttggggtgggagttccacacgttggagtgccccatcttcgccgccgccgccgccgccttcgccttccgccgccgccggtgagaggtgggaaaccctagagaggcgcgcgcgtgtgggagcctcgcaggtgtggactgggccatggctggcggccgccgacggtgacctccagctctggctccgcatccaggtgagagtcgatggcgaacttgccagccttggaagcggcgatggaggactccgccaaggggacggcgtggtcgacgcccgggaggaggaggtcgaagcggtagccgaggctgttggaggcgcccgcgccgccgcgctctcgccagcactcgaggcggccccatggctcccacgacccgtcgccggcggggcggaggatgagccacgcgcccgggttggagcggctcacccggtccgtccccggcgacgccacgaacggcgtcaccatcgacgccagcgccacgggggaccccgacaggtcgtgcacccgtgtgcactccgtaccaccccttccgctccttcccggcggcggggggcgggcgtgtcggctccgttctgatccaccgacccacggtaggtctcgcttgttgccgcggcacccgatacttgcaggtgaacatcggctgcttcatgcttcccctcacctgcagcacctgcgggctgcactccggctcgccgtcgcaactcgtaacacgaaccatcgcacccacctccgcgcatagggtgaggctgaggtccgcatatataggggacaatggagcagccgctcttcttcccaacccgtctgcaggcggccgcaggcgccggagccccggtgccgggggtgccgtggcgcgggcggggccgccggcggtgcctgcaccgccacgtgctccagcagcagctggcgccgctgctggcgttctagacggacaagcggacagtaggcgggcggcgcgcggcggagtacgacgagaagaaccgagaaggctcccctgccgcgcatccagaagctgctgaaggcggacggaggacgtgggcaagagcccgggggggcgcctccgcgctgttctgccaagccgtcgggagcgcggcatccgccggctccgcattcgcccggggccggatgccgatgtaaacgggcgccgccgccgggagcgcacccgcccccgcagccgccgccggcggcgcccccggccttccgagcgccaggtcgccaacgagcagcggcacgaatccgccccggtccctggctgcgcgatgcgatctcaaactcagaagtcctgcaagaaacttagcaggatactggctccatcttggcgcgcggcatacatacgccttgctgggagaggtggcgacaccagcacccgtacgaaatacgccgggggacaaaacggcatagcagaaccaaacaccgaccgaccttaaccagggcaccgccggcaacttgaaggtggaagcgccgcagggattcgcaggccatggcgcggcggcagctggcttccccccggcacctccaagctccgaatagtgatgatccatatggttccatgcatgcatcgctgaggtgctagctagctactatagctgctcaaatcaaatgctcaatgtgtcggtaattaattaatgtggtacgtattaacttaaccgatgtacgtaatggacgctcaagctaattaagggatgtacaatttactaattaatttaatttgtaatatatagccgattaactgtgaggttgaaggaagaacaccactatcactaccaggacagctgctagctgaagtgtttgaactttcttgcttcctagatgctgccaagttaaaactgaactcatcacaggtttcttcagcaccccagatggtcgaatgggatgcaagggctggctgctctactgttttatgacgagaagcgtgaagagcaacagcagcatcaaatgaatcatagctgcagggattctcaagaaacaatgtgtttttggcaatagctgtccctggacaatctgtattagtacctatggatgcttctgttagtaagtatccaacactgatatcagtaagggtatctgcccactctccttcagatattatagcacaatccatccccagattagcctctaaaacttggtttgtggaatctttttcttgcttctgcctgctaaaccatgaggcgggaaaatcactgtgctgctcttgccccttagcgctcttgcctgtactaaatgtcatagcaagaaataatgccggccgatcttttgaattacaaaggtgttcctcaggagcacaactattgagaaaagtaccatccttctgcacacaagcgtctgagggagatttggcatggatgtcttcaggcatcatgcaattcttaaaatgagttgaagatattccacttcctccttcaagctcagcaagggaaaaccaaccataccttaatcgaaaaacaggcgggctattcacagaaagaaaaacatcagccaccacaactgtatctcttgtggtccatctctgataggtagctaaatcttctcggtgagcacaatatggaaaaagcaaaagctctccagacgcaatgtttgagctgccccacttgcggttaagatgttctagtacagaagatatttttttcctaccgctaactgtgagttccagatgtggattatgttcatccttttccaatgcccctcgtgccgaattcc

SEQ ID NO: 73693 - DNA, 620 bp, Oryza sativa
  unsure (1)..(620): unsure at all n locations
  Clone ID: PAT_MRT4530_73950C.1
atgaaggcattggcgcaggtcgggaatagtgaagcacaacaatggctgggaggggaggaggatgtggtcgggggggagcagcagccatcggataactgtgagaggagccgctgccctcgaatccgccgcgggaggagctgctgccacccgatccactctcagccggcgccgctgccgccagatccacacgcggtcgccgtccccgtcgtcagatccgcttgggagggaggcgagagggggcagagggagccgccgccggatccgtcctcatccgctgccaccgctgccagatccacccgcggccgccgccgacgccgccatcgatgccggatctaccgcgggagggaggcgagatggagagaaggagatggcgagcgatgcgaatccatccgtggctcgctcggcctccccgtctccgaccactctctccgcctcaagctgctcgcctccgaataccaccgccgcctccacgtcttcgccctctaggaggacctccgtggtgatggcatcgtggatctggccggcaactcgagggaaaaagaaggccggcgacgatgttgtggataggccgtcgacgatgtggtggatcggccggcaacgttgagggagaggnataaaca

SEQ ID NO: 73694 - DNA, 251 bp, Oryza sativa
  unsure (1)..(251): unsure at all n locations
  Clone ID: PAT_MRT4530_73951C.1
cccgcctcttttttttnttttttttacacgtattgattaattaacactggagaatagtttgtgggacattttaactaccggggttatactttcatactcccatagctgcctatgctcacagctttttaataaatccataacacacgcgttcatttcttactgaataaatcactcccaaacgcaacctaattttgtggtgctaactgtgaattccttgtgtaattatatttatttgttgagtaaacaatcta

SEQ ID NO: 73695 - DNA, 3244 bp, Oryza sativa
  Clone ID: PAT_MRT4530_73952C.1
gaaaagtcatcccacacagaaaacaaagaaaggttggaagcggcgggattgcctgcgacaacaagctcgtcaagagcgtttggaatcaagcaggagcaagctcaatgatgattatgttgatgaaatggctgtgaatatgacagaagatgagagcccgttgcatgatatggaaaacaagtcagagatgaaaggcattgatgaagaagcttcattacaggatttgccaaaagaaacaagttctatatctgaggacttgtcatgtatagttgatgatgactcctatgggcatattaaagatagtggcatgatgttacaggaccataatgaagaagaaaagcctggattaagtatgaaaagccatggcaactgttcttgtatcagcggtaacactgatattttgagcaggagaaggatccgcagtgttgaaaacgaactagaggattctgcatcatcagtcccatgatgctgctgtggttgttgaaagagatccttcagaaccatctaagcattcatggaaatctaaaaggcaccctgatatgggactgcaatcctaaacctagcaaatgcccctagaccatttgatgaatgctcaaagttatcctataagtacagtgtgcaatcgttctgcagcattgatgatcatctaccagatggcttctatgatgcaggacgagatatgcctttcatgccattagaggagtatgagcggagtattggactatatgcacgtgaagttattctcttggaccgagaacaagatgaagagttggatgcaatcgcgtcttcagcacaaatattgctgtctaatttgaaaatgccaagctgttttgtagctgatgaagatgcaggccaggacttactaagggcatctgtgcttgctttgtttgtttctgactgctttggaggttgtgatagaagtgcttctctcagtagaacacggagagctattgttagcttgagaaaggagcaaccttttgtttgcacttgttctgctgggagcatatgtgacagcactgaagcatctaagcggatcaataatctttacggccactttgattttactggcctgtgcgataaatcaagtagatatcatcaaagaaaggagaaattcaggaattgtaccgataggagcactgcaatttggtgtttgtaggcaccgagctgtcctaatgaagtacttgtgcgatcgagcagaccctccaattccttgtgagcttgtgcgggggcatcttggagtacacacctcatgcttggaatgttgttcctgttagaaaagggaatacatggtgtaaggatgatagtggatgcatgctacccaaccaatataaagtgaagagacagatccagagtacttttgcaggtatgttccactcagtcggcttcagatcatacttgatgatcagggttatactccacggtctccctttccttctgtctcactgtgcaaagaaatagaaactacagcttctagttcagtctactactgcaaaattggtgctgttgatgcggcagcaaaggtaagatatctagacactcgatgtgcttctagtgatgaagttaaaaattttgaatacaagcttctcgcggaagtaagaatgctgggtgccctaaggaagcaccaatccatagtggaaatatatggtcatcagctttattctaactgggttcaagctgatgatgatccggaatacaagatattacagtccacaattatgatggagcatgtgaaaggagggtctctgaagggttatttgacaaaattgctgaaagagggcaagaagcatgcacctattgacctggcattctacattgtacgagaagttgcttgtgcattgttggagctgcacaaaaagctagttattcatcgggacataaaaagtgagaatgttttggttgatctggaatttagagagaagtgatggcacaccagtagtcaaactctctgatttcgacaacgcaattcctttgcattctctctcccacacatgctgtatagctcaccttgggacatatccacccaatgtttgtgttggtacaccatgctggatggctccagaggttcttcgtgccatgcgagacaaaaaccaatatggactggaagttgatatctggtcatttggctgttttttattggagatgcttacacttcggataccctaccagggcctacctgattcagaaatatatgatctcataatgaggaagaagcaaagaccaagactaactcaagaactagaagcgttctggacgttagacaagccaattacgaggctggagttgggtatcacatctgatgctcatgcagaaaaactaagactgttgatagatctcttctaccagtgcactaaaggaattgcatctgagcgcccaaaagctgaggcggtttacaatttactgtgctctctacccacatgctatgacatgaggtgaaagtgtggatcttaaatcagtatgacataaggtgaaaatgtggatcttgaatcaggaacctgttgatgagacagccagccagatcggcctgcgccaggatggcaagttatgctgggtggttttagcaggtcaacagatctggcctcgcttggtttgaacttctgaccagcatgccgcttattctttgagtgctggcgatgcggaacacgagaaatccaaccaaaaccaaagccggtggcagcattgttctgagttctctggagttcatcctgtgtcagttttgtagcagccagccccgtttcccgcctcttgtgttgctgcggtgttggcctgaccatgtgttgcttgtcgtgtcatttgtttttgtttttcattattgcgttaatttattgatttaggccattcacaaccccaaggcgtctgtctgctgcacatgacccattctgtatttgtatctgtatctgtatgtacaagtgtcggtccatccgtgatccatgtaaccctctactgttgagtcatgtaacaataacagatactgttttgaggttatttatcatgagggattgtttttccatttaaagtttcaacaatagtactcatggcagtttatcatttgtgttagtatcacatagcatgcactgtgtatgagtgtatccctccctccagaggaacaatgtactattctcattaaaacagtttccctgcatcagttaataatattcgttgtgcgtgaactgtactccaaaaaaaaaaaaaaaaaactcgagggggggcccggtacccaattcgccctatagtgagtcgtattacaagt

SEQ ID NO: 73696 - DNA, 297 bp, Oryza sativa
  Clone ID: PAT_MRT4530_73953C.1
atgaaaaacagtaacgagaaagatgcctgccagccttgggtcaaagtatatagggttgttcacgtggagacagggagtacgacagagcaggttgcgcctggagaggcggagagacgcgctgatgagatcactggcaacggtttcggcatcaatctggtgatccatgactcgatgcagctgcctgctacctctaccccgacctgtggtgctacaccgacttcagaagcagaagcagcgaagagaagagaagatgtcatctatagaagtaactatcccggtcatttcggcggtcaatag

SEQ ID NO: 73697 - DNA, 225 bp, Oryza sativa
  Clone ID: PAT_MRT4530_73954C.1
cgttctcaacacctcattgcatataatttcctgaagaatttacaagagatttagaagattaagatgtcgtgtggtggaagttgcaactgcggttcgagctgcggatgcggtggcggctgcggaaagatgtaccctgacctggcagagaagaacaccaccaccacctcagtgaccatggtcctcggtgttgcacctgaaaaggggcacagcgaagcgggtttcgag

SEQ ID NO: 73698 - DNA, 2897 bp, Oryza sativa
  Clone ID: PAT_MRT4530_73955C.1
atgcccatgagctgcatgggaggagtcagggcgggtgcgtgggtggcgcagggcaaagcgcagcaggaagatacccacgcggcgtccggctctgcctcatcagcggctctgcctgatcacccttcatgcgcgcgcctctctctccttcccggcttctttctccggtctctgccgtgcgtccgcggccagaccagaccagaccagaccagggctatacattgcgttgctgggcgctgtcttttgggcttggcagccggtcagtggggcgaaataggagaggagggcggcatcacgacggtggccagtggcggcagcggcggggaaccaaggtggcagcctggcggagctcgacggtggccaaagataggcctcgggaggaggcagcgaggcaggaacggcgcgggcatcgacggggaggcgggggtcgtcaacggtaggcgcgatgccgtcgaggtcgctcacctcgccgccaccgggatcttcgacctcgagctcgcttgtgccaccgctaccaacacctcctaggcctctccgacggtccgacctcgaggtcgcacgtgccgccgccgcctcccttctcaaacgtcgcagccgccaccgcgtcccttctctcgtgtcgtcgccgccgccgctggggtggtcgggacagcgcgcagccggcggcggggaaggaggcacaactgatagatcgatgacgatgcccaacgaagacgaccggttcgacggagacgaagccaagtgaagaagagcacgtggtgatgcccccatgggccaacctcccgttcgatctccacgccaccacgacggctcctctcccccagcgacgctatcgaccaccggacggcccgctgcgtcttctccaagtccagtcgatggggaccaaaagagccaggcaaatagatccaatccagtcacctccccgccgggcccgccgacctcgccggcagcggctactgcaacgacgtccgtgtctccttcgtgacggcggtagcggcggcggtgccgccgggtgctcgcacgctgcctccgccggacaccgctcaaccccactcgccacctccaccgctcaggcctgctcgccgcctccgccgctgtgctccgccggccgccactctgccccacgtcgcccgtagccgccatcactgcagagaatggacaaagagagatgatgaagggatagaagagaggaaaagagagaggggcactgcccgtcaggagtcgggcccgtgccggcccggcccgaccaccgggccatgcctgggcctctccaccggcaccatccaaggcagatcctccgtccccgctggaaatgtcgtggcgcggcggtcgcttcctcgatgtaaaatcaccggttcctagtctgctccgccccgctcccccgtgccgtatcctcgcgcccgcgaccgacgacggcccctgccggagccgctccgccgtctcgatcggtggtccaaggccgctcagcgtttccatgcgtgtgggaggatctagccggagagctatagcgtgtaccacaatggcctcaagagatcattctggcttgactcgacagcttttagattttcaacatggtacagtagatgagatagatggggaacatgatccattcatggagttgaaagcaaggttcatggacttcaagcacaggaatcgtgtggataatatttctaactatcaaaatcttgctcagcagcaaacaccaaagttcatggtggttgcttgtgctgattctagggtatgtccttcaagtgttttggggtttcagcccggggaagcatttactgtccgtaatatagcaaatttggtaccaccatatcagcatggtgcttcagagactagcgctgcactggagttcgctgtcaacacactagaggtagagaatgtattagtggtaggtcacagccgttgtggtggtatccaagcactaatgagtatgaaaagtaagcaagatgattcgcaatctagaagctttatcagagattgggtgtcaattgcaaagagtgcaaggttaagtacggaagcagcagctggaaatttgaattttgaattacagtgcaaacattgtgaaaaggaatcaattaatagctcactgttgaacttgttaacatacccttggatagagaaaagggtgaatgaaggaactttgagccttcatgggggctattacaattttattgattgcacattcgagaagtggaaattagtataccgccaagggttggaaggtggaagcaagtatgccataaagaataggactacctggtcttgatcaagaggcattgcttacttgggtaaatttcactctgccccctgcagtttagcatggttttgctttgccactgtgctgtccattttcattgcactttgctccattgtggtattgacattctgcaagaacgagtcccagtatcaagtcactgttacggtgttgttggtaccattgattaacataacacttgacggccatacttggtcatgttgtatgttatcagcttcacagaggtacatgtggcactttaacagttatttgatacagtgactaggctgcagttgagcgaaaccacaatggagtgaagtgcaacagaaatgaacattatggcagcaaagtgaaagtttgtcaaactgccggggacaaagtgaattttgtccaaatatccctgtattattttctgcttagaagcatcatattaattcaataagctgcaaactcatattcataccaaaaacatgtacgatcttgccacatttggcaaattattgtgttgtatcatttatcgtgtaattgcaaaaataagatagagctttgtaatctggtgtgccgggcagctgctgtatcaatataataattctcaaatagttgaaacaatgttgtgtttaaagttcaatctttactgttc

SEQ ID NO: 73699 - DNA, 349 bp, Oryza sativa
  Clone ID: PAT_MRT4530_73956C.1
cccaaagggaaaatcaaacaaaaaattatctttttacgggggaggggtacatcagcaaccctggctccgaacgaaaaattacccatccatacttttaggggcaatcacaaggaaaaatttttggttaggtagcacagccaaataaacgccggggggatccccacttgccggggaaaagtctcggggaaagcttgcagcgggttcaatcaaaggaacctctaaagaaggaaccgggaaacaaccccaccagaaggctatgggctttgcaggaagagaattccatttacgatctaaacactcaccagtggggcctggcgatatccgggctggaaccgaaatggggggcccc

SEQ ID NO: 73700 - DNA, 393 bp, Oryza sativa
  Clone ID: PAT_MRT4530_73957C.1
atggcgacgtcctcgaccagtatcgtctggcacccgccgttcgcgatcgttgtgatcgtggtggttgtggcgggcgccgtgaagagacatgacgtcgggaatgattctcgttgtctcgtggttttcaccattggcatcgccagttggtggctgctctgggtgcgctgcggcagcgacctcttcgaacacgttgctgaggaccttgttgcttcggaagtcatcttcctcggctcgcggttcatgtcggaacgacaaggtttggccgcatcagaacccttctcgagctgggatgtcgtcgatgctccgttctccgcctcggcgggaggatctttcgacatggagtcgccttgggaatacttggctgaggttggcgttgacgctgttatcgactag

SEQ ID NO: 73701 - DNA, 1203 bp, Oryza sativa
  Clone ID: PAT_MRT4530_73958C.1
atgcggtcatccgatatggtggccgaggtggcgccgccgtatattcggtggtcctcaggcgatggcgatgaggtccatcggcctgccgacaggggaactggtcacggccgcgtggtaggacgaggacggccagccgacccctccgactacctcgctagcgctcttgcagtccgtgtcaccatcatgcactcgtgcacggtgcaccgctctcgcctgcgtgtctgctctcgccggcagcgctaccagcctaccacagccggcctgcaggtctccggcctatggctagcatcagatatggaggtggaggcagtgatcctgatggccgctcagatctgggaggtgatggccggtgcgcgcacggcgcagatagcgcggacgtcggtgctccggtggctgggaggtggcaacgccagtggcaggtggggagttcatcggctatttataggcgacgagaggcagtggttggaggcggtttcggaggagaaggagaaggggaacacgacgcatcggcagctcccttccgcctccgccaccagccgccacccccatcctgaccccgacagcgacgccagcacgctgaaggagacggagtacggttggttcgccgcggtccgagagggagtagcggccgcgcgggacacggaggcggcgaccgcgtgggacgcagaggcggtggtggcgaacttctccgccaccggccgccgcccccatccggagccccacctccagctgcatccaccactgccctccgtccttatcacgaccccgcctccagcctcctctgccatcagctaccgcccccatcccgagcaccatctcgaccggtggcggaggcggcagctggaggcgaaggcggagttcgccaccaccacctctgcatcccgcgcggtcaccgcctccgtgtcccttgccactgctgctccctccggaccgcggcgccgaactcctgcttgccgccgcgccgtgcctaagcgccgacgtccgcgccatcctcgccgactgcccgtccccgtgccgtcctcatcgactgcccacgcacaccgcctgtcctcgccgggggcgggtgatcaggtttttggggagtgcctcccgcacgactgctcatcgcgatgtctggagtcgccgccgctgctggaggagatggcggaggtggtgcgccaccaacaggagccggagctggtgcgccaggaggaggtgccatga

SEQ ID NO: 73702 - DNA, 273 bp, Oryza sativa
  Clone ID: PAT_MRT4530_73959C.1
atggcgacgccgccggcgcaggcggtgaggctccgcctggtcttcgacaaccagcgcatcctccggcggtcgctgagggagagcggcctccgccgctgctggctcctcctccccccggagctgtccaccgtctccgacctcgccgcgcacatcgcggctcggttccgcctccgccgctcctgccccagctgcgtcatcctctcgatagatggattcgtcttaccaccgtttgagtcgacttgtatcttcagggacaatgacatcataagatag

SEQ ID NO: 73703 - DNA, 363 bp, Oryza sativa
  Clone ID: PAT_MRT4530_7395C.1
tttttggtttttttttttttttggtttttttttaaaaagaagcttctgacatttattatttcatcgatgattccaaagcgcgcaaaagaaaatcgaatccaaacaaacaggttgggcttctctctctctctctctctctctctctctctctctctcctccaaatctttggaaagaagaaaaaacaggggaattaaaggcttttaaaacaagaggagaagagagaaactttgaaggaccctcatatgtatgaccctcatgtggtgattcaattgggttatttagtagcaggggttttgttgcccttgggggggcaagaggcccccttgttgttgcccctagacctttacccttgccagggcccc

SEQ ID NO: 73704 - DNA, 660 bp, Oryza sativa
  Clone ID: PAT_MRT4530_73960C.1
atggcgcggacgtcggcgcttaggcacggcgcggcggcaagcaggagttcggcgccgcggtccggagggagcagcagtggcaagggacacggaggcggtgaccgcgcgggatgcagaggtggtggtggcgaactccgccttcgcctccagctgccgcctccgccaccggtcgagatggtgctcgggatgggggcggtagctgatggcagaggaggctggaggcggggtcgtgataaggacggagggcagtggtggatgcagctggaggtggggctccggatgggggcggcggccggtggcggagaagttcgccaccaccgcctctgcgtcccacgcggtcgccgcctccgtgtcccgcgcggccgctactccctctcggaccgcggcgaaccaaccgtactccgtctccttcagcgtgctggcgtcgctgtcggggtcaggatgggggtggcggctggtggcggaggcggaagggagcctgtcaacattagccaccaccgcaactcgttgacatcacccaatgcgtcgagtcgccatggttggccaatcggagatggagccaacgccaacttctcctcctcactgccgatgcgtcgtgttccccttctccttctcctccgaaaccgcctccaaccactgcctctcgtcgcctataaatag

SEQ ID NO: 73705 - DNA, 383 bp, Oryza sativa
  Clone ID: PAT_MRT4530_73961C.1
ccggccgggatcctcaacactactgattccaccatatgctaatgtatgtttatagactacaagaaagccgaagcatgcaaacacggcatacaccatcaagatctttgctcatgatcgccttaattggctcttctgtgacagtgaccctactggaccaaccactataccagtattgcgcacacaacattaggcgcggtgaccatgaagaacggtctacccgacatacatgcataccacgctgacgggcggctccaacagcctagtgactgggccaccaatgaccctcctgcaccaggaacgatgcatgcaggtacgactgatgacgcctgatcgccactgtcgacccaagttgcagaagatgctcagcacgcaaccacatagtt

SEQ ID NO: 73706 - DNA, 294 bp, Oryza sativa
  Clone ID: PAT_MRT4530_73962C.1
atgcaggaggacgacgacaccgtggcaattgatggtggtggccagcgagcggtggctggcagcggcatcaccttaaccagcaaggaggtgttcacctgggccaatagcagcaaccagcggctgctccacatcggcgatattgatataacaaacaagtcctacatttgcacatcgtgctccatgtggctggccgcagaggatagggtggagtccaccggtgatggagatgatggatggctgctactgagctacgtcgagctcatctctataccacactactatatccttccatga

SEQ ID NO: 73707 - DNA, 171 bp, Oryza sativa
  Clone ID: PAT_MRT4530_73963C.1
atgacattcaacattgattggaactggatgatcgccgaggggatcaccatgcatgccagggtgttcttcctgcacggtagcgtgtcgtccgtcgcgtgggtgttcgtgtacctgcggtcgccggtgacgagaggccaaggcaggaatgcaggatgcggcgcgctccggtga

SEQ ID NO: 73708 - DNA, 449 bp, Oryza sativa
  Clone ID: PAT_MRT4530_73964C.1
ggggaagggcaagggatttcaaaaaaggcaagggggataacagggtgggcaacaaaaacaaaaggcggggggccaaaggaaaggggaaaaacaattagccccgggattcaaacccaagaaaaggggaaacccccaaggaaaaaccggtctaatcccaaaaaaccccgaaaggccaaaagaaccaaaaggggggggggaaagccccccctggtctgggggtagccctaaccccccaaatcaacaaagggcaaaaacaacttccgggcgggtaaccattgggggacccttaacaagcggcccttggtcattggaaaaaaccaaattcccccaggggtttggaaaccccgacccgaagaccccccccccaaggaaggaaccccggaaaaaaaggttcttcttggaaccgacgcccaaaaacatgtcccgaaagctgaagcccctgaagggaa

SEQ ID NO: 73709 - DNA, 1992 bp, Oryza sativa
  Clone ID: PAT_MRT4530_73965C.1
atggccgcgctgcttctcctcctcctcctcgcgctgctgtgcctgtgcggcggggcggcgggggacccgaggacggcggtggcgaggcaggagtgcgcgcctggcggggcggtgtcggggcccgcgctggcggacaacttcgtgcccgccatggacgacctcaatagcaacgtcagcgccaacggcttcggcacctccgccgtcggcaccacggcggggctcaaccccaacgccgtcttcggcctcggccagtgctaccgcgacctctcccccgtcgactgcaagctctgcttcgccgaggtcaggtccctcctccccaagtgctacccgagcgccggcggccgcctctacctcgacggctgcttcggccgctacgccaactactccttcttctccgaaaccctcggccccgacgacgccgtcacctgcggcgtcgtcggcggcggcggcgcgggcggaggcaactacaccggcgccaacccgcgcgggttcgccgacgcggtgcgcgccgcgctcgccaacgtcacgggcgtcgccgcctccgccgcggtgccggggggtggcgacgggtacgcggtggggtcggcgtccgccggcggcgccacggcgttcgcgctcgcgcagtgctgggggagcctcaacgccaccgcctgcggccagtgcctccgcgctgccgcggccgccgcggcgcggtgcgcgcccgccgccgcggagggccgcgcgctctacaccggctgctacctccgctactccacgcgcctcttctggaatctcaactccactgccggatcaggatcatcaaggcataatgacgttgtttggatactattgggttcttcccttggtgcctttgttattgttttcattgttgtttttctggcatggaagaagaaaatttttaggaacaagaaaaggtccaaatcattcatagatatttacggagatggagtccctgtgagaattgcacaatccagtttaaatttcaaatacgaagagttaaggaaagcaacaaactattttgatccagcaaacaaacttggtcaagggagctatggagctgtgttcaaggctattcttttggatggaaaacaagttgctgtgaagaggctattcctaaatacaagggagtgggttgatcaatttttcaacgaagttgaactcataagtcaagttcgtcataagaatctagttaagctgcttggttgcagcgtgaatggtccagagagcctgcttgtttatgaatactacttcaacaagagcctcgatctcttcttgtttgatgcaagtcgtagcagaaatttaacctggaatttgagggttgatatcattcaaggcatagcggagggactttcttacctccatgaggagtcagaaacaaggattatccacagagatatcaaagccagtaatattttattggatgataagtttaagcccaagataacagattttggccttgcaagagcttttggagaggatagaactcatctcaccacgggtgttgctggaacactaggatacatggctcctgaatatttggcacatggccatcttacagagaaggctgatgtctacagctatggtattctggttcttgagcttgtaacaggacaaagatgtagcggctcaattggttcacatggaggtcacttcttgttaacaaaggtatggaaccactacaagaacaaagcagtagaaatgatcgctgaccgcagcatctacgaggataccatcagggatgaggtcatgcatgtcgtgcagattgggctgtcatgcacccaagcaaacgctggcgacaggcctacaatgacgaaggttgtggagttgctgagaagccacaggcatgatgtggagattatcttgagtgatcctccatttttggatgtcgaggcctttgaggatatcaaacaaggcgaacagtctcggttgctgtccgcacgttcggctcattcagtatcaggttcatctcggtcctatctaagtggaagataa

SEQ ID NO: 73710 - DNA, 1917 bp, Oryza sativa
  Clone ID: PAT_MRT4530_73966C.1
atggccaaccggcgcaagttctcgcaggcggggggcggcggcggcggcggggtgttcgacccgttcggcacgaaacaggccgtgtcgtcgctgcggaagggcgggcggctgccggtgtacgtggctggcgtcttcttcgtcatcttcgtcatcatcatgtacggcgaggacatccggtcgctcacgctggacccgatcgcgcgcgcggggacaacgccggcgcggatcgtggagccggtagtgacggaggagcgccacgtcgcccgggtcaaccctcctcggcgcgaggtctcgtccgcggagaaggccgccgcgttgccgctcgacgtcgacgagaggccgaagctggcgacgccgacgccgacggaggcggcgaaggaggtcccgaaggtcgagaagatcaggaagccgaagaaacccaagacgacgaagaagaagccgaggaagccgcggccggcgaagaagacggtggcggcggcagccgggggcctgctcggcgtgccggagacgtgcgacctgtccaagggcgagtgggtgttcgacaacaccagctaccctctgtaccgggaggagcagtgcgagttcctcacgtcgcaggtgacgtgcatgaggaacggccgccgcgacgacacctaccagaagtggcggtggcagcccaaagactgctccatgcccaggttcgacgcgaagctgttcatggagaggctccgagggaagcggttcatgttcgtgggggactcgctgaaccggaaccagtgggagtccatggtgtgcctggtgcagtcggcgatgtcgccggggaagaaatacgtcacctgggaggaccagcgggtcgtcttccacgccgtggagtacaacgcgacggtggagttctactgggcgccgttcctggtggagtccaactccgacgaccccaagatccacagcatccagcaccggatcatcaaggcggacgcgatcgcggcgcacgcacagaactggcgcggcgtcgactacctcgtcttcaacacctacatctggtggatgaacaccctcaacatgaagatcatgagaccgggcgggcagagctgggaggagcatgacgaggtcgtgaggatcgaggcgtatcggaaggtgctgacgacgtgggcgagctgggtgaacgacaacatcgacccggcgcgcacgtccgtcttcttcatgagcatctcccctcttcacatcagcccggaggtgtgggggaacccgggcgggatccggtgcgccaaggagacgatgccgctgctcaactggcacgggccgatctggctgggcacggactgggacatgttccacgcggcggccaacgtgtcccgcacggcggcgacgcgggtgcccatcaccttcgtcgacgtgaccaccatgtcggagcggcgcaaggacgggcacacctccgtgcacaccatccggcagggcaaggtgctgacgccggagcagcaggccgaccctggcacctacgccgactgcatccactggtgcctccccggcgtccctgacatctggaacctcatcctctacaccaggataatgtccaggccgcagctggggttaggttaaccaagaatttacggagaccggattactcataggcagagctggttggttatacacaatcatcgtactgaaaagagatttttcttcttcttttcttcacattcttttctggccgtttcacctgctgtcagaagatgtctttcatttgttctttttcttcaggggttaggttaagtgggaagagatcgatacagtatatggttatatatatggctaatgggatggccatgcttgcgtacgttacgtgcctgcgtgcacagatgcgctgtaaggttcctgaccaaactgtacattggggaagaaaaggattcaagccccagagatgaacagatatggtttacagag

SEQ ID NO: 73711 - DNA, 1058 bp, Oryza sativa
  Clone ID: PAT_MRT4530_73967C.1
aatatcagcagatgcacaagatccgagtaaaatgccacttctaggagatgcccttgtcattgccgggacaatattttttgcatttagcaatgttggtgaggaatactgtgtcaagaaaaaagatcgagttgaatttgttgccatgtttgcactctttgggttgcttgtcagtataattcagatattaatatttgaaaagaagaacttagttgcaattgcctggtctccaacaatgttatgtctgttcgcaggatttgcagtggcactatttatgttctacagcatcactccttttgtccttaagatgagtggatcaacattgttcaacctttcactcctaacatccgacatgtgggcagtcgccattcgagttttattctatcaccaacagataaactggctgtactatatagcgttcgcagttgtggccattggattgatcatctattcgctgaatgaccattcttcggacagtggaacaagaacaactgcaaatacagaagcagcagcccaataccagcaacttccaggagagaataattcaacaggaattggttcgaacgacagccaagaaaggaaacaagaggaggaagttcatatctgttagtgggggtcaatgtacaaagtcacctcccggtgttgaatttgggcataattacatatggttacaaagggcaaaaaaaaaaaagaatatgctagggggaaagcaccggagttttgtttgccctctataactacaaccagttgatgatccattgtcatctgcctgccaccaaggtccagctctcttaagtgttttgtgagagatcttttagaatccttgtatatatatgttttcctttgttttttgaaacccctgctttatcaatagggtgtattaggcaatttattttccctatatatccttcaaaaacaaatgtaagcaacaacaaattgaacatattggaggcatggatacatatacaagttattttaaatgaaagtataactttccatcttaaaaaaaaaggtcgaaggctgtacggtttacaagctggcgtgcgggtgcactgaaacgt

SEQ ID NO: 73712 - DNA, 232 bp, Oryza sativa
  Clone ID: PAT_MRT4530_73968C.1
gtgcacacgcgttgggagagtaggcctctgaaaccacgcgctgctgcaacgtttgcatggacgagcgggcgatcaggtttttggggagcgcacgacacgactactcactgttcgtcaacatctacttcaccttcaccaacatgtcgaacactggagacaaggagaaggaggctcccgttaataccaacggaggcaacactgcctcaaactccaacggaggaccattcttggg

SEQ ID NO: 73713 - DNA, 2928 bp, Oryza sativa
  Clone ID: PAT_MRT4530_73969C.1
ctattcatcctcaatcttattcttcttcggtgcaatcggctcataaagatgcttaatagaaacatcagaatgtgatgcttcccttttagatccaaagttagccaatctgtctattgcttcattgttattcctaagcacatgagttaactccaaaccattgaatttgtcttcaagcttgcgaacttcttgtcggtgggcagccacattatcgtcgagataggaacaatccttcataacttgattaacaactaagtgagaatcaccacgaactgctaggcgccgtatccctaaagacacagcaatcctaaatccatgaagtaatgcttcatactcagctacattatgggacggtggcttgaatgatatgtccaaagacatcaactccaaagcccactttgcaattcgaccagtcgcctcacgattatgaagaatatcgccgagtggaaaagatgtgaccaccttgaccgagtgactttggaaataataggccaatttcctgacggtaattaaaatgccatataacaacttttgtacctgaggatatcttgtcttggagtcgacgagaacctcgctaactaagtagatcggtcgttgaacttttttagcatggccttcctcttctcgttgaatttcatcgtgttgataagttgctccggtgttcttcaaaccaaacagcatagtgatatagtagtaggcaccgaacgacgtgatgaatgaagtcctcaagcagtcagactccttcaagctgatctggtgatatcctgagtagcaatccaaaaagctgagtaactcgcagccagctgttgaatcaactacatggtcaatacgaagcaatccaaagggatcgttaaggcatgacttgttgagatccgtgtagtcaacacacatgcgccattgccctgctttcttccgaactagaaccggattagctagccattctggatgaaagacttccttgatgaagcctgctgctaatagcttggtcaactcttccttgattgcatccttcctgtcttgtgcgaaacggcagagtcgttgctttataggtatagcataatctatctcagcgcctattacaacaattttggtaggatcagatagatcaaggggaattttcttggtcttcgtgtcgccttctccggtcttgggtaacttggtagcaggcacttcaccctcagccgatgttgatgcagctagtctgatttcttcacggccgagtgctatctcgcgagttcgagccatctcgcagctttccttgtcgcaggtgacggcttgcttgatatcgcttcgcagagatatgactccttgtggccctggcatcttcatcatcatgtaggtgtagtgtgggacatccataaatttggctaacgtcgggcgcccaagtatagcgtgataagccgtttcgaagtcaacgacctcaaaacaaacattctttatacgaaagttctcccgagtgccgaaagtaaccggcagagtgatctggccgagtggcgtagatgacaaccccgggatgactccatgaaagggcgcactactcggtcgcaactcagtcctttggacttgcatctcgtctagagtcttggcgaagaggatattgagtgcactaccaccatcaataagagaacgcttgagcttgacattgtgaaccactgggtctaatactagggggtaccgccccgggtggaccactcggtcgggatgacccgagcagtcaaacttgattagaacgacaagtaggtcgttgcaaacccctttggtaaacgcagcaatgatgttgtcatcggtgatgtcggagatcttgttacgttgctcagaaaaacgctgaatatagtccctaagagattcatcaggtctcattgcctttctacctcctccttttgtgtggattacgagagtgtagacagtgagccatgactcggggtcagttttgccgtcatacttctcgatactagttggcttgaagccagctggcaaatccactcgacgcaggtcgcttgtaaaggcagcaactccttcatcgttcgcgtcatagcgatccagtgtgtgggggcgtcgtcggtcgtctctttctgctcggtgacggttgagggtgtcacgtaggtcaacaggctgccattgtcgaggggagcaaggccgttcatggtcggcacgacgctctcgatgtctgtcagcagaagagtgaacggattgctcccggtgagccctgccctcgtgcggcgatcttgacttggtaacgctgagacttggttgatgataatcccaagatcggggaggtgaaacccgactgccagatggtgtacgaactgaagcagagggctgccgagtacttcgcgagccaattgggaccgacgcagcaatcatcgtctctgtttgattgagaatttgagcaacattttctgttgctccagttgccatgagggtatccaagagcgtgattgctgtaaccgcattctggccgcaatctggcttgcccttgctcttgccgttcccgctccagcctgagtcgctcggcttcttgacatgctcattcctcattggcttcacgcgcaaggagctgttcttccgtctcattgtcggccataaaaacgcaaagacttcatcaaggtcgtcgtaatcgtcaaaattgttgaagtcatattcgtcatcgaagtcaccgtagtcgatattctcagtcggagcatgagaatcaatgcttggagtgctgaggtattcttcaatttcttctggagaaagatccgactgtggttgaagctgagtcagacctaggcttgtggggagaaggcgctcgtcatctcttctcgactggtttgaatccgagtcgagaagagagatcttgccgaagctgtcggtgatgaagtcaaggctgcctaactggtacgcctgcccgggagggaaggcgaagtcgtcgatgcccgaaacgaatcccat

SEQ ID NO: 73714 - DNA, 312 bp, Oryza sativa
  unsure (1)..(312): unsure at all n locations
  Clone ID: PAT_MRT4530_7396C.1
atagtaggttagtttattttagtattggttggtggttaagaaaaaaaaaaatggggtttaaacctggacatggaagaaagatgaccgggtaatgtataaaagtgtgaaggctaaaataaattattctagggtggtggtttttatttcttaataggcctgatgagaaaaatcctaatcgtgggagacaagctccaaaaataacccttgtcggcgaagtacttcgattaacatatgaccaaacttggtcataggcatnggnttgttttttttgtaaattataaacattctccaaatggaggctaagcggaaata

SEQ ID NO: 73715 - DNA, 117 bp, Oryza sativa
  Clone ID: PAT_MRT4530_73970C.1
gtcgtactaaggggaagaaataagtaaccaaggggtcagatttaatacttagacaccttgaaggatccatcaaaaaatctacttctatagaatatatactagtctctctatataata

SEQ ID NO: 73716 - DNA, 417 bp, Oryza sativa
  Clone ID: PAT_MRT4530_73971C.1
tcttcgcgtccgcatttgtgcaggtctttcacaatggctgttcagatggcacgtgcccctgtcaacacccgcacggtcggtggccagcaggctgccgtcgttcgctcagcacgccccagcgtggtggtgcgcgctgcagccaccagcacactgacgcgccagagcgtccctctggagctggaagagggacccatgcccctcaacaccttcaacaacaaggctcccttcaaggctaagatcaagtctgtcgagcgcattgttggccccaaggccaccggtgagacctgcaacatcgtcatcgagacagagggcaagatccccttctgggagggtcagagctacggtgtgatccccccaggcaccaaggtgaacagcaagggcaaggaggtgccccacggtgtgcgcctggactccatt

SEQ ID NO: 73717 - DNA, 333 bp, Oryza sativa
  Clone ID: PAT_MRT4530_73972C.1
atggtgtattggtctcttcaagcaatcaccaagggcaagctcatcctccaagcgatccacttggtccaaagctcaaacgccacacaatttccctccaatgaagctttctctaccaagcacccaccgagatgtagcccagcttccactatttcctcttcccttggagaggcaaggattctccttctcctcttacaatggctcaagttcttcaacttgaagcataccaactccaaattactcccaaatccactccctaacaagcacacaagctctagccttcttataaatgtgcaagaactcactctcaaggataaactctccctaaattcctaa

SEQ ID NO: 73718 - DNA, 900 bp, Oryza sativa
  Clone ID: PAT_MRT4530_73973C.1
atgacgccatggcgccccttcgagctctcgaccaccgggctcggcttcacggcgaccggcgagcacaaggtggtcaggctcttcaagagactcaacggcgagcacgcctgcgaggtgtacaccctgggaaagcccggcgggtggcgcccctgcgccgggcgagtgccggcgtccgcggccagcatcctcccagccatgccgccggtgttcgtcaacggctacctctactggctgctccagccagccgcccccggcgacgagcagatccggcgaatcctgtcgttctccatcggcgccgagcagttcgggtcggtgtacgtgccgccgcggctgtcctcccgaatgtgccacctcgccaacctcgacggctcgctgtgcgccgtgttcgacaaccgcgtcgaaggcgacgtctacgggctgttcacgtgcagcgagccctcggcgtcgccgtcgccgtcgtggtcggtgcgttgctccatctacctgaataggctgccgcgagaggtgagcgacgagctgatggaggagcgcgtgatcgtgccgctctgcaccgccggaggcaagatcctgctcgccacggggcaccacaaggtgttcgcctacgacgccgagcggaacaccgtggagcgcgtgttccgcatgcaggagttcgtcgatctacggcatgactacatcaaggcccccctgctgatcaacattggtctccacgacgaatgcatcgccgacgttcacaatggcgacggcggcggcgagaggatgctgcgtgtgaacatgggacgccgcgacaacatggtggtgaagcaagaggtggccgtcgagtaccacgacgctagcaatcgtcaattcaacgtccttttgaaggatttaaagaggatagctgcctgcttccgccgcacatga

SEQ ID NO: 73719 - DNA, 106 bp, Oryza sativa
  Clone ID: PAT_MRT4530_73974C.1
atggtccgggcaaccaaggacgagaaaatttcagatgcagaacaggcacaaaagacagaccatgcaatggtgaagagatggctcaaggccattcatagctaccatg

SEQ ID NO: 73720 - DNA, 420 bp, Oryza sativa
  Clone ID: PAT_MRT4530_73975C.1
atgtggtgcgccgaggggatcgccggagagagaaaagatgagtttggcttaagcggtgaaaacggaggtgacggtgtgaagtttcttaggggtgacgggtccgagttggacaaggatcaaatcaactggcacgctcgcgaacctaaaagcaagatttttggacctgcactgaaattaagcagaggcctcgtgttttcgcatcaacacatgcccgtcctgagcccccacctccaccgctcaggggacggacgaggtcgccacgaccctcacttcacgcgcatcggcctccaccctggccagccgccgtgcgagccaaccgaaggtcagaatggtgagaaatgtgggaacctagatacgagggtaggattccacccgtacaaatgctacatggacgaggaggagccgaagaagatagagtag

SEQ ID NO: 73721 - DNA, 343 bp, Oryza sativa
  Clone ID: PAT_MRT4530_73976C.1
gccctatacaaaaaggaagttatatttttatgagatatttcttaggttaatagaggagattgaagttaatataacagacgggaagaggaaactaggatcattaaatctgacagattattagaggtgaacgaccgtaataacatacagagcaacttgatggaaaacgcagaatgaaactgaaagggcagggataaagcataggaaacgagaggagggaaatctaaaagaggatgggaacacgggtgaggatgagcagacggtaccgaagattaacgggacgtcgtgaccagagataaaaaaaatgcataaaatgaaacggcattcgaactgatatcaaactaaa

SEQ ID NO: 73722 - DNA, 306 bp, Oryza sativa
  Clone ID: PAT_MRT4530_73977C.1
atggctggagggcatcgtcatgtcgattccaaggggaaggctggtgctgaggagcaaagaaccatatattccagtgagcaagaggaaggagaaaagcttcttatcatggcacccttcaagatcaacaagactatcgctgctactttcttcatggttcttattatgtcctgcgccctcacatccacatctgcttgccagggtggtacggagtgcaccgttgaagaaccacactgcacaatggattcgtgcagagaaaaatgcaaagacataggccaccaaccgcaagtgcaaccgaatgacagctag

SEQ ID NO: 73723 - DNA, 1903 bp, Oryza sativa
  Clone ID: PAT_MRT4530_73978C.1
cccacgcgtcccgccttccgccgaacgggtggctgcgcgcgcgtgcaatcgccttatccccggtctccacgccacaaagccccagcggtgatcgccgcgccctccgcgccaagtacatatacgcgcgcatccggccgcctcgatccatccagccgagcgagctaaggaaggaagaagcatacaggcggcagcgacgagccatggccacacacgcagcgctcgcggcgtcccgcattccggccaccgcccggctgcacagcaaggcggcgtccaagcagagggtggacttcgccgacttctccggactgaggccgggatcgtgctccatcagccacgccgcgagggaggcgtccttctccgatgtccttggctcgcagctcgtcgccagggctaccggagagaacgccgtgagggcgccggctgaggcgaagctcaaggttgccatcaacggcttcggccgcattggccgcaacttcctccggtgctggcacgaacgcgagaactccccgctcgaggtcgtcgtcgtcaacgacagcggaggcgtcaggaacgcatcacaccttctcaagtacgactcgatgctcggcaccttcaaggccgacgtcaagatcgtcgacgaccagaccatcagcgtcgacggcaagctgatcaagtggtcgtctaaaaacagggaccccctcaagctaaattgggctgagctcggcatcgacattaacaaagaaggtaccggagtgttcgtcgacggccccggcgccgggaagcacatccaggccggcgcgaagaaggtcatcatcactgctccggcgaagggtgctgacatccctacctacgtcctcggtgtcaacgagggagactactcccacgaagtggccaacattatcagcaatgcttcctgcacaaccaactgcctcgctccgttcgtcaagatcttggacgaagagttcggaatcgtaaagggaaccatgaccacaactcactcctacaccggcgaccagaggttgctggacgcgtcgcaccgtgacctgaggagggcccgggcggcggcgctgaacatcgtgccgacgagcaccggcgccgcgaaggccgtggcgctggtgctcccgcagctgaaggggaagctcaacggcatcgcgctgcgcgtgccgaccccgaacgtgtccgtggtggacctggtgatcaacaccgtgaagaccggcatcaccgccgacgacgtgaacgccgcgttccgcaaggccgcggcggggccactcagcggcatcctcgacgtctgcgacgtgccgctggtgtccgtcgacttccgctgctccgacgtctcctccaccatcgacgcctcgctcaccatggtcatgggcgacgacatggtcaaggtggtcgcctggtacgacaacgagtggggctacagccaacgcgtggtcgatctggcgcatctggtggcgagcaagtggcccggcgcggcggtgcagggcagcggcgacccactggaggacttctgcaaggacaacccggagaccgacgagtgcaaagtgtacgaaaactaagaccactgtccaagtacgggctcgcgtaggtgcagaaatatatactcctataatgtaacgaagcacacacattgactgtccccgggcagaactgctatactatatatactgtgctcggattggctgcccgtacgttgttccccttcgacagaggaacgcatgactgtcgaagaagaaacacagctgcagacacgggccattttctgtgaggtgtaatactgaactttggtacagacttcaggatttttttcttttcgagtcttgttttactttcttctgtctgtgtgtttgtgccacatgcgtctgttttgtccgaattctgaagtctgaagtcatgaggtttcgaatttcggcagcccaaaaaa

SEQ ID NO: 73724 - DNA, 842 bp, Oryza sativa
  Clone ID: PAT_MRT4530_73979C.1
atggcggcaaggtggctggacgaggccgacgacacggggacgatgtctgtccaggaggacgatgacgcggccgggccggaggtggacaggctccggcgccacgactcgttctacggcgacgcagagaaggtctccaacgacaagagccatggcaccggggagaactgggcgcggacgctgcagctggcgttccagagcatcggcgtggtgtacggtgacgtcgggacgtcgccgctgtacgtctactccagcacgttcccggacggcgtcaagcacccggacgacctcgtcggcgtcctctccctcatgctctacaccctcatcctcatccccatggtcaagtacgtcttcatcgtcctctacgccaacgacaacggcgacggtggaacatttgcgctctactcgctgatatcgcggcacgcgaagatcaggatgatcccgaacgatcagacggaggacgccaacgtgtcgaattacagcatcgaggcgccgagctcgcagctgaggagggcagagtgggtgaagcagaagctggagtccagcaacgcagccaagatcgcactgttcacaatcacgatccttggcacctccatggtcatgggtgatgggacactgacgccagcgatttctgtccttgcgtgcgccatccgcgcgccgcccaccacccgctaccctcacgccatccccgcacgcgccgcctgtggccggccgcgtgctgcccgccgctggctatgcgtcacccacgcgcctccaagccaccgcccgccgcgcaccggccacgcgccatcccgtcggagtgccgccattgaccccgccgccaaccgcgcctgcccatgggagag

SEQ ID NO: 73725 - DNA, 402 bp, Oryza sativa
  Clone ID: PAT_MRT4530_7397C.1
atgtcgccgacctcgatcacgacgtcgctggggagtccggtggtgcagaacctgatgaacacaagacagacacacagattggggatcagagaacagcaaatcggtgacagagagacagagacagagctcaatcagtcgcttgccatgcttggcctttggagctcgattgctgctgctgctgctgctgatgatgatgatgatgatgattcttctcctccctggccatctccctcgcgctcttcatcttcctcccctgcatctcagaaggggaaggacaccagggagagacgagagacgagggagctctcaataatggctactaacaacgagaagaatgaaggaatctacggcacaagcgcacaggtgaaggccaagacgtgctctgaaaaacctggattttga

SEQ ID NO: 73726 - DNA, 933 bp, Oryza sativa
  Clone ID: PAT_MRT4530_73980C.1
atggacggcggcggccgctggggcgacgtcccgacggacgtgctctgggagatcctgaggcggctcccgcagatcaccggccggcggtggcgcgacgtcgtcgacgagatcgagccggaggtgcagcggaggcgcgcaaagccgctggccttcttcaagaacggctgctacgagcccccctccgcgttctccctccacgacatcgccggagactgcgacgtcacctccctcttccgcgaggagaagcaggaggacaacgacggcggcgatagggatttcttcgcccgctacaacaacgacgacatggtcggctcgtgcaacggcctgatctgcctgtggctcgaccgatcttattccggcggctgcggcatcttcgtgaccaacccggtcaccggcgagaccctacacatcccgtcgccgccgctggagacgatggcgaccagcagccaccgccgtactgcgggtccactctgcttcggttaccaccccacgaccggcaagtacaagatcgtccacttcccctccaacggcgggcgggtggatgatgtcacgctggggggcaccacctcggccgccgccgccgctgccgcgtcgtcgttcccctcccgccacggcggggtggtgaatgtcctcacgctgggggacggcgccgcgtcgtggcgcgcggtgggggtgccgccgtggagcctgtgcatcgcctggggcgtcgtcagcgtcgacggcgccacgtactgggtggccgagggcagggagatcatgtcgttcgacctcgagcacgagcgcgtcgcggccgtcgcgccgctgccggcgatgagcaggtgccgcttgccggtgtccatggcgaaggaggacgcctgctgcccagctgacggatgtaggcgggaggctgggagtctccatcgccatccaccagcggaactcaatctgcattga

SEQ ID NO: 73727 - DNA, 1239 bp, Oryza sativa
  Clone ID: PAT_MRT4530_73981C.1
atgcccccagacggcgtcgccaacatcgatgagcttgatcctgaaacgccggcgccggcgacggacgacgacgaccggtggggcgacgtcgtcctgacggacgtgctctgggagatcctcaggcggctcccgcagatcagcggccggcggcggctccgcctcgtgtgccggcggtggcgcgacgtcgtcgacgaggtcgagccggaggtgcagcggaggcgcgccaaaccgctcgtcttcttcaaggacggcaggtacgagcccgcctccgcgttcctcctccacgacgtcgccggagactgcgacgtcacctccctctccctcttccgcgaggaggaggaggacgacgacggcggcgatagggatttcttcgcccgctacaacaacgacgacatggtcggctcgtgcaacggcctgatctgcctgtggttcgaccgagatcccctctactacggcagcatcgtcgtgatcaacccggtcaccggcgagtccctccacgtcccgtcgctgccgacggcgacccgcgcgggcacgatcagcttcggctaccacccgacgaccggcaagtacaagatcgtccacttcccctccaatggcgggctggtggacgatgtcacgctgggggactccgccgccgcgtcgtcgtcgtcgtcgtccccctcccgccatggccgcggcggccacggcgacggggtggtggatgtcctcacgctgggggacgacaccgccggtggcggcggcggcgcgcggtggcggtgccgcttgccggtgtccatggcgaaggaggacgcctgctgccagctgacggatgtcggcgggaggctgggggtttccatcgccatccaccggcggaactcaatccgcattgaggtgtggatattagagggacaaagatggagccaatggcgcaccatacaagggcttcagcctaaccagaagatcgggcgaccatactttgcttatggaaagttcgtcttaacaaacatctatcgaaaaatatttagggagagacttaatatagggtaccagcacttgccatgctccctcaaggctgggagtattctctcaagggcaatagaaggcacaccagtggcaaagtttaaaaccgaagaactacgaatgttcagctatactgagaccggtgaacctttaaacatatacaaggaggaggaggacaagaaggaggaggtggaggaatcatcatcatcggaagaagaagaagtggcagtaaatgcatag

SEQ ID NO: 73728 - DNA, 1431 bp, Oryza sativa
  Clone ID: PAT_MRT4530_73982C.1
atggccacggtggaggtgttgacgtcggaggtggtcgccccggcggaggagacgccggcgggcgccgtgtggctgtccaacctcgacctcgccgcgcggcgcgggtacacgccgacggtgtacttctaccggcggaacggcgacgacgaggcggcgttcttcgcggcggacgccgtgagggacggcctcgccagggctctggtgccgttctacccgctcgccggccggctcgggctcgccggcggcggcgaagacgggcgcgtccagatcgactgcaccggcgagggcgcggtgttcgtcacggcgaggtccgggcactacgcgctggacgacctgatgaacgagttcgtgccgtgcgacgagatgcgcgacctgttcgtgcccccgacgccgccgccgaacccgccgtgcgcgctgctgctggtgcaggtcacgcacctgcggtgcggcggcgtcgtgctcggcatggcgctgcaccactcggtggtggacgcgaggagcgcggcgcacttcgcggagacgtgggcgagcatcgtgcgcggcgcgcccgccggggacgcgcccgtgccgccgtgcttcgaccacaagctgctcgccgcgcggccggcccgcgcggtgctgtacgaccacccggagtacaagcccgagccggcgccggcgccggcgcacgccgccacggcgtccacgtacgcgagcgccatcatcacgctgacgaagcagcaggtgggcgcgctgaaggcggcgtgcgcgggggcgtccacgttccgcgcggtggtggcgctggtgtggcaagaaagtgggggtgaagtgaagtgcgatttgaggagggagcggtggaggcgtgaggaggcgagccgcacatggccaccacgcgcggcggtggtggctgctgctggtggcggtggtctgcctgttgtgcgcggcggcgaggtctccggaggggagggcgcaccgcaccggcacctgaaggggctcaacaagccggcggtgaagagcatcgagcgtgtgtggcttcatttgggaagaggatttgggaggaagcacgagcaaggtggtaggtttgctcttgggcttatcgttcaaagtgcaaggtggcattctgattcaaaagaagatgtcttttctgtggctctgtgtggttgtgcaaggcccttcttccagccgtaccacctcatcatcgtcctggacggcgaccccaagaaaacgatccgggtgactgcttcgatgaagaagtttatctccaagaagaagtacatctacaccatcgacgagttcctccccttccacccctcgattaacttcacctcagtgagatctgtctctgttaaggacgtcaaaggcagaggttccggagacctgctctcccgatcgctggtgcacgccggcgagcgggatggagtagtctacgagcgacggcgcagtacagagtag

SEQ ID NO: 73729 - DNA, 326 bp, Oryza sativa
  Clone ID: PAT_MRT4530_73983C.1
cccacgcgtccgtggacgcgtgggtcgccgcaggcgccacttcgaccaacgttgtggcgctcacccgccagcgccggtacgctcgctgcgctcgcccgacgactgtcctcctgcaggacagcgccgatcaaccaccgcacccgcaggcacctgaatgcaccggacagtcagttccgtccgtgggcgatcgacgccgacattgtacgggtacactgccgcgagaacacccagtaccaaatggcggcggtaaggagcaggcacaggatggataggtctagaggagcccctccctggtggcgcttgtggacctggagcccctgctactg

SEQ ID NO: 73730 - DNA, 2231 bp, Oryza sativa
  Clone ID: PAT_MRT4530_73984C.1
atggcgtcctcgacggcggccaacctgtgggttctgctcggcctcggcatcgccggggtcctcctggcggcgaagcggctgcggcggcccgcgcggcccgacaacggcgcgttcatcgcccgcctcgagctcctccccccgccgcagccgccgcccccccaggcgcgacacccactcacggggctctgcttcgccatcgccgacgcattccacgtaactggttatataacaagttttggcagcttagaatgggcaaagacacatgatgcagcaacacaaacatctctagtcgtttcatctcttgtagatggtggtgctatgtgtgttggaaaaactgttattgatgaaatggcatttagtatccatggtgagaataaacattttggcacaccaacaaatcctgctgctccagatcgagtacctggaggatgttcaagtgggtcagctgttgctgttgctgctggcattgtagatttttccttaggtattgataccattggaggagtaagggtaccaggtagttattgtggcgtcttggcattccggccttcacatgctgttgtccccaacaatggtgttattcctgtcgctcctagcctggatgccataggttggtttgcgagggatccaagtgtactgcgtcgtgttggccatctccttctgaggctaccctacgctgatattcgacaacccagacatttctacatagcagatgattgctttgaaatgtcaaaggtgcatgcaagaagattgactcaggtggtgacgaaatctgtggaaaagctatttgggatttttgctggccaccaacttcctcatgttgatttttttcccttgcgtattacattaggacaagtcctgggtcatgttaatcttgaaaattatttggcttcaagaatacccagcctgaggaacaattcaaatggtcatggtgactcaaagttttcttcattgctagcactttctagggctatgcagtttcttcacaaacatgaattcaaagatcaacatatggagtggataaactctgttaagcctgctgttgatgcatgcatagttggtaatttgtctgatgatggtgagtcaactatcaataacagtcaagatgcaaggaaagaagtccgtgcagctctcggtgctcttcttaaggatgatggaattctggtcattccaactgttctgggatgccccccaaaactaaatgccagggaactttcatctcaggactacaatgttcagacatcatgtcttacatctttagctagcatgtcagggtgttgccaggtgacggttcctctgggtacacatgataagtgtccagtttcagtttctttgattgcaaggcatggtggtgatcgatttttattggacaccattcaaacaatttatgctaccatccaagagcaagttgacgctctagcaaagtctaatgtctcgagtaaacaggcgatgagtgaagaagctgctgaagctgctaaagagaaaggtaacattgcatttaaggagaaacaatggcaaaaggcaataaatttctatactgaagcaatcaaattaaataataaagtggctacatactacagcaacagagctgctgcttttctagagctagctagttaccgccaagctgaggcagattgcacaagtgccatcgatattgatccaaagattgtaaaagcttatttgaggagaggcactgcaagggagatgctgggttactacaaggaggctgttgatgatttcagccacgcccttgttctagaacccatgaacaagacagctggtgtggccatcaataggttaaagaagctatttccgtaaatactgggctgttggattttttttctgcataaagatactcaagttctgcatgcctggggggtgaaaaagaaggtacctgagtgccaccgattgatgctgctatccaagttcataaggtactaactaccgttgctactggcgatagaactgtctatcatctgtgttttcaattagttgttaccccccaagttttggaaaagtggaatcgaaaacagaattttgggagttgatcatagtaaacaatgcctttaaatatgctctagtggtgttcttggcccacttccatgtataatatcggttttggcaattatttgttgaggcacccataaaaaaaaaaaaaaaaacccccccaaaaaaaaaaaaaaaaaaaaaaaaaaaaactcgagactagttctctctctctctcctcgtgc

SEQ ID NO: 73731 - DNA, 234 bp, Oryza sativa
  Clone ID: PAT_MRT4530_73985C.1
atgcctgatgagtgcctggacaattcgccgaaagtgagggtgggtgctgacggctacctcccaacgacttcatgggtattccggcgcggcaaagtgctggatgctgttgtgatggtgatcaccgaaggtagccaggcccaagcacggcgtggcactactggtcttatacctgtgccgggtgttagacctatccggcctggcctgatagttgggccgatgtcttggcacggttag

SEQ ID NO: 73732 - DNA, 302 bp, Oryza sativa
  Clone ID: PAT_MRT4530_73986C.1
ataggatcaaaattttttttttaccactttttttttaagtttgttttttttttcaagaatttgaccccaaacgattcaattgcaaataaaacactggtgattccctttcttatttcacacaatctaaataccccggcaaactggcttaaaaaccaaccaattgatttctaagtaaaacgggtgtgaaggatttttccaccaagactttttttaccttaaaaaaaacaattggatccactggacccaatttattaaaaaacagatgggttttaaaggattgtcctggcaaacgaaaggaaatt

SEQ ID NO: 73733 - DNA, 249 bp, Oryza sativa
  Clone ID: PAT_MRT4530_73987C.1
atgacgagattaattaagtaacaggactataaaggagtagagtggtggcggttgatgaaacatctaaaagctattaataaaacaccaaatagaatcctaatgacgattaaaaggaaggacgttgggcaggttgtgaagcaatcagtcaacacggttgtgacaataaagaagggcggtagcgagcgagccgtagaggagtatagtgacaacgtcgctaacgttttgacggaacttctagaaagtaaaaga

SEQ ID NO: 73734 - DNA, 226 bp, Oryza sativa
  unsure (1)..(226): unsure at all n locations
  Clone ID: PAT_MRT4530_73988C.1
actgaacctgtcaaacagagagagaagtagatgatagcgtnagagaatagaacagaagaaagaagatataaaaaangtaaaggaanggaaaagctctgtgtaaagcctncatntacggggctctctttggttttggggtgttcttttcttnctaagaactagcttagccttggttctgccatngngtnaagaggcctctcgttcatctccgattctttgggggttt

SEQ ID NO: 73735 - DNA, 842 bp, Oryza sativa
  Clone ID: PAT_MRT4530_73989C.1
ctcactatagggcgaattcgagctcggtacccggggatcctctagagtcgacctgcaggcatgcaagcttgtcgccttcaatatatccgctgtcggatccacagcgtctaggaattgccactgccagatccgcggcttgccatcgccgtttccactggcctcatcccctcccacctgcccctcgttaccgccacagccgccgtcaccgtcacctagagcaccccgctctccgtcgccctcgatccctctccgccaacgcctcccaggtcggttcgcccctcgactcgtcgcaaattaccggatccgccgcccgctcccgtcgccggccgaagacacccctcccctccgccggatctgcaaggggaggggagggagtggccgcgcgccaccgtcgtcaaccgtcgccgccactgttgcctccgcctgcgcccgccgcccccatatatccctcccctctgacggatctgcaaggggagggaggggccgctcgctaccgtcgtcgcctgccgccggatccgccgcccccttccctcccctccgccggatctgcaaggggagggaggggccgctcgccaccgtcgtcgcccgccgccggatccgccgcccccatccctcccctctgccggatccgcctccgcctacgcccgccgccgcagctgtcgccttcgcctgcgcccgccgccggatccgccgcccccatccaatccaccaccgctgtcgccggccgctgtccctcctcccccaccgccaccgccgccgtctccggagcctactctcccttcctcctcgctgtcgccaccacccacggagccagctcactaccaccgtttgtcgcctctgtt

SEQ ID NO: 73736 - DNA, 1249 bp, Oryza sativa
  unsure (1)..(1249): unsure at all n locations
  Clone ID: PAT_MRT4530_7398C.1
tgcagttgttacattcggccttaacgcgcttcaagggcgacagcagatgggcagaggtgtttggggaggtgcttggaattccagtaatgctcgggagttcatggagtacactgtttcgatgaactaccctatagactcatgggaatttggtaatgagttgagtggaagtggaattggtgcaagtgttggagctgaacaatatggaaaagatataattgagctcaagaacatcatcagccagttatatggaaactctaggaaaccattggtggttgccccaggaggattctatgaccaaaaatggtatgctcagcttcttgatatctctggtccaaatgttctcgacacaatgactcatcatatttacaatcttggtgctggtaacgatccgcaagttgcaaataggatcttgaatccgcagtatttgagccagagctctgatacattcagagatctccaaatgacgatacagcggcatggaccatggtatcttgatcagcttggtcagtcagcaaagtatgacacaaaggttnactgcagacagactttgattggaggcaactatggccttcttgataccgaaacttttgttccaaaccctgattactacaggcaagtattcctatactttgctctgccacaatcatgctttactaccctatataccttttgtactaaaccgcggtatatgttcagtgccttgctgtggcatcggctcatggggaagggagttatttccttagacaccagcggttcttcgtacttgcgtgcctatgcgcattgcggaaagcaaaagggcggcgtcgcgctcctcatgctcaacctgaacaagaacatgggattcatggtctcagtcagaaatgacctcaacattaatttcagagaaatggcagggataaagagggacaactcctttgtccatggcctgaagaggacagtctcctgggttgggagcaaagcctcggatgggctggagaagagggaggagtaccatctgactccacaggatggcaacccttttgccaggacagtgctgctcaatggagctcctcttcagctcactggagatggtgacatcccttcactgccaccagtgatggtctcagtcaattccccattctatgtcgccccgctgtcgatcgcgttcgtcgtcttcccagatttcgaggctgaaggtggtaatgttccaagcctccaaagtgcgaacgttgagctcaattctgcagggaaagaaggtagcatgagtaag

SEQ ID NO: 73737 - DNA, 147 bp, Oryza sativa
  Clone ID: PAT_MRT4530_73990C.1
ctgggatcctctaaaggggccgcccttaatgttttttttattttacggtctcatgtaaatacatactatagcatgtaatgagctgtgtgcacaatcagtacagtggccataagccttcaacttggatatacaaaacacaaaatagat

SEQ ID NO: 73738 - DNA, 249 bp, Oryza sativa
  Clone ID: PAT_MRT4530_73991C.1
caaaagttttgtaaagtaataagtaataaacaaaactagtgatagagcaacgtacgttgtgtcgttgccacactaggatgatcgatactccgttcggtcgattcggatcatgaccggccgccttctacgacgtgacgaccccgagttgggccgtgtagctgccgtcgacgcggcgcatgacggagcgggaccagtcggagtgcgcccagtaggggccgacgacgacgagcggcatcatcgggaggaggc

SEQ ID NO: 73739 - DNA, 409 bp, Oryza sativa
  Clone ID: PAT_MRT4530_73992C.1
aggctttagcgcttttagagactctctgctttgtgctctcttttttgtttcctcagtgacacccgactttagagccttattattattttgtgcagagatttggagcgggagagagagcccacggctatttcctacctcgctaagcaaccttccaacctcgtctgcttaagcctgcaggaagcagcgtttctgagagtgagagtgagagaaagagagagagagagagatggctgggaggaggcagcttctgcttcttcttcttctctggggattcttgcagctcattcgtcttccttattcagcgtcgcagtccttcatcggcatcaactacggcgacgtcggccgacaacctcccggcgccggcgtccaccgcgcgcctactacagttgacgaccatcaccaaggtgcg

SEQ ID NO: 73740 - DNA, 250 bp, Oryza sativa
  Clone ID: PAT_MRT4530_73993C.1
cacgagtccaccacgattatgcggcggcggttgttgtcttttaggcggctcgtcactggcggttaataggcttacgtggaagcgctcctcccctcggtgcatgactcggtgattcttaagctgtatgccaactcccaccttgtttcctcttctttcttgtccaccgctccaaatctttcttcctcgttcgatcaccccgccgtctcctttcgtctcatatcctcttcgacttctaccttctccttcgctt

SEQ ID NO: 73741 - DNA, 361 bp, Oryza sativa
  Clone ID: PAT_MRT4530_73994C.1
cgggctgcaggaatcggcacgagggaaaccacaattattcatgcaataggaaccgaaaaaatgttctcaaacatacacagcagtcgcaagcattacagtacataaccatgtttgtgctttacaaacaactttcaagaacggttaaccaaacaaagtgcaatggaatcatgaaatgcattcatcggatcgcaatcatcaaacacttcttctgtctcaggctgatcggcagtagcttgtgagggcacatagttctcatcacggtcacaacgatcaaagtgcttatcccgtatgccactaaccctaatgaagttatggagagcacagcatgcaactatgattttggcctgtttaattaggagca

SEQ ID NO: 73742 - DNA, 402 bp, Oryza sativa
  Clone ID: PAT_MRT4530_73995C.1
aacaagaaaaccaacaacatagttatcgtgtgatcaaagtgttggtgtgtttccacacgaaagaacaagaaaacgccaactactactataacaacctaagcataactgttcatgatacaacaattatcatctagtcacacgttcactactttagccaaacctgtgagctgtcatgcaatggtcacactcacacactttgcgcctcaattcagttcagttatttctgttacacacagctgcagatgcttctctgcataactccatcagaggtattggaaaaaagaccatgaacatacatacctcaatgagagctttgtagcttcacagcaatggctactctttctcttcctctccactcccagatagctctgtggcgacagcgacgacgacgacacgacttgt

SEQ ID NO: 73743 - DNA, 212 bp, Oryza sativa
  Clone ID: PAT_MRT4530_73996C.1
aacacataattcgccacactagtaaacttaaccggaggatttctgttatctgattaaatgtactacaactacatgcttatcaggtaattatctgggagccaagttatctcgagaaagaaccaaatttctcctagccatcctaatcagaatatgtatcacatatgattccaaatgtgataacactttatgttatatgaaggctagatggttcc

SEQ ID NO: 73744 - DNA, 186 bp, Oryza sativa
  Clone ID: PAT_MRT4530_73997C.1
cgtcttcagctcagaagcactacacttatgaaaagggggaataatagcaagggtgagtacaaccaccgtactcagcaaaacacaccaatgatgcagacgtgcaaggggatacaaggatggcttgtggctatttatataaaggcggttgtaaagcattttattgagcaaaacagtaaaacagttgag

SEQ ID NO: 73745 - DNA, 2709 bp, Oryza sativa
  Clone ID: PAT_MRT4530_73998C.1
atggcaaggcttgttacagttgcagctgctaaggtgaagggctcagcttccagatttcgatacgtttgtagtactcctagaacactggatcagccatggattatagctggtggaaaggtaattgctacaaaaataagaaatgcaactcagcttctgagttgtaaacttggagaattggttccagaagcatggagggaatgcccaaactgcaaatgtcacattgataatagcgatgttactttacagtggccagaattccctgacggtgttaaatttgatccatctgatcttgaagtacttgaacatttagaaagaaaaattaacctgggaaatccagggcctcagggtcttattgatcacttcatcccaactctagaaaagatttaccataacggtgtcttaaaaggatggaagaaaatactggttctttacaaaggctccaaaaagaacaagatagtacaagctaattgggttatgcatcaatataatcttggtgtggaagaaggcggggaggacggagagcttgttgtttccaaggtattctaccaattatcctccaagcaaactggcacgcctgaaatggactctgttactgaagaagcatctgatgcactgaccataagaagtgatcccattacacccataacgaaccctccgctgcctcgctgcctgatgaacagcccgtgtgacacggagcagaatggcaccatttcacatgatcaggagggggaatgcagcacatccactctccggcccatggtagaagctggaaaccgtgcagggtgttctgctggagcgtcaacagccggggacttcaacgaagatctgctgcagcgctgcgagtttccggaggaccccgtcccaactcttgatgacacgctgccttttctttacacggacgaaacggaccttttcagctgggaagattttcaattcgggtcgcaggaaagcttcggctgggtggatggggatcacactcttgttcagtttctgtacctctgcatgtgggaccgccttttggtagacgatctgctgagagaaaaatcaataccattgcccaactctgtagaaaactcacgaaaaaccctcctccgaagtccccaattccacatggcgccgcccacctccgccgccgccgccgtcgcggcggccgcccgcgcctcgccgacgtcggcggcggcgctcgcgctcttcaagtcggtgctgtccgcggacaaggcgctctcgccgctcgccgtgctcccgcacctcgacggcgcgccgtcctcgctgcccaacctcctgctcaccgcctccgccgccgtgcgcccccacgccacctccctccgcctctactcgcggatgaagtccctatccctccccatctcgaccgcctcgctccacccgctcctctccgccctcccctccgccccggccttcgccctcttcgccgacatgttccgcctccgcctcccgctctgcaccaccaccttcaacatcatgctccgccacctctgctccgccgggaagcccgcccgcgcgctcgagctcctccgccagatgccccgcccgaacgccgtcacctacaacaccgtcatcgccgggttctgctcccggggccgcgtccaggcggcgctggatattatgcgggagatgcgagaacgcggaggaatcgcgcccaaccagtacacctacggcacggtgatctctggctggtgtaaggttggccgggtcgatgaggcagtgaaggtgttcgacgaaatgctgaccaagggagaggttaaaccggaagctgtgatgtacaacgccttgattggtggatactgtgaccagggtaagctggatactgcgctcctttaccgtgatagaatggtggagagaggggtcgcaatgacagtcgcgacctacaatttactcgtgcacgccttgttcatggatgggcgtggaacagaggcatatgagttggtcgaggagatgggtggaaagggtcttgcgccggatgtgttcacgtacaatatattgataaacgggcattgcaaagagggcaacgtgaagaaagcactagagatttttgagaatatgtccaggagaggggtccgtgcgacagtagtgacctatacggcattgatatatgccttgtctaagaaggggcaagttcaggagacagataagctgtttgatgaggctgtaaggagaggcattaggcctgaccttgtcttgtacaatgctctgatcaatagtcactccacttctggcaacatcgatcgagctttcgagataatgggtgagatggagaagaaaaggatcgcaccagatgatgtgacctacaatacgctaatgagggggctgtgtctactgggacgtgttgatgaagcgcgcaagctcattgatgagatgacagagaggggaatccagccagaccttgtcacttataacacgctgatcagtggctacagcatgaagggtgatgtcaaggatgctctgaggattcggaatgagatgatgaataaggggttcaatccaacgcttttgacatataatgcgctgatacaggggctctgtaagaatggccagggagatgacgctgagaacatggtgaaggagatggtggagaatggcatcacccctgatgacagcacatacatctcactgattgagggtcttaccactgaagacgagcgtgccattgatgatgagcgactggctgcagcagatgctgcgaaagtatga

SEQ ID NO: 73746 - DNA, 217 bp, Oryza sativa
  Clone ID: PAT_MRT4530_73999C.1
ccaatccattcgaatggagtggccaacaccctcggttctttgttattctggggaggcttgggattcttgccgggattaccacctaatcttctcctaggtggggggggggggggcggcagagctgaccccatttttacttttttggggcgggtggtggggctggtttgggttttagtgagccgggtggtggtgcgggcggggtagctgctcgtccccc

SEQ ID NO: 73747 - DNA, 571 bp, Oryza sativa
  Clone ID: PAT_MRT4530_7399C.1
gcggcatggaccatggtctgctccctgggttggggaagctggtggtgcatataacagtggcagccgaaaagtgtctaatactttcctgaatagcttctggtatcttgatcagcttggtcagtcagcaaagtatgacacaaaggtttactgcagacagactttgattggaggcaactatggccttcttgataccgaaacttttgttccaaaccctgattactacagtgccttgctgtggcatcggctcatggggaagggagttatttccttagacaccagcggttcttcgtacttgcgtgcctatgcgcattgcggaaagcaaaagggcggcgtcgcgctcctcatgctcaacctgaacaagaacatgggattcatggtctcagtcagaaatgacctcaacattaatttcagagaaatggcagggataaagagggacaactcctttgtccatggcctgaagaggacagtctcctgggttgggagcaaagcctcggatgggctggagaagagggaggagtaccatctgactccacaggatggcaaccctttgcccagacagtgctgctcaatg

SEQ ID NO: 73748 - DNA, 741 bp, Oryza sativa
  Clone ID: PAT_MRT4530_739C.1
gcacgaggaattcgagctcgtcggcgaagcagcagcagccagctgagtgaggcagctaagcttgggggtcgatcgatgggcaacgcgatcgccggcgggaggcggcggacggcgagggtgatgacggtggacgggacgacgtacaagtacaggccgccggcgtcggcggcggcggcgctgcgcgaccacccgggctaccaggtcctggagtcggaggaggtcaggcgcctcgggatgcgcgcgcggccgctcgacgccgacgcgccgctcaagcccggcaagctctacttcctcgtcgagctccctcgcctcgcccgcgcgccgcggcggacgtggtcgggcgcgcttgtccatgtcggcggcgccggggagaggttggagagcatgatgctgtcgcggcggtcggcgtcggacgtggcggcgtcgccggtgtcgtcggtggaggccggcgagggcggcgccgtgcggctgcggatgcggctgcccaaggcggaggtggcgcggcttgtgaaggagagccgcgacgccgccgaggccgccgagaagatcatgcagctctgcgtcgacagggaccacagctccgcgccggccacccccgtcctccgccgcccgccgccgctgccgctgccgctgccgctgccggcggcgctcgtctcgtcggacaagaagaaggtcgccgacaagaagcagaagaaggcgaggtttatgactgacgtacctgacgagatcatcgacttctga

SEQ ID NO: 73749 - DNA, 246 bp, Oryza sativa
  Clone ID: PAT_MRT4530_73C.1
tcgttaattctaattggaccagagagtaaaatacttggggttggcgagaggacttaggctaaacatcaggacactggcatggtgacacgagctgaatttaaagtcaaacatcttgggttactgatggtgagataaacgatgaagtacttcagaatagacgagaaagtgataatgtcccagaaatccactaccattatttcttatgttgctacaaaagatgagatcgaggggagaattgcatagcag

SEQ ID NO: 73750 - DNA, 2901 bp, Oryza sativa
  Clone ID: PAT_MRT4530_74000C.1
atggcaaggcttgttacagttgcagctgctaaggtgaagggctcagcttccagatttcgatacgtttgtagtactcctagaacactggatcagccatggattatagctggtggaaaggtaattgctacaaaaataagaaatgcaactcagcttctgagttgtaaacttggagaattggttccagaagcatggagggaatgcccaaactgcaaatgtcacattgataatagcgatgttactttacagtggccagaattccctgacggtgttaaatttgatccatctgatcttgaagtacttgaacatttagaaagaaaaattaacctgggaaatccagggcctcagggtcttattgatcacttcatcccaactctagaaaaggtggaaggaatctgctatacacatcctgaaaatctccccggtatcaagctggacggcaccagcagccatttcttccacagaatatcaaacgcatatggttctggtcagcgcaagcgtagaaagataagccacaccggccatgctgcttctgacgagaacataagatggcacaaaactgggaaaatccaacagatttaccataacggtgtcttaaaaggatggaagaaaatactggttctttacaaaggctccaaaaagaacaagatagtacaagctaattgggttatgcatcaatataatcttggtgtggaagaaggcggggaggacggagagcttgttgtttccaaggtattctaccaattatcctccaagcaaactggcacgcctgaaatggactctgttactgaagaagcatctgatgcactgaccataagaagtgatcccattacacccataacgaaccctccgctgcctcgctgcctgatgaacagcccgtgtgacacggagcagaatggcaccatttcacatgatcaggagggggaatgcagcacatccactctccggcccatggtagaagctggaaaccgtgcagggtgttctgctggagcgtcaacagccggggacttcaacgaagatctgctgcagcgctgcgagtttccggaggaccccgtcccaactcttgatgacacgctgccttttctttacacggacgaaacggaccttttcagctgggaagattttcaattcgggtcgcaggaaagcttcggctgggtggatggggatcacactcttgttcagtttctgtacctctgcatgtgggaccgccttttggtagacgatctgctgagagaaaaatcaataccattgcccaactctgtagaaaactcacgaaaaaccctcctccgaagtccccaattccacatggcgccgcccacctccgccgccgccgccgtcgcggcggccgcccgcgcctcgccgacgtcggcggcggcgctcgcgctcttcaagtcggtgctgtccgcggacaaggcgctctcgccgctcgccgtgctcccgcacctcgacggcgcgccgtcctcgctgcccaacctcctgctcaccgcctccgccgccgtgcgcccccacgccacctccctccgcctctactcgcggatgaagtccctatccctccccatctcgaccgcctcgctccacccgctcctctccgccctcccctccgccccggccttcgccctcttcgccgacatgttccgcctccgcctcccgctctgcaccaccaccttcaacatcatgctccgccacctctgctccgccgggaagcccgcccgcgcgctcgagctcctccgccagatgccccgcccgaacgccgtcacctacaacaccgtcatcgccgggttctgctcccggggccgcgtccaggcggcgctggatattatgcgggagatgcgagaacgcggaggaatcgcgcccaaccagtacacctacggcacggtgatctctggctggtgtaaggttggccgggtcgatgaggcagtgaaggtgttcgacgaaatgctgaccaagggagaggttaaaccggaagctgtgatgtacaacgccttgattggtggatactgtgaccagggtaagctggatactgcgctcctttaccgtgatagaatggtggagagaggggtcgcaatgacagtcgcgacctacaatttactcgtgcacgccttgttcatggatgggcgtggaacagaggcatatgagttggtcgaggagatgggtggaaagggtcttgcgccggatgtgttcacgtacaatatattgataaacgggcattgcaaagagggcaacgtgaagaaagcactagagatttttgagaatatgtccaggagaggggtccgtgcgacagtagtgacctatacggcattgatatatgccttgtctaagaaggggcaagttcaggagacagataagctgtttgatgaggctgtaaggagaggcattaggcctgaccttgtcttgtacaatgctctgatcaatagtcactccacttctggcaacatcgatcgagctttcgagataatgggtgagatggagaagaaaaggatcgcaccagatgatgtgacctacaatacgctaatgagggggctgtgtctactgggacgtgttgatgaagcgcgcaagctcattgatgagatgacagagaggggaatccagccagaccttgtcacttataacacgctgatcagtggctacagcatgaagggtgatgtcaaggatgctctgaggattcggaatgagatgatgaataaggggttcaatccaacgcttttgacatataatgcgctgatacaggggctctgtaagaatggccagggagatgacgctgagaacatggtgaaggagatggtggagaatggcatcacccctgatgacagcacatacatctcactgattgagggtcttaccactgaagacgagcgtgccattgatgatgagcgactggctgcagcagatgctgcgaaagtatga

SEQ ID NO: 73751 - DNA, 183 bp, Oryza sativa
  Clone ID: PAT_MRT4530_74001C.1
gttctttttttttaaatgaacagaagaaatatgccaggctgaatgcactgaacttaaagaatacattaacgcccgagcagcacacgttgaaggccacaatatcgctgtataccatatctagtacgcagacactacacgaagattcttatttgagaggttcttagaaactgctgaagaaccaca

SEQ ID NO: 73752 - DNA, 144 bp, Oryza sativa
  Clone ID: PAT_MRT4530_74002C.1
atggaaaaaactctatggcacacaagtgatgaccttcagatctcttccaggattgttttgaaagttggttttgatcactggactattctacgtggttctggagggtgggctgttacagcgactatgcaagatatattaatttaa

SEQ ID NO: 73753 - DNA, 602 bp, Oryza sativa
  unsure (1)..(602): unsure at all n locations
  Clone ID: PAT_MRT4530_74003C.1
ggccgccccttttttttttttttttttccgtcatattaacattgggaatctcgttagaatttttgatcaccatccctcttctagctggactttttttatgctccatgccagttcatacctgacccagcccaaacgcgaggcgtaacgaaccaacccttgacaccgatgcaatggaatgattggttaagatacaaaaagaaacaaactgccgctttaagcggaagaaaggtccttcttgagagtaccctggtactgcttcttctcggcaggggtctggaaagcaccgtgtccgaactcggacgaggtgtcgatccacttgaggctgaccttctcgagggcccttcgggaggtctgggggaacatggtctttcggagggtcatgacacgcttcttgacaccagggatggaacccttgagcatgacgaagtcgttcttgacctcaccgtagcggacgaaaccaccaagaggagtgatggtcttcttggtgacatcgatctcggtggcggncgttgtcgtcagcatcgcccttaccaatacggtagatcttgtggttgaccgaggttcggtgatggtaacccatctgaccggcacgggcaacagtc

SEQ ID NO: 73754 - DNA, 1418 bp, Oryza sativa
  Clone ID: PAT_MRT4530_74004C.1
atggcgccgacgacgacggccacggcggcggcggagcaggcgccgccgccgcagcatacgaggaaggcggtggggctcgccgcgcacgacgactccggccacctcacacccatccgcatctcgcgcaggaaaactggagatgacgacgtcgctataaaggtgctgtactgtgggatttgtcactctgacctgcacaccatcaagaatgagtggagaaacgctgtctacccagttgttgcagggcacgagatcaccggggtggtgaccgaggtggggaagaacgtggcgaggttcaaggccggcgacgaggtcggcgtcgggtgcatggtgaacacctgcggcggctgcgagagctgccgggacggctgcgagaactactgctccggcggggtcgtcttcacctacaactccgtcgaccgggacggcacgcgcacctacggcggctactccgacgcggtggtcgtcagccagcgcttcgtcgtgcgcttcccctcctccgccggcggcggcgccggcgccgcgctgccgctggacagcggcgcgccgctgctgtgcgccggggtgacggtgtacgcgccgatgaggcagcatgggctgtgcgaggccgggaagcacgtcggcgtggtggggctcggcgggctcggccacgtcgccgtcaagttcgccagggcgttcgggatgagggtgacggtgatcagcacgtcgccggtgaagaggcaggaggccctggagaggctcggcgccgacggcttcatcgtcagcaccaacgccagtgagatgaagtgcaactttgcaaggctatgcaagccgaagaaatctttgaatacaactgatgcacctcattgccgacagagcatcttaagattgtttggtcaagctgcgatgggcaccatgcatggcatcatcaacacggcctctgcaagcacatccatgcactcttacctggcactcttgaagcccaagggcaagatgatcttggttggcctgcctgagaagcctctccagatcccaaccttcgctttggttggagggggcaagatactagctgggagctgcatggggagcatcagtgaaacgcaggagatgatcgacttcgccgccgagcacggggtggccgccgacatcgagctgatcggcgccgacgaggtgaacacggccatggagcgcctcgccaagggcgacgtcaggtaccgcttcgtcgtcgacatcggcaacaccctcaggtcggattgaatcgagtgatgcgtccggtccgatccctgcttaatttatctctctgtccattctggaaccggccagactgtctaatcgaacgtttgattagaaaatgaacatttaaaatacctttcgccagattccggaacaacaaaaaaaactaaaaaaacaaaaaaaaaaaagggcggcctctaataaggttc

SEQ ID NO: 73755 - DNA, 328 bp, Oryza sativa
  Clone ID: PAT_MRT4530_74005C.1
ttttttttttttttttttttttttttttttttttttttttttttattgggtttttttttttatttttgtttttttttttattttagcgacaagcccaataaaaagaaaagcctcttaaaccatgtccaaatatttggcccgaacgaaaatggccatacaaagggggcaaaaaccttccttggagggtgctccaaacttgacaaaccggtcgaattcaattttaaacctggttttacacccattttaaaaaaatggaacaaaccgggggtgaattttgggtttccacccggcgtaaaaagtggggggggggaaaaaaatacccggtgct

SEQ ID NO: 73756 - DNA, 454 bp, Oryza sativa
  Clone ID: PAT_MRT4530_74006C.1
tcgcccacgcgttcgcccacgcgggcgcccacgcgtccgaccacgcgtacggacgctggctacgcgatggcgaacggtgacgacgagatgctacggactgagttgatctacggtaccctgctcgaggccgtgtacggcgttgactactaacccgtagatctcttgaaccaggatcgccctatctgtcctgaggatgaacaagatgacgccgcctgcaggaagatcgcttagtcggacaccacggacctcttctcctacaccggccgcgtggcgcattaggagaagacaacgtggtggtccgccatgcgtaattgcgccctgccgcgcctataacatatgcacatgccagatagaaccggctcctgtcctatagtctgctgctaattgagccaggccccatacctatgtgtgtctgtaatactagtacgaatcatgcatagtactactatgcgac

SEQ ID NO: 73757 - DNA, 459 bp, Oryza sativa
  Clone ID: PAT_MRT4530_74007C.1
atggccagcagcagcgccagcccgcagttgtcgtcggcgcccgccgctgccgccacgttcacgatctgctgcgccgcgagcgctgcgttcgtcgatgccagcggccgagtcgccaagaagaacgcccttgtcatcgccgccaccacgggcgccgacgacatcaacagacccttcttggtcaggcttttgagcgagattgggctaggcgtccgggtggaagataatcgcaagcggcggccggcgaagacacgccgggaagattgggcggggaatcgacgcggaagacaactgcgaggcgatggctggcaaagatcgatctgcgacactcccgtgaggagagaaacaagatgggctgcggagggggagggaatagcgctgcatgtcacacgggatcggatggctcgccgtgggacccacaaagcgcatgcgaacccgtgctatcgcccagctatagattag

SEQ ID NO: 73758 - DNA, 263 bp, Oryza sativa
  Clone ID: PAT_MRT4530_74008C.1
gttgtaggccggaagcgggcaatctggaggaaacacatgtacaaacccgttcattcgaagtactatgactagactagcgtccatacagtgaatcaacttacatcccttgtagaatgacgggactggagaatctgtagcttgacacgactaaattactttacaacagattcacccttaaacagatggtgtacaagcaaagaggcacttaccagtctcgctctccagcagatgacctaactatagagcatgtgatacccactgtg

SEQ ID NO: 73759 - DNA, 193 bp, Oryza sativa
  Clone ID: PAT_MRT4530_74009C.1
tgcagcatagtgtatgctcggtcgtccggtggtagacttgtcaagaatgaaggtggaaatcattcatcggccatcaccatacatgaagattcaaccaccgacaccattgatacctgatgctgccttctctgccgcacgctcacctcagtgtctgagatggttttgatgaccctcaactttcaaataaatagtg

SEQ ID NO: 73760 - DNA, 230 bp, Oryza sativa
  Clone ID: PAT_MRT4530_7400C.1
cggggtgcggcggtggccacaagagcaaaatgcgaccatccacggcatggggtggcacagaagtggacaaccgcgggcgcctctccgaacggaatttggcgaaagactgcgcagcaacgcgggggcgcgccgagacgcatagtaagagcaccccgctcagggaccgggccgtaaaagaggccggggttaatgaaacccgggcgcctataggcgacttcccgcccccctag

SEQ ID NO: 73761 - DNA, 3623 bp, Oryza sativa
  Clone ID: PAT_MRT4530_74010C.1
cggaattcccgggtcgacccacgcgtccggtcagatctcaaagtgttccatatgaggaggagggcaagcgctgtgttcttgttggcgtggctcgtcgccggcgtggtgaaggctgctgaggcggcttctggcatggcgcgaccgcttgcttacgactactcgtcaagctctgagtgcttgcctgagccgatggacgctcactacggtggcggcatcatccgcaacggcgacttcagcgccggactccagggctggtcggccttcgggtacggcagcctcgccgtgggctcgtcgccggcggggaacaggtacgccgtggcgacgaaccggacgcggccgtaccagagcgtcagccagaaggtgctcctccaggacggcacgcactacaccctctcagcttggttgcaggttagtgacgggatcgccgacgtgagagccgttgtgaagacggccggcggcgacttcatccactccggcggcgtcgaggcgaggtccgggtgctggtccattctcaagggcgggctcaccgccgccgccgccgggcaggctgaactctacttcgagagcaacgcgacggtggacatatgggtggacaacgtgtcgctgcagccgttctcgagggaggagtggagcgcgcaccacggggcggccatcaagaaggcgaggaagaagacggtgcggctccaggcgagggacgccgccggcaacccggtcgccggcgcgcggatgcacatcgagcacgtccgcaacggcttccctctggggtcggcgatgagcaaggagatcctgaccaacccggggtaccagcggtggttcacgtcgcggttcacggtgaccacgttcgagaacgagatgaagtggtacagcacggaggcgatcccggggcgggaggactactcggtgcccgacgcgatgctccggttcgccaagagccacggcatcgcggtgcgcgggcacaacatcttctgggacgacccgagcacgcagatggggtgggtgaaggcgctctccggcgagcagctccgccgcgccacggagaagcggatcaagtcggtgatgtcgcggtactccgggcaggtgatcgcgtgggacgtggtgaacgagaacctccacttcgacttcttcgagggccggttcgggtgggaggcgtcggcggcgttctaccgcaaggcgcaccagatggacggcggcgcgctcatgtccatgaacgagttcaacacgctggagcagccgggcgacctgacggtgctccccggcaagtacctccgcaagctgtggcagatcaaggcgttcccggggaacggcaacgccgcccggatgggcatcggcctcgagggccacttcagcgcgcaacccaacatcccttacatccgcgccgcgctcgacaccatggcgcaggccaacgcgcccatctggctcaccgagatcgacgtcgcgccggggcccgaccaggcgcgccacctcgagcagatcctccgggaggtgtacgcccacccggcggtgcacggcatcatcctctggacggcgtggcacccgcagggatgctacgtcatgtgcctcaccgacaacaacttcaagaacctccccgccggcgacgtcgtcgacaagctcatctgggagtggaagacgcgctcccacgtcggcgtcgccgacgccgacggctactacgagaccgagctgttccacggggactacaaggtcaccgtcacccacccggcggcgaactccaccgtggcgcagagcctcagcgtcgacagggagtccgacaacgagttcaccatacactgcgtgaaggagccggagaagcctctgtacggcggcggtatcctgaaggagaccgaggctaaggggtatgccagcggcaagaagcttctgtcggagaatagcaagagcgccgctccggtgaagggctccgccctcaaggtcgacctcaagaaggaccaccactacgccttgtccgtgtggctgcagctctccaagggggaaggcgacatcagggccgtgctggtgacccccgacggcaagttcaacaccgccggcatgatcgcggccaagtgcggctgctggaccatgctcaagggcggcgccacctcctacgacgacggcaagggcgacatcttcttcgagaccaacgtgacggcggaggtgatggcggaagggatggcgctgcagcccttcagcttcgacgaatggaagggccatcgcgcggagtccgtcaagaaggagaggatgaagaaggtgaagatcacggtggtgggccccgacggcaagccggtgccggaagcggacgtgagcctggagcgggtggggaaggggttcccgctggggaacgcgatgaccaaggagatcctggacatgccggagtacgagaagtggttcgcggcgcggttccggtacgcgaccctggagaacgagatgaagtggtacagcacggagttccaccagaacgaggaggactacaaggtttcggacaagatggtggagctcgcggagaagcacaacatcacgctgcgcggccacaacgtgttctgggacgaccaggacaagcagatggactgggtggagaagctgggcgtgccggagctcaaggaggccatggcgaagcggctcaaggacatcgtcacccgctacgccggcaaggtgatccactgggacgtcgtcaacgagaacctccacttcaacttcttcgagggcaagctcggcaaggacgcgtcggcggagatcttcagggacgtggccaagctcgacagcaagcccatcctcttcatgaacgagttcaacaccatcgaggagcccaacgacgcggcgccgctgccgaccaagtacgtggccaagctcaagcagatccgcgagttcccgggcaacgccgacctcaagtacggcatcggcctcgagagccacttcgccgcgccgaacatcccctacatgcgtggctccatcgacacgctggcgcaggccaaggtgcccatctggctcaccgaggtggacgtcaagccctgcaagaaccaggtggagtacctggatgaggtgatgcgcgaagggttcgcgcacccggccgtcaagggcatcgtgctctggggggcgtggcacgccaagggatgctacgtcatgtgcttcacagacaacagcttcaagaacctccccgtcggcgacgccatcgacaagctcctcaaggagtggacggccggccacaccggcaagaccgactccaagggcgtcctcgaggtggagatcttccacggcgagtacaatgccaccgtcaagcacaaggagttcaaggagaactgcatgaccctcgacctcgactccaaggcagaggccaaaatcgagctcagatccggtacgtactaattaatatgatatgatttagtttgaattgtaggagcgccctagactttgctgcccactggatcagcagtcgtttccttggtcacaatgttgctattttttctagttctaggctaattgcattgtcacttcatttccttccattttttttagtgattctagtaacttttttatatatatacgtagatccaatgcttacatttcatttgtaacttgtaaggactctgtgatgagagaatttaatcagcacggtacatagttctcataaaaaacaa

SEQ ID NO: 73762 - DNA, 402 bp, Oryza sativa
  Clone ID: PAT_MRT4530_74011C.1
atgggctatgctgacgtcagcaaagggggtgccggcgccgacaggtgggccccacatgtcagcgggacacaagggagagggcgcacggtggacgcggtccaccgtggcctcgggcgtgccgtggaccaggaccacggcggtccacgggcggccacgggacagggcgggggaggggaaaaagagaggagggagatgctcaccgagtgcctgtggcaaggaagcggcgcggggagctcgacgatgagagacggcggcgggcgggctcccgcgatggccgacgggcgcggaagggtggccgaggggcggtggggcgcggtggagttggtggtgggggcggcgcgacgcggcgacagctatggcggcggcgtaagtgcgactggaggcggtgtctcgggatggtga

SEQ ID NO: 73763 - DNA, 397 bp, Oryza sativa
  Clone ID: PAT_MRT4530_74012C.1
ggtgaaaaagttcaggagtatatcattcatatacacgtaccggaggaagttaaatatttaatttttttacattgttcaaacatcaaaagtgcactctaaagaattacaggcgaaaaatggctttgctgatcactggacttacaatgaaactccacaacacaaatttgtcgtagttttagagtataacaaaacatgcttcaaaagcaaagcctggttcactttttctttggagggatatggttgccaccagttgcaattttgaacaggtagaacgcaaactttaaagctctggggccgggaacgtcacacagttggcattatctttgaagccttaaggtttttttgccccataacatatggtaaagctagtgcacatagggtttttagggcaagggct

SEQ ID NO: 73764 - DNA, 324 bp, Oryza sativa
  Clone ID: PAT_MRT4530_74013C.1
aatcgccgccgtttgtcctggattccaccgacatgacaatgagggagtgaatgacaagccacaagaggccaatcgctatccacgatgagaacgcgagcgaggagctccaaggactctagcatggagatcagactgtgggacagaaacccggatacaagaccggtgagggaggagacgatactgttgacacctatggcagagagacagggagcgaccaccatggaacatgagctagatcagcagaaagcgcgactaccgaaactgacgatgatgaggctggcaaccaccagcgagtctatgatcataggcatgtcataagaagca

SEQ ID NO: 73765 - DNA, 1308 bp, Oryza sativa
  Clone ID: PAT_MRT4530_74014C.1
atggctgataacaggaggagacgtggtgctgcgattgcggggctcaatacagtgttcgttcagaagccggaccgagttgtgtcgcgactccgcccaaatctactgtttacaatacttatcggaagatcgggacctaacatcctcatcagttgcacaattgcgttcctttcctactatatattgtgcctcctaagctccacatatatacttctagtcagcaccactttgatccttgcaattgccacatcacgtcctttaaggtgtcacaaaccagccaccggttatagcatccttagcattgctggtatgggtggcgctcaaaatgagcgataccaacaaggtaacactaatcgcgtgcctgatgatctttatgctaagtttatgtttaaaataccatcttttttgggttattatgatgctgagaaataccttgattgggagatgacaatagagcagaagtttagtgcccaccttgtgcctgagcatcatagagttcaacgagctactagtgagtttaaagattttgctatcatttggtggactgggttagctgcagagggagttttacctactacttgggaagaaattaaggtagctatgcacgatagatttgtcccatcatcttatcatacagacttaagcaagaaactgatacgtttagaacaaggggataaatctgtaaaggattactatggtgagctacaaaaggaattgatgcgatgtagaatagtggagggtaccgaggattctatttgtcgtttttactcgggattgaggcgcgaaattcaggacatagttgattataaggaatttaacactgtcaaccagttgtttcagtttgctatgcttgcggagaaggaattgcagggcgtgatcaacagtattcagtgccaccgctgccatggatttggctatgtgcagaaggtttgccctagtcaacgggcatgtgttgctactgaagatggctacatcagcatctccaacattgaagatgatgaggaggaagagaagaaagatgaagagaaaaaagacctatctatagctccatgcatgcttgaagaatgttcaattgaccaagcacctataatttatgaagatgagaataaaggtaatgataatggtgctacaactaatcaaggtatgcatatttatgatgtgccaactatgtccactacttatgctacattagagcaacccatagtggaaacaattgttgaaaacctttgtcacaatacaatttgcttgatgtttcttgtgataaagaagagttgtgcgatgcttcacttatatcaatgtcacaacaagtga

SEQ ID NO: 73766 - DNA, 1951 bp, Oryza sativa
  Clone ID: PAT_MRT4530_74015C.1
tgattagggaccaaaccaagaacttctccaagtctacttctacctcaccacgtcacttttggcccatagaagtagtataattgcgttcctttgctactatatattgtgcctcccaagctccatatatattcttctggtcagcaccgctttgatccttacaatcgccacatcacgttcttcaaggtgtcacaaactagccactggttgtaccatccttagcattgctggtatgagtggcgctcaaaatcagtgataccaacaaggtgcacgtgatgatagtactttggtgcaacaagtgctaagttctcaactggagaaagcggagcaatggcagtaccacgaattatttgaaacaaagtttgtggttaaggatagagcatgtcgtactataatcgatagtgagagttgtaataactttgtgagtttagatttggttgagaaacttgaattgcctacacaaccgcatcctcatccatattacatcaaatggttcaactcttgtggtaaggtcaaggtaaatagagttgtgagaataaactttttgattggaaattaccatgatactgccaattttgatcttgtccctatgcaagaatgttctttgttgtttggtcaaccatggctatatgataataatggttcgcataattttgttgctaatacatacacatttagacaaaatggtcgaaaaatgaaattggtacccatgagttttactgaaattttcgaagataatcttgaaaggatgaagaatggaatcaaggaaattttcaaagatagtattgaaaggacgaaaaatagaatcgatgtgattttcagagataccaggaaagatactattgtgatgccttcaactaagtctgagttattacaaaacgaacgtaatgttgtgcctattgttttggatactaatattttacaggcatctgagaataaccaaggtaataatgacaaagagaagaaagacgaagaggaaaaagtcctatctatagctccatgcatgtttgaagaatgttcaattgaacaagcgcctataatttctgcagatgagaaaaaaggtaatgataacggtgctacagctactcaaggtatgcatatttatgaggtgccaactatgtctactacttacgctacattagagcaacccatggtggaaacaattgctgaaatacctttgtcacaaaacaatttgcttgatgtttctcgtgacaaagaagagttgtgcgatgcttcacttatatccatgccacaactagtgaatgaacatgctagttctatagtagagccaccaagtgttgagtttaaacatgttattcacattgctagcgagaatgaagaaattaaattgctatcttctttaaatacttggggttatattcaatttgatgatatttgtccactcaactgcttaaagaagaaattatttgctagatttgaattgccatgcccttctgatgtgatttttcatattattggcaattatgaaaaaaaatacatggatgcgtactggagtgctacgtggtcaccttgctatgccagttgtgagagttcaaatgttgtaaattcggctagggggcaaactgaaatacgaactggcaatattgatcataagcacactttcgatcccgacaatagcattgtcacattagatgatttatctgaggatcaacgacgcgagttagagtgggagctcaaggtagaaagcgtggagctaagaaaacagaaacttgcacgccttctaaagaaaaggaaaagcgtcatggaaaaacaacaaaagccgataaatttagaattatcgtctaacaaagacgaggtagttgtgcttgatttctctagagacataggagtttttgttttgccagatgaacttcgtgccaagaaagttgatgagcatcaagtcgatggagcacgataccttgagaacacagaggagatgttggagggccattag

SEQ ID NO: 73767 - DNA, 2540 bp, Oryza sativa
  Clone ID: PAT_MRT4530_74016C.1
tctactactttacaaactactgcttcatttttttaggttcgacattatggaagcgagatctattaccagcacagccagataaatttcgtaatagtcaggaccaaacaccacaccttaattcctaccactaacggaatgaactgggttaggtttgctccaagctgaaaagaaatctagtagtattaaaattacatcgtgcgaccaaggccgaattttgtgtgttttcgtttgcagaggtacttgcttgggcgaaagaaaagagaccgaacgtaactaatgcatagatgattaaagaagttgattggggaccaaaccaagaccttctccaagtctacttctacctcaccacttcaactttgcattttcttattagcataattgcattcctttgctactatatattgtgcctcccaagctccacatatatacttctggtcagcaccgctttgatccttgcaattgccacatcacgtccttcaaggtgtcacaaaccagccactggttgtaccgttcttagcattgctggtatgagtggcgctcaaaatcagcgatactaacaaggtgcacgtgatgacagtactttggtgcaacaaatttggttgagaaacttgagttgcctacacaaccgcatcctcatccatattacatcaaatggttcaactcttgtggcatctgagaacaaccaaggtaatgaggtggaagagaagaaagacgaagagcaaaaagatctatccatagctccatgcatgcttgaggaatgtttaattgaccaagcgcctacaatttctgaagatgaccaaaaaggtaaagataatggtgctacaactgctcaaggtatgcatagttatgatgtgccaactatgttcactacttatgctacactagagcaacctatagtggaagcaattgctgaaatacctttgtcacaaaataatttgtttgatgtttcttgtgataaagaagagttgtgcgatgcttcacttatatctatgtcacaactagtgaatgaacatgttagttctatagtagagacaccatgtgttgagtttaaacatgttattcacattgctagcgagaatgaagaggttacatagctatcttctttaaatacttggggttatattcaatttgatgatctttgttcactcaactgtttagagaagaaattatttgctagttgtttaaaagttacaggttggtttgcaagaaggggagtgttgtggcttttcgactacaaagattttaggatccaatcatatggccatcaagaaatgttccgcacaggatgttgtgatagacaaagataagtacaatacgctccatgacaaggtgaaaccgaggacgatttccaaccaagaaggggaggatgaggaggacataactagctcggatataaccatgactatcttatgtattaatcaaataaaggtgcatatgttctacataagatttacttgttatatatttgaacaaacgttgctacacaatgagtttcgtgtgttttcatttgcagaggtagttgcttgggcgaaagaaaagagaccgagcgtaactaataaatggatgattgaagaagttgattagggaccaaaccaagacctctccaagtctacttctacctcaccacgtctagggtacatcactcaagtgtcacaattgcattcctttgctactatatattgtgcctcccaagctacacatatatacttctggtcagcaccgctttgatccttgcaattgccacatcacgtcctttaaggtgtcacgaaccagccaccggttgtaccgtccttagcattgctgatatgagtggcgctcaaaatcagcgataccaacaaggtgcacgtgatgacagtactttggtgcaacgaatttggttgagaaacttgagttgcctacacaaccgcatcatcatccatattacatcaaatggttcaactcttgtggcatctgagaacaaccaagttagtaaggaggaagagaagaaagatggagaggaaaaagatctatctatagctacatgcatgcgggaagaatgttcaattgaccaagcacctataatttctgaagatgagaaaaaaagtaatgataatggtgctacagctactcaaggtatgcatatttatgatgtgccaactatgtccacaacttatgctacgttagagcaacccatagtggaaccgattgttgaaatacctttgtcacaaaacaatttgcttgatgtttcttgtgataaagaagagttgtgcgatgcttcacttatatccatgcaacaactagtgaatgaacatgttagttctatagtagagccactatgtgttgagtttaaacatgttattcacattgctagcgagaatgaagagcctaaattgcaatcttctttaaatacttggggttatattcaatttgatgatctttgtccactcaactgcttagagaagaaattatttgctagttgtttaaatgagttaagggttggtttgcaaaaaggggagtgttgtggtttttcgactacaaagattttaggatccaatcatatg

SEQ ID NO: 73768 - DNA, 186 bp, Oryza sativa
  Clone ID: PAT_MRT4530_74017C.1
atggagcacggaggcgacgaggtcttgtgggatggcgcatcgggcgtggaggaagctgacatcaccgccaccgccattgctgctggtggaggtgtgggcggagtagaggaggagatcgtgaagctgttagtgaggtgtttctacagctatgttggcttttttcctggaatatatttcctttattag

SEQ ID NO: 73769 - DNA, 747 bp, Oryza sativa
  Clone ID: PAT_MRT4530_74018C.1
atgacacgtcatcttctctgttcccctcttttcttgcctctcttcctgttgctcggcgcggcgaactggcgaggcgatggtggtcgtgactctggcgatgaagggtggcggccggcccggagctcggtggggcaaggcggaagaggaggagggcggcgccgtgacgatggccggcgacggcggcggcggtggcggccgcagtggggctccacggcggccaaagatgggaccggggaggtgacagcgaggggcagagcgccaccattgcgcttctcccctgtcagcggccagacgcgccgcctcgtcgccgttcaacctgaccgcctccgcctcctaccgcccggcgccatgcggctcgccgcaatgcgtgctggtgccctcggccctcctcctcatcgagtcccaccaagatctcctgtttttatgcaaaggaactatcacgggctggaggacaaatctcctgggtgcagcaacttcttggctttagttccttggacgccaccacaaattgccacggcatctaattggtcttcttcagattcagaaaagagagaattctttgaagtgccaatggagtctgatgagacagaagtcgattctatggacgttgaggaatctcttgaagcaaatgccgcagcaatcgatggtgaaagccttcaccagtgggcagtggcaacaacactgcatgaccccatcgtcactaccaaacccttcagcacctgttatgtgttcaaggtgacggaatga

SEQ ID NO: 73770 - DNA, 944 bp, Oryza sativa
  Clone ID: PAT_MRT4530_74019C.1
atgataccgacgagaccgcagtcgagttggttcgattagatcaccccgatgactaggctcctgaaggctccgactttgtaggctgtggtggttgtgttggcggtgagattcgatgccttagatcctcccggggggtccctcttataccgcaggtcagttggtctccaagtagaactcggagacatcggaccctacacgatacagtgacgacccagttctatccgagtaggactccttccatctgtggactccatgatgaatttccttaacatgtacagagaacgtccgtatacgcgcaggtataccataccagtacatgacgtatatccaaggatagagggtataccaacagactagaccaccaacacggacgaaaaaaactcaaccaccaaaagactccacggccggtctgggagcaggcgaccaagagaagggaggagcatcaaggaggggaggaggcctggccggtctgaaggtgaaactgagaactggcagcaagggcaacaaagacatcggtgtcatccatgtttccagcgaggatcttcgggcttcgtgggacaatccaaaacaactgtggcaaccacctccaacttcaccaccagcgcagagagaggagcaccggggtgagcaacatagcaactgtaagaaggaagaaaatggggggcggccaccccctactgcttgtgccgagacggttgaaagaggaagaaagagtagggaaggaaggagataacatggtggctgccagcgactggagcggtcggagtcgccgacgcgaccccccggcaggacccaatcccaccgactgacggagacagccggcgcagctgtaggcaggccaatgcgccgccccggacgccgacctgccgcgagcgccagccaccgccggccaccccgcgggccgccaccaccacgctgccccgcgccgcaacaacctccgccgc

SEQ ID NO: 73771 - DNA, 2156 bp, Oryza sativa
  Clone ID: PAT_MRT4530_7401C.1
ctcctcttcttttctatccaagaaccgctcaaaagctcgaaccttgcgcaatctttttaaatcctcccgaccatttcctccgggtttgattctgggcagagattgcgaggggaaagatacgagcttttcttggcttctttcccctgcattgggaaagatacgagctgttgctgttcttgggaagaacagcttgggacattcttgggttggggtttgattcccaggggaagaaagcatgaggctatggtttctcatacctcttcttctctgtttccctacattgattcgatccgaggattactcggatgtgaccatcgtcgttcggggtgctgagacgatcgcttcgaccagcaacgagttcatttgcgccaccattgattggtggcctccagagaagtgcaattatgaccagtgtccatgggggcaagcttctatcttaaatttggacttgactaatcctttgctagctaaagctatccaagcctttagccctctacgtatcagacttggaggttccttacaagatcaggtggtgtatggcacgccgaatttaggatctccatgcaccccattttcaaagagttcaagtggcctgtttggattttctcaaggatgcataaccatggaaagatgggatgctattaataagatctttatggatacaggtgcagttgttacattcggccttaacgcgcttcaagggcgacagcagatgggcagaggtgtttggggaggtgcttggaattccagtaatgctcgggagttcatggagtacactgtttcgatgaactaccctatagactcatgggaatttggtaatgagttgagtggaagtggaattggtgcaagtgttggagctgaacaatatggaaaagatataattgagctcaagaacatcatcagccagttatatggaaactctaggaaaccattggtggttgccccaggaggattctatgaccaaaaatggtatgctcagcttcttgatatctctggtccaaatgttctcgacacaatgactcatcatatttacaatcttggtgctggtaacgatccgcaagttgcaaataggatcttgaatccgcagtatttgagccagagctctgatacattcagagatctccaaatgacgatacagcggcatggaccatggtctgctccctgggttggggaagctggtggtgcatataacagtggcagccgaaaagtgtctaatactttcctgaatagcttctggtatcttgatcagcttggtcagtcagcaaagtatgacacaaaggtttactgcagacagactttgattggaggcaactatggccttcttgataccgaaacttttgttccaaaccctgattactacaggcaagtattcctatactttgctctgccacaatcatgctttactaccctatataccttttgtactaaaccgcggtatatgttcagtgccttgctgtggcatcggctcatggggaagggagttatttccttagacaccagcggttcttcgtacttgcgtgcctatgcgcattgcggaaagcaaaagggcggcgtcgcgctcctcatgctcaacctgaacaagaacatgggattcatggtctcagtcagaaatgacctcaacattaatttcagagaaatggcagggataaagagggacaactcctttgtccatggcctgaagaggacagtctcctgggttgggagcaaagcctcggatgggctggagaagagggaggagtaccatctgactccacaggatggcaacccttttgccaggacagtgctgctcaatggagctcctcttcagctcactggagatggtgacatcccttcactgccaccagtgatggtctcagtcaattccccaatctatgtcgccccgctgtcgatcgcgttcgtcgtcttcccagatttcgaggctgaaggttgcgaacgatgatttcgagtttagatagaaatatcatgaggtttttcttttctgatgtgatgatataggtgttctcagggttacatccactgtaaagatttttctgtgtttctagttttttccccaattgggctatatatagaataacttgattccagtgtttactgatcagtatgtagcaagcctgcagttccatccccttctatgtttggttgggtcacaataacac

SEQ ID NO: 73772 - DNA, 574 bp, Oryza sativa
  Clone ID: PAT_MRT4530_74020C.1
gtgtttgtactcccgctctaatccaccgtccatcaaaggtatgagtggcgctcaaaatcagcgataccaacaagatttggttgagaaacttgagttgcttacacaaccgcatcctcatccatattacatcaaatggttcaactcttgtggtaagttcaaggcatctgagaacaacaaaggtaatgaggaagagaagaaagacgaagaggaaaaaaacctatacatagctccacgcatgcttgaggaatgtttaattgaccaagtgcctacaatttctgaagatgagaaaaaaggtaaagataatggtgctacaagtgctcaaggtatgcatagttataatgtgccaactatgtccactacttgtgctaagttagagcaacccatagtggaaacaattgttgaaatacctttgtcacaaaacaaattgcttgatgtctcttgtgataaagaagagttgtgtgatgctacacttatatccatggcacaactagtgaatgaacatgttagttctatagtagagccacccagtgttgagtttaaacatgttattcacattgctagcgagaatgaatag

SEQ ID NO: 73773 - DNA, 783 bp, Oryza sativa
  Clone ID: PAT_MRT4530_74021C.1
atgctcctcaacgtcaccccatcaccaatgctgacctacactgtcttcggctacccagcacaacatcctcttcttgcagctcaacatgcacaagatgttgccttcagcggacgtctctacctcggtagatgcgtctcgcccaagggcatagacacccgtattgacgtgttcatcgatgatcttacccttacttcccgagacagcacggtcaaagggaatcagatcgatcccctttctcttctccctcctttctgctcgcctctccccggcccgagtgacgccgccgcccagactgttgcgccgctcttccccgccgaccagccgagctcaggagccgcgccgcttcaccaactcctccgcgcccctgaggaagttggcctcctcaacgctgccagtgagagcgccgccgctgctgccgccgtgggtttcccaccggtgaggatgccgacgcccacgggagccgcctccccgacacaggagcgttgccgccgccccttcgccggtacttgccgcctcctcgccggagccggcccgcgtcgaactcgccggcacctgcacgatgactacaccaagccgtgcttctaccgcttcttcaatcaaccccgagcatctggccagccgctccctgttgaaagtagctcaccggaaagttcgagccacccgcccaaagtgtccgacccaccgattgaatcaccaatcgcttccgccgccatcaacccgagcaccacgtctagtcatctccctgttgattgcagccatcaaacggttcagaccaccgcctga

SEQ ID NO: 73774 - DNA, 317 bp, Oryza sativa
  unsure (1)..(317): unsure at all n locations
  Clone ID: PAT_MRT4530_74022C.1
atggatggaacacaattagcaggtataacggaaagaaagcacggtatcaaaggacacaccgagntgaaggactaagttggtgaataggaaaatagtaacggggtggacactgaaaagccataggggtggagggangtaggattaagactgtgcgtgggcgatactgtaataaagtaagggagataccctagctactgaccaggagggattaggagttaagccaagatatgaaaggtagttaaaggtaaatatggattatgttttgaaatataagataggaaattatacggggggttaaatgggtggatttgttatgt

SEQ ID NO: 73775 - DNA, 450 bp, Oryza sativa
  Clone ID: PAT_MRT4530_74023C.1
atgtcgggaacggaaggggattggacgaggactgtattcgttttggaatcggagtcaagttttacccaaaatagaagcagcagggattccacgggattgcagagattgcaatcgaatcaaaccaaccaaagcaatgaagagatcggacccgatttcttgggcggtgggggtttgggccatgaactacaagcggtagaagcacggcttggtgtagtcatcgtgcaggtgccggcgagttcgacgcgggccggctccggcgaggaggcggcaagtaccggcgaaggggcggcggcaacgctcctgtgtcggggaggcggctcccgtgggcgtcggcatcctcaccggtgggaaacccacggcggcagcagcggcggcgctctcactggcagcgttgaggaggccaacttcctcaggggcgcggaggagttggtgaagcggcgcggctcctga

SEQ ID NO: 73776 - DNA, 813 bp, Oryza sativa
  Clone ID: PAT_MRT4530_74024C.1
ctctatttataaatttcgtaaggatgggctacaaccaagcaccttccgacgttgaagatgatgaggaggaagagaagaaagacgaagagaaaaaaacctatctatagcttcatgcatgcttgaagaatgttcaattggacaagcacctataatttgtgaagatgagaataaatgtaatgataatggtgctacaactaatcaaggtatgcatatttatgatgtaccaactatatccagtacttgtgctacattagagcaacccatagggaaacgattgttgaaatacctttgtcacaaaacaatttgcttgatgtttcttgtgataaaaaagagttgtgcgatgcttcacttatatccatgccacaactagtgaatgaacatgttggttctatagtaaagccaccatgtgttgagtttaaacatgttattcatattgctagcgagaatgaagagcttaaactgctatcttctttgaatacttggggttatattcaatttgatgatctttgtccactcaactgtttagagaagaaattatttgctagttgtttaaatgagttacaagttaatttgcaagaaagggagtgttggggtttttcgactacaaagattttagaatccaaccatatggccatcaagaaatgttcctcaccggatgttgtgatagataaagataagttcaatacgctccatgacaaggtgaaaccgaggacggtttccaatcaagaaagggaggatgatgaggacacaacaagctcggatataaccatgactaacttatgtattaatcaaccaaaggtgcatatgttttat

SEQ ID NO: 73777 - DNA, 963 bp, Oryza sativa
  Clone ID: PAT_MRT4530_74025C.1
acggaatttgatcggtggaatcggacatttcaggcggtggtctgaaccgttcgatggctgcaatcaacagggagatgactagacgtggtgctcgggttgatggcggcggaagcgattggcaattcaattggtgggtcgaacacttcgggcgggtggctcaaactttccggtgagctattttcaacagggagcggctggccagacgctcggggttgattgaagctggaggtgattggcgttctcgatcggtggaatcgaacactctgggcgggtggcctaggcctttcgatgagctgcgttcgacagggagacggctagatgtagcactcgggtcattcggcggctgggaagacgacacgcgacttgtcggcttcggttcgcgactagattgatggcgttcaatcgaaagtcggagcgggtggatcctacaggctgttttggaggtgttaacgacaaggtactgcatggaggagatgtcggtggtcgtgctgtgtgtgtttgctctggaaccaggatgttgctggcgtacgtgaagcttggaggtcagggtcgtggtggtgtgcacgattttgcgttgaggcgtgccggcgacggagacagaagcggcgctggtagtagcaccgatttcttgggcggcggggggtttgggcgacgaactgcgagcggtaggagcacggcttggtgtagtcgtcgtgcaggtgccggcgagttcgacgcgggccgactcctgcgaggaggtggcaggtactggcgaaggggcggcggcgacgctcctgtatcggggaggtggctcccgtgggcgtcggcatcctcaccggcaggaaacccacggcggaagcaacggtggttgccctcaccggcgaagtcctgaggggaggcggcgcaagggagtccagctcccgtgcgtggcagcgccttccagcgggcgacagcgttgaagagaaacctaggctgcggcagtag

SEQ ID NO: 73778 - DNA, 1584 bp, Oryza sativa
  Clone ID: PAT_MRT4530_74026C.1
tttgcattttctgattagcacatttgcgttcctttgctactatatattgtgccttccaagctacacatatatacttctggtcagcaccgctttgatccttgcaatcgccacatcatgtccttcatggtgtcacgaaccaaccaccgattgtaccgtccttagcattgctggtatgagtggcgctcaaaatcagcgataccaacaaggtgcacgtgatgacagtactttggtgcaacgagtgctaagttctcaaatggaaaaagcggagcaatggcagtatcacgaattatttgaaacaaagtttgtggttaaggatagagcatatcgtactataatcgataatgagagttgcaataacttggtgagttcagatttggttgagaaacttgagttgcctacacaaccgcatcatcatccatattacatcaaatggttcaactcttgtggtaagttcaaggcatctgagaacaaccaagttagtaaggaggaagagaagaaagatggagaggaaaaagatctatctatagctacatgcatgcgggaagaatgttcaattgaccaagcacctataatttctgaagatgagaaaaaaagtaatgataatggtgctacagctactcaaggtatgcatatttatgatgtgccaactatgtccacaacttatgctacgttagagcaacccatagtggaaccgattgttgaaatacctttgtcacaaaacaatttgcttgatgtttcttgtgataaagaagagttgtgcgatgcttcacttatatccatgcaacaactagtgaatgaacatgttagttctatagtagagccactatgtgttgagtttaaacatgttattcacattgctagcgagaatgaagagcctaaattgcaatcttctttaaatacttggggttatattcaatttgatgatctttgtccactcaactgcttagagaagaaattatttgatagagttgaattgccatgcccttctgatgtgatttttcatattattggtaattatgatagtaaaggagaatataatgtgcatcgagtatatatttgttcgaatttgactatacctcattttcatgataaaatgtattgtcgagaggaccgcgtgcatacaagtaattctctatctagttcctctagttgtttaaatgagttaagggttggtttgcaaaaaggggagtgttgtggtttttcgactacaaagattttaggatccaatcatatggccatcaagaaatgttccgcacaggatgttatgatagacaaagataagtacaatacactccatgacaaggtgaaaccgaggacggtttccaatcaagaagggaaggatgatgaggacataactagctctgatataaccatgactaccttatgtattaatcaaataaagaggtacttgcttgggcgaaggaaaagagaccgagcgtaacaaatgcatggataatcaaagaagttgattggggaccaaatcaagaccttctccaagtctacttctacctcaccgcgtcacttttggtccaaagaagacaagagataaaattatacacgttttggattcggattcgggcctcc

SEQ ID NO: 73779 - DNA, 1526 bp, Oryza sativa
  Clone ID: PAT_MRT4530_74027C.1
atggagggcatagaggatgttgacacatggtgctcctgtagtgatgcacgtgatgaaagtactttggtgcaacaagtgctaagttctcaaatggataaagcagagcaaaggtcgtaccacgaactatttgaaacaaagtttgaggtaaaggatagagcatgtcgtgttataatcgatactgagagttgcaataactttgtgagtttagatttggttgagaaacttgagttgcctacacaaccacatcctcatccatattacatcaaatggttcaactcttgtggtaagttcaaggaaaatagaattgtgagagtaaacttttcgattggaaattaccatgatactacaaattttgatattgtcccaatgcaagcatgttctttgttatttggtcaaccatggatatatgataataatgctttgcataatgatattgctaatacatacacatttagacataatggtcaaaaaatgaaattggtaccaataagtgttgctgaaattttcgaagataatcttgaaaggatgaagaatggaatcgatgaaatttacaaagatagtcttgaaaggatgaggaatagaattgatgagattttcagagataccaagaatgatactaatattgcgatgccttcaactaagtctgagttattacaaaacgaatgtattgttgtgcctattgctttggatactaatattttgcaggcatctgagaacaaccaaggtaatgaggaagagaagaaagatgaagaggaaaaagacctattgttggtatttcttacgatcacatataagatccacaagcgcacggatataccgatgtagcacttcccctaggagtattccaagggtatcgattctaagggaacgtgtgtgacatctgagaataacaaagctaatgtgggcagagggcagagaggatttcctaataagaaacagtgtctagggaaagcttaagtttaatcctaacgtaatacttcaggcactggcaacctgctgttcccagatgtcgctctactacgtacccggacagggaggacttaagtgatctcgagggctgtcaccacctctacacccacctcaaacgtactgtcgggactcggcaagcgagcccggtgcgcctcgccccgttcccgcgccggctccgccccgccattgttgccgatctccctgctgtgccgccgtcgacgacctccctaccccgccgctgtcaccgaccccgctttcgtgggcggatctggcccccccgcggccagatcggggaggagacggcgccggcgccggaggaggaagccgaggtgcaggtcgtcgccgaggagcttgaggagaggggagaggggtggaagaggaaatcctcgcttggggggcattgcctcaagcacccgtacccacgcaacaggttcctttcactggcgcctgggcgaaaaggagttggggggcgcgtctcccagctgagggacgtgctctctcgcagagggacgacgccgacggaaaagtggacggccgtcgctaggggcatgggctga

SEQ ID NO: 73780 - DNA, 1029 bp, Oryza sativa
  Clone ID: PAT_MRT4530_74028C.1
atggctgatctgaacaataacaacgggcctcgtcgacccaatctccttaccagcagcgtcaatgtgaatcaaagttggatttctactgcaactgccccctcaattttcagtgttgaggtggttgtgcgttatgaagacgaggacaactatgagtctctggttaaatacgtggaaatgacaaaagcattgttgccagaggacaaaagggacaagataaaagtaccgaagaagacaaaggttgcaacgaataagagaacggacgtaccggagtttggaggaaggcaacagacgggattcctcgttcacagacacgacaactttatctacatactaactactgcgcatgcggttgacagtgtttatcagaaaggggtacatcaaattagtatactagacctcaatgtggcattctcttttagtatcatatgcactcaccatgaggagtatcttaagtctactcaacctgatatgaaagtttcagaattggtgagatcatattctgctgcgtcggtcattgcaattgatactcagaaggatttgctccttcttgaagcagaagtggaccagctacgcttgcatgatgtggatgatgatcagtttgttgcatgcccatttgatcaccctgttatcacaatgtctctttcgcctcctgcgaaagatgagcttgtcctcatgcatggttggccgccacaccgagtgaactcatctgtctggggcaatgcaagtcataacaatagaacttatgatgttctgacaagatcgaacgtcaaaggatatgacatgcggcttatggaggttcctcagttcgattgctctgatgggttttctggaagcccaatactgaatggagattctaattgtgttgttgtctatcatgcgataatcaaacaaaccaagtttggatactgtattagtttggatgatgtcagacgcttcgtaaccactgcattgaacaattatatctcggggagttttgtttgtgacacgaggccagagggtatatgtcagggaagcctgccagctccttag

SEQ ID NO: 73781 - DNA, 2531 bp, Oryza sativa
  Clone ID: PAT_MRT4530_74029C.1
ctctctgacgcacgtcggggcccacctttggtctcgcacttccccaccatgaaaccgagtgcgatttcgcattctcccagcgcgagaccgaaatgttaattgcagacacaactagcttggatataaccaagactaccttatatattaatcaaccaaaggtgcatatgttctacattagatttacttgttatatatttgaacaaacgttgctacacaaagagttttgtgtgttttcgtttgcagaggtacttgcttgggggaagaaaaagaaaccgagcgtaacgaatgcacgaatgattaaagaaattgattggagaccaaaccaagaccttctccaagtctatttccatctcaccacgtcacttttggtccatagaagacaagagataaagttctatacgttttggatccggattcgggcctcctgacaagatcaacttaaaatggacctagccgctgatctagatggaatttcggggcctatgagtacttgttggaagtcgagacgtggtgctgcaattgcggggctcagtagcgtgttcgttcagaagccggatcgagttgtgtcgcgactccgcccaaatcgattgtttatcaatacctatcggaagatcgggagctaacatccctcatcagttggtatgagagcgcggttgcccgttaggtaatttatcttcccataaccagaaaattgccacacaaaaaaatattctttacctagacaatgtgacccgttgcattgttctattagattttcctttgttgaattctagattgcattgtctcgtcgggtaaaaaaaggtaatgataatggtgctacaactactcaaggtatgtatatttatgatgtgccaactatgtctactacttatgctacattagagcaacccatagtggaaacaattgctgaaatacctttgtcacaaaataatttgcttgatgtttcttgtgataaagaagagttgtgcgatgctccacttatatccatgccacaactagtgaatggacatgttagttctatagtagagccaccatgtgttgagtttaaacatgttattaacattgctagcgagaatgaagaggttaaattattatcttctttaaatacatagggttatattctatttgatgatgtttgtcctatcaactgttcagagaagaaattatttgctagttgtttaaatgagttacatgttagtttgcaagaaggggagtgttgtggtttttcgactacaaagattttaggatccatccatatggccacaagaaatgttcctcaccggatgttgtgatagataaagataagttcaaaatgctccatgacaaggtgaaactgaggacggtttccaatcaagaaggggaggatgatgaggacacaactagctcggatataaccaagactaccttatgtactaatcaaccaaagatgcatatgttttatattagatttacttgttatatatttggaaaaacgttgctacacaatgagttttgtgtgttttcgtttgcagagttacttgcttgggcgaaagaaaagagaccgaacgtaaggaatgcgtggatgattgaagaagttgattggtgacaaaaccaagaccttttccaagtcttctttcatctcaccacgtctagggttcatcactcaagtcgcacaattgcgttcctttgctactatatattgtgcctcccaagctctacatatatacttctggtcagcaccactttgatctttgcaatcgccacatcacatccttcgaggtgtcacgaactagccacggttgtaccgtccttagcattgctggtatgagtggcgctcaaaatcagcgataccaacaaggtaacaataatcgcgtgcccgatgatccttatgttaaggttaagtttaaaataccatctttttttggcatacgttgctacggaagatggctacatcagcacctccaatgttgaagatgatgaggaggaagagaagaaagatggagagcaaaaagacctatccatagtttcatgcatacttgaggaatgtttaattgactaagtgcctataatttctgaagataagaaaaaaaggtaatgataatggtgctacaactactcaaggtatgcataattatgatgtgccaactatgtccactacttgtgctacattagagcaacccatagtggaaacaattgttgaaatacctttgtcacaaaacaatttgcttgatgtttcttgtgataaagaatagttgtgtgatgtttcacttctatccatgccacaactagtgaatgaacatgttagttctatagtagagccaccatgtgttgagttcaaacatgttattcacattgctagcgagaataaagagcttaaattgctatcttctttaaatacttggggctatattcaatttgatgatgtttgtccactcaactgcttacagaagaaattatttgctagatttgaattgccatgcccttctgatgtgatttttcatgttattggcaattatgatagtaaaggagaatataatgtgcatgaagtatat

SEQ ID NO: 73782 - DNA, 544 bp, Oryza sativa
  Clone ID: PAT_MRT4530_7402C.1
tgaatgagtattattggattagaccttcgaatttgattgtgtttttcagctcgatcactaaaatccagattgccaaatagttaataaagtgtcggctttaaaggtcaaaccggtgtccgattagcctgttttttgacagcttggaagggaatcatagaccatcatttctccaagtttcgtgcaactgtggtttggagatctcagctgagaaccgaaaaggacagaatctgctatttctctacttgttagttgatatacctcttgttagctttgatggttgagatgttgataatcccatgtaacttgatgttgtacctgttgtgatgtgtctttagatattatagagaagactacatttgtacccattgttgattatagtggaagcttggagtggaccgttggtcccgtgttttttactcctcacaccgaggaggtttttccacgtaaatcactggtgtcttgtgtccatgttttattgttattccgctactgatttgttaagttgaaactatcctcaaagttcatcccaaaaaaaaaaaaaaaa

SEQ ID NO: 73783 - DNA, 2627 bp, Oryza sativa
  Clone ID: PAT_MRT4530_74030C.1
atggcggctgagtcccacatagatcctacaagtcaaccggcaatcttcttccacctcactcccctctactcccatctcaacccaaacctccagggcatccgtcaatgggtgagaagaagggtgtcggtcggcggggaaaagctcgatggcggaggccaccggctgacgtggctcccaatagccgggagcgctcacatcatggacttgcgcacgcggggagtgcggtgcaggtcccaactacaattgcaatgtcgtcttcacctgcacgcgcgaaggatggggcttctgcctcgtcacgctggccaagctcctatcccccaagctcatactcccccacccctcgtcgagttgctcaaaagccgatgtgttcaggtgtccccgagctctgcctctcattcgcagaggcgcacgcgcggttccaccgcatcgtcttcgagttgtctccgtgagagcaacacaattccaatagatgagaaggttgaccagcaagtaggccatgagcacactggagttgctgcacggggacgaccaccattgcaaggtccggcaaaggggagaacaaggcggctgagccagatctgtcgaaacagaggtatgagtggcgctcaaaatcagcgataccaacaaggtgcacgtgatgaaagtacttgggtgcaacaagtgctaagttctcaaatggagaaagcggagcaatggcagtatcacgaattatttgaaacaaagtttatggttaaggatagagcatgtcgtactataatcgatagtgagagttgcaataactttgtgagttcagatttggttgagaaacttgagttgcctacacaaccgcatcctcatccatattacatcaaatggttcaactcttgtggtaagttcaaggcatctgagaataaccaaggtaatgagaaggaagagaagaaagacgaagaggaaaaagacttatctatagctccatgcatgcttgaagaatgttcaattgaccaagcgccgataatttctgaagatgagaaaaaaagaggtacttgcttgggcgaaagaatagagaccgagcgtaaggaatgcatggatgattgaagaagttgattggggaccaaaccaagaacttctccaagtcttctttcatcttaccacatcacttttacattttctgataagcacaattgcattcctttgctactacatattgtgcctcccaagctccacatatatacttctggtcagcaccactttgatccttgcaatcgccacatcacgtccttcaaggtatcacgaaccagccaccggttgtaccgtgcttagcattgctggtatgattggcgctcaaaatcagcgagaccaacaaggtaacaataatcgcgattcagtgccaccgcttccatggatttagccatgtgcagaaggtttgccatagtcaacgggcatatgttgctacggaatatggctacatcagcacctccgatgttgaagacgatgaggaggaagagaagaaagacgaagaggaaaaagacctaaccatatagctccatgcatgcttgaggaatgtttaattgaccaagcgcctataatttctgaagatgagaaaaaaggtaatgataatggtgctacaactactcaaggtgtgcatagttatgatgtgccaactatgtccactacttatgctacgttagagcaacccatagtggaaacaattgttgaaatacctttgtcacaaaacaaattgcttgatgtctcttgtgataaagaagagttgtgcgatgcttcacttatatccatgccacaactagtgaatgaacatgttagttctatagtagagccaccatgtgttgagtttaaacatgttattcacattgctagcgagaataaagagcttaaattgctatcttctttaaatacttggggttatattcaatttgatgatctttgtccactcaactgtttagagtagaaattattttctagttgtttaaataagttataggttggtttgcaagaagggaagtgtggtggtttttcgactaccaagatttcaggatccaaccatatggccatcaagaaattttcctcaacggatgttgaggtaaataaagataagttcaatacactttatgacaaggtgaaaccgaggacgaattccaatctagaaggggaggatgatgaggacacaactagctcggatataaccatgactaccttatgtattaatcaaccaaaggatcaacttcaaacagacctaaccgctgatctagaaggtatttcggggcccatagtacttgttggaaagcttatggagtctactttcagatggttttggtcccacgtcaaaattcttaccaagcttccgggaatctgcaaaacaagccacggattagccttctcggagaggtcaaccgggtttcggcacggttgataaccagagaagacgtggtgctgcgattgccggggttcagtagcgtgttcattcagaagccggatcgagttgtgtctcgactccgcctaaatcgattgtttatcaatacctatcggaagatcggggtctaacatccctcatcagttgcagcccccctctcgtgccgcggtgaatccggaagccgatcaaccggacaccccgcccgacccaactccatcac

SEQ ID NO: 73784 - DNA, 2736 bp, Oryza sativa
  Clone ID: PAT_MRT4530_74031C.1
atggattcttacaacggtgacggcgacaacgggggcggctacggcgacggccatgacggaggcgggtacggcaacggtgacaacggaggagggttcgccgacggcagccacgtgagcgggtacggcgacggcaacgccgtgcgcgtattcggcgatggcagccacctcggcggatacgtgccggacagccgcttaggtgcgtacggcggcgggaccaccggcccgctatacggggctgagcatcgattcggcgccggcatccctactcgcgacttcctcggtcagcctctccatgcgtcccgagatggcggccacccgtcgttcagctcgggtggattcggcgaggggtcttcgagcagccaaaacccctctcgtctcgagttcggggcactcgacctcaactccggcgacgactggtcgtccgtgcacgcctacgaagaccttcttcgaggcggcggctgcgcgactggccaagtgctcaaggggcttctggatctggggcgtgacgtgcccttccgatgtcggctggaggactcggcggatcgcattccgttgctgctgggttcgaagcgccaatggctccgcattccgttgctgctgggttcaaagcgccaatggctccgccatttggaggtacaggcgaaggaggcgtcttcgtgcctccgatccggccgccagctccggctgcttctcagggtagaggccgaggtaggggtcgcggttcacggcctcggtagacacaggtacaaaaacttcaatattaagttctgcactttcattcttgctctttcccatgcatctgactgctgccttcgttttttccaaggccatcctgaattgaggaagctgaagaacgggatgcccgaccatctcgatgagctggaccgcatgttcatgggggtggctgtcgacggatcgacttcatttgttcctacgcaccgcgcatcccagccggccaaccccattgtcgatgttgaggacagcgacgatgacgaagagtccgacaaagactacttcgaccccctaagccctagcagcgttgggacgaagaggtcgcacagcatgaggagcacaccaagcactaggagcatggcaactagtccgagcaagaagttgaagagcccagccgtccgcgccgtggtgaaagaaatgcaggtgcgcaacaatcttcagaaggacaaagcgacatcaattgacaccctatttggccgtttagaccagaggagggatgatgatgacgctcgcgcgcggcaaaaggccgagcgcatcatggcactctgtagggagtgcagggtcacagaggcgacaccgcccttgtgggttgccatgttcaagctgctgaaggatcgagatgcaatcaatgtctttgagctgtccaatcctgaaggaagaaagaccctccttgagcacctcgcacgggaggacgtgcggcctgatcctgcggatacaagcgaagaagtttccgacaaagatttggaaataattctggtggaatacttcatggacgattctgcggacaccacgttcctgtacggtgcgtattttatcgctactcacattgacaagtactgcaaccgctctgattatagagatcatagcacaactatgagtggtttggaatgggtagagcataagcttgcagataggaagcggtgttacaacatgtttagaatgacccctgatatgttctatagtcttcatgatctgttggtcgacaaatatgaactcaagtctagcacaaaatctacaagtattgaggtgttaggaatgttcctttggatgtgtggggctccacagttggttaggcaagctgaggacagatttgagtgctctctaggaacagtgcacaacatgtttcacaaagttttggcaagccttttgaagctagctgctgacataattaaaccacgcgacccacagttcacaactttgcatggaagactaaggaaccctaggttctatccttatttcaacgactgcattggggcaatagatggaacccacattcctgttcaggtttcgaaagatctgttggttcagcacatgtgccgacaccacattacaactcagaatgtgatggcatgttgtgactttgacatgatattcacttttttgcttgttgggtggccgggttcagtgcatgacatgagggtgttccacaatgcaatgagtacatacagtcatgttttccctcatccacctccaggtacacagctacctgttgtaattttgcaatgtctaacttccataacgtgtaacttacaggtgattaccgctgcagggaagtactatctagtggactcgggatacgcaaaccggattgggtacctggcgccgtacaagggcacgaagtaccatatcaccgagtttcaaaacgcgccagaaccagaaggtaaagaggaggtatttaactacgcacattcctcccttagaaatgtcattgagcgatcatttggagtactcaagcagaaatggcgcatattgaaatatgtgccttgttatccccgtgaaattcaaacacatatcatagttgcttgcatggctctccataattacataaggcttgctggtttaagggataaacactttggtcgttgcgaccgagatgagaattatgttcctcctgaggcctatgaagatcagccaccggaggacgaggctcctagttacttacaatgtgaacatatgaatgcatttcgtgatacacttgccctcgagttgttgcatcgagcatga

SEQ ID NO: 73785 - DNA, 465 bp, Oryza sativa
  Clone ID: PAT_MRT4530_74032C.1
tttggtttttttattttttttttttttttttttttttttttttttttttttcttttcaacacgaatgcaagagagcgccccctcttcttttgcaaaagaaaacgaggcattcaacgttctgttcgacgaccacttgtccccaagggcccactccaggacttagctggggctgggcgggggccccaaattgcttgacaaaaatgtttaaacccaaattacacacatgccctttgaaggccccaaatgggttcacaaaaatgcttaaatccaaacaccccccgtggcttgttaaggcacaacacccgggatcatgcaaatgatcaaaccatttcccctcatagggaacaaaaactaatttccttttaccccccaaaaatgggggttatttctgataccccaccgggttattcagactgaaaggagctgcccctcgaacttggtggtgaaattccaaaaattataaac

SEQ ID NO: 73786 - DNA, 260 bp, Oryza sativa
  unsure (1)..(260): unsure at all n locations
  Clone ID: PAT_MRT4530_74033C.1
aataataaatagaactaaaagggaaatcaacggcccacatcgtttcaatcccggggactttgttgggtttccgatttctttaaacttgtattctattttgcactactcctggagctttactcatcccacggtcctgatcgcctattcaaataacggtttaaaaattaaactttttgcgtgtttatgctaataattccctgggggcattaacattttantggcccaccctttggtggcctgaaggtaaccataaggaaatt

SEQ ID NO: 73787 - DNA, 2481 bp, Oryza sativa
  Clone ID: PAT_MRT4530_74034C.1
gaaccatctactgtgcaacttgttattatagtctcttgtacttccatgtctgatttatttgtgagactggcaaggtttttgaacttaaagaaagaggcatcatcatttgctggaagacttgttgaacctgtgctgctgcttttaaatggaaatggtcaagtggctgtaggttcttttcctccacaggatgaagcagttgatttgctgaggacagttattaaattgtacccatcatctttaaatcgacattacaataaagattacagcatcatgttgtccgccagccctaatggtggtgataaagcctccttaggtggaggggtggattttttaggggcaagggttgaatccgccattgcaacaaatgtaatgagttcagaagtcaatatcaaactaaaggagaaattcgcaagagccttagcatcattaccttctgtccgagtatctgaggagagttggtcattgatgattcaaaagatactaattgtggtaaataatcttttgaatgatgcatttattgggctggaagaagaaaagaaaggccatgagattctaatgttactagttccacctggaaatgatcctccactaatgctgggagatcaaacaaagtggtctggaggaaatgtgcatgtcacaaagaaatttcgtgtctatactgttcctactatttcagtccttattcattgctgctgtgtgatgctgactagttattatccagttcaggtgaatgtcccagtgcgtgctttgatagctttgacacggagagttctgtcagttgatgggtcattgcataaaaagttattcccttcaacaacttccttgcaccaagagcttatttgttttgagcttccatcattgcattctactttcttggatttgctcagtgcaacaataaaaggaatgcgaagccaacttttgccacatgctgctaatattgttcggctcataactaagtactttgaaatagcgaagttgtctactatgaggacaaaagtatacggcattgtgcagcagttgctgacatccatgggcgttgggatatctatgcacttgcttgaggccatagtaagcaattcagttgctgatctggacgacagctgtggccaagatatgacttcattaagcacaaaacctactatagcgacaaatgaatcatcatcaaaaagttattccaagaagaggaagcaagaaacagattcacaaaatttacatgtctccggttcagacaaaacagtaatcagccctaagaaaaggaaaagttcttccatgtcaactacttctgaaactacagctgatgttagaatgttgactccactctctgtgaaactagcagctcttgaaacgctggaaattctacttaatgtggggggttcactgaggacagatcactggagggcagaggtggacttgctcctaattaacatagctagaagtgcttgtgacacaggagggaggtacgagtacaaactatcatctgcagttggggagacaagcatagcagacttccagcttgcttcattgaaggcattgttggcatcttttctttcttctcatgcccgccctccttatttagcccaaggaattgaactcttcagaagaggaaagctagagataggcactaagcttgcagaattttgttcacatgctttgctggctttggatgtccttacacatcctcgagcactttctctagaaagtgcagctccttcaggccctggactcacctacggtgcacctgaaaaggcaattttcggtactgaaaaatataggttttcactgtctggaaaccaatctcaggctttggaggatgacgacccttatgatgattggttgacatccaccaaggtcagtgaaccaacaggttctccagcgaaagatagccctgtaggaaaagagaaagcaattgagaagtcgcaaggtgaaaagcaaatcacccctgtggaagaacatcaacaaatagatttagctgtagttcctgcggccatacaagacgttccaacgtctgggaagactgatattgaaatggcggatgcggccactacagaaacggtcaatctaaaagcaacggataatccttcaagctccaatgatggtttaactcaagtccgcacactgctacctgatctcaaccaacaggtagctgccccagtctccgacgaagggcacactgacattgtcgatcatcttcggaacaaaacgtcagcttttgatgcatcattaagcaaaacagtaactggaggtgaagcaccgcaatctggttctggttcttcccacttcatgcagtccagcaaaactgatgattctgatgtggaatcagaagattcaatgccaggtattgttgatggcgaccctgactctgactagatttgaataacatttaatgtatcaatgtatcttgctttttaagactgagtatatgtcatggactaatgatcgtcagaagcgttaaggctgttgtattccatcacttaccttgac

SEQ ID NO: 73788 - DNA, 444 bp, Oryza sativa
  Clone ID: PAT_MRT4530_74035C.1
gcacgaggggtattccgaccggcgccatctctcccacctcaacttctcctccacctctccacccctccgtcgccgtccgtacacccccccccccctccttcctcctccgccgccgccggatcaggggcctcgccgcgtcgcgctgtcgctgctgaatccgtggttcttggtggtggtgcggtgctcccccccctaccatgctgcggggctgggtgccctcccgaccttgacgcctcccgctccccgacgaccacccgctcgacgccgtcttctccttcctcttcatccccacataagcgttgtgctgtcgtctcccgctccgatcggtgttcctggatcttggatcgatgagcgaggaggtgcagaggtatggaggtgggggtggtggggggatggcggcgctgtcgctggatttgctcggccaggtgctcgaccgggtgcggg

SEQ ID NO: 73789 - DNA, 330 bp, Oryza sativa
  Clone ID: PAT_MRT4530_74036C.1
atggccaagggagcgacgtgcggcggtgacgtgcggcagtggccgtggccaagggaaatggcggtggcagtggcggtggcaagggaccccggctgtgattggcagcagcacattgacgacgacagaggcaccgtaggccggtcgacctccaagtggcgtggatcaaggcagcatagggtgatgggtggattttcccatggtgatggagtagccagcaatggcacatccccagtccccaccatcacggtgggtcttccaagctgcacggatcagggcatcggacctgagtggaagagcgcgctaggtgtggcaattgattggtcagcgtga

SEQ ID NO: 73790 - DNA, 327 bp, Oryza sativa
  Clone ID: PAT_MRT4530_74037C.1
atggccaagggagcgacgtgcggcggtgacgtgcggcagtggccgtggccaagggaaatggcggtggcagtggcggtggcaagggaccccggctgtgattggcagcagcacattgacgacgacagacacatcaacaagctctctggcgcagcctcgatggcaaatctgcccagggtgatgggtggattttcccatggtgatggagtagccagcaatggcacatccccagtccccaccatcacggtgggtcttccaagctgcacggatcagggcatcggacctgagtggaagagcgcgctaggtgtggcaattgattggtcagcgtga

SEQ ID NO: 73791 - DNA, 445 bp, Oryza sativa
  Clone ID: PAT_MRT4530_74038C.1
tgtaacaccccagataaccactgccgctgccgcttaacgcacgtggttggtgaagattccatatggcatacgatggagatattgtgtgtgtatgggatgcggattcgaattttgaaggagtccaaatttggtatgattggagtttgtaaagttggtttcatgtacaggaaggtatactaggtggattaggacttcttgtataagtttggttcgtggctttagactgcctacctcatgtataaatagagagggagggtctaaccggcgagacaccagcagtcagaccggcgggtacacggcggtcagactggcgacggtgacaggaagcagaggcgacttcgggacggttggaccggtcaatctataccggtcagaccggtgacataggcgcggtcagaccggccgatctacttcggtcaaaccataatccgtcgattcaagggta

SEQ ID NO: 73792 - DNA, 345 bp, Oryza sativa
  Clone ID: PAT_MRT4530_74039C.1
attacgcgcgagactaagaggatggacctgaacaacctcaccaatctacatggcctttacggttagagatgacctaacctaaaagtactacttcaagctgagaaggcagaactgattggaggtcagcgctaaagcaacctgcgtatcactctgctagtacgtcaatctgtccaacggacgaagtacatctaaccttgtatataagagcaaactctgtgtgagatatgcatcaattgtgatgatacctgggaatagtacaccactaactatagagcagagtcaaaaaggacatacaacttgttaagatggtcttagacatgagaggatgtgaacctattaatatca

SEQ ID NO: 73793 - DNA, 608 bp, Oryza sativa
  Clone ID: PAT_MRT4530_7403C.1
gggctgcaggaatcggacgaggcacatggattctactaaactaaattgtacacataactttatggctgtccactattctttctgtaatatctgatctaatcagttgtactcaatgtgtagcaaaattaaagaaataagactgatttgttttcatatggttctattgatttttttttatctattactacgtatcattaaataaaatgtaaatgcatccttcaggagcagttaagatggcaaatgtgatggtttccattacttaaatatcagatagctgtcatatgcattgcaatatcgatccatggacacggtttatctccattaccagtttattttgtgtatcattcttatgttagttattattttatgtgccagcaaacatatttcttagtgttgaaggtttaaaatatttacaatattcaaataacataaaactgcaagaaaacatattgtagttattctttattatgtattgcttgcattcatactccactgcaaagaaacataaatatggctactaattaggattgtctaggcatacttggcccaaccagttgaaggtcattgtacaaaaacatccatttgatctatcttttaagctgtatgaa

SEQ ID NO: 73794 - DNA, 433 bp, Oryza sativa
  Clone ID: PAT_MRT4530_74040C.1
gggccctgggaagaccaaaactttatggaaaaggggtttggtggcccccaaagggggcccgggacaggggccccacaaaacccccaacccaaaaggaaatgggggccaaaaagaaaaaacccccccttattcaggcccccctagcttttaaaaggggggaagggccctaccctacccgggggcaaaaaaaacacggggtttaaaacccggggggcccctccagggggatatcatacaagaggggggggggtttacccaaaaaaaaaccgggacatttattttttttttaaaaattccccccggaaaccccggtggtgggggcaacaggggaagcaaattgggggaaaacggaaaaaaaaacccttttgaggatcaccaaaacattcgggatggcccccgggaggggccccacccccaaccaaaaaggggggga

SEQ ID NO: 73795 - DNA, 504 bp, Oryza sativa
  Clone ID: PAT_MRT4530_74041C.1
aggatggagtgaagacttaggcacacaaggaattttcttatacattttgcaagagcagcattatgtttggctcatgtctcatattatagctatggtgaccgctcactgcaaaacaagacaagttattcttttcttggattgtatatttaaaagcattgccttgcccaaaaagatccaaaatcataatgtccattaggttggttgtttgtcatttctattaaataaaatatagatacatccaatttattcaaatgcaatgtatcatgtggatatatatgaagtcgaaagatgcaacaaactctcttgcacatgttcgttattcatagagaatattgttgaatcaccccttgcttttttctgaaaacaatgtagtctattcatctttgtcttgggaagtattaaaaagttaataacaatatattttttttgtctatcacttcttcttttgcaaagagaagtacaactgattggtctattataagctattctagttaacatcacgta

SEQ ID NO: 73796 - DNA, 481 bp, Oryza sativa
  Clone ID: PAT_MRT4530_74042C.1
catccgcatacaaaccccaaccctagccgtctccgtgctagggccgccgccggcgacgagggctaaggaccggaacgaggaaggatccataagttgccagccatgctgctacataggcggaagaggctagggaagagcagatgaatgtgaggaagctgcggaggcacggggggcataagaagactaatggctgacgatcctgtgctgcgtatcgcggcaaggaaggcccgagaggagcaggagaatacgactgcagcagctgcagcggcacaggtgccaccgtcagcaaggatgagattggaggaaatgaggaatgagccagaattcgccgactaggctgctgcgcacgcgaaataggataaggaagaagatactgatgaggtggatctgatggtggaacatagcaccagggaagaaatgaaacgttctccacattacaaaggcaaagttgacaacggcgtcggtgaggaccatgggaata

SEQ ID NO: 73797 - DNA, 1552 bp, Oryza sativa
  Clone ID: PAT_MRT4530_74043C.1
atgccggccgtgtggcgggggaccgcccgcctgccccacttcgtgagcctctgcgtggccgtcgctgggctgctgctgatgctgctcggcggcggggaggcgtcggtgcacgagtaccgcgggctcggcttcctcaacaagggcaatgcgttcatcctccacgccggcagcgagggcctttacgcgccgtcctcccccgcgaatgcgacgaccgcggaggacgacgaggatgccgccgccgccgccgtggccgacgccttcatccggtgtagatttgctggtatagcttgggcgattgaagatgcttctgatttgtgtgatgagagatttgacaagattacgtttaggagaccaaaggatgctgcaaaggaaactggttcagcaatggttcagatacttgtttttgagatagaagatcgtgagatgattggtggatcagcatatggaggtcagaaagctatttgttgtacctcagatcttgcgaagttaggagcttgcacggaaggttctgtcatctatcggccatcacaggtgaatcctggctggccacagttgcttttttcatcttttgatggaagtgacacgattgcaacactaccttcaaggatcattcctataacaaaaaccgggatgtacaatatgtacttcatacactgtgatccatcacttgctggtctggagatagaggggcaaaccgtatggaaaaatcctactgggtatcttcctgctaagacccttgacaaacttcaggccagaaggtcaatggccaaacttgacatttacaggaaattcacaatagcattggctgtaactgttctggtgtctattggctggattggctatgagatttacttcaaatcaacagatgtattcaatgaacgatggcagtatgcatggataattcctgcgttctggcatgtcttgtctttctcacttctttgtgtcatttcatacctgtgggcgccgtcacagaactcaatgaggtttacctatgatgcaagcgaaaactttgatcgagaggacagtctgtcactaataaggccaggtcccattgcttccaagaacgggtggagtttatcttcttcaccagacaccaaagcaacaaagaacgttacagttacatcttttgatggagatgacgaagaaaacaaaagggagtagaaggggcactgtgcatttcatgagggagagaagatacagccacattcaaattttggtatgcagcagatcacactttactaattctagttgtcgggatacgccaagggaattatggaagtaatctttattgaattcatttcctccataatagtagtttttcacacggtgcgccacgttataggcatcactgtatggatgatgatatatatgataggaacaatttatctatgccatccagaggatgtgtggtgtataatgtgtatttttgtagatttgatgctgcttctggtttatgtgaactccaagattgtcatgtaaaaaaaaaaaaaaaaaaaaaaaaaaaaaaaaaaaaaaaaaaaaaaaaaaaaaaaaaaaaaaaaaaaaaaaaaaa

SEQ ID NO: 73798 - DNA, 1008 bp, Oryza sativa
  Clone ID: PAT_MRT4530_74044C.1
atggctcgagtaaccatgtttcagaaacagatggatcggcaatggatgtacgcggaccggtggttgaaagagtttattgacggcgtgcattattttttgagagtggcagaggctagcaagcataagggttttatttgttgtccatgcattaagtgcaagaaccagaaggattgtacagggttcatgcctagctataattgttggacatcacacgaagagataggggttcaaatggaagaagatgaagtggaagacaagaacattccggactgggttcagtacgctggatttgaaggaaatagaacgggtgaggtggacggggatgttgacgataatgacgctgcggatgatcttggtgaagttgacgggcagccaacgaagaagagaattcctgctaaggtggtgtggtatttccctataataccagggctatggcgtttgttcaggaacaatgggaagcccagaatggtttgttggcacgcagaagaacgtcaacaggacgggatattgagacactccgccgacggttcgcagtggcgaaacatcgacagaacatttaaagactttggagaggacgcacgaaacataagcaacctattcgggcagtcaaacaaggggtacaaggcttgcactcatagtatggctgaaactgaaagtacgtatctgaagcattgcaggaaggttgtgtacatgggccatcgtcgatttcttgttgcaaaccaccctgtacgaaagaaaggtaagcactttgaacataaggcagaccaccgtattaagcctaaacatcgcagtggaaaagcaatgtttgctatggtgaaaaatctcaaagtagtgtttagaaaggggcccggcagccaacctatagagaacgaagatggtcacgcgacgatgtggaagaagaactatattttttgggagttaccatattgggaatttttggacgtccgccacgcaatcgacgtgatgcacctcactaagaacctttgcgtaaatctgatgggcttttaa

SEQ ID NO: 73799 - DNA, 710 bp, Oryza sativa
  unsure (1)..(710): unsure at all n locations
  Clone ID: PAT_MRT4530_74045C.1
acgcagaaatccaaaggcttcctcctcctctccctcgcggcggcggcgcggcgtctatcctcctccaccggcggcaaggtcagatccccctcctccctctccacccccgccgatccgttctcccgcccccgatcgctcggctgtatcctgttccgtgtggccgatcctagcgcgcgaaccctaggtggtgttctttttttcttctttttttattcaagaatcgtctggatctggtttcttggtgagcaaacgtttaggttcgcgtgggtgatccgttttgtgatgcgatgttgagggactctaggcggggaggatttaggttttacgttagggaggggggatgcggcaggttacgcctcgaatttgatttgcgtggagggatttggttcttgggatgttgggagttgttagtatgattaatcggtcacgcgcgaagctttttgtgtgagattagttcgtgttcttgcgagtggtgatgataacgagatggtctgtattgttcgcctccgcgattcggattggggaattggtggcgganaatggggattttttcgctgtgataattgggcgtggaaatgttagtagtgatagtggtggtgctcgttgactttggttgatgtgtcccttatgttgacctttccgaatccgcatcacgaacggaacagctctgatgcatgatggcttgctagatagcctttagacaatggaat

SEQ ID NO: 73800 - DNA, 464 bp, Oryza sativa
  unsure (1)..(464): unsure at all n locations
  Clone ID: PAT_MRT4530_74046C.1
aaaaaaaaaatattttggtggcgagctggatgtctacattcggttgcatcttattgattttatgaaaatcgtagtttggttgtaccaaacaatttcttggtttctccgttgaggcatcatttttcatcgagaaatttatattttgtacttttaattggattccttgattttgaaacattcttcaaatatctttttttgagtttccaattatttttgttgtcacggttcatcttctgaagtttgtttggactttgttttctggtttataaaaacaaaatattctttngctttaagccgtaccgatttgttttgctctgccgttagttctagagttgagtctcccagtttattgaaaacaactaacttttttgtgagctggacccttataggtttgttgcacggtccaatcttttctgnaaattacaggttnccttgtataaacattctagggcttctctctgacg

SEQ ID NO: 73801 - DNA, 401 bp, Oryza sativa
  Clone ID: PAT_MRT4530_74047C.1
aaaaagaccatctaaagggatgtccttagcattcaaaacggattttaaaagaaacttttacagaacatagcagcaacccaatagcttgcaattaatttattttttaattaaggaatcctttaaccgaattgccaacttaaaaggattccaccacattttaaacgccttgaaaactcttggattgcaggggaataaatgcaccgaactcttctcctgtggaaggcttgagcctttgagcctcttcttttgaaatgcaatttgcattcgctaaaactttagttggaaaagcacggaaaatggaactctttccggaattgtggcttacaataaagttagggtttatcttgaatgcaatgtaaacacatccttggctttggcccttctttacaactacataacgt

SEQ ID NO: 73802 - DNA, 257 bp, Oryza sativa
  Clone ID: PAT_MRT4530_74048C.1
tcaggtcagaccacagatcttcgtctacctcggcggctaccgcttcccccgaccaggtccccgactttgtcatcgccggcaactactacggcggcgcatgcactgtcttcgccggcaactcgaactccgacgccgacgccgccattgctcagatcactcgtccaaatttggcgggtacattggtgggattgacgaggtctgtgtatacggctaggatcaacccggggatagaccaggcgttcatcctgtcgctcgtt

SEQ ID NO: 73803 - DNA, 273 bp, Oryza sativa
  Clone ID: PAT_MRT4530_74049C.1
atggcgtcgtcgtcggcgatggtgagggtggtggtggtggccgtgctgctgatgcaatgctgcaacgcgatcatggcggcgaggctgctggaaggtgacttgtttggcagcagctggctgcagggcctgcagggcggcgtcgccaccggcgagctcatcttgcaggtccttgacaagggcacgtcggattcggaaggcaatggttgtcaccaaggtcccggaggcggctccggagccagctgccaccaaccgtaagtatggatattcaactag

SEQ ID NO: 73804 - DNA, 249 bp, Oryza sativa
  Clone ID: PAT_MRT4530_7404C.1
atggcttccctcctgctgctgctgcgagcaatcgtcatcggcgtcgacgtcgaggagaggcagctcgtcagcggcgcgagggaggcggcggaggaggcggagaggtcttgttcgaagcatccggcgatgccccggcgatgcggcttcttctccgacaacgatgtggaggaagaacggtggctggcaaaatttgtcaggctgatgagtgatgcaatcttcctgattgctgacgcacaattggcactgtga

SEQ ID NO: 73805 - DNA, 1071 bp, Oryza sativa
  Clone ID: PAT_MRT4530_74050C.1
atggccagcagttcgagcggcaagagggtttcttcctcctcgacctcgagccaccagcagcatgccaagcgccggcgacgcgctcccggcgacgagctctcccagacccacggcgtggcgcgcaatgcggtggcggccatgcccatggttggcgtcgcgccgttgatgctgtcgccggtgaccatgcaagcgcagcttctctgctacgtggcgatgccaatggcgccggtggccggcggcggcgtcccgctcgccgccgcgctctgcaggctccgcaacggcacgctggagcgcatgatgagggagatggcgcaggagtgcacgccgccgctggtggcgcggcgggacaggaagagcggcgccacgccgccgccgccgccgccgtggtggccgacggcggaggagccgtggtggggcaccgaggtggcggcgcacctgcgcgggaggcggatggcgacgcccgtgccgttcgcgagcccgcgccgcctcgcgaaggccgagaaggtggccgtgctcgtcgccgtcgtgaggcacgtcgcgccggacttcggccgcctcgccgccgcggccggccgctccaggctgaccgagctcgagtcctccatatgggagagcgcgctccgcggcgagcgcgagcgccgctacgtcgtgatgccgtcgttcatcctgctgccgccgccgccgccgccgccgccacagcacgcgcactccgccgagagcgcggcggcgcacgcaggccctgagcctgagagcgccgaccaaaccgccgtcgacttctccgtctccggcgaggataccgtcactaccgggccggagctcgaacagctggtgggcgacggcaatggcgccactgtcgagggagaagggcagaagacggaggactcgccggtgccgccattgctcgagcaacacggcggcgaggatcatgatcaccaccggcagcatggtggcttctccggcgaggtctccggcgcggcgccggaagatgttgactggtttgactacgacgaggtgcttcgcgggctggacgagctggagattcccagcttttttggcggctactatatttga

SEQ ID NO: 73806 - DNA, 1258 bp, Oryza sativa
  Clone ID: PAT_MRT4530_74051C.1
aaataactcccttttctgaaggctgcatactttcgagcacacaccttgcagtttttcatgtgaaagtaaaactcaatgtcaagataaagtcttggtctaaaacaagcaattattcagtaccaactacgatgtctcagtgattaggatccaattactgcaaaccaccaccgcaaaaataaaaagaagagagagtatcgatgcagtcttccttcttgtacccagaacaaccagctccggcaaccgctttcagccagtcaagttcgccatgtcaaactgcactggtacttgcttcggtcaaggacctgtagtggatcaggttcctgttactgttgaggaagtaattgaagtcatgatgctggacgtcaagcttcttcagccacgagtccgccgcgccgacgagggaggtggtcagctcttggtcgccggagttcgcgcttgtccatacatctccgtccgtcttgtgcgtcgcgaggccaattgggggaagcgtcagcgggtccttgctgtcaaacggcgtacgatcttctaatgttgacaggctatggtaagtcaagaagcaagtagtcaggtccttcttgttcatcgcgggaacatggcctataggataccagaaaactgacatccaactagatggagagagctcaatactgctaagatatgataggggtggaaagttatagcacagctcatacaccttgtctgcgagaggcatcctttcataaggggaatcacattcaaagtactgaaaacatggccctccattcattgacctcgggctgtcatacctcgctaatgatgttgttgcatactgaccattccagttatctgccgcactgcaccagccgtagttgttcgcatcaaacaagttattgccgaccattatctcgttgcatgaagtgaagtctgagatggtgtgcaactgaatggctgaaagatacggcacaaagtactgctcaatttcctgaccggaagggagacgaaccggagtaccgacaccataggcgctcaacgggtagaagtggttccaaaggtctacaaggaagaagcatctacctaactcgggcactctaccagaatagccgcctggcttggcaacggtgtagggctccaaagttggcgtaacactgtgaaggaaggacctcagattcgaattgatacaagcttcaaaaagcttaataccagatctggaatcagcagtagcacttcccatatctcaaatctctatgttgcttctaatctgaaacatctactccaaaac

SEQ ID NO: 73807 - DNA, 609 bp, Oryza sativa
  Clone ID: PAT_MRT4530_74052C.1
ccggccgggatttcatcccaccttctacgtcgccgcattctcctcaatgctgctcccatcctctccctcgaggaaccttcctccttattcaaccatggtaaaagagataacatgcatgaacctctgtgttcattgaacacatatactgccgaaagtgctccaccacgggacgtttgatctacaatgtttaaggtatcgacaacgctgtagattgagcagattttgtaagatggcctatgagatttacaacagctccttcaagtactggtgcatgctagacaagttcaaagtcaaatatgagagacgtatgcaccatcgatatctgcctgtgtatgatcaagagcaccaagcatactgtctggacatcacatgcctctgctgcatcagagacttcgatcaataacaatgatcacagggtacctcccaggattactgaggctggctcataatatactccaccactggagcaatggttacatggactctccaaggatggacatcaccaaagatgacgctcttcatgctcccacgctggaagagcatcagatgatctgctgctgcgcaacatgtatgccacactccgcgaaacttctaagaccggtaccatga

SEQ ID NO: 73808 - DNA, 1017 bp, Oryza sativa
  Clone ID: PAT_MRT4530_74053C.1
atggtggcgcatggggtactgccaagcaaggagatcatcgggtggcgtcctgtatttggtgagccatttccaactcctgacacccatgagatcgtggagaggatgtataagattttatcatctagtatcgtggttgacttcacacatctgctcccggtcgtgccgttcaatgccttcaatccacctccagcagaaaatgccttgatgaaatctgatcctccgattgttcaatgtcgttctttgcggcgtcaccagggccaagctaccgggggtccaaagatccagcccggcggccagaaaagtagtgctaatctggctaaacaagcgggctcttggaagaggaagatgatcatagatgatgatgatgacagcgatgatgaatcgatcggcaaacagcttaaacaggctactccgtcgaagaagaaaacaaccagtcgtccgatgccaaaaatccgaagaacttctaggaaaccgccggacattggtccgtctagtaagagcactgacccacccgctagctcgaaagcaattgaagaaggaaaaacttcacccgcaaccgggactgggaccttccgagtagaaaccccgactggcgaaaagccaacgacaggcgaagctgatgccaacaaagaaccaccgactggaaaccagtcggcatccgctgaagcgagcacaaaccaggagcccttgactggaaaccagtcggctgtccatgttgccgactcccaggatttggagagacgaattaaagccttagagaatgacaaagctgctctgtccaaggaaagagatcttgttgtcaaggaatttgaagatcatatggggaaaacaaaggcgcaattcgacttgttgataaacaaagttgaaattgctgagaaggctagagacgaagttgctaatattgccactcctataatccaagccatgtatcattgcaacagcggcacaagctccttggacgccatggaaatctttgataagctggcaatatgggagcaagcatggccttggcaatga

SEQ ID NO: 73809 - DNA, 243 bp, Oryza sativa
  Clone ID: PAT_MRT4530_74054C.1
ggtgcaagaaagggggatagcatatttggggctaaaattctcaagatgtgaaaccacgatcagacacctggcagctccctgtggtgaatatcataagggagaaaacactgttaagcgagacaaaacctgtaggcatgactaaaagctgtacttggcgaactagctaactgatgggaagcagcattatgaggcgtttcttttgtgcaaattgagctccacgaagcaccatcatatgtacaagct

SEQ ID NO: 73810 - DNA, 2577 bp, Oryza sativa
  Clone ID: PAT_MRT4530_74055C.1
atggaaaggaatgaccaaggcttcttgacagccattattaaggttgagtcttattttaccacatcgcttttgagtcaaaggacatatgttaagggaaacaatgtcaaaatttcgatcgaaagggatagataccccacagattcacaattgctagattggttggataagggtaatcagcacggggttgtcaatattcatgccattgtcaatgattttggtggtccattgcaagttgaaccttcaccaactaaaagaaggtgccacccatctgtgaggtattctattccatgtactccaccactatttactgacctattggttgatgctacgccactaacactgcctgagagttacaaccatcttgagaactccatccaaccagtaccatccacccaaaatgagagcaccacccatccggagagcacttcacatcctgatgatgaagccacatcccctattaaaaagagtgcaaagaaggttgtaaaaaagtgtgcaaagaggaggagccaagccgatgacgatgatgaagaggttcgggatgatgagaaggaagagaacgaagaggaggagccccagctatgcccaaattgtgacccactagaggttgatagtgatagcagctatgatagtgatgcagcagcctcctctgactctgaatatgattgtgatgatcttgatgaccaaatacatgatgacgatgacaatgactctgaccttgagcatgtgtttgcatatgattttgataacccatgtattgatgaaggagaggtgttcgcagatactactacttgcaaggaagctgttacacaccatgctataatccatgactattcttttgaaactgagaaaaagggcaagcatagattcagagctttttgcaagaaaaaagagcagggttgtaaatggaggtttcatgcctctacaagtaagaaatactatggctgcaaggtcaaggtaaataggcctgcccacaattgttgttccataaataagactggggctgccatggcaacaaatagctgggttgctgaaagagttatagattggctgaaggagactccaactctaggagctagtgcattgaaggtcaagctagagaagaagtacaaatttacaataggatatgacaaagtttttagaggcaaagagaaggcccttgagaagatatttgggaagtgggaagacagctttgcattgctgcccacttttagagaggagcttttgaaggcacaacctggaagtattgtcgatattgataccgagattcatgaagaccaagtatgcttcaggcggctgttcatagctctgaaaccttgcattgatggcttcctacaaggttgtaggccatatattgcaatggactcaacacacttgacagggaagcatagaggacagctggcagctgctgttgcaatagatggaaacaactggctttttcctgttgcatttggtgtgatagaagctgagacaacggagagttggacatggttcgtgcagaacttgaagaatgctattggtaatcctcctgggctagccatcagcacagatgctgggaaaggactagagagagctgttagtgatgtctatccaactgctgagcaccgagagtgcatgcgacacctgtggaagaacttcaagaagcagtaccatggaccactttttggtgaaaacatgtggcctgctgctaagtgctacaccagccagcagtacaactatcacatgaacaagattgctgagaaatctcctgaagctattgcatatttaaaaaccaatcacccatttttttggagtaggagcaaattctcagagctttcaaaggtggactacatcaacaacaatctttctgagtcattcaacaattgggtgatgaagatcaaggaattacacatagtggacttatttgacacacttaggcaaatgataattgacaaatttcacttgaggagccaacttgcaagcaaaatggaaggaagaataattccatctattattaagacactgaatgaacagagcaagaatctaaaagattacaatgtggtaaggagtaattgcgatgatttagctgaagtttctgtggtgtccaacaagggagtggtatggaggcatgcagtgaacctaaaggctcatacatgctcttgtagagcctggcaagtaagtgggaaaccttgtaaccatgcattggcattcataggctctctaaggtttcctgacatgaatggctatgtggatgagtgctattcagtgcaaagattgaggcaaacatatgctgggatatggaacccaatgacatcaaagaatatgtggacatttgtagatcctggtttcaaattgatgaggccaaagttgaggagaaagcctggaaggcctaggacacacaggattaaagcttcagatgagtctggctgtagaaagaagaggacatgccctgaatgtggtgacaaaggccactttgcaaagacatgtcagggaggacctatagctagcaaaagtggcaatgcaaatgatgtgtcaacaagaccaccaagagcaagagggaaggggaaggagaagaaaggttctgttgcggcatccatttga

SEQ ID NO: 73811 - DNA, 243 bp, Oryza sativa
  Clone ID: PAT_MRT4530_74056C.1
atgcacatatacattacaagagaattgtctgtgacgtcgcagatcaaaatggggacatgtgatcaacctaacaaactggacaaggaagcagcagtcctccacactcacactgccacaggagtaggcgtcaacggcggtggcgttgtcggcgggggattcagtgtcggcgtcggcgaggaggagtcactgcctggggtggcggcgtcggtggcaggtgggcggaaggaggaaaggcggagctag

SEQ ID NO: 73812 - DNA, 1550 bp, Oryza sativa
  Clone ID: PAT_MRT4530_74057C.1
actatcaactgtgcttggccaagaacttgaactgcttctccgccgaatcctcggagcgatgtcgtggttgaaagagcagggctgtaaatggaggtttcatgcctctacaataattacattgttatatgtgcaggtcaaggtaaataggcctgcccacagttgttgttccataaataagactggggctgccatggcaacaaatagctgggttgctgaaagagttatagattggctgaaggagattccaactctaggagctagtgcattgaaggtcaagctagagaagaagtacaaatttacaataggatatgacaaagtttttagaggcaaagagaaggcccttgagaagatatttgggaagtgggaagacagctttgcattgctgcccacttttagagaggagcttttgaaggcacaacctggaagtattgtcgatattgataccgagattcatgaagaccaagtatgcttcaggcggctgttcatagctctaaaaccttgcattgatggattcctacaaggttgtaggccatatattgcaatggactcaacacacttgacagggaagcatagaggacagctggcagctgctgttgcaatagatggaaacaactggctttttcctgttgcatttggtgtgatagaagctaagacgacggagagttggacatggttcgtgcagaacttgaagaatgctattggtaatcctcctgggctagccatcagcacagatgctgggaaaggactagagagagctgttagtgatgtctatccaactgctgagcaccgggagtgcatgcgacacctgtggaagaacttcaagaagcagtaccatggaccactttttggtgaaaacatgtggcatgctgctaagtgctacaccagccagcagtacaactatcacatgaacaagattgctgagaaatctcctgaagctattgcatatttaaaaaccaatcacccatttttttggagtaggagcaaattctcagagctttcaaaggtggactacatcaacaacaatctttctgagtcattcaacaattgggtgatgaagatcaaggaattacacatagtggacttatttgacacacttaggcaaatgataattgacaaatttcacttgagccaacttgcaagcaaaatggaaggaagaataattccatctattattaagacactgaatgaacagagcaagaatctaaaagattacaatgtggtaaggagtaattgcgatgatttagctgaagtttctatggtgtccaacaagggagtggtatggaggcatgcagtgaacctgaaggctcatacatgcttcaaattgatgaggccaaagttgaggagaaagcctggaaggcctaggacacataggattaaagcttcagatgagcctggctgtagaaagaagaggacatgccctgaatgtggtgacaaaggccactttgcaaagacatgtaagcaaagcagagcagcttgatcccgaggtcaggtcccggcaatatttgctaaacaaggaaatggtggattgcacccctttgttagtgattatt

SEQ ID NO: 73813 - DNA, 2688 bp, Oryza sativa
  Clone ID: PAT_MRT4530_74058C.1
atggaaaggaatgaccaaggcttcttgacagccattattaaggttgagtcttattttaccacatcgcttttgagtcaaaggacatatgttaagggaaacaatgtcaaaatttcgatcgaaagggataggtattcgatgcttgcgctagttgacgatgtaggggaaaattttaactgggggccaaatcaatacatcagcttttggaaattgggtgatgtgtcaactcagagtaaagtagagataaccacagattcacaattgctagattggttggataagggtaatcagcacggggttgtcaatattcatgccattgtcaatgattttggtggtccattgcaagttgaaccttcaccaactaaaagaaggtgccacccatctgtgaggtattctattccatgtactccaccactatttactgacctattggttgatgctacgccactaacactgcctgagagttacaaccatcttgagaactccatccaaccagtaccatccacccaaaatgagagcaccacccatccggagagcacttcacatcctgatgatgaagccacatcccctattaaaaagagtgcaaagaaggttgtaaaaaagtgtgcaaagaggaggagccaagccgatgacgatgatgaagaggttcgggatgatgagaaggaagagaacgaagaggaggagccccagctatgcccaaattgtgacccactagaggttgatagtgatagcagctatgatagtgatgcagcagcctcctctgactctgaatatgattgtgatgatcttgatgaccaaatacatgatgacgatgacaatgactctgaccttgagcatgtgtttgcatatgattttgataacccatgtattgatgaaggagaggtgttcgcagatactactacttgcaaggaagctgttacacaccatgctataatccatgactattcttttgaaactgagaaaaagggcaagcatagattcagagctttttgcaagaaaaaagagcagggttgtaaatggaggtttcatgcctctacaagtaagaaatactatggctgcaaggtcaaggtaaataggcctgcccacaattgttgttccataaataagactggggctgccatggcaacaaatagctgggttgctgaaagagttatagattggctgaaggagactccaactctaggagctagtgcattgaaggtcaagctagagaagaagtacaaatttacaataggatatgacaaagtttttagaggcaaagagaaggcccttgagaagatatttgggaagtgggaagacagctttgcattgctgcccacttttagagaggagcttttgaaggcacaacctggaagtattgtcgatattgataccgagattcatgaagaccaagtatgcttcaggcggctgttcatagctctgaaaccttgcattgatggcttcctacaaggttgtaggccatatattgcaatggactcaacacacttgacagggaagcatagaggacagctggcagctgctgttgcaatagatggaaacaactggctttttcctgttgcatttggtgtgatagaagctgagacaacggagagttggacatggttcgtgcagaacttgaagaatgctattggtaatcctcctgggctagccatcagcacagatgctgggaaaggactagagagagctgttagtgatgtctatccaactgctgagcaccgagagtgcatgcgacacctgtggaagaacttcaagaagcagtaccatggaccactttttggtgaaaacatgtggcctgctgctaagtgctacaccagccagcagtacaactatcacatgaacaagattgctgagaaatctcctgaagctattgcatatttaaaaaccaatcacccatttttttggagtaggagcaaattctcagagctttcaaaggtggactacatcaacaacaatctttctgagtcattcaacaattgggtgatgaagatcaaggaattacacatagtggacttatttgacacacttaggcaaatgataattgacaaatttcacttgaggagccaacttgcaagcaaaatggaaggaagaataattccatctattattaagacactgaatgaacagagcaagaatctaaaagattacaatgtggtaaggagtaattgcgatgatttagctgaagtttctgtggtgtccaacaagggagtggtatggaggcatgcagtgaacctaaaggctcatacatgctcttgtagagcctggcaagtaagtgggaaaccttgtaaccatgcattggcattcataggctctctaaggtttcctgacatgaatggctatgtggatgagtgctattcagtgcaaagattgaggcaaacatatgctgggatatggaacccaatgacatcaaagaatatgtggacatttgtagatcctggtttcaaattgatgaggccaaagttgaggagaaagcctggaaggcctaggacacacaggattaaagcttcagatgagtctggctgtagaaagaagaggacatgccctgaatgtggtgacaaaggccactttgcaaagacatgtcagggaggacctatagctagcaaaagtggcaatgcaaatgatgtgtcaacaagaccaccaagagcaagagggaaggggaaggagaagaaaggttctgttgcggcatccatttga

SEQ ID NO: 73814 - DNA, 1402 bp, Oryza sativa
  unsure (1)..(1402): unsure at all n locations
  Clone ID: PAT_MRT4530_74059C.1
cgtaatacgactncactnnatagggncganattgggggtaccccctcnagggcccggccgggnaaaaaaaaaaaaaaaaaaaaaaaaaaaaaaaaaaacgggcggacctcccatcgcgccgccacctctccccaaccctagctagctccccctccttccccggcggcgacatcgacgatggcggcggctgcggcaggcggcggcggcggcggcgccccgcgggcgctctcccagcgggagcaggacatccagatgatgctcgcggcggacgtccacctcggcaccaagaactgcgacttccagatggagcgctacgtctacaagcgccgatccgacggcattttcatcattaaccttggcaaaacctgggagaagcttcagctggctgccagagtgattgttgccattgagaacccacaggacatcatcgtgcagtctgctaggccttatggtcagagggctgtcctcaagtttgcacagtacaccggagctcatgccattgctggcaggcacactcctggtacatttaccaaccaactgcaaacctcattcagtgagccacgtcttctcatccttactgaccccaggacagatcatcagccaatcaaggagtctgctcttggaaacatccccactattgctttctgtgacactgattctcccatgcgctatgtcgacattggtattcctgccaacaacaaggggaagcagagcattggttgcctcttctggctgcttgctaggatggttctccagatgcgtggcacaattctcccaggacacaagtgggatgtcatggttgatctgttcttctacagggacccagaggaagcgaaggagcaagaggaagaagaggcggctctggtggctcctgattatggtgcggttgcggaatatgctgccccagcggctgatacctggggtggagaatggggcactgacgctgcagctcaacctgctgccattccagcacaggctggtgctgactggactgctgctccagctcctgcagccggaggatgggacacggctgctgcccctgcccctggatgggaacaaggcagtgcaccagtcccagcggcagcacccacccctaactggggggagtgagtgaaagagtaactgatccagttcatgggtcagaggctgagtttgttgtcgggagcagctggtagacactatttaagtagctttaatctttttacagtactgagttatttagatgcaaatcaaattttgtgttcttgacaatgctgggactgcgaactagccagccttttttttgttacaatctcatggatagctttatttcaagagcaattctgctttgcgaacaaagtgtatgtgtttgcaacaacaaattgatggggttttctcctcatagttcttattgttcaccgtc

SEQ ID NO: 73815 - DNA, 416 bp, Oryza sativa
  Clone ID: PAT_MRT4530_7405C.1
gaacaaaacatgtttttttttttttattagaagttttataatacttattaacattaactcgtcactaaagtttttacataactttgtggcattatttttttgatacacctatactattttattattacaggggggtaaggcctttttttccgacaaaaaacgaaaagcctgggtagggcgggtgtagaaatcaaggaaagaaggcccccaactcttctcccctatgagtctaaaggttttgggcccgccccctcgatatgggggaagcattagcgaacacatccactggcatggcacggaaaaaagagttcttccctgcaagggggctcaccagggagtgaggcatgggccttgaatgaaatgtattgggatacgggaggcgcgggttccttcaagacaacggggggttggggaat

SEQ ID NO: 73816 - DNA, 890 bp, Oryza sativa
  Clone ID: PAT_MRT4530_74060C.1
atggcggcggcggcgacctctccctccgccgcatcctcctccggtgattctttttgttacaagtgcatatgccagtgggtaaagattgtatcgaccaagcatgccgaacctttatcatcagtgcaatgtcccctttgcaagaccgtgaatgtgtctattatacatggttttaatggtgaatcatttgagcggcactacataaatcaggaccccagaaaaagacatctttcagatgcacacgacttgattacacaattctatagtatacgagatattataggcaatacttccagcgttcagcaattctggaagcaacgcaagtatcttcgcaagaacatttggcttcaaacctggctaagacaggaaatacaggctcttacacgggatgaaaatgttgacgctattatctaccacatccatggtgtgatcgagtctttcatgaaaaggcaagagaaggggcatgcctcgaagatggctccaccagagaagaggagggaagaattcaagagcttgctcatggaagctgccaggccgttcctccttggccaaacggagcggtttgtcgctgaggtagagctcttcttggtctcacatctgaacattgacgcatatagcaggctgcgtgttcagagacttaaggagtccacttcgcatgtgtcaagagagcaagatgtgctgccacaggatcggtctctggaggaccactacttgtactttctaggtgatgaaacagattgcaatgacgagatatggtgacgtggcaagcaatatcagcgatctcctgtaggcgatggcacagatggtcaagcggagctctggccacggagtacccattgctggatgcgtaggtgaccaggacagattgcacaccaggacggatacatatcata

SEQ ID NO: 73817 - DNA, 802 bp, Oryza sativa
  Clone ID: PAT_MRT4530_74061C.1
atgacgacgacgaaccacctcgtctcccccgcgctgctgctgcttctcgccctcctcggcgcatcggtccggcgtgccggcgccaccaccttcgaggtcggtggggaacacggctgggccgtgccgccggccaaagacgccggcgtgtacaacgactgggcgtccaagaaccgcttcctcgtcggcgacagcgtccatttcaagtacgcgaaggactcggtgatggtagtgacggaagacgactacaacaagtgcaaggcggagcacccgatcttcttctccaacaacggcgacacggaggtggggctggaccggcagggcctcttctacttcatcagcggcgtcgccggccactgcgagcgtgggcagaggatggtcatcaaggtcatcggccacgacgcgcctccgccggccagcccgccgccgccgccgtcgaacgctcccccctacaccgcctcaccccagcggcgccgcctccgcgctaggcgccggcggactcgccgtcgcggccatgctgctgccggtcttcgtgtacggtgtctgatggtcaccgtagctgcatgcacctgcgtgcatgcccgatcgaattgatatcgtcttgtagattgtcaggtctttgcgagtgttatgcttagtgatttttgacgtgctcgttcattgcaatctcgtgtaattcttacttagattttttttttgtatttggaattgactttggataatttatttgtgactttgctgaatgttgcatcccaaaccttcagtttgcactcgcatttttctcccgtggaaaaaaaaaaaaaaa

SEQ ID NO: 73818 - DNA, 141 bp, Oryza sativa
  Clone ID: PAT_MRT4530_74062C.1
atggcgcggcacccagagacgcgccgttatagggcgcggatagatgtcgccgaacgagcactcggagagaccccgtcggggagggttgaaattgcttcccaggttctttctcacgttcaattagctgtagaaaccaattag

SEQ ID NO: 73819 - DNA, 404 bp, Oryza sativa
  Clone ID: PAT_MRT4530_74063C.1
aagcttacgcaacgacaactacgagcacaagtacctctacttcgggcacttctagcacttctactggaacgtctacttcgtctacctctggttcgacaacttcgggaacgacaggcactaccggaacgactggttcgactgttactactggaggatcaaccactggttcgtctggagcgattcagtgtacaaaggacatctcgcaacaatgtctcgacgaatgtgcaccacaatttgttgattattgcagatgcaatatcactacaaacacattggtttacgtatgcaaagacagttttagcgctgctatgagcttcggaacacctgcttattggatcgcactcattctcggccttgttgctttgttacaataaaaactcttgttacttaaaaaaaaaaagctt

SEQ ID NO: 73820 - DNA, 454 bp, Oryza sativa
  Clone ID: PAT_MRT4530_74064C.1
ctctgatgcaaaaaaaaatatatacataaacatataacaaaaatcataaaaaaaaaactatcatgcatgaaatccaaaaaaaaaaacatagaggtgatatataactaccgggcgagtaacatatatctttgctaaatcatccaatttattcatcgagtacctaatatatgtgcccccgtttttattgcataaattttctcctcccggcctttgtgcgccttatttctttttttggtccccccaatataaattttccggctctttgttttacccctttgctatttaaaaaccttgttcttccccaacttattctgtttcaccacctttctctcttcctcccctgggattttaatcaataacccccacctatttgcccttcacaaacagttggcacttctatatttcatttgtccccccccttctgaccgtaatttaatccgcgtgttttttgttt

SEQ ID NO: 73821 - DNA, 221 bp, Oryza sativa
  Clone ID: PAT_MRT4530_74065C.1
gcccacccaaggagagaagaaagtgtcaaccaccccaggtcataccactgtgtcacctagcgaccgatgattcttttgagaccgctggtacactgcactgcactccacgctcggtaattatgtggagcttgaattataaaaccccagagggttgtgtttgtgccacttgtccgcctgggttaatccctaccgtgtttttataaaaaaaaaaaaaaaaaaaa

SEQ ID NO: 73822 - DNA, 969 bp, Oryza sativa
  Clone ID: PAT_MRT4530_74066C.1
atccacgaaggtcaccgtcggggtccatctccacgcgaggtcaccgccgaggtccctatctgcacgaggtcgccgccaaccgccaggtccctctccgcgcgaggtcgccgcgggccgtgggccgctgggtccctcttcatgccgaggtcgccgcacccatccatctccgtgctgaagtcccgcgggaggctggctgtcgctgctcaccggttccgtcgtattttgaagtgacggcgttaggtcggagtggagaaaattttcgtcggactcatttgcccttcgttccccacatgtttggctgcgtgttcggtgacgcgtcccatgcggaagagcgggtcgacgggatccatcacgcggtggcaccgcaacagtgagctcgtcatcggccgcagccacagcgacggcaaggagaagtttcgcttcctctctgcgccgtcgtcccgggccagggagctccccgaaccgaagcccacaacgaagggcgtcgccgccaccaaatcgcgttcttcgtcgacggcggcgaagaggccgcttgacgacgaggacgacgatgatagcgtggacggccctagcgtcgacgtggatggatgtgggctgctgtacgctgactgtgccggcgagcaccgcacgtggtggccgtactcggcgtcgcagcccacacctccgtcgtcctatccctactgctgctcgccgtcgaggtcgctccccgccgttgatggcctcttcgccgcacctccattgccctcttgctcgggggagggcggctgtggcgggagtgctataaatcacaagaaaattggtgtcctgtgcttctggtcgaaatagaaaatttgttgtgctattttttggtaccggattttttcctatggaaggttttttagtagtgggcaaaactctagatgcctctgagatgtacgtagtacactcttctatcctctgcagtagacttatggtgttgataaaggccat

SEQ ID NO: 73823 - DNA, 2388 bp, Oryza sativa
  unsure (1)..(2388): unsure at all n locations
  Clone ID: PAT_MRT4530_74067C.1
atgatgatgagggtgttgggtttcatgggagatggtggtggtggtgggatgatgacggcgcaggctgcggcggaggcggcggtgggcgcgatcgggtgcgggtacgacctcacgagcgacctccgcctcagccgcgtcaaggcgggcgggaggctggtggacatcgacggggcgagcggcgcggcgagacgggagctggtcctcccctggggagccgtcgtggggggcgtgccggtggggatcgtcgccgacaagggggagcgcacccggttccgctccgacgtcctctccttcgctcagatggcggagcaggtgaaccagacgatgtcggtggcggggaagatcccgtcgggcgcgttcaacgccatgttcgactaccacgggtgctggcacaaggacgcggccgccacggggagcctctgcttcgacggccgcttcatcgagctctacgccgtcgaggccccccgcgcgcacctcgccctgctcgaccgcgtcaagcgcgacgtcccgcccttctgggaccccgctgctctcgccgagtcagtacgccttcccccgtcgcgcgccgcgcgcccggcgttcgtcgcgtttgctgctaccccagtggccactgactctagtgtactgacatggtcgctgccgaattttctgttcagattcatcgacaagtacgggacgcacgtcatcgccggggtgaagatgggagggaaggatgtggtctgcatcaagcagctcaagggatccaatctcacacagagcgatgtgcagtctcggctcaagaaactctccgacgacaagctcgctcaggattcacctgaaagtttaactgcaagagacgacaagttcttgctgggattaaacgggagtttattattgggtcctggatctgctgcttggcggtcgttcagaccatcagtcgtgtcacacaaagatgacatcctcagtatccacatcagaagagggggcgttgataatggccaaggccacagtaattggctttcgacgatcagcggttcaccggacgtcatctctatggcttttgtgccgattacttctctgctcactggtgttcgaggctgcgggttcctgaatcatgcagtgaacctctacctcagatacaaacctccaatagaggaactccatcaatttctggaattccaggtgccacgacaatgggctccagagtttggggagctccctctggctttgggcccgagaaagaagaagaacagcctgccatctcttcagtttactctcatgggtcctaagcttcatgtcaccactgccaaggctgattctgggaatcgtccggtgaccggcattcggctgttcctggaaggcaagaagaacaaccggctgggcgttcacctacagcatttgtcagcgacgccgggcacgatcacgatcgccggcgaggtggcgtcggcggaggacgccaccgtgagggagcgcgactacatcgagcccatcaagtcgccgctgctgtcgcacgtgtgcacggcgccggtgcagtacaacggcgcgcggatcgacgactgcgcggcgatcgtgacgagggcgtggctggaggtgcaggagacgtgcctcaagaaggtgctcttcctgcggctgggcttctccggcgtggcatccaccaagatccggcggtcggagtgggatggcccgttcgtcgtgtcacgcaagtcgggctcgctgtcggcattgttcagcgcgcggctgtccgccgccggtgccggtggctccgcgcagatgatgcagcagcagcagccggtgggggagaaggtggaggtgaactccgccatcttccccaagggcccgccggtgcctctcccggtgcagaggatggcgaggtacgtcgacacaacggaggtgatgaggggccccgccgacttgccggggtactgggtggtcaccggcgcgaagctctgcatcgaaggcggcaaagttgcactcaaggtcaagtactcgctgctcatcgcggaggtgctagactaccctgagtgactgttgagaagaactgcacggtgtgtgcatctttttggctcgtttgtgatgctgttgtgtacagtacagtacagtacaggtaaggtcggctcagctcagcgtatacttgtacagattgggcacacgctagtagtcaggtatactatttgtatgtataaaccacagagtagagcagtacactaccagcaggcaattgttttggtttgcacttggattctagcaaaactaggagcatacacagttgttgaaattggtttccttaggcatgcagctcaaaaggttatgtacgattatttctcacctctggtattgccctgagatgggatcatttttactgccatncntgagaatgtgagcacggtttggtaaaaaaaaaaaaaaaaa

SEQ ID NO: 73824 - DNA, 579 bp, Oryza sativa
  Clone ID: PAT_MRT4530_74068C.1
atggaaccggagagggaggcatcgtcggagtggggagatggtgtcggggcgctgggtttccgggtgaaggcgtcttcgcgcgagccggcggcgcagaaggcggccaatgtgctggagccggacctgcgttcccactggtccaccgccaccaacaccaaggagtggatcctgctcgagctcagcgagccgtgcctcctctcccacatccgcatctacaacaagtccgtcctcgagtgggagatcactgccggcctgcgctacaacaagccagataccttcgtcaaggttcgcccgcgctgcgaggctcccaagcgcgacatactctatcctgccaaccacaccccttgccgctacgtccgcatctcttgtatgcgcggcaaccctatcgccatcttcttcatccagctcattggaatccctatacctggactggaacctgacctccagcctctagtcaactacctattgccacatatcactgcacacaaacaatcctctcaaaatatccacctccagttactcaaagacattgcaagcaggctaccaccatttctgccccagattgagggattttactaa

SEQ ID NO: 73825 - DNA, 507 bp, Oryza sativa
  Clone ID: PAT_MRT4530_74069C.1
tcgtcccgggagggtttagatgtcccggggcggccaccgtttttttttattcgcatcatcaagtcgttgtcctaagagagattgatctctcgggcatttgcatcgtcatcaagcagcagtagcagagtctccggtcatcgtcgtatatatatatatatatatgtatatatatacatatatatatatatatacacatatatatatatatatatacacatatatatattatgcatatatatagaatacatatatatatatatatatacatatatatacacacacacacacacatatatatatatatatatatatatatatatatatatatatatatacatatatatatatatatatatatatatatatatatatatatatatatatatatatatatacatatatatacatatatacatatatatacatatatatacatatatatatatatatacatatatatatatatatatatatatatatatatatatatatatatatatatatata

SEQ ID NO: 73826 - DNA, 713 bp, Oryza sativa
  Clone ID: PAT_MRT4530_7406C.1
agtagggctgcagcgttagctgccgtactgcttacttaatgtcagttttaaattttataccaaagttgctacaaataaaattactgaggttgctcaaaacgtatttagtccaactcaaacaacttttatacctgggagaaatatcatggaaggacttgttatattacatacatgaaatgcatcgaaaaaagaagagtggtgtgatttttaagattgattttgagaaagcgtatgataaaataaaatggtcatttgtacaacaaacattgaggatgaaaggtttttcacataaatggtatgaatggatagcttcttttatctaaggtggacatgttgcgataaaagtaaatgaccaagtgggctctaatttttaaacatataagggtctaaagcaaggagatccaatgtccccagtcctttttaatatagttgttgatatgctagctatattaattagtggggtcgttccacatttggtggacgatggtctatccattttacaatatgcaaacgatactcttatttttcttgagcatgacttagagaaggcgaagaatatgaagttgttattatcagcttttgaaaagctccctggcctaaagattaatttttacaaaaaaaacttagtaacaatgattagaaaacagttgagcaaagaattgaaaaaaaaaaacttagtagttggaaacgtaaacatatgtttgtacggggaa

SEQ ID NO: 73827 - DNA, 581 bp, Oryza sativa
  unsure (1)..(581): unsure at all n locations
  Clone ID: PAT_MRT4530_74070C.1
ttttgttcaagttgcatatccgaaatactggaattcatgtcccagctcatttactaaacagtgaacacgcactaaattactggatctacgaactctgaaatatatatctttcttggcaatgcgagatctgtagagcttgaggatacatcaggcctgctataaatacacaagtggctgacatggcacaatcttgatggtttcctcctttgttgatttaccagttggcatggttgaggatgaagaagaaaatcagacggattcccattgatttcaaatcgaaatgtgatctttaaccagctacttccgactcaaattcatgccattggatacaagtctcttttcctcttgtttttgaaaaaaaagtcttcatgtgtttttttgtgtttgctttgctgaggaccagggatgtgagaaaaatatttgctactcttgatgaggcattgagtcccatctgatgatcattaaccaccaagatctctgaggccttgntctagccgtcactgtttatttcgagctttctgcttctctggttttgacttttgggtgtgcaagccgcataacataaacttggaagggcaggc

SEQ ID NO: 73828 - DNA, 536 bp, Oryza sativa
  Clone ID: PAT_MRT4530_74071C.1
catatgttttggacgaaaattgattggtaccttggttgggtggtcaatgctcatcaactgaatgcatgtctaataggtgtaactgctgcaacaataatcagtggcgaagccaagatttagagatggagggtgccatctacgagacatggcaactcacttaaggtttagtgaacagtgattttgtagcgttgatgtatgatcggtaactcgatatcatacatattatagcgattagctacaagagagaacaagaacccatatatcatgatttgccaatttaaaattcagtaatatttttaatatatggatgattgaacagtttgtttcattaattggagtcttgcaatcacttctaaaatgataaatcatttagctaagtcatttcataagtcctatatatatataggagagaatccattatatgccactgactttgtcacacatctacaatttaccatcgactttgtcacattgtacaatacaccatcgacttttgattaccccctacgatttaccatcgccgtccgattagaaga

SEQ ID NO: 73829 - DNA, 379 bp, Oryza sativa
  Clone ID: PAT_MRT4530_74072C.1
atggctccgcccgaggtagtcgcgggcgcgataccgctgcggtcacgcgtctcgtttgcgcgagagcgccagctcaacttcgctattgctctttcatatagcgatttcgccacgctatcgcactttccaggagcgaacatcggtggtatcgctctggtttatttccacaaatccttcgctatccgcggcggtgtctccggcggcttggagaagataatgtgggaggaggaggaggggggggccggcgatcggcgcgctgggcgcggcaggggaggagaccaaggcggaattggttgcgaggaaaccgaggaggaggaagagattaggattcaattaaggttaatgcggctgcacgaaaacaagatcaatctccgtctct

SEQ ID NO: 73830 - DNA, 252 bp, Oryza sativa
  Clone ID: PAT_MRT4530_74073C.1
atgccgccatgcaaggagggtagcctgcggcgcggacgcgtggggcgtgaggtggacaggtggcgccgccgccgcttcgtcgtcttctgcagccacggcaaccgccgcccgccgcctcggcgtgcgtggcccagcccaactaaaacaagtcaagccgcgaagttaacacgggccggaccaactgatgagaaaccagcccagcccacattggagactgtacggcggacaaagcggagagttacatcacgctaa

SEQ ID NO: 73831 - DNA, 675 bp, Oryza sativa
  Clone ID: PAT_MRT4530_74074C.1
atgcgcttcacggcgtctccggtggtggagctgccggtgggcggcgcggtgctgacgttcgagcaggacaacgactccttcgaggtgggcacctccgtgtggccttcctccctcgtcctcgtcaagttcgccgagcgctgcctccgcgacccggcgctccccttcgccgacgtcctccgcttcccgggcacccgcgccgtcgagctcggctcgggctgcggccccgccggcctcggcctctcccgcctcggcctcgccgacctcgtcctcacggacatcgccgcggtgctccccgcgctccgccgcaacctccgccgcaaccgccgccacctcccgcgcgccccacgcctcgcccagctccactggaactgccccgcgcacctcgcctccctcgcctccccgcgccgcttcgacctcgtcgtcgccgccgacgtcgtctacgtcccggaatccgtgccccacctcgtcgctgccatggacgtgctcgccgacgccgaccgcggggtggtgctgctcgggtaccaggtccggtcgccggaggcgcatcaggccttctgggacgccgtgccggcggccttcccggtgatcgagaagattccacgggagcatctggacccggattacgcctacgaggaatccgatgtgttcgttcttcgcaggaggccgcgacagtga

SEQ ID NO: 73832 - DNA, 270 bp, Oryza sativa
  Clone ID: PAT_MRT4530_74075C.1
aaataacaagtgggctaagcccatataggcccaacaatcattccataccttttataggtcataaactgtcctcacaagtcttttctgcacactttgtcctcactcgtgtgcacccgggaagaatttaccggtctgtcacctatctcaaattactccagaccaagtacgcttaacctcataattctttgaagaccagcttccggaaaagaagttgcaacctgttgatatgagtattctattaatcctattaagccctgggccgggatgtta

SEQ ID NO: 73833 - DNA, 317 bp, Oryza sativa
  Clone ID: PAT_MRT4530_74076C.1
ggcgcttggtgggcgcaggatcagcccggagcaggggccattcggtgcccacgaggagcggcgctgcacctatgctgctgctgcaagcggccgatgccgtaagcccaacaggagggatctggaccgacaacagacgtgcacctgtaccttaaaccgagggacgccggtagggacataatacacctgcgcgcgtgatatctctttctacggaactcatgcctatactcctggaacttcgaccgaaggggtgaggtctgggaggagggggtcggagtgaccaggcgtaggggattgctgaccaaagacacagggctcca

SEQ ID NO: 73834 - DNA, 1572 bp, Oryza sativa
  Clone ID: PAT_MRT4530_74077C.1
atgcgccaccgcgtcggccccgccgccgccgccgcggcggcgctccggcggttctcccacctccgcccgccggccccgccggacccgaggctcgccttccttcgctcagagtttgatggccgtgagcccggccgacagccaccgtcaccggaaacaagagaggagccaaaaggtggcgagcgcgcgcgctcgccggtggccgtggatatcgcgcacccgtggccggagtgggtggcgctgatggagctcctccttcagaggggccacctcgacgcctccgtgttcgccggcggcgcggctggctcgccgtccaaggattccaacgttatccgcaccgcctgcctccggtttgggcgagagcggccggagcttatcaggcatctatcaagatgggatatccaggttgctctccggtatgggtgccccagcattgacaggaaggttgttaattctgggaagcgattacgtgctcatgtaggccttgatgaaggagaggtctgcagccaatgcaatttaaggggtggatgcgagagggcatatgtaaaggctcggaaggaggaaattggaagaactgtggatgttatgcgcatccttttgacttatgggcttgacacagttactggcaatgtggagaacagagcatgtctaaacaaaaccgttaaagaatccattaagagcctacttaatgagattgttgggttcgattccatgggtcctggttccagcactgaaaagcccacacaccgtatgccaaaaggacaatcttctattcctatgaagcagggtgattggaattgtcccaaatgcaacttcttgaactttgcaaagaatataaaatgtttacgctgcaatggagaatttgaagagaggtatcagctgctccatgagaaccaagagcatcttcctctcaaaaagggtgattggatatgcaaaaggtgcaactttttgaattttgcaaagaatacaagatgccttcagtgccatgagaaaccaacaaaccgtcaactcaatccaggggaatgggagtgtgtctcgtgtaattatttgaacttcaagaggaatgcattctgtttgaaatgtggttggaaaagaccaaaatcattgaacaaccaagacagtattgaatcacaacgtgacttagatgataataagcattctgctatttcatttatccaagatggcatccaatcgaggaggcaaattctgcaaaataaggctccattgtctgacgaagattcagacttctggagctccgaggaggaaggggcctaccacagtgacaaaaacattcccccaataaagaaggattacaagttccttgaaagttttcccatcattgggggtaggactgctatgtctcaagatcctcttgagagggagaaatggaaggacgaaatgtccaggagaaacaaagggctcctaacagaagtatcagaagaaagtaatcggccttcgtgccccgttcgtattccgagaagcattgagcagattgaatctggtgacgacgacgacgacgacatttcatcatggttttctggtggtactagtaatattaacatgaaaaaggcatag

SEQ ID NO: 73835 - DNA, 1383 bp, Oryza sativa
  Clone ID: PAT_MRT4530_74078C.1
atggaccacaaccagcgcctccgcgagatcctcacctaccttccgccgccaccagcctccagcaacaccgccgctgccccacccgacggcgccggcgcgggcgcggtcttcaccacctcctcgagctcgcacgcgcgcggcggcgaccgcatcagccagctcccggcggagctcctccaggacgtcgtgtcccgtcttccggccgccgacggcgcccgcaccacggcgctgtcccgcccctgggcccggatctggggctccgtgcccctcgtcctcgacgacgccctcttcgtgatccccaccacgccccaagccggcgccggcgccgtcaccgggcggatcagctccagatcgcaccacgccgcggtggtggtggacaaggtgtcgcgcgccatcgactcccacccgggccccttccgcagcatccggctcacgagcaccaacttccaccgccacgaccgcctcggccactggatccgcgccatgggacgcaagggcggcgtcgaggatctcgtcctcgtccaccccggcggcgtggcccgcgccgtaaccctcccgcccgaggtcctcacctgcacctccatggtgcgcctcgccgtcgcgcgctgcggcctgcccccgtacaccgacgtcgacctgccgagactgcgggagctcgtcctatgcgagggccacttccgggcggccaacaagctgggccggatgctcgccggctgccctaagctcgagtcgctcacgctgatcaaccccaacgacatgccctattcggccatggaagtcgtgagctccaccatgaaaatcttggtcctctgcattttccacaccaaggtgctcgacttgctggacgctccgtcccttgagcgtctcatcatctggaggccgatgttagtgatgagtctttacatgttcatgatcaagatcacccgcgcacccatccttcgagcgatcgggtatcttgacaccattctgcatgtggtccagatcggaggaactatcatagaggctgggacgaagatcagcccgtctttaacgatccctagtgtcgagaccctggctataaaactatcgtttggatcaaaagagcaagagaataggcttttgtcctttctgaagatatttccaaatgtcaagactctatatgtgatgtcacatcctccttgtacatcatcttgtgttttccatgatgagcgtgatgtagatttctggatgaagaaccttggatccattttatgtgtccattcacaacttacaaagttcacgttctataatctacatggagtggttctcggtgatcttccattcattagagcagtcatggggacagctagattgctaaaggagatgcgtcttttcccatgtgacaaaatcttctttaatcggtaa

SEQ ID NO: 73836 - DNA, 438 bp, Oryza sativa
  Clone ID: PAT_MRT4530_74079C.1
atggcactggaccacaactccgccggcgatagagagctcggttgggctatccgaagacaccaacacgaagaggacgacgacgcgaactcaccggtgcaaagaacaacgacgaacgacgacaaacgacggccggcgacgaggtcccaaggcggcacggtttggctcaacgtcgacggcggcgctccggcggtcttcggcggctgcaaaggggcggccggggtgctcctcctcctcacgaacccgacggtggcgacggaaggcggcggcgacgaccacagcagcggcgcggcgtggctgaagcgacgacaacgacggcggcggctagggctacgcggtggcggcgctacgggcaacggggaggaggagggcaaggagatgggcatgacaaggccagccgccgccgtcgccgcgtgcgacagcgatggcgagaactgctga

SEQ ID NO: 73837 - DNA, 774 bp, Oryza sativa
  Clone ID: PAT_MRT4530_7407C.1
ccacgcgtccgggtttttcttacaggagctaacaagcttaatgtctccatcggtgtttggtgaactaaataattaatgcactgattaatcaagtttatctgcacactatgtcagcttgcttgggattctttatttcatgtttggtaatacatgattcaaatagttttttgttatttagaagtggtccgtccagcaatcctgacaactatttctcacgacaacactgcttgtcaagttgatccacccaggtatagtacaataagttatcattttgtccctaccattgggggtggatggcgcttgctgcatgcatatgacataatgaaaatggtatcacatcttctatataacaatgtttgcagcccaaatctagtacattgaggtgttcatatagcaaatgtatacacgataaaagtccatattttctcccaatctaatttctgtgttgtttttaaatttattttgctaaatttgttgtttgttatttgctgcataagtatgtagtaagcaaaacatgccattttttttactttatttctcagaaatggcacgtgtttatgcagatcaaggaacaagccgttgcagttgtcataaggaaaaaacacaagatctacgaagaaccaactcaatggaatggtagaagtaacccaatttctgttgttactctcttacagctacagagattctcccgttttctgtttcccctagctgatgtttcaggcgacttggtagaatagtcaaggctttcaggtgacatgaaatctcaaagccatc

SEQ ID NO: 73838 - DNA, 273 bp, Oryza sativa
  Clone ID: PAT_MRT4530_74080C.1
tttaagtttttttttatattttattttatttttattattaaaaacaaatggggccaccctatacccttaaatcgcatattgttataaattatttaagattccaaaggtgtaaatttcacataattgaaaattcttttaggggtgttctatacaggaaatgtcaacatttaccgaaaatgtgtaaaaacactaatttggcctttaagcggaatcttactgtgcaagtttttggctagcttatttaaaactgaaccaaaaaactttggaaaaatg

SEQ ID NO: 73839 - DNA, 471 bp, Oryza sativa
  Clone ID: PAT_MRT4530_74081C.1
cgaccctaccgtatggcagcaaatgaactggctggagttaagaaacatagttggtcgtggatttttggccgcgttggaagccaagcccacctttgctcgatcaaatccgcgaggctcagaagaatgatccggacatgcatggactcctcaagaatatgaaacagggtaaagccgctggtttcacagaggatgaacacggaaccttatggaacggaaagcgggtatgcgttccagatagcagagaacttaaacaggtgatactttaggaagctcatgaaagttcttatttcattcacccgggcagtacaaagatgtatttagacttgaaggagaaatactggtgggtcaacatgaagcgggaaattgcagagtttgtgggtctatgtgatgtgtgccaacgtttaaggcaaagcaccaacgaccgggccggacttttcaaccttttcagtggcggaatggaaatgcatgaat

SEQ ID NO: 73840 - DNA, 1224 bp, Oryza sativa
  Clone ID: PAT_MRT4530_74082C.1
atgctatcccacagtatagacagttgtaaggaagaccaagaacatctagctcttctagatcctaagcttgccccggtgctactgttggttgcttaccgcattattgatacagacgacaagggcaacaccgatgatgaatattgtcccatagatgatgaagaggaagaattagatcacggggatgaaaattcacatgatgaggatatcgttgataacgataaggatgattgtgaccttggggatgaagatgacaatcacacgtgcgaaagagattatgatggaagcgatgatgctggaacggaggaaagtgatgacagcgatgatcaggaggaagatgacactcttttcttctacagtatagctaaaagagaattgctatccaaaagagtggatgaattcggcatccacttatattggataacagcacaaggctggttgcttatggtgcaccttgaattgtatgaaattttcctatggagtcccatcacaaatcaaaagatcaacctacccttcgatgaagacaattttcttgcgaataataatgtggtcaagtgctttctatcacataaaccttctgatccaaactgtatcgtgctagtagtaaattgcagggacacaatgttctggtattgccatcctaaaggagacgtatggttcaggcatgagtaccaatcaagtatgattagtacaggagaggacagagaaaatgttattgcaactgtgaaacaccttacggctgttggggggagattccatgcatatttaaatcaggataaggcaattttgacacttgaattcctgccaaagccaacatttacaactacgccagttaaggatgcaccagatccaagttattggtgcacgttttctacttgtttcttgttagaatcaggtggagagttgttcacgttgtcatttaaacatccaattgaatgtgttgataaggttatgcaaattgaagttcataaactcaatttatctcaaagaatttggatgaaagttagcacaattgataacaaggcatttttggttgactgtactggctttggagcatcactcaatgcagaagatgttggattgaagaggaactgcatttactttgtaagacctaaagataagggattatatgtttataacatggaacgaggaactaccaccatacacaatccaggggaagatctaccagataacattgcacttgagattgtgatgcctccatcttga

SEQ ID NO: 73841 - DNA, 444 bp, Oryza sativa
  Clone ID: PAT_MRT4530_74083C.1
atggagaaggatgaggagttcaagcaagcgacaacaatgctcagtgtagctagaggtagtggtggctctcgatggagggaggttgtcggcgttagacagggcgaggcggctggcggttttgtactcttggtttgtggtggcggcggcaggcggagtggctggcgaggggagattggccgccccgggagagcggggagaggagggcgctggcaggatagtgttgacgacgacgagaggatgccggcgggagaggcgcgacggagcttcattgccgcgagcaccccgttgagaccaacggcgccccacagccgaccctcggcctactttggcttcgtcgtcgacgccgcccccacatgccaccctagatctgccttgcctggaccacctagggaccttcaccaccacctcatcaaccaccccaccgtcggcacagccctccactga

SEQ ID NO: 73842 - DNA, 702 bp, Oryza sativa
  Clone ID: PAT_MRT4530_74084C.1
atggcggatccagtgagtagcttgaagcatatcacgcagatggctctgaagatcaaggaggcggtggacacggttcggagaaacaaggaggattgccttcagatcagaaggcgagtagtcagagtgagtgatatcctctcgcagctgcaggaaacgggaaacatcatgagcaatccggcaatgagcgccgcgctggaggatctctccgagacgctccgccacgcccacacgctggtggtctcctgccaggagaagagcgtcatgtgcctcctctgcgcggctaccgcgctctccaagaagctgcgtcgggtgaacgatgacatctcggatcagatgatggtggggatctttgtgaccaccgtccacactaccattgctctgagccaaattcaaggcgatgcccaacatgatgtaatatatgctcttccccgtacagaaataaccgacgacatcgaagcaacgcttccgaaaaaggaagagcctaagccgccatcaccaccaagggaagctgaaccagaacccgagccaccacttccaccaccagaggaaccaacacccctagtgcgaaacgaaccatcgcccgctcccacaccggagaaaccagaggctactcagataggagaagtgcgagcagaggatagtggctttcactaccgtactgctaggtcagatgtgcacaatacattcttctcttctatgtga

SEQ ID NO: 73843 - DNA, 318 bp, Oryza sativa
  Clone ID: PAT_MRT4530_74085C.1
tcagtttgcttgcactccatgcgttatgctggagccctccagggcctgtaggctgtaaggctgcaagctgtaccgctctacgtctactgccatcgcgtcgttgtaaattgcagagaagcaggcaggagctgggtatctggctttcgtgcggctggtgctgacgccgtcgcggaacgaggtggtgagcacgaagccagccgcgtcccggatgagcgaggtgaagccaaggagcgtgaggttgctcgcccacgagatgcggtggtaggaggtgccgatcccctctttcctcagctcgcacatatcctgaatctccggcat

SEQ ID NO: 73844 - DNA, 357 bp, Oryza sativa
  Clone ID: PAT_MRT4530_74086C.1
agacagtatatattcctccctttattactagttacgagtagtagtagtataatcgctcaccggcgacacgagggataaccgaagcggctggcttcaacagcgccggacgaaatcggtcacgacggcgagctccttgacggcattgtcgcagtcgggcttgggcaagaagaagacatggccctcgccatcggtctcgtggagctccaccttgccgtcccacccgcactttttgatcccctccgcgtacgcgcgcgcccttttcacgaaccaacagtgcttcgccgtagtgaccaggacgcgggcgggcccgagctggcttcactccttcggcgacgccagcgggttgacgcacgggtg

SEQ ID NO: 73845 - DNA, 234 bp, Oryza sativa
  Clone ID: PAT_MRT4530_74087C.1
acataactatgcatgccaaacacatgcataggagattgttcatagagacggatgcaccattttgcttactacatctctgctcagttataacgacacacagaatagaaacaggaattggttaatacagacttccaactcggcataactcgtctaattcagaaaactacttggtcccatcgcacatggaccccctgattgtattttactaaacctttgctgaccggttgaaccctt

SEQ ID NO: 73846 - DNA, 3166 bp, Oryza sativa
  Clone ID: PAT_MRT4530_74088C.1
gcacgaggccggagccaggtttgtagcggcggcgaggcggggcggggatggccgtcggggatgcgctgcggcggctgtgcgaggaggtcgggtggtcgtacgccgtcttctggaaggccatcggcgccgccgaccccgttcatttggtgtgggaggacggctactgtggccacgcatcatgccctgccggatctgatccttctgaagctctgcctaccgacgtcggctgtgctgctgctgctgacaccatgaccatgtgctccctcgtcaacaaggttatggcctcgcaggttcatgtcgtaggagaagggaccgtaggccgtgctgcttttacgggcaaccatcaatggatcatccatggtactgccaatgatcacgggattccctccgaggttgctgctgagatgagttatcagttcagagttggcattcagactatagcgattattcctgttctaccacgtggcgtgctacagttgggatctactggcgtgataatttcaaagcctatttttcatgctattgtaaattcagaatgtgctggtgcaaagttatggcagcttccagttatttcttccagtgaaaagcaaattaagaatagttcaagccagcagggtcgttcacgccctttacatggtgcctcaaatgttcaatctacagagaatcgctcaaaacttttcagtcaattccccgtgacttgtgaacaatacaaccatcctgagggcatggctgtgtcaggtagcacttcacttaatgcatgcatgaatggatctttgcttaagattgcacaactgaatggtcaagctgtcagagagcacattgtctattccaagcctgatgtgaggttcatacaacaagtttatcgtgatggccaacttggaagtaatgcacagagtattgctatgagttcagatttgatctcatcgagcttgagatcagtacaaaagcagcccctgttgatgaacaacattagccagctagaatatggtgacggtgcagaaacatcagcagatttacggaagaatgtcctgttgaaaccgcctgtgtgccttgacccctttatccatgatcgaaacatcaatatatctcatggaataactgaggtatccaacgtcataaatgatcacgggaattttgatttcctctcaggaggtgccagagttgtcagagctaacttatgtaccagtgcaacaagtcaagtattagaccgaagaagccattctgtttcaggaatgttgctgcatagagaacctatagtgtcttgtgaggtaccccaatcttctgaattttcaacaaaaatgggaagtcttgaaagagggtcatttcaaatttcttcagctccatcttctgaatctgatgttcagatttctaatggtttgaatacaagtatttctcgagagaatcaattaagtgtgtcaaaccatatctgccaagatcaaaagattaatggagtaaatgatctgagtgctactttgagcacagaaagaatgaacaatatggatggatgcaagccaccaggcttgtctcttgagagaacctctccgctgtttatggagcagagtgtagagaatgacttgtttgatatacttggtcctcagtttcatcacttgtgccacaatgctggtgccgatttggtcccctggactgatgcaaaaccagagagttcagatagagatgtgcctgaatcctctattcatgccgattccgctcctctattcagttcacgagacaacgagctctattctgggatcttttcattaacggatactgaccaactattagatgctgtcatctcaaatgttaatccagctggtaagcagagttccgatgatagtgcttcttgcaagacttcattgacagacattcctgccacttcttatctttgttcaaaagagatgaagcaatgtggatcctctggcgttccctcggtgctaatcaagaatgagtctgcacagtttattaaacaaccatgtctcgctgagaacgccgaggatggttgcctatcccagaataatggaatgcacaaatctcaaatacgtctttggattgagagtggacagagcatgaaatgtgaaagtgcatcagcttctaacagcaaaggtcttgatacaccaagcaaggcgaaccgaaagaggtctcggccaggagagagtcctaaaccaaggccaaaggatcggcagctgatacaggatcgtataaaggagctccgagaaatggtacctaatggggctaagtgtagcatcgatgccttgctggagaagacagttaagcacatgcttttcttgcaaagtgtgacgaagcatgcagacaagctcaaggattctactgaatccaagattcttggcaatgagaatggtcctgtttggaaagactattttgaaggtggtgcaacttgggcatttgatgttggctctcagtctatgacatgtccaatcattgttgaggatcttgaccgacctcgccaaatgcttgttgagatgatttgtgaggatagaggcatattcttggagatagctgacttcatcaagggacttggattgaccatcctaagaggtgcaatggaagcccgtaaaagtaaaatttgggcacggtttactgttgaggcaaacagggacgtgacccgaatggagatctttctctcgcttgtgcgcttactggaacccaattgcgacagcagtggagcagcggaaaatgctaacaatgtcaacatgcctcttggcttggtgcaccaacctgttatcccggcgacaggtcgaatccagtgaccactgacaagtagatgaagcaatcatcatcttcaggaagacatcaagtgctaagagcaggaattcggtttcgttcctgccatgactagcattgccaatttgctggtgcacaccacctgctttcatgtgacatcttgctgtgaaaatgtgccatctttgctgcgagccatctgatcccaaagtctagagctgaacatgagatgcatcagagaagagggtctgttgattgagagaatgttcattaggcagtgtttagcctgtataatcttagtcttctttttttgttcttaattctgtcttgacatatgttagtggattctctactgttatcctgaatgcaaattcttgtgttggtttgttaaccaaaaaaaatcgtaaagcccctttaaaaaacctcgtgc

SEQ ID NO: 73847 - DNA, 959 bp, Oryza sativa
  Clone ID: PAT_MRT4530_74089C.1
gatgcctacacataaatgttccattatcacttgtggggatcgatgtgttgggttttacatatatgcatgcgtgaattaacatgtggtgtcgcatgatctaagataattaatctagatgcggtcgacgatcgatgggtgatccagcgcttaactaggaaatggatgcatgcatgcatgacctaagaacacgcggaagaccgaggtgttaaccatctgcttcttcttgtgcttgtcgttcagcctcctctgcatggatctctctccctggcacatgtgaccttggcgttttcacctttgacgtttgaagcgcactggcacgagttgctgtctgcggggattgtactacctgcaccctctcctcaagagcggagcgctcaccgttggcatggagcggctgaacctccacctgcactgccattggaccaagcgttttgtccggtggacctcacgctgacacgcgtcctacaacatcgtctgtccgtgcgggtgcagtattgtgtcctctccttgccacgggcacagtagcccccgtctccttcgcccgcgcgtctctctccacgccctgtcagctcatgtgctttcttacaagaatggctgatgcctgtgtttgtgttatactgtctagctggtcccgcacgcacacaccgtcaccgttctggctgttagacgtgcctttcctaggtttttctctcgccatctttcccattctctaaatattctagcttcattgcttctcttttgcctcgtgcggtccgtactcgtttatatgctatctgtcgcttcctcgccttctattccttttcctttcttcatactcagacatagccattaaacctccttctcacgctccccgcccgattgcaccccgcttctatttttaatacacaccactcggttgaggtgtctattcgttccgttgctagtttattttgggtgtttgtttgtatttttcccagtag

SEQ ID NO: 73848 - DNA, 456 bp, Oryza sativa
  Clone ID: PAT_MRT4530_7408C.1
atgccggggcacaagcccagccaggggggtagtgccggcgcgccaatgtgcgctggagccgccataatggggtaccggcgacagccactctggcgtcccaaaaagaaccatttccggtttaagttttttcaggggtctatttgtaaaataagttttcaaaaaggaccaaaatgtaaaaatttcagatatgtgcttcatttctatgctaaccttgaggtgttcagaccatcatcagcattaaggtttttgttgctgtggaatgaagggtacacgcagacgtacccaccatcgagccagcctcctttggggtatcagaactactttggcaaggagcagcacccacctttgtattacctgccgtcgcatgaaatcaaaatggaagcaaaattagaatcgcagtatactgcatatgatatattccatgtcaatgcatgcctggaatatatcatattgtaa

SEQ ID NO: 73849 - DNA, 274 bp, Oryza sativa
  Clone ID: PAT_MRT4530_74090C.1
ccggccgggacacaaccatccaagcacatctagacctacaacgacatggaattacatatatcgccccatagaagacatcacagttcgctggtctctttggtgtcagtggctcgctaggccagtaggtattaggccacagcactagacaatgacagagattttgaggtggaagtgcaagagaaggcagattcgctaaggcgcaagcaatgcagccaattcggagtgcgagggctcaagctagcacaactgagttctttgaagtcactaatgagca

SEQ ID NO: 73850 - DNA, 1650 bp, Oryza sativa
  Clone ID: PAT_MRT4530_74091C.1
atggctatggttatcgagtctagaaataagaaaaggaaaagggttgcaaggagagaaggaattacctatgggccaatagatgagagagataggaaaagatttgattatctcaatgacaagatttggaaaaacgataccatctgtgtgaacatgctaaggcttaaaagagcaccttttttctgtttttgtaaactttttagggatcgtggcatgcttgtggatactatacatatgcctgttgaagagcaagtggctatgtttttacatacaattgggcacaatgatagaaatagggtagttgccactaatttttataggtccagtgaaactgtaagccgatatttcaacctagtccttcatgctgttggtgagctgagaaaggaattaataaggccaccctcaataacgactccttcaaaaatattagggaacccaaggtgggatccttattttaaggattgtattggagctattgatggcacacatgtacgagtctctgttaccaaagatatggagccttcctttcgtggtaggaaggatcatgctactcaaaatgtaatggcagctatagattttgaccttaagttcacgtatgtgttggctggttgggaggggacagcacaagatgctgtagttttacgtgatgctatagagcgtacagatggccttcgtgtcccacaaggaaaattctacctagttgatgcgggatatggagcaaaacctagatttttacccccttttcgtggtgtgaggtatcacttgaatgagtgggggactaatcctgtacagaatgagaaggagctatttaatttgaggcactcatctcttcgggtgaccgttgagcgtgcatttgggtctctcaagaggaggtggaaaattttagatgatgctactccattttttctctatccaactcaagtggatattgtgtggttgctgaaatttatatatcagattactaatcacattaggacttggaaaaggaaatattctaagatagctgatctgaggaagttgagtgctgctctttgggatgatgacaattttatcatatcacttgatcataaacattatgcagaccacatcaatgatcacaaggctgatgctgaatatctaaacaaacctattcacaattatggcaagatgcttgtgatatttggcaatagcttggctactgaaaaatatgcaaaaggatcaggtgatcctctagccattgaatctattcccattgatgatgatgaagaagaagaaattggtattggaagtgctgcagcaactggatcagctagtagagttcatgcccttaatgaggagaatggtgcatcatcttcagcacccaaacccaagaaaacaaagactgctgctgcaattgaagaggaagggctgataggtgcatttaaatctgttggtgacaagcttgctggagcaatagttgaagctggaaaagaggctgcaaaatctaacaaagagctgcccgataacctgtatgagagtgtgcatagcattccagggtttgaagatacatatcttgctcattatcatgcacatctagttgacaatcctccaactgcaagggtgtttgttacccttgaatttgctcacaaggtcacttgggttgcaagatatattgccaccacttttaatgggtga

SEQ ID NO: 73851 - DNA, 240 bp, Oryza sativa
  Clone ID: PAT_MRT4530_74092C.1
actccaggagtcattatcttcatctttgcttcggaacagacattctacttcaacaaatatttcagtttggacgagctggacaacaacatcaactctcctccaagtgaagcatctacaacagctctgcttcatcgaccctgacatctccgctgttgctaatggatgattatgttttcgccgacttattatttcaccttcacggttgacctgactgccgccgactggtttcttcgcctccat

SEQ ID NO: 73852 - DNA, 393 bp, Oryza sativa
  Clone ID: PAT_MRT4530_74093C.1
atggcttgggacctccacgacggcgaggtggcgaggaggaagttgggcgaggagcagcagaagcctcccgctcacccctccctcctcctatgtgatgaaccatcggcagcagccagcatccagccgtcggtcgcagccattgtacatgccagccggtcgccgctgccaaacgccacctcatccccaacctctcgcatcggcttcttcgtgcagtgcggccacagcgtcatcaggcagcggcgccgccaccgccttgacctcgctggtggcaacggcaccacgacaaggtacaaccgttgtcaaagaggatccgagctcggcggcggcgacacggcggcggcgatggcggtggcggcgtcaacgtcacaaggagatacgcctagcgacggttag

SEQ ID NO: 73853 - DNA, 221 bp, Oryza sativa
  Clone ID: PAT_MRT4530_74094C.1
attttttttgaaaggcaggcagaacacaattatatcaatatccgggcggcagcttctcacataaataggataactgatagctcattgtacatacatacaggacattagaattaggttctttgtgcagagagcataacatacacggaattgccagcacctatacgggggacatctacacaacccataatgccttattggaggatgcatggcagaataagatg

SEQ ID NO: 73854 - DNA, 2380 bp, Oryza sativa
  Clone ID: PAT_MRT4530_74095C.1
agagaactagttctcgggtgatactgccagcttcttctcaactcgacataagagctccctggcttctctgtaggggggtcactttggtcgatggagggggggacgaagaaagttttcacagttcaggtggaggatggaaagcccaggaaggacggccggccggcggtagggccagtgttcaggagtgcactgtcaaaggatggattcccgccacttgagcctgacatgaaaacatcatgggacgtgttcagggtcgcagcaggcaagtacccagataatcggatgctcggatggcgtcctgtaaaagatggagtgatagggccatacatatggaaatcatacagggaagtgtatgaagaagtcctgcaagttggatctgctttgcagcagctgggggtgaagccaggttcccggattggaatatatggatcaaactgccctcagtggatagtagcaatgcaggcttgcaatggttacagcttaatctgtgtcccactctacgatacgttaggtgcaggagctgttgacttcattattgaccatgctgaaatcgatgttatctttgttcaggacaagaaaataaaagaaatactgtccgcaaattgcaagtctgctaagagagtgaaaggactggtggcatttacttcgggaacaagcgaagaaatcacaagtgctgatcagattgggatgaagttgtactcgtggaaagatttcttaaaaatgggaaaggaaaatccagcccaaccttgtgctccaaaaccaaatgatacatgcaccatcatgtacacaagtgggacaagtggagagcccaaaggtgtcatgcttagccatgagagtcatgccatatatgtgaaaggtgtggacctcttcatggagcagtttgacgataagatgacaacagatgatgtgtttctttcctttctaccgcttgctcacatccttgaccgcatgatcgaggagtttttctttcacaaaggagcctcagttggctattatcatggggatttgaatgccttgagagatgatctcatggagctaaagccaactctactagttggggtgcctcgagtgtatgaaaaaatttatgaaggtatcttgaaggccttatcagaactcagaccactcagaagattaattttcaatgctctgtataaccgcaaactggcaaacatgaaagcaggctgcacgcacaaaactgcttcaccttttgcagatatgttggctttccgcaaggtcaaagcaaggcttggtggtcgtcttcgcctattaatctcgggtggggctccattaagtaatgagatcgaagagttcttgagagtaaccagctgcgcatactttatccaaggctatggtttaacagaaacactgggacctagcacggtctgttaccctgatgacatgtccctggttggaactgttggcgtggctgctacctatacggaattgcgattggaagaagtgcctgagatgggttacaatccacttggtactccttcccgtggtgaaatatgcgtccgaggaaacttcttcaccggatactataaaaatcctgagctcacgaatgaggtcatggctgatggatggtttcacacaggtgacattggagagatgaactcagatggaatcctgaaggtaattgaccgaaagaaaaatatattcaagttgtcacaaggggagtatgttgcagttgaatacctggagaaagtatatgttttccctccaaccgttgaagatgtctgggtatatggggacagcttcagatcaatgttagtggcagtagttaatccacatgaagagaacaccatgaagtgggcagaatcaaatggctgcaagggttcttttgctgaaatatgcaagtctgaaggccttaaagagcatatcctgaaagagctgcaatctgttgcagcaaagaacaagctacggggatttgagtatgtcaaaggtgtaatattggaccctattccttttgaccttgaaagggatttggtgactgcaacaatgaaaaagaaaagaaacaacatgctaaaatattacaagcctgagattgagaaagtataccaaaaactggaggaacagagggttgccgccaaatcaaagtaaagaaatatgttccctttgaacactaaatgaaaagctagaatgccattgtaaatttttcaatttttagataatggatatcgttccggcctctacatgtaaattttcagttgaactttggtactcaagattacatgaatgcaataaaatgtatatcgtgtgatgccttgtgtagctattaccccccttcatctcatcttacatatatggaatatgatgagcactacagaagtttgtgctacaccacatacttcgaagatactgaatgagatatcaggtattg

SEQ ID NO: 73855 - DNA, 1021 bp, Oryza sativa
  Clone ID: PAT_MRT4530_74096C.1
ctttaacctatcagccatggaacaagttcatgttgggaccaatgagaaagactcgaacttacttgcagctatttcatctgaaaccaaccacgatgacaatcccatatcaaccctcccaacaagggaaggatggtccaccccacttaccctttacaacaactgttgacttagatcacacatggtcaccaaattcatgcttgtcaaggagaactttaagccccgccatgacgacgtcatcctcgtgacacaccccaagagcagcactacttggttgaaggcccttgcctttgctatagtcaaccgctcaagctttgaatccattgatgctagccaccaccctctcctcacccaaaacccgcagcaccttgtgccgttcgttggtgcacaaggaggtaatctcgactaccttgagacattgccatctccacggctgctcaccacccaccttcctctctccctgctcccttccactgtcaccaccatgggctgccacatcatctacctttgccgggaacccaaggacgcctttatatcaaggtggcacttcgacaacaagattgcacaaggagctaaaataaacatagatacaacattcaccatgtttttggaaggatgctcaccattcggacccttctgggatcactacctccaatactggaaagaaagcttgaaaaggcctcgagatgttcttttcctgaggtatgaggagatcgtttttgatccactaaaggttgttagggatcttgcaggattcatcggtgtaccatttactgaagaggaggtaaaaagtggggttgaccaggaggtggtgagattatgtagctttaaagctctcagtgaccttgatatcaatagaaatggtggcgtagagcgtgcagaaggtaagatatttatcgcgtattctgtgttgtttcgacaagggaagactggggattgggttaaccatatgagcaaagacatgggagaaaaactggatcaacttgtggaggacaagttcaaaggatcaggtctcaagttctga

SEQ ID NO: 73856 - DNA, 240 bp, Oryza sativa
  Clone ID: PAT_MRT4530_74097C.1
atggccatccatttactttgcttcttttgtgcaaagtggtggctgctgccactgctgcttttggatcacaccctctcctcctcctctcttcctacttcttggggtgtgtgggctaacttgggatcaattaatacatgggaaaaatgtgtttacggggatagtgagattaagagcacccgcaatggtaaagtacagttaggcattgagcatatgaacctacttgggaaagtaaccctctag

SEQ ID NO: 73857 - DNA, 263 bp, Oryza sativa
  unsure (1)..(263): unsure at all n locations
  Clone ID: PAT_MRT4530_74098C.1
gcacgagcggcacgaggagaagtgggtgcgcggggacttcaatgagcccgtgtggcaacggccggtgcccatatcttctccnacggcatgtctatactacctctgcaaccccaacctggtgcacgcccatatcatcctcgccgtgctgggattccaggtcgtcctcatgggcctcgtctagggctaccgcatcaacggcctccccggcgtcggcgacggcaacgacctctaccccggcggncagtacttctacccgctcggct

SEQ ID NO: 73858 - DNA, 470 bp, Oryza sativa
  unsure (1)..(470): unsure at all n locations
  Clone ID: PAT_MRT4530_74099C.1
tctgtgaagagcttccaggaaggttggaccatttgctttcttggaaaagaagtttacaagaagtattatcgatggttggaaaacaaaacaaattgggggagactatcctctgggggcttggaagggcctcccggagaaagaacgattgtggcaaagaaaagggaattgaagttttttttgcgtgcttctgacgaagactgcaaaatggaagcatcagatttgctttgagcacggagcatactgttggtgccttgtaatctgggagatcctggcttgccttgggacttgttgtgttctttacacgttgctatgtaccnatctaggataggaacttgtatgtatagttcccttaaagaaagaataacagtgatgatgggcccttaaacctgagctgcacaagcctaatgtaaaaataaagtttcaggctttcatccaagaataaaacagcggttcatttaccaaaaaaaaaa

SEQ ID NO: 73859 - DNA, 1485 bp, Oryza sativa
  Clone ID: PAT_MRT4530_7409C.1
atgcagtcgccagagaatgcggcaccgcgcgtgtacttcatcccgttcccgacgccggggcacgcgctgccgatgtgcgacctcgcgcgcctcttcgcgtcccgcggcgccgacgcgacgctcgtcctcacgcgcgccaacgccgccaggctcggcggcgccgtcgcccgcgccgccgccgcgggatcacggatccgcgtccacgcgctcgccctgcccgccgaggccgcggggctcacgggcggccacgagagcgccgacgacctccccagccgcgagctcgcggggcccttcgccgtcgccgtcgacctcctcgcgccgctcttcgccgacctcctgcggcgcagacccgccgacgccgtggtgttcgacggcgtcctcccgtgggctgccaccgcggcggccgagctccgcgtcccgcggtacgcgttcacggggacggggtgcttcgcgctctcggtgcagcgagcactgctgctccacgccccgcaggacggcgtcgcgtcggacgacgagccgttcctcgtgccgggcctccccgacgcggtgcggctcaccaagtcgaggctcgccgaggcgaccctccccggcgcgcactcgcgggagttcttgaaccgaatgttcgacggcgagcgcgccacgacggggtgggtggtcaactccttcgccgacctagagcagaggtacatcgagcactacgagaaggagacggggaagcccgtgttcgccgtcgggccggtctgcctcgtcaacggcgacggcgacgacgtcatggagcgcgggcgcggcggggaaccgtgcgccgccacggacgccgcgcgcgcgctggcgtggctcgacgcgaagcccgcgcggtcggtggtgtacgtctgcttcggcagcctcacccggttcccggacgagcaggtcgcggagctcggcgcggggctcgcgggctccggcgtgaacttcgtgtgggtcgtcgggggcaagaacgcgtcggcggcgccgctgctcccggacgtcgtgcacgccgccgtgtcgtccggccgcggccacgtgatcgcggggtgggcgccgcaggtggcggtgctgaggcacgcggcggtgggcgcgttcgtgacgcactgcgggtggggcgcggtgacggaggcggcggcggccggggtgccggtgctggcgtggccggtgttcgcggagcagttctacaacgaggcgctggtggtcgggctcgccggcacgggcgccggcgtcggcgcggagagggggtacgtgtggggaggcgaggagtccggcggggtggtggtgtgcagggagaaggtggcggagagggtgcgcgccgccatggctgacgaggcgatgcggcggcgggcggaggaggtcggcgagcgcgcgcgccgcgccgtcgaggtgggcgggtcgtcgtacgacgccgtcggcgcgctgctggaggatgtgcggcgccgggagatggcggcggatccacggaacgtgaaggaagtatga

SEQ ID NO: 73860 - DNA, 692 bp, Oryza sativa
  Clone ID: PAT_MRT4530_740C.1
ccggccgggaccaaagaaataaagaaaaaaccaaaatccttcttccaaaccaaccaactccctacttcttctactcctcgtcttcgttcgtcttcgtcttcttgtacaattaattcctcctctttctccgcccaagaaacccacaccaagaacatcttcttcttcttctccgtgtcaaaacaaacactgtttctctctctctctctctctctttctctgtgttcagagccaagaagtctctgctctgcatgggtcaggaagaagcagcagccgcgccggccaccgtgatgttctcgtgggagcaggagctgggcgtgcccaagcagaagatggcttctgacgacgacatgcccgagagccccaggaaggcgccgccgccgccggcgcggcggctgtcggtgccgccgcctccggggcggatgctgatggcggggagcaagagcttctccaaggcccgggccgtccggccggaggacgacccgttcttggcggcgtacctggcctgcaccaagagcagcaacggcggcggcggtggcgttgcgcgggagagcaaggggcagaggcggtccagatgggccgggcttgggcttgggcttgggctcgggctctcttgcaagagctcaaatggagttgtggaggacagcatggtgaagatggccaaactgcctgaggttcatcctagggatgcttag

SEQ ID NO: 73861 - DNA, 642 bp, Oryza sativa
  Clone ID: PAT_MRT4530_74100C.1
atggtggcggtgtcggcggccagggtcggcatcggcgggcgaagcggtggtggccccatgatggatctggcctcggcagtggccggggtggtgacggcgggcgaagctgcatccagcgtcggcatcggcgggcggagcggcggctcccgcaatggatccggcgacgtagcggcaatggattctagctctgcttctgcatttactgccttcggaagagtggaggatggtgcttctggttttgctgaagcaatggggaagacttatgccaaattctcatctcagcaggaaaatcaagacgaacatgacgaagttactactcacataagaataccagatattccgaggggtaataggtgttatgttgatgcagcctgggtggatggccatgctggaattggagttttcttccacataccaagcactcataatgcactttttctaaaggctactattttggtagctcgatcatctttgcagggagaattgatggctcttcaaatggcgatggaggtagcaaaatttttggactttgcatgtaccattttcctcaccggcaacgagacgattgcaaacacaaaatatcttagtcaaattcaaacaaatttgaatttgaagatgagccaggagccaggacacgtctga

SEQ ID NO: 73862 - DNA, 1024 bp, Oryza sativa
  Clone ID: PAT_MRT4530_74101C.1
gcgaaaccggtttttaaggatgtcacatgtgaatttctcgctgtaggatggctgcatcccgatagcacccggcctcgccgcccgatctccgggcggggcttcttcaccttgggggacgccacgggggtcctcgacctggacccggacgacgcggacgacacgaggaacctgaagcacccgccccgcgcggcggaggcgtcaccggagttgagatcggtgagcggggcattcttggcggtcttgggcgccgtcccgggggagggggacggggaaggggaggccctcctcctcggcttggacgcggaggaggcgggcgctggcttggacatcctcggcatcatggcggcggtgggtcagggggttggtggcggcggtggcggcggcggcggcgagggcattggggggatttggtttggtttggagaggagaggagagaatcgaggagatagccgttggaggaggaggattaggaagagaagaattgggggggggggggagagaaaaggggagagaaggtagcgtatagggagaggggtgggccggtgatcgtggcgatcgagttcttgccgaagctggcgtcctgcttccggccgccgtcgtcgtcgtcgtcgtcgttgtcggcggcggcggcgaggcgaggacggcgccaggaggcggcggctcgccgtcgcccagacaaggcggagaagaggcggtgggtggacgagcaggtggggcttcacctggcggcgagggtttgggacggctacggctacggcgccggctacggcaagggcggcgccgtcgacgtgagccgctacggcgacatcggcctggaggcggcgctgggctacgagttcgagcggaggtggtggttcgccgagatggcgcgcctgctcgccttggtcgacgaggacgacgcggcggcggcggcggcaggcaacagcggcgacaacacgccggcggcgaagggtgtggccgggccggcgagtcaggagggagaggaggagacggactggcgacaccggtggggagggggagtggg

SEQ ID NO: 73863 - DNA, 332 bp, Oryza sativa
  Clone ID: PAT_MRT4530_74102C.1
ggttcataataaattttttttttcttgtttcaaggcgaaggttaaagtgaggggggcaaccccacacatggggagaaaaaacttttttttcgggggaaaaaaaaaaattttgaaacccagggtccaggggggagggaaaaataattttcccaccggcaccccttggggggctaaaatttttcaaaacaaaaaattccccgaaaaaaaaaaaaagggttattgccaaaaaaaaaaaacattcgggggaggaataataaggaggttactcggccttttgaaaaacccactcctccttttgttggggccgcccaaagaagtaaaaaagagggccc

SEQ ID NO: 73864 - DNA, 509 bp, Oryza sativa
  Clone ID: PAT_MRT4530_74103C.1
gctcgatagaacaagatccgttggttgccctcgttttgaggctgtcctacaacgtcgccaccgccggaccttgccaccacaaggcaagactgagtagaggtcagcaacttcgcaggatggctaggtgatgacctatgtctcagagactccgccaccgtaatgtgcagcaacgacctagatgatgctgctcccggagacgatgatgtcggcgacatgcaagtattagatcatagatcgttatcactcgacgcgctgcgcagcggaagaaggcgctaagaagtcgaaggaattctcgcgaagtagtgcgcgtcgatgtagaggaagtagtcgatggcaccggctcgaccttctcctcctcgtgtactcttctcgcggtactcccatcgtgatgcgatccctccgctggtcacacctctcacgaatatatagaatccatcactcgggcctccaaggcccgtaggactcctattcggatccctatctgaattaagctcatattggatctccat

SEQ ID NO: 73865 - DNA, 1567 bp, Oryza sativa
  unsure (1)..(1567): unsure at all n locations
  Clone ID: PAT_MRT4530_74104C.1
cggaattcccgggtcgacccacgcgtccgtcataatgtcagctttgaaataggaattgatttggattgtgtgtatatgtggtgagaatggaattctgtattagattgatcgtcaaacttgaatttgcatattgatgctttgtaatggcaaggtcaattttctcatataaatagtaattaattctggattttgattgtgtgtatacgtggtgagaatagaaatctgtattagattgatcgtcaaacttgaatatgcatattgatgctttgaaatggcaaggtcaattttctcatgtaaatagtaattaaccgctctagattttttaactatattgtcatgttacttcaatcatatgtgaatagaacatcccattaattagtggctttattgcattcaaaattggtcaggacctgtcactcctttccatcttgcatgctcaacatcttagtatgttatatgccacctgtcactcctttccatcttgcatgctcaacatcttagtatggttatatgctgtctgtaggtgttacatgttatatgactgcaaatcttttagctactgctcatgttttgngggaactgaagattaggttcgtaattttagaagctggtccgggagagaaaaaaaaacggaagtcagaaagggggggaattttgctgcggtttcttcttcttcttcctcctcctcgcgctcccccgattcgaagcgtgaagagaggaacggcgcttgcgagaggagagagatggcccgtaccaagcagaccgctcgtaagtccacaggaggaaaggctcccaggaagcagcttgccaccaagggctgctcgtaagtctgctcccaccactggaggagttaagaagccccaccgttaccgccctggaactgttgccctccgtgagattcgcaagtaccagaagagtactgagcttttgatcaggaagctgcccttccagaggcttgttagggaaattgcacaggacttcaagaccgatctgcgtttccagagccatgctgtccttgccctccaggaggctgcggaggcataccttgttggtctcttcgaggacaccaacctgtgcgccattcatgccaagcgtgtgaccatcatgcctaaggacattcagctggctaggaggattcgtggtgagagggcttaaattcccctcggcgattcctttgacaaatgaagcatgcgtcgtagtgttagtagtgggttttaatcttttgcttataagaacaatctgagtagggtgtattttgtggaacaatatgtttctcatgatggtgctgtattcgtcttattggtggatctgtcaaaaatactcagcatattgtcagtgtgtctggtgactcttattttgttagtctgattcgtttgcgtcttattctagcggtgctgcctctttggcactgtgcatggctagatacaattacattgtaattcacctgtctctaatccgtgttaatgtaagtgttccgttgctgtccgtgtaaaaaaaaaaaaaaaaaaaaaaaaaaaaaaaaacactgtaaaaaaaacctgcaaaaaaaaaaaaaaaaaaaaaaaaa

SEQ ID NO: 73866 - DNA, 525 bp, Oryza sativa
  Clone ID: PAT_MRT4530_74105C.1
atgaggttccacggcgtgcaggtggatctcgtgtacgccggcgtgtgcctcccgtggtgcccgacaacctggaccacagcgcgaccggtcgatgctccgtggccttgacgaccacgccacggcgcgcagcctcaacggcgtccgcgtggccgacgagatcctgcggcttgtctcgggcaccgccgcgttccgcaccatgctgtggtgcgtgaagcactgggctaaggcgcgggggtcgtctactccaacgtcgcgggcttcctcggtggcgtcggctcggccatcctcgtggcgcgcgtgtgccagttctaccccaacgcctccccagcatgctgctcccgcgcttcttccgcgtcttcgcgcggtggaagtggcccagcccggtgatgctgtgcgccattgagcacgacgacggcgagctcggccttaaacgccaccctgcgcgtcatcaccgagcagcttgccgtcggcaacgccatctgccaagagatcatcaaggccggcgccatgtgggtggtgattagt

SEQ ID NO: 73867 - DNA, 787 bp, Oryza sativa
  unsure (1)..(787): unsure at all n locations
  Clone ID: PAT_MRT4530_74106C.1
atggcccgtaccaagcagaccgctcgtaagtccacaggaggaaaggctcccaggaagcagcttgccaccaagagtgatttcgacagatggtcttacatcaccatctctgtgcaggctgctcgtaagtctgctcccaccactggaggagttaagaagccccaccgttaccgccctggaactgttgccctccgtgagattcgcaagtaccagaagagtactgagcttttgatcaggaagctgcccttccagaggcttgttagggaaattgcacaggacttcaagaccgatctgcgtttccagagccatgctgtccttgccctccaggaggctgcggaggcataccttgttggtctcttcgaggacaccaacctgtgcgccattcatgccaagcgtgtgaccatcatgcctaaggacattcagctggctaggaggattccgtggtgagagggcttaaattccccctcggcgattccctttgacaaatgaaagcatgcgccgtagtgttagtagtgggttttaatcttttgcttataagaacaatctgagtagggtgtattttgtggaacaatatgtttctcatgatggtgctgtattcgtcttattggtggatctgtcaaaaatactcagcatattgtcagtgtgtctggtgactcttattttgttagtctganncgtttgcgtcttantctagcggtgctgcctctttggcactgtgcatggctagatacaattacattgtaattcacctgtctctaatccgtgttaatgtaagtgttccgttgctgtc

SEQ ID NO: 73868 - DNA, 371 bp, Oryza sativa
  unsure (1)..(371): unsure at all n locations
  Clone ID: PAT_MRT4530_74107C.1
ctcgaatcgaatccaccacacggtaccctcctctctcctcctccgaccaccatggccatggccacgcaagcctccgncgccaagtgccacctcctcgncgcctgggcaccggcgaanngnctcatccaccctctccatgcccacctcgagggcacccacctccctcagagcggcggcgnaggatcagcccgccgcggcgcgacggaggagaagaagccagncccgcgggttcgtnccgccgagttggaccccaacacgccgtcccgatcttcgcgggagacgnggggactctccggaagcgaagttgaggagtctacgtatacatggacgtggccaaggagaagtttcgaatnccaaggcgggggcattat

SEQ ID NO: 73869 - DNA, 591 bp, Oryza sativa
  Clone ID: PAT_MRT4530_74108C.1
atgaccggcggtgaagatgataaggccaatcaacagtatcagaatcatgcagccatggaagtgaagaatccagtcggtagcagatgtagacagcttgtgttgaagatgatgacgcctattagcggtggcggcgacgcggccagccgtgaaggcgatagcaccagttggcgtcatacaaggcggccggtcagtgatgatgtggacgtccaacaacggcggcataatagaccagccttgcaggcggagacaccagtcggcggcggtgaaggcgagccggtcagtgaagacgtagacgcccaacaacggtggcataataggccagccgtgcaggcgaagacagcagtcggcagcggtaaaggcaagccggtcggtgaaggcatagatgcccaacaacggcggcataataggccagccgtgcaggcggtgacaccagtcggcggcggcgaagacaagccggtcggtgaagacgtagatgcccaacaacggcggcataataggccaaccgtgcaggcgaagacaccagtcggcggcggtgaaggcaagccggtcggtgaagacgtagatgcccaatacggcggcataataggctag

SEQ ID NO: 73870 - DNA, 1327 bp, Oryza sativa
  Clone ID: PAT_MRT4530_74109C.1
atggagtccggccagtctggtgacggggctagccacggccacacgagtacggtggtggagactgccaaggaggaagcgctcgccggcggctacgatgaggaggaggaggactgcacaccgctacctaatgggctcatatgctcgcggcagaattgggaaacgatgtacggcaaattcggtgccttcgaggacgagacggatgcttctccaatgaggaacacggataggccagtgccaccatattatctgccaattagcatgatgcaattcttctcagtgaaggtgatcgagatcatgggaggtctccaatggccactccacgtctatggtatcgttgctacgcgtgactcacaagataacaagaggaacttcttgtttcgttgtgatagagagcactgccagacccttgcctcaccacaggattcatgtttgagacttacacgtcctagtcgagctattgtaatagtgaaccctgtagttgttgaggttgacttgaaagtgaagggcagcagaggacccccatctgaagacaaggttttaagcgagcatgcttttgttcacaaccacactggtcataggattaaacctggctttcctcatagacagctggaatcaacagaggacagcacgatggagtttgtgtttgcacatctgcagagtgcagtggaggccaccatcacggttggagtcgttgaaggatcgcctgatttcagggctcgttttactgctcgaactgctgggattgatgaggatgtgttgcttcttgactttcaggatgggcctaaggtggtggtcgatgatgatgggttcgtcgtgctccggcgacgtgttgtttctgttgaagggacagggaagctgattctccggatggaggctacagatcacggtggcgatgacacggctgttgttaaggaagaaatcttctgtgctagaaagacatcaaggagccaaagttacttcatgcttgggttttgtaagctgtcgatcatcatcgcctggtcgttacttccatagatgtagcgccagtttaagtccttgcgtaattgtgtgtattgtgtactagtagtactgctttgactaagccagattggtgtgactctgggttcttactaaagagcatctcccaaagagccaatccggtgaagaaaaagataggagtcgatattcatctgatactatcttggtaaagaaaaagataggaataggagactatgcattcattatagccatttaatgctaagacccaatactcattcttattataaaaagacctgctagataaactccatagtaatcccttttggtctaaaaaaaaaaaaaaaaaaaa

SEQ ID NO: 73871 - DNA, 883 bp, Oryza sativa
  Clone ID: PAT_MRT4530_7410C.1
ttctcggctgaacaggggaggcggcgagcagagcatgggagaggaggggatcctgcagggagggagaagttatctggcaatttcagggtgttttgagttaaaggaagttaaaggaaatttgatagtgatagtgttgcaatttgggttttatcaaatcagctatggactcagtggtgttggagtgtggcgacatctccgcttcccaggaagaactccttgcccactcctcattcctcaatggtggtgatgatggtgaggtcttcagcacacctcccacaactcaagaggacgccatcaccatgtgcaccctccccttcacccagtcccagtccccagcaccagcaccattgccatcaccagcagccgtgtcgcgcaccacccctggatgcagctcctcagaggacaaccgagacgatgagatgagcgatattgtcaagcagcggcgcaggcctagggtttgcacaagaaaggtgaggtggggtgccaagatcaggaccccaaccccaagcccagatcgcaccacctctgaagtggagaacaaggatggtgatcctctgtacaaggcagttctcatgattcccacaagggatagcactcctgccattcctatggacctgatcgcgcttgctcgccagcgaggcctcttctagcagatggaccttgctatcagttgtttttaaactattgaactgaactctggaggtcaggtcactatctccttcccagtttacctttgctttggagggctcaacttgtcaaatcccaaccgaaggcactgtttaactaatttagtgaggtggttagtatatctggtttttaccactgtggtgttcagaagttgtagttgcctggacaagcaggtttactcgggttattcaatgat

SEQ ID NO: 73872 - DNA, 374 bp, Oryza sativa
  Clone ID: PAT_MRT4530_74110C.1
tctattccctaaataaagaggatgtgtggtgtagtatttaatttaataagaggtggactacacacaaacattcgatctcctatagtctgttcctactactcttacttatcacactgcccgatccaactaagaagctccaagtcaattctgatgacatcactaatcatttagttgatcccccgaaggtagaggagaatattggtggtgtttcccatagcctgtccactgactctatggtttttcatatggaggctgattcaatctccaggaaaaccctcaagaacctcaacgaaaaattttagttccaggcttatgtgttcagactcattgacatcatcattaacttactttacagtaacaaggacattttcctt

SEQ ID NO: 73873 - DNA, 180 bp, Oryza sativa
  Clone ID: PAT_MRT4530_74111C.1
ggaaaagcccatatgagactatgatgtaccatcaaaaaactcagttgtttctgcaggggaagagagaaaatataaaaaaggggaaaggaaaaaaagtaataaaagaatggaagatgattttcgccatggtgcgggggaatggctgtggtgtttgattggcctctctgggtgccactggct

SEQ ID NO: 73874 - DNA, 742 bp, Oryza sativa
  Clone ID: PAT_MRT4530_74112C.1
cccacgcgtccgtccactcccgcgcgtctcctcttcccgcctcttcttccccacgctgcgattcccgagctgaccggccggcggcgacatgttgggcgagctcatctccaaggtcctactggtgctgttcgggtacgccatgccggcgttcgagtgcttcaagacgctggagacgcgacccgacgacgcgcacatgctccgcttctggtgccagtactggatcatagtgtccatggtgatagcttgtgagagcttcgtctcatggatgccaatgtatggagaaattaagctagctttctttgtttatctgtggtatcccaaaacgaagggcagtgatgtggtgtatgactccttcattcggcctacagtgatgcaatacgaaccaaatattgagcagaggcttgagcatcttagagctaactctggccagctgatagcattctacatcaagaacttcgctgacaaagggacagctttcttcatggacttcctgcgctatgttgtttctgaaagacctgaagcagcagcaaattcagagccgcagaggagcagttggtcgagttggaaccccttcgccagccgccggcaggagccatctccgccgccgtcggcgccgccgcgggagcgcaggttcagcggcgccgaccccgacgacgagccaccggccattgctgacgttttccgcgcttccctcggcggtggcgccatgaaccggcgaccgcacaacaacaacaacaactaa

SEQ ID NO: 73875 - DNA, 1266 bp, Oryza sativa
  Clone ID: PAT_MRT4530_74113C.1
gaagtggaccttttttgtacattaagtgaacttcatttgaaaatgaagcacatgcatgatgcatgggtctgccactatggtattcaagtttggatttgacacagttatgatcaagcatttgaattaaaatcatagtttttttttttttttttagagaaagaaaaactatgaaagcttgtttcatgaggtgaatgtacaaacacgggttgaaaaacctatttcaactacaaaacattgtgtcggaattgaggcctgatacactgataagggggtgtcaacacatagattaatacagcaacatgaaagctggtcgctggatgctgctttatacccttagctaatgatcagggtcaggatcgccttccaaatcaccagcagaagggtcctgaattgcaggatcctcactatccttatcttctcctgatgctgtagaatctgtcttttgttttttcgcatcgcttgcagtaggggtaccatcatcctctaaatcatcgtttccagggtctgcaggatccgactctttccttggtctcttccattttttggtagacgatgtgccatcatcctcaaaatcttcctcctctctacccctgtgcaggtaggtccacaattttttgtcattgtcatacagtacacaaggatcgcgctcataatgcagacgatcaagagcaccgctgacaacttggttaacagcagcctctttattagattcttcgtggtttagatactgtgaatctttgagaagtgtgcacacatcagctcttgttccagttcttgcaggcaacctggcagcagcatctcttacaagacagagaatagtgacatgaggcgggcgatcaggtaagagcatggggtgtcccctagcttttgctgtaggcttgccacctccccttctcaagggagcaactatagatttctccccatcagcagcagtatagcaaaaggctctatcaggaattgagtacctcaaaaattcttcacgctggaaatacgctcttgcttcctccgagcttggactaattgtgtttagacttttctgggctctaaggtccttgaacctttccttcaaatccaagtttgcaggatctggtgccggaggtggtggaagggatcctatctgcttaagggtttcctgaccacttttcagccagttagcaaatgcgtcaaccaacttcacaagcattttgtgtggtataccccatgcatcaggagaagtttcttcattaggatcaccatctgaagaacccgaacgcgtgcgtgccgaat

SEQ ID NO: 73876 - DNA, 2277 bp, Oryza sativa
  Clone ID: PAT_MRT4530_74114C.1
atgacgcaatctgatgaaccccagtcgaaggcatccgtgtacaagatagaggaacctctaacgatcgagccacactctgaaccatcatgttctgctagctcgattgaggagaaggttcctgagcagccatccgtcgagaatgaagaaattcagactctagatcgtgccgcaattttgttcagggacgatagtgaggcgatcttggatttccacatctttcaaattcaagattttgacatcctaatcgggctacccattgagcagcttctcattgacacaccccgattagacagcctcaaaataacgctgggagggaatggattttcagttccattctcacgggcaaggatcgccttgaccaacactctcctagaaattgagtcaacggaggaggtaatagcagttccccctcacgagtctcccgaggcccttctagaagatgaagtctccgatttcattaaggaagaagcgaaacccggtctggtcggagggtctcatgacataccaccaacaagcccctcacaggcaaggacgcagccctcacccttcgccatggcccctcgtaagctaaacccagcctctgttacaggtccctatcccggtaggatatacgacgacaccaccacctatctgggcgcttcgcttatggacgaagaagagttggcgaagctggtggcctccaacgtgctgttggaaaagcaggcctttgctccaggaaaggccattgtgccgaaacctggcgacaaccggacggtggtgttcgccgtgttttttgaggccggccttcggtttccatgcaacgagttgttgccggagattcttcgccttttccaggtggagcttccccaactgagcctatcggctcttgtcagaatcgccatcttcgactgggcgtgccggacctctaggttcgaaccaagcaccgagcttttcggcgccattttttacgccaccgtgaattcgaagacagtggtcactccggctgggacgaagaaaatagcgttcaggagtgtgaactttaatgttcgccccgagtgctccgatctttggccggtgaacgccgctatgtcgaagtgggattgccagtggatgtcaaagtggttctaccactccatccccttcgaggctggatccgacgcggcgaaggccctccgatggcggcgcagggcgattgcgccaagcaggaaacccaaggtcgctgtcgatggcgccatggaagcccggtttgcccttcttcgcaaggtctgctctcgccttagctgtcgcgacctagtggaggaattctgcatgcttcggattttccctctctcccagtcgtggcaggtcgagatgaaccaggacgaggaggtcgacggcttgccaaagcttgttatgcctgagggggcgaacatgctgactcttgctcaggccgatactgaagcccgtaggatgatcgacgatgtgtcggtcactgagtacagccaactactcacgcggcaggcggctggccgggcgaatcgggtgtatgatggcgatcgtccaccccgggcgaaacccttcaaggccgatggcaatgaggggatgtccaggaagcgtatgcgtgggcaggtgaagctggcccctcggaagcgaagggcccccacctcctccgactttgatgccgatgatgaagataacatcgaggaccatgacggcgaagaggaaggggaggacgaaggggaggcggaagttgcggctgaaaaggctgcggacgaggtggtcgacaaccgcaccgagactcatggctacaccactcaaaacatcagcctcagaattcttgcggcccattgttcgatagagcgaaccatgcgggctcgtcttgatggattgaagaaccgtcttcgaggaaaggatgacgaactgggccgcaagagcttggagatggagggcctcgctaacaccctcaaagaaacgaaggctgaaaataagcggctccaagccgagctggagaaggggagcgaggcgaacgccgagatcgaacgactcaaggctgagctccaaaaggaaaaggatcaatccgccgccttggctgagtactataaccttactgagccgaagatggaggctcttcgccagaaggccctaaaggcggaggtgagcgctgaaaaagaggcggaacggttcgcgcaagagatggcgaaagccaccgtgtctgccaaaaccgcgtgccgtacgcttcgccttgccctcactgatatgggggcgagggtacgaggagtccctggcgaagatgcctctgcttttgacttctcggagtga

SEQ ID NO: 73877 - DNA, 283 bp, Oryza sativa
  Clone ID: PAT_MRT4530_74115C.1
aaggcgctcggcgtcagcctcgtcctcccctccagcttccagtgcccatcataaatcatctcaattatatatgatcactaattaataattaatcacctactgcatctcatctctgtatgcatgcatggattaattaagctatcaaattacatattacctgcataattaaatagtgacatgtagcatatatacatgagctctgacttgtgtcatggaggcatgcatggagccttggattgtgcatttaattgatgtataataatatgtgtgacatatatatata

SEQ ID NO: 73878 - DNA, 156 bp, Oryza sativa
  Clone ID: PAT_MRT4530_74116C.1
atgggagccaaattcttgtctggtgacaatctgtccaagctcgtccaagtgttacggcgacatgaaactgtactacaaaaacaaatggtagttgattgctctcataccatccaaccaccattggatatggaaatcgagcttccaggattaaagtga

SEQ ID NO: 73879 - DNA, 2670 bp, Oryza sativa
  Clone ID: PAT_MRT4530_74117C.1
atggagcacaaacctatctatcaattatcagctcctaggggtgaattttatgagccacctccttcaccgaagccaattcttacatctggctatgaaattcgtcctaaaattataaacatgattagggtgaaatccttctctggcttagatcaagagaatccctaccatcatctgcgagagtttgaggaattgtgttcatgcctcatgattcaagacatgacacaagaaatcatacggtacatatcctcagttttcggcagattgaaaaagaatcaatcaatagcttgggccagatttactttattagtacaatctacgcctaacttgtctatacccgattatgtgttgttacaacattttcatacaggcttagataaggagtctgcattccatcttaacatcactgctggagagtcgttttttcataacaccccatctgaaggcacggaaatcctagatcgaatcttggaaaatacttcctttgttgagaaatattctgaacccctccaaaaggcatctgtgtcaagtcgtgaggacccatctttagtcgaacctgagtctgacctttccatatctgtagattcaattaaagaatcctctcccaagccatcaacaccggagagcaaagaaattcgaactccaggatgtgctcctgacttcagggacgattttcatgaagattatggaaacaccctgaattatttcaacaaaaagaagccacatattcttactccacctcccgatccaatcgaagatgaatatcttggagtaaccgttggggagttaaccacaatcatgagcaacgaatggttgaaagagaaggagttctcttctaaaatacaaccattgctcacatcatggatgaacaagatgatatcaagatcaagtcctccaagaataaggttgatctgcaccggcaagatcaacaacccacagagaggattgagcaagggaataagagatcatcaagttcttcactttcgacgagatatgacgacttctccacgcaatgcatataagggagttcagaacattcaccatgaggagaagagcaatatgctcgagatgtcatctccatcactcacgaaggaagaagagaagactgatgcacctatattatctaaagagggcataaaaggtaaattaaatggtgctgatattactcaaggtgagtgtgcttctgatgagtcacatttgtccactatccatgctaatatagagcaaatttgggtggaaactacttctgatttgcatttgtcacaagttgatttacttgctgttccttgtgataaagaagagttgtgtgataatgcttcacttatatccctaccacaactagtgaatgaacatgctatttctagtgtttcattgtgtgctgattttaagcatgttgttcacattgctaatgatgttgaggaatcttcgttttgggcccatgagtacttgatggaaaggtctcggagtcctctttccaacggatctagccgcatcatcaaactttgtctcagttggccacaatcaaagaaacaaggtgctgcgtcacctgtcatgggcctatgggcatgtaacttcgtctggggccccggcccaagtggggccctgttgatgaataaggttgatctgcaccggcaagatcaacaacccacggagagttatcatcaactcaccgacagatcgggccaacaacagcctcgagtgtctcgagtggagctcagggttcatcaaacggccggtgctaatctgatctctaaatctctcgctttctcctatttgggcaatggagtgataatactgacctacaaattcttcaaacatcatgttgggcagttgattgaaggatttgcgattataaaagatgttcttgttcatcacaataacaaagaggttgtcatggatttccacgcttttgaaatccaagacattgacgtcctaatcgggcatccaattaagaaacttctcatcgacaccatatatgccttgaccgatgcccttcctgaagatgaatttgcggaggaagtgacggttgttcttccatttgagccccctgaatctcttcttgaatatgatgtccccgatttcattcaagaggaagaatcgggcgaaacctttgaattgtcgtccttagaaccaccaccaccacggcctatgatcgaaataaaacatcttcctcagggccttcgctatgcttttctacatggcaacaaggaagctcctgtcatcataagtgacaagctttctgaggatgaaaccattcgtcttgtaactgtgttagagaaacatcactctatcatgagctgctctcttcaagatctcaagggcattagtcccgctctctgcacccattgcatacctattgagcttgagagctcactgtcaagggaaccccaaagatggctaaacaatgcgatgagagaagttatcaagaaagaggtcttgaaactcttgtgtgcctggattatttatcccatacaatgtagtgagtggatgagttttaacaaaatgatagagactcagctggcgcagctagctgctctagttcctgctaaggaagcgggacggattctagggcaacccaaaccgtccctagaaaatgttaaggcgatcaccacgaggggaggaaaatccactcgggatgtcacgcccggaaaaataccttttcccaaacgctag

SEQ ID NO: 73880 - DNA, 372 bp, Oryza sativa
  Clone ID: PAT_MRT4530_74118C.1
tctatctgaacacagcaccaccccttctgctgcatctcccacctccctctgaattgtgggcctgaggcgatggcggcgctcgccccgtccaagatgctcggcacccggctcaacttcgccggctcctcccgctacgccaccgcggcaccgaccaccggagcgcagaagatcgactccctcttcagcaagaaggccgtcctgtagcccaagcccaccgtcgagacctcctcgagccccggcatcagggattagctcgtgaagaagttcgagccttccaggaagatgaacctgccggagggtatcctggacctgtcagaggtgccggactactctcacggcgagggccccggagactacggctacgaccctttt

SEQ ID NO: 73881 - DNA, 255 bp, Oryza sativa
  Clone ID: PAT_MRT4530_74119C.1
atgaggaacaagggagtgattctttctttgtttagcaaggcaccaaagaattctgattctagatcagctaagccaggttcacagtgctcttcctgtcgttgtgaagcagcacttccagtaatggtagtgctcagcgcctctgatttttgcttcaaaaattgtaacttgcacaaggcatcccgagtcctgatgatcccagttttgtatcaactgctgcaagatgaagcaagaacttataaaactggatatatttga

SEQ ID NO: 73882 - DNA, 221 bp, Oryza sativa
  Clone ID: PAT_MRT4530_7411C.1
gttacactccgtagctgtttctttcattgagatgcagctgctatcacatacacaaatgacaagacaccacatgctgtaaaggtgaaggctcctgggatcaaaacaccgtaacaaacagcactctaatcacttaacaatcacatgatgactacttgagcttgacctcacataaaggcatgtaatccaacgcgccacatccatgatcctaacctcagttgatc

SEQ ID NO: 73883 - DNA, 288 bp, Oryza sativa
  Clone ID: PAT_MRT4530_74120C.1
taactaatgaggaagttggagtaactgatgcaacagaggagattaactccaggtgaggaatgatcacatataatcagtgaactccatttattgttctagatgtgactgagccattatttgtgggcttccctcttgacttggagctgcaaccgaaaacaattgtggccaggaatgcatgagctgaagctgtaaactgtaccgcatttgatgatcctgacgtgttgaaaagaaggatgagagcctccaacccatgttacaccaatgctgtttgcaaggctttctggttgt

SEQ ID NO: 73884 - DNA, 657 bp, Oryza sativa
  unsure (1)..(657): unsure at all n locations
  Clone ID: PAT_MRT4530_74121C.1
ctctcccagtatatacncttctagncatatgattttctcggtgttgctgtttatctttcgcgatggcggtcactgctcgtcttgctgctgttgtgtggctgcactctcctctagatgtgcgggtctcaattctttttctgacgatagcagtttggactgtatacatgtcattttgctggtttcttttgctttaagggaatcagggcaggacagaaggaacactgtgaccatgtcccccatgtacgcatcaagctcccaagtgataatctgaatgcctgctcagatcctaggcgccggcggaatcaaccttgacccatcaatgatggtcatcccccattgacgatcacatggtccatagagaccatggtgtctgatttttgacggtttaagctttgtctacactttttctttctcagcatttgcttctgatggtttatactttagagttgggtattggatgttcattctctagatgaattggtcatgtacttgaaattttgcacatttggtactgaatctgcactcgaagtgggtttcctaatttggttaggtacattgtataagctagattcgcattttgtacaattgattaaagaatatggtttgtctaaaaaaaaaaaaaaaaaaatactcgagtatagttctctcctcgtgccg

SEQ ID NO: 73885 - DNA, 313 bp, Oryza sativa
  Clone ID: PAT_MRT4530_74122C.1
aaaaaagaatttccattgggcaaaaaaatttgggtttttcacattttttggaactggaaaaaaaacacaatttggcgggcctttttaaatgttccccaacaaaaagtttttttttttgtttggaaaatccttccatgggttttttgggaaaaaatgggattttgtcgggcggagggggttttttcaatattgccgttcattttcctaaagggaaagggccccggaaactttaataaaatttttcccctaaactgaaaatttcggggcccgttaaaagaaagtttttggggtttttttccaaaaacattttttt

SEQ ID NO: 73886 - DNA, 3468 bp, Oryza sativa
  Clone ID: PAT_MRT4530_74123C.1
tcgctactgcgctgagggctgaaggcaatggcgccgccgccgccgccggtggcgatggcggtggcagcagctgacgaggaacccgacgagatcctggaggtggggtgcgcggggtgcggggagacgctggaggtggagcgggggctgacggagttcgtctgcccggactgcgccacgccgcagtcgctcccgccggatctcatgccggccccgccgccgccgcggcggagggcgctgcccctcccccggggtgccgcggacgcgcgcggggcgcggctgccctgcggctcctgcggcgagctcctgagcgtccccgtcgggctgtcgcgctgcgcctgcccgctctgcggcgccgagctcgccgtcaaacgggggcttctccggatgtatttctggtcgcctccaacggcggctccagggtttgcgcagggcccagatgcatcggagctcgcgcgatgatttcccggtgccccctatccagattatgaagttctagaatctacgacacactccgaatctgcaaaatcggagattgacgacacgggtgcttttgatccacgttgatggatgcctcaaccacacagtgttagtattattcacgtcgttgcatgctgatgcgcaccaggtgtccatgaggatctcagagatgctgcaagtgagtcatctaattagtaggttggtaacgcatgttcgcatctttctttggttgttcctgagcgtgttaggcaactttactgtaaagtattcgtgcttgaggtccgaagtgtgctttcaaacaattgcactcatgcagatcgcatgcatctagtctgcgagcaacgatccgttgacgtatgtgtgggtgactccgcggctgcggcgcaagaacgtcattgccagttcccatatggtaatttcatactttatatgtagacaaaaaaaaacaaacgaagaattatgtgctctgttaaacccgaaactgttgggagtgtagataagaggcgtattgaacacgataatcagatcacacagaagcggcaaaagcatactgctcatgcaattcgtgcagagcacactcaggtagggtgtctagatggtgcgattcatgcagaggaggcgcaaccggaacctgttgaccaagcaaatcatggagaagagggatgcattcaggttatagataaaacaactgcaaggggtgacagttggaaatctggatgctcagttagacataacactgttagtgcagggaagagaaaaacatcgaccgccgatcaggtcacaaagcagacacaaacaaatcaatcttatgctaatgatgcagaacatgcacagatagagcatccagatcaggaaattcacgtggattttgatcctcagagtaagcatattggaagaaaaggcaaaccaaaaactggaactggagttgactctaatttgaccctaaagaaccaggatctgctagtctctccgaatcagcttagccatataaatcagaaacacatgccccccaatcatgaggctcagaagaagcatattaatgtcgaaaattgcaagcagccttctagtcaagcccgggagaagaacaggaaggggctgatggcttcttcaaattcaagtcttcatcttaggcgtagtaaacgtttggccaaagattcagttgctgttgtagaaaatgaaccagttgaaaatgaccctgttgacctgcaggtttcttctccgaattgccaggtgtcggcggttgctatgtctagtgaaccaatagaacaggagcctattctgcatcagtctccttctccaaattgtgaagttttagtatctacgacagacgccgaatctgtagaaagtgagcatcacgagcattgtgctttttctccacatcaaagcatgtctgaccctccagacattgacagaatcattgctggtctttgccctagcacatcctctgttcatgagaagcctcgggaaatatctagtgaaccagatgaccctgatttagccacaactccttcaaatcctgatatgtctgatcctgagcgttttgctcaacattactgtcaggtattccctctagaggtcagaagggccctttcaaagaaaagatctaattcattacttaatcatctagtctccgaggaatgttccgatgaggaatttgtgcatgattttcctgatgcggagcaagcacgtgattgtcagaagccatctggccagaatattggtagcaagagaaagaaaggacacaggcgtggccctaccctttgtgtcaaagtgtggaccttgcctgaaggtgtgcggcttccagtatccttgaacaattcaggttttcctattggaaaaaatgctgccatgtttggtaactttctgggcacactagcgcgtgatggaatattggcacctcttacatataaaaaatggaaaagtataccaaaggagaacaaggatgtaatgtggcatattattaagcttaaattttatgttgctccatcttccgagtccttgctactgaaatgcataagaacaaagtggaggaattggaggtgtaacttaaaacgaaaacactatgattctcatataactgaagaggaacgtcttgctgattgtgatcctcgtgtcctaaaagaacagtggcgattccttgttgcattttggaataccgaagaggcacaggctgcaagtgctagatgcaaagcttctcgagcaaaatcaacctatatcagctctacaggatcgaagagctttgcacggatacttgacgaagagtcatgttctcgtgacaaggctcgtaagcgcagtgatgatgtcacagccatgggtgaaaagaggaggggtaggatgcataaccatgaacctggggccagccctagtggcctgaaggaaaaggcagcccttaaggcatccttcaaggaagctgtggatgcaaaagagattgctgaaaatgaggctgccacactgaggaagaagatgatggtaatggaggaaagtcagaaaaagctgcaggaggatttggctaacatgaggaatacagtgagcgccatgcagaaaatgatgtcaaatggtggtttgcctgatggattgatgggtgcatcaacggcgcctccaagttttccacaggttgaacctggttggtggatgctcgagtacacagtggaagtattactcacatcctagattgcagaaatgacaaagggattaaggaaaataaatatgcaagtcttaaatgaaaggatccggttggaatgaaaaagtgggggcagctttctttggtccttctttgagttgttaggagagtaattgggagagtaatgtggttggtcttccactgtgttccatttcacttccaatcttgcagatggcatgtttgaaattcgaaaacaacaatatgtgttcgtgtgtgttggtgtcaccgtgtcagcatcttcaaaacaacagtcccttttcttatatcgtaatttcaaactgtatatgtaggtcaacctttaaaagattata

SEQ ID NO: 73887 - DNA, 606 bp, Oryza sativa
  Clone ID: PAT_MRT4530_74124C.1
ggggactacatatacagtttgaaattacgatataagaaaagggactgttgttttgaagatgctgacacggtgacaccaacacacacgaacacatattgttgttttcaaatttcaaacatgccatctgcaagattggaagtgaaatggaacacagtggaagaccaaccacattactctcccaattactctcctaacaactcaaagaaggaccaaagaaagctgctatcatgcgtgaccaaccaactaaatggaaaacgcagatgcagcatatctgagatccttgcgacgcctgcacgatcagcatgctaggatgtgagtaatacttccactgtgtactcgagcatccaccaaccaggttcaacccgtgaggcaatcatcgagtttgttggctagaagagttagggttgtacagcacagagtaatcaatatagggggactgcaaatcatcacgagagctcgatgcattttggccctgtggaaaacttggaggcgccgttgatgcacccatcaatccatcaggcaaaccaccatttgacatcattttctgcatggcgctcactgtattcctcatgttagccaaatcctcctgcagctttttctgacttt

SEQ ID NO: 73888 - DNA, 321 bp, Oryza sativa
  Clone ID: PAT_MRT4530_74125C.1
atggagcagtttgaggctttgagctcaacgggctcaacggggaagtgcctcttgcagaagagctgcagcgattcagtgaccctggaaaaagctaaacagtggagagaggagtcgctggccgttgggcttttgtcttctgttcgcgcacacacgctgaagtgcagttcagacttcagaccgggaaaaggcttccgccatcagctcatcaaggaactgatggagagctggacggtggcacgtcatgtgatggacataagtcgttggttggcagcggtgaactcactagttgcagctgaaaagacgagcgaggagagcatttga

SEQ ID NO: 73889 - DNA, 1215 bp, Oryza sativa
  Clone ID: PAT_MRT4530_74126C.1
tcacatgagcgggaatgacggccggatggcgatgccgcagagcccctccggcttgccggcgacgtccttcttcatcttgatgtatccctggtcgccccagttcttcccccacgagttcttgatgatccagtacttgtcgccgccggcggcgccgccgtccgccgccgcctcctcctggccgtagccgacgacggtgacgccgtggttgagccgcgtcccgcacggcccgtcgtacacgcccttcctgtagtgctggaagttgtcgccgccggcctcgatggacacggccacgggctgcgccgccgcggcgttcgccagcgacgcctcgctccgggtggccacgcggcggagcccggcgatggtggcggcgtggtggcccagcttggcgcggtcgcaggcggcggaggcggcggccgtgtaggggtagtcgtcgcgggtggtgatgccgccgttggcggtgatccactccagcgcccggtagctgacgccgccgtcgcagccgctgtcgagcgtgtcgcagtcgaccagctcctgctccgacagtgacaccagcttccccttcttgatcttctgtatcccctccaccaccgccaccgtcgagaacgcccagcacgatccacatcgcccttggtccttcacctccgtcacggcgccgctcgcccgccagtcaacgctcgccggcgcgccggcggactcgttgaagtacacctccggctgcaggttgtgttcgtccaccggcccggcgcgcgtggtgatgatcgtcgtcgccgcgtcgtcgtcgtcgccgtctgacgaccgcagcggcggcggcgcggtgtacatggcgatgaactcgtcgttggtgaggtcggtgtaggccgtctcgccgagctcgtacgcgagccccgccgccgcgttcgtcgcctcgatgtaccgcacgttgcgcgcgtacacccggagccggcggcgctcctcccccgccgtggcgtacgaccggttgtactccgccttccaccgccggaacctctccaccatcgtcgtcgtcgtcgccggttcgccctcggtgacgcggcgggccgtcgccggcgacgagcaaccgaggaagaagacggctaatatgagcagtaggcatgggagagatcgtttggaacagaaggatgcggccgccatgaggatccaagcttacgtacgcgtgcatgcgacgtcatagctcttctatagtgtcacctaatcatc

SEQ ID NO: 73890 - DNA, 729 bp, Oryza sativa
  Clone ID: PAT_MRT4530_74127C.1
ccccaaaaaaaaacttttactttcgcaagcccggggaagtaaacttgggttcctttaaaacgcgccccccccttttttttttttttttttttttttttttttttttttttttttttttttttttttttttttttttttttttttttttttttttttttttttttttttatccaattatcatattataaaaaataatagtaatgccacctcattttcccctctttacaaatgtaattagcaaatgaacacacgaggggaagaaaaggcgagcaaattaaatgaatggactaatggatcaacattgtcaatcaaatccaaacaaaaaccacatttagacacttaattataacatgaacgataacgaacacatatcaaaccaaatgtcctctcctcccctccacacccacactcacgcaacaccttcatcattcctcccttccttactgtaggtagtaggcgaagaaggacagcatggaggcgccgatcaccgcgccgaccgccgggaaggcggccgagggtggcggcggcgctggtggggggcaggggcgggcgcctcgacggcgagggccacggtggccgaggcagcgacaaggacggcgcaggcaatcttcttcatctccatgatcctgagaagggtacggtcgaggaagcggccgctagagacgaggaagaaaggaagggctttattggcaggataggattggggttaatgttgcccttccctcgtgc

SEQ ID NO: 73891 - DNA, 1641 bp, Oryza sativa
  Clone ID: PAT_MRT4530_74128C.1
atggcgacggtggtttcgtacattacattgacgagaatccccttctacagttcgaccgaggccctcgccggcgccggcgccgccacgcccatctccatccccgaccaccacttcttctccggcgagctcgcctcgggagacgaatccgcagctccagaggcagagaatcgaatgctactaccacccgtgaaaggtacgatccaagaaccatcccctccccggatggatgacgcggaggcgaacatcctcgcgtccctcggccgcgtgcgcctctgcgacctcgccgccgccgacggcctcccgtccgacggctacaagatgtgcgtgtcggccctgatgcagtcgctggcgcagtactcggcggccgtcgtcgagctgcctccggccgacggcgccctgctgaggtcggggctggactccgcacgcctcttcttccaccagcgagggtacggatccggcgaggccggcggcggcggcggtggcggcggctcgggtgatgcccgggagtggtgcaagacgtctggctactatgctgatcctcagatgtggctggaaatgtatgatttcaggcccggcatcacgccggtagagccgaacggtgtggcggaattgccgccgtccgggttgcctgatatgttttcggtgcttgggaaggtttcccgggaggtcttggacgcgattagcttctcgctgaatctgcgtagctccacatttacggagttgcttgacaacatacccttgagaagccaggaggtatcatcttctgttctttcggcatgttgtcattcgaggccgtcgatggaaggagcacagcagcatagcgtcgcttctcaggatgatgaacaattgctcatgttttcggatcaggagaaccagattgacaagactttgcttacgctggttaagtcggataggtcgggcctgtatatcaaagatttgcaagggcgctggattcttgtcgatggggatcttggtccgcttgatattgttgtctatcctggccttgcgctttatcgggaaacagctggctatgtaaacccagctgtgcacaagacggaggtcggcaacttgcaggaatgtatgtttgggcggtgttcgttggtgttcaagctcatgcctaggtcagttgcaaggctgagtggtgaagagatgagggctgctggccatggtgttgatgctcagtttcaggtccccatactagttaatgatttcatgcagacagaacattcagcaaatcaactttttcccaagaacaatgaaccatcaccacatgttgaacaggaagcatcgtataactttgtgatgaagagaaagaaggaaggtagaaaaacaaaggcactccctccttccaaaagacttcgcctagaggcgcagagggtgctcaaggagcgtgtccaggatattgcggataagaaaggcatcaagctgagattttgcagtctcagggactgtgaaagccacataaaatcgttagaccgtccatgtgagaacatcagaactgaaatcggatggccgccaggggttccatttgtccatccacatgaccttccaaacaaagcaaagctcatgtttctggaagcctatgaacccggatggactgcctcccagcaagatttagagttaagttttactgaaccatga

SEQ ID NO: 73892 - DNA, 657 bp, Oryza sativa
  Clone ID: PAT_MRT4530_74129C.1
ctgcgcgcgtgggcccgtcgctgcaacacattctgatgtagtgatagtgaaatggccatccgcagctatatcttctctccttttcctcctgctttcctgtatcgctgcaacagtagcatgtcaacattctgtatcatcatacaatccacagcaaaaggacttcccaaacgagcgactctaccgcgcttaccttgtcatccaacgctgcaagaacaccattactagagaccctaagaacatcacattgacgtggaacggccatgacatctgcggccggacgacctacctcggcttctactgcggaaaaccaaggcaagcaaaggagctcacagtcatggcggttgttctgaacggcttcggtttacgcgcgccaaagctgcaaggtttcgtcgaccagctccctgatctagcccttttccatgctgcctccaatgattttggcggcgacatcccccgtctcgctggccttgagtacatgtacgaactcaatgtcggtgacgatgtaccagctcatacaactagtactaaattgggggcttacgtcagggggggtggtgactttgtgtatccttgtgtaactgctcatataagagttacatttcgctttggagttggcaacggaaaggacggaggtatcctccctacgggtgtcacaga

SEQ ID NO: 73893 - DNA, 303 bp, Oryza sativa
  Clone ID: PAT_MRT4530_7412C.1
atactcgtagatcggatatagagggtattggggtacgctggtacgaagatctatgtaatacgacatcaagcaaacaagaaatagggattatactggttcagaccccttaataggtaatagctctaatccagttggtatgggattatataatggaaaccacatattacaaagggaatagtagaactcgatgataccgacgagactgtagtcgagcaggctgtggtggttgtgttggcgatgagattcgatgccttaggtccccccgggggtcccttttatatcgcgggtcagttgatctccaag

SEQ ID NO: 73894 - DNA, 1162 bp, Oryza sativa
  Clone ID: PAT_MRT4530_74130C.1
cttcctctcacagagcacacacaaaaccctagagtaggaagcgagcgagagagagagagagagagagagagaccacacccatggagcgctcccacctcgccgtcctgctcggcctcctcgccttcgccgccggggtcccggccgcagcggcggccaccgccgtggagggagcgcaggcggccacggcggaggcgtcgtgcgagccctccatcctcgccacccaggtctcgctcttctgcgcgcccgacatgcccaccgcgcagtgctgcgagccggtggtggcctccgtcgacctcggcggcggcgtaccctgcctctgccgcgtcgccgccgagccgcagctcatcatctccggcctcaacgccacccacctcctcacgctgtacgccgcctgcggaggcctccgccctggaggcgctcgcctcgccgccgcctgtgaaggtcccgccccaccggcctccatcgtcactgccccgccgcccccggttgcttttcgccgcaagccgccggcacgcgaggcacctcccccaccgccggcggccgagaagctctccccgccgcttcagcagcacgacgactccgaccacaacaagcgcgtcggcccactcccgagaggctctcctcccccgtatgcccagtccgtcccggtcggccccgccgccgctcccccgccaccacgctccggcgcctcctcgtcgctccaggcgcccctcgccgccaccaccaccatcgttgccatcaccctcatcgccgccgcccagtactgaggacacgccgccgccggcgcccgctccccagagccatgattcgttcgcagtatttttcatcctgttcttttgcttctctctcgggctacccatgtatatgagtttggaagacgatgatttgatctagtagcgcgttaccaagtttgcctagattcgagtagtagctgtggtactatgctgatgtctctttgatcgcgtcgtctctagagcgtccgccgtttttgatcgatcactagcatggcccatgtgagtccagcatgaaaagtggtcgaggagaacattgttgctaagttttttttttgctttctatctccagtagctgaacaagtatgtcaactgaatgctgcaatgaagtgaatggatgcagtcttaaaaaaaaaaaaaaaaaaaaaaaa

SEQ ID NO: 73895 - DNA, 136 bp, Oryza sativa
  Clone ID: PAT_MRT4530_74131C.1
cccgatgcacgctacgaagcttgatgcctcctagtggccgccctccttttttttttggtggttaagagaagttattagtattccccaaccaacaaacccgtccttccaggaagtagaatgggagaactcaactctc

SEQ ID NO: 73896 - DNA, 249 bp, Oryza sativa
  Clone ID: PAT_MRT4530_74132C.1
atggggaggaggtgtgggcataagacggtgatggggacgccgctcggcgcggtgctgtcgtcgcagctgaagaccggattcgctgcgtcgggctcattcggtgccgtgacccgtgatagtcgacgtgttgtgctggagaacgacgtcggccgctgcgcgtgggggcggaagtggctcgcggcttcgagctcgcggcagccgcgcttctttccggcggcatccgcctcgcggttcctaggcccgttctag

SEQ ID NO: 73897 - DNA, 372 bp, Oryza sativa
  Clone ID: PAT_MRT4530_74133C.1
ccggccgggaaatcatcagcaactaatcaaaacccctgagcctgccaattcgttcagattaacccagcatcacatatcccatcgatcgttgagcgctatcacaaaattaagtagctcctataggtggctagcttcggtcgtcgatcaatcggccggcgatcaatggcagtgctcaggaacgtcatcaccggcgttggccggcgtctggtgctcctcgtcctgacgctgttggtgctggcggcgctggatgatcaggcgccgcccatgatcatggcctccgctgccagggttttgctacaacaatatccaccgacttatgggcctccgcgctgttatccgccgtactgtgcaccgcgtcacgctcgccgatga

SEQ ID NO: 73898 - DNA, 304 bp, Oryza sativa
  Clone ID: PAT_MRT4530_74134C.1
gccttcttccgtcgtctagcccgcgcagagcgcgcgcctgctcaccagccagaggcggtgcgcatggccgacgcccgcttgtcgccgtcgcccactcgctggcgccggcaccattgcctggctgggttgcccccgtcgactgctgcgaccagccgccgtagccatcgcctcctcccggcggctagcccgcgcagagtgcacgcctgctcgccggcaggaggagctgcgcctggccgccgcccgcacgtcgtcgcctggccgctgcccgaacgccgaccaatttgacgtcgcctgtgctgcccag

SEQ ID NO: 73899 - DNA, 440 bp, Oryza sativa
  Clone ID: PAT_MRT4530_74135C.1
cccctgcacgccacctcccgccggcagtcgttgctgacgggcagggggagtccaccgccgcagtcgtcgccgatgccgcgcggaagatgaggtcacgagagggagacgacggggaggggcgccggggcaaggccactcaacggccgcgcactcacccacgggcgagtgcgcacaccggcgagagggcatgcgccggcgtcgtcgattttcgcttttccggtgagggggtgaggaggctagggttttcaccggcggctgggagggatggggtttgtccctctgacgtcaccgcccgatcgtctgatcgaaaccctaagattggacggccggcattggctggacagaatctggctcaagtggaggcgcacgtggggctgcttccccggcccaggcccaggttgcagcctggggaggtgggaagtgcccgcacgtgtacataa

SEQ ID NO: 73900 - DNA, 1947 bp, Oryza sativa
  Clone ID: PAT_MRT4530_74136C.1
atggctgacaagacccttcgtgggttcgctgctccctccgcttacaatgtggccattgggccacagagcaacatgggagatgtggatttcgacttgaagtccagcctcgtcacaatggcgcaggctagcccgttctacagcaagcctaacgaggatgccaatgctcatttgcaacagttcctagagatctgtagcactttccaccagaaaagggatgagtacattcctgaagcatgggaacgtctgcaggagtatgtggccgcctgtcctcatcatgggatggacgactggctgatcctgcagaacttctacaacggacttacgcccatgtcccgtgatcacctgaacgcggcagctggaggagctttcttctctaaaacggagatggaattacttgttgccaagctagacctcctcatgaagcgattggacgaccacgacaaacggcctcaaggcaccgtcatggccttggattcacacgttacgtgtgaggtctacggcaacacgggtcactctgggaatgactgcccagaaacccgtgaagaggcgatgaacgtgggcaacaacaacaacgggtaccatccacaaggaggtcaggggtggaaccaaccacgcccatactatcaaggaggtaacaacaacggtaacttctctaacaagccctccttgaaggatctcgtctttgcgcaagctaaaaccactgatgcgttaagcaaaaagctcgctgccaatgacaagatcctcgaaaacattaatctgagctttaataaaatgatagaaacccaactagctcagttgacatcctatgtccctgcaaatgaaaccgggaggattccggggcaacctgactcctccgttgaaaatgttaaggcgatcacgacgaggggagataagtccactcgtgatccgccatatcctaaccctgcagaaactaacgggatagcaagagaagtgccatctagtaactcggctgacaaagaggttcggccagaaaagaccgtactgcaggagtactgcgacacacaattgctgtcgtttcctcaacggggtaggaaaccgtcagtggatgagcaatttgctcgttttgttgaagtaatccagaagatccacatcaacgtgccgttgttggatgctatgcaagtacgaacatatgtccattatcttaaatatatcctcaacaacaagagaccgctcccaacaacagaggtggttaagctgacgaagcagtgcagcaaagtaatactccacaagctcctggaaaagaagaaggatccggggtgtcctacgatcacctgctcgatcggggcacagcaattcgaccaagctttatgtgatcttggagcaagtgtcagcgtcatgccaaaggacgtctttgacaagctcaacttcacggtgttggcaccaacaccgatgcgcctacaactagctgactcgtcagtccgttacctggcagggatagcggaggatgtgcgactcaagatacgggatttcttcatcccggttcacttcgtggtgttggagatggacacaggaaaagagacaccgctcatcttggggcgtccgttccttagcaccgcgggagccaatattgacgtgggaacggggagtatccatttccatatcaacgggaaggaggaaaagtttgagttccagctgaggacggaacaatgctccatggtcagaataaagtacgggccaaacccgcagaatattcaagtggtcgaagtggaaccacccaagacggatagcctggtaaggttcatgcagaatttccttgagaaggaaacaacgatgcccaggaaccgttattggaagaagccggtaaaatcaagtaaccggccaagaggccagagcagacagctcagaggaagccgccttccgcaccaaagccaaagaaggtatggaaggagaagcccaagacgcccgctccatcacctccggagatag

SEQ ID NO: 73901 - DNA, 2409 bp, Oryza sativa
  Clone ID: PAT_MRT4530_74137C.1
atggcgccaagggaccagtcatgtggggacggcggcgaggtggatccggagggtggcatcgaggcgccactcctctcctccggctcctcgttcttccaggacccggcgcacgaggacggcgatggcgacgaggaggcgcgacggcggcggcggaggttcctcctcgccggccgctcccagtccaacaccacctcccaggtggccctcgtcggcgtcggcgtgtgccccatcgagagcctcgactacgagttgatcgagaacgaagtgttcaagcaggactggagggcgcgggggcggggtcacatcctgcgctacgtggcgctcaagtgggccctctgcttcctcgtcggcgtcctctccgccgccgccggattcgtcgccaacctcggcgtcgagaacgtcgccggcgccaagttcgtcgtcacctccaatctcatgctcgccggcagatacgggacagcgtttgcggtgttcctggtttcgaatttcgcccttacgatgttagcaacggtgctgacggtgtatgtggcgccggcggcggccgggtcgggcatccctgaggtgaaggcttacttgaacggggttgatgcccccgacatattttctctaaagaccctggtggtgaagattgtgggttgcattgctgcagtatcatcatcattgcatgtgggaaaagctggtcctctagtacacacaggtgcatgcattgcatctatacttggacaaggtgggtcaagtaaatatcacctgacatgtaaatggctaaggtacttcaagaatgatagggaccgaagggaccttgttacttgtggtgctggtgctggtattgctgctgctttccgggcaccagttggcggagtcctgtttgctcttgaagcagtgtcttcatggtggaggagtgccctactctggcgagcatttttcacaacagcaatggttgctgttgtgcttagggcattgatagacttctgcaaaagtgacaagtgtggcttgtttgggaaaggtggacttataatgtttgatgtgacttcagattacatcacctaccatttggtcgatttaccgccagtaatcactctaggagttcttggtggagtactgggaagcttgcacaactttttcctggacaagcttactttcaggaaagggcaaaagtacaagctgctcctggctgcagtagtcaccatttgtacatcctgttgtctcttcggcttgccatggattgcttcttgcaaaccttgtccaagtgacaccgaagaagcctgtccatccataggaagatctggtaattttaagaagtatcagtgtgcaatgaatgagtacaatgacttagctagcctgttcttcaacaccaacgatgacaccattagaaacctttacagtgctggcactgatgatgaattccatatctcttcaatacttgtcttcttcttcacatcgtatttcctgggcattttcagctatggccttgctttaccatccggcctttttgtgccagttattttgacaggtgcaacttatggccgccttgttggcatgttaattgggtcccaatcaacattagatcatggcctttttgcagttcttggctctgctgcccttctaggaggatcaatgagaatgactgtctcagtttgtgtcgtcatcctagagctgactaataatttacttatgcttcctttggttatgctggtccttctcatatcgaagacagtggcagatgcttttaatgcaaatatttatgatttgcttgttaaattgaaaggatttccttatctcgaaggccatgttgaaccttacatgaggcaattgtctgtcagtgatgttgtaactggtcctctacaggcattcaatggcatagagaaggttggccatatagtgcatgtcttaaggacaactggacataatggttttcctgttgttgatgagccaccattttcagattctcctgtcttatttggtctagttcttagagcccacttgcttgttctgctgagaaagaaagatttcattcctaactgctcagcttcagcactggatgcttccaagcaattcttgcctcatgattttgctaaacctggctcaggaaagcatgacagaatagaggaaatacaattcagtgcagaagaactggaaatgttcgtagatttgcatccgttcacaaacacgtctccttacactgtggtcgagactatgtctttggctaaggcccatgtgcttttccgcgaagttggattgaggcatcttttggttctaccgaaatcgtctaagagagcgcctgttgtaggcatactgacaaggcacgacttcatgcctgagcatatattgggtcttcatcctttcctcttcaagactagatggaagaaggtgcggtttggcaagtcagcattcaccaacctcgtcttctga

SEQ ID NO: 73902 - DNA, 2821 bp, Oryza sativa
  Clone ID: PAT_MRT4530_74138C.1
ttggcacgagtggacttgagaacacagtcaatcagtaaattcggaggtaacttataaacctcggagcaagggttgtgtctacagttacgccggccgaaggccaaaggcgatgtggaaggagcagtacagaagttctttctgaatttacaagaaaacacgaaatgatactcctgagaccaaattccagactaaaaaaggacgtgccaagatggagatgagtggatcatccctcgcgcgtgcacgaattgcaatgctgcgccacttattcgtgatcaggactgaacttttcataaggaacatgccctctcctgtcaccgagacgccaaccgaacaggcagtacaattattatctcctctcaaattcggctgaacgacagctgggagttgcttggctgaaaaaccttcctacaaccctttcctccaataccatcatcgcctctttcgaccgaatggctgtcggagttttgtattgactcgctgatgtccctctagacacaaagaagtccatcagagcatcaaacgcaccatggctaagaatccttatctcgagcgcactgattgagccacggtgcctaattttgcggtacatttcatcgaagtggtcttccactgccaagcaacacttctccatggcagtttggtcgatgtcaatggcaacattgctatcacaggtattggtcagctcccagaaaaggatatagtggccaggcaaagtggatatgtctgcatatgcagtgctaccaacaagcatgtagccaagaggcctgaggtggaacttatctgtttctgcaatggcattgagaaggtcctcctcacttatcttctcgtaatctatgcttaggatgacatcatgccgtcctgagaagtgaaacaatggcgtcgcattgtagaagccactcacagtaaacaggtcacccacccggtacctgtaaagacctaacattggagagaactcacccaaattgtcatcaagcctggtagttccttgtaccttttcaccattttcatccatgacctccaagaactcaaagtaagcaatgtttggaagcaatgcatatgacacatgggatggtggatcaagtggcctcagatttatcccggcagcgcattctgtagatgcatagattggtgagaccaacggtagcccgccaccataaacctcaagaattggaatgtactgtgacattgaaccagtcacaatggtccggatataccgtgccctaggccatagcctcctgactatcccatcccaaggtttcctcgcacactcggatgcaatctcatcggctaaagctgggttagatccttgaagatactgtccagtgaccgcatcacgcagaggagtatgcgtgatccagtcgctgagctgcccgctccggatgttgaagcacatctcctcccagtgattttccaagaacttgatcccccgaaccaacccagcggcaaagctggcaccaacacggtccactctgcatcggtgaagtaggccacagagcaactggcagtacatgctctgctcgccataggggcagaggattgcctccagggggcttgtgcacttatcaaacccgccaatgtcgcattcctgaaactgtctgctgtggtagtaggtagttagagcagactggatgggcaggccagacaatgtccggtcaccgtggaaggcgaacatgaggtacattccctcgccaccaccgccgtcgtcgtcttcaccatgatcggtgtgcaagctcatgttcctcacgagcgcctggacagcatagaagaataccttcctgtcgagctcctccgcggtggacggcaacagcttctgctgcccgccggacgtgccggagctcctgctgaggcaggtgatggggtcggagcagaggagggcagaggagggctcgccgccggacgcgacgcggtcgacgtacggcttgacatcctcgtagccggacacggggacgcgcctcttgaatgcgtctcgcacgtcgtcgtcgtcgccggcggcgccgcccaggaagcggcggaggtactcggtgccggagttccgggagaggatctcgcggaggacgccccgctggatgccggcggcgtcggcggtgaggcggtggatgaggtcgcggccggcgcggacgtccgccgggtcgaactccggcagcaggagcgccattcctgcttggttggtgaagtttcggctaatcctttctataccctcgaattttacccaatccctacccttgaaatttcgctttgattcctcccatgcccctcccgtcaggtttccgttagatatgttaatcaaaccgtgtgttgtattgtcagtatttttaggaaatactaaaatgccccttccaaccctaactagtttcgatcccctttccttctcccgcatctctccacgtgagcggcctctgcgcgccgccgggctgcagtcctgcgccgccgtcccgccgccctccggccactgcgccgccgtcccgccgccttcccgccacgcgagccgtcgtcccggcgtcgtccgaccgtgggcgccgtcgacgcatcctcccgccgccctccggccacgcgccgtcgtccagccgccgtcacgccgcgcggggcgccggccaccgccctcccactgcgcgggcgtcgccccgccgcgcgggctgccggccacggcccctccctccgcgtgggcagccggccacggccgctcccgccgcgcgggccgccggcggccaccgcccctcccgccgcgcgggccgccggccaccgcccctcccgccgcgcgggcgtcgccggccacctccctcccgtcgtgtgcgccaaagtcggccgccctcccagctcccat

SEQ ID NO: 73903 - DNA, 2347 bp, Oryza sativa
  Clone ID: PAT_MRT4530_74139C.1
gttcgccgcgtcgaaagcaaccactcctcctggtcgacctcgcgctcgctcggtggccctacaggccaccgccgcaccagggggggcagcgagcgagcccgcgaggtagtcggcgacgaccaggagggggactgggatgggttgctgcgggtcgtcgctgcaggccgggacccacccggagaagccgccggggatggcggcgccgccgcagcgcccgtccttctccctgaaccagcaccaggcgccggggtcggcggcggcgcagggcgtggtgagaggggtggtcccggcgttcgcgtggttctcgctagcggagctccgtgccgccacgggcgggttcgccgcggagaacatcgtgtccgagagcggcgagaaggccccgaatttcgtgtacaggggccgcctccagcgcacccgccgcgcgatcgccgtcaagaagttccccaagatggcgtggcccgatcccaagcagttcgaggaggaggccaagggggtggggaagctgcgccaccgccgcttggcgaacctcatcggctactgctgcgatggggacgagcggcttctcgtcgccgagttcatgcccaacgacaccctagccaagcacgtcttccattgggaaaaccagactatcgaatgggctatgcgtttaagagttgcacaccacattgctgaagcacttgactactgcagtagcaatgaacggcctttatatcatgacttaaatgcatatagggtcctttttgatgagaatggtgatcctcgtctttcatgctttggcctgatgaaaaacagcagggatggcaaaagttatagcacaaaccttgcatatacacctccagagtatttgagaaatggtagagttactccagaaagtgtcatattcagctttggtactgttctcctcgaccttctaagtggaaagcgcatacctccttcccattatgaacctagggaccgtcccaatacaggaaagctggtctccatacttgatcctttgcaaacaaaactagaggtgccttcctatgagatgcttggcattccaaagcatgaagaagaagcacctcctgctcctgctcctgctccagctccacaaccacaacaccctctatcccccatgggtgaagcctgttctaggatggacatgacagcaatccatcagattctagttgccacacattacagagatgatgaagggactaatgagctatcgttccaggaatggactcagcagatgagggatatgttagatgctaggaaacgtggagactttgcgtttcgtgataaagattttaagacagccatagagcttctcccgctcgccggcgccacgctgctgatcgcggcggccggcggcgccagcgggcagcaggcgggtgttgggtcgatcatcacgcgggcgatgttcgagtcgatgctgagccaccgtggggaccaaggttgccagggcgccttctacacctacgacgcgttcatcaaggccgccggagatttccctagattcggcacgaccggcaacgacgaaacgcgccggcgcgagctcgccgctttctttggccagacctcccacgaaactacaggtggatgggcaactgctcctgatggaccctttgcttggggatactgccgggtgaacgagatcacgccgtcggacccgccctactacggccgaggacccatacagcttactcataagtacaactaccagctagccggggacgcgttgggtctggacctggtgaacaaccccgacctggtgtcaagcgaccccgtggtgggtgttcaggacgcccatttgtttttggatgacggcgcagtcacccaagccgttgtgccaggatgtaatcaccaaccagtggaccccttccggcgatgaccgtagctccgggaggctccccggctacggcatggccaccaacatcatcaacggcggtgaagagtgcggcaagggctactccaccgacaacgccaaggaccgggtcggctactacaagaggtactgcgacatgttccgcgtaggatacggagataacatagcctgcagggaccagaagccctacggaggaggttaagcactggagacgatcgactgggagtacgtcgtcataagcggattctcctagtgctagtacagctgctggttgcttgctaatggctagcttagccttcgcgtacatacgtatatgtacgtgatactagtacgaataaagctagcagagagcgttcgcggatatcatgtaacagatatgagtatatgacacatggtcgcttatctcacatgttattgtgaaataatattattactggtggaacgatgcccctagttaaactgaaaaaaaaaaaaaaaaaa

SEQ ID NO: 73904 - DNA, 1227 bp, Oryza sativa
  Clone ID: PAT_MRT4530_7413C.1
tcatcctgtagatgtagaccctcctccacataggccaccaagctggagcagaaagaactccaccaagtccatctcgtacggcacaggcggcagatccatctcgcggccaattcgcaggggcaggaagcagtccatggccctgtcgatcaccttcttgtcgaggtcgacgacgaacacggcgccgctgctcctgtacatcatggccaccgatcccatgtccaagccatgcatcagcggcacgcagtatgggtaaggcgccggcaatgtcatccacatcacgtcgcggcgccacgccgccgcatcgtcgtcgccatcgccgcgtcgctgctgcttccagattctgacgtgcatggggaacacgcaggcgatggtgagctcgccgtccccgccgacgcagagcagcgtggccgtcgcgccgccggcgcggacggggagattcgtcatggagacgcgcggcgtggctgcggccggcacgcccacctccacgctgagcttgtacaggcggtcgcctcgggtggcgctcgcgacgtcgtcggtgcacagccagtgcgccgcgccgcggtgaacgacggcggatggcgtcgatctgcccgccagcgagaagcggaggagatccaggaactcggcgggcgcggcccagccgccggcggcggagtacgagttgacgtacatggtgatgctgttcgcgtgcttggtggtgacgagcagctgcgagaacgtgaagcggcctgacgatgccggctgctgcggcttcccagcgaggtcgtcggagacgacgatggcgtagctggtgaccttgtagggaccaaggtcagagtactcctccaggcgcgggaccacgtggcgctcgccggtgacggggttggagaggaagaggaggcgggtgatgggaagccgcatcaggaggacgccgcggcgcgccgccagtggctggacggagttggaggagccggaggaggcgagggggcggagcggcgagctcggcaccggcaggaagccgaatgtcgagaccttgatgcgctgcaggtggaagaagaagccgaggaggtcgccggcgcgctggccgccccagaggtcgaggaggaaggcgcggtcggtgaagcggcgcagccagcggcggcatgtggcggcgagcatgaagaggctcttgacgctggccacgcgggagaggacctggaggaggacgtcctccggcaatgccgcgatgatgccgccgtcgtccgccat

SEQ ID NO: 73905 - DNA, 1039 bp, Oryza sativa
  Clone ID: PAT_MRT4530_74140C.1
ggaacgtcacgcattgaaacaaaaaaacttgcagttatgcagtacacctttgacaggttcacattattaatgcttctgagatgtctcacgagctctttggtgtgtatgtctatgtgcttatgggagctccagtgcttgctctcaccacatgtttctgacaacggatggttatgctatgatctgttttcgctaatgtaccatccattgtcctgccgacggtacactggtacagcctaataagagccttgcaatctgttttcgatgttaccctacataagattggtgcatacctgtcatcgactggtgcatatcacttgtcgaaaacatagtaatttcaaagcatcaatcaattttaagtatattttactgaccgcacaagcacatggcagatcctggactgatttatctgtcccaccatactttacacttcttccatacctgcaacgatgcacaccagcatactttttctcaccaatagttattactccttatgtcccaaaaaaattataaaatttagcatagttatgtcaaacatttttaattttaactatgatagcaaaaaaatgaatagcaaaaagaaaaagatcaatcatgtaaaattgatgttactagatttatcattaaacaaactatcataatatgcaacttttttatttaaaacatcttaattttatagatattatttgttaaattagcatctcgaagactgggtcgaagtccaaaatacgtatattttgggacggagggattactcattaacaaaatccatggcaaccattgaagatgcatttcttattgcgaacagttctgatctttgaagaataacttgtctttaatggtctaaaaaatctatagtagtgcaatgtactatcaaaattagactttacatacttatatctcctcttgttggatcactactttagatacttgatgccaaaaccaacctcctaggaatgcaaattgtagagatcgtacgcttcctgtagagagtcgaatgaaagacccactttcggttcactaacaaggtcaaccttcttct

SEQ ID NO: 73906 - DNA, 623 bp, Oryza sativa
  Clone ID: PAT_MRT4530_74141C.1
atctcaccccggcggcgacgccgccgcagcctcttaaggctggtcccatcctctacttcgagttagcttgctccttattcaaccatgggtaaggagaagacgcacatgagcattgtggccattggccacttagactccggcaagtcaaccaccacggcccatctgatctacaagctgggaggtatagacaagcgtgcgattgacaggttcgagaaggaagccggctgaaatgaacaagaggggcttcaagcactcgtgggtgcttgacaagctcaaggcctagcgagacagaggtatcaccatctatatcaccctgtgcaagatcgacaccaccaagtactactgcacgggcatagatgcccctgggcaacgagacttcatcaagatcatgatcactggtacctcccaggctgactgtgccacgctcatcattgactccaccactgatgagttttgatgctggtatctccaaggatgggcagaccagtgagcacactcttcttgctttcactcttggagcgaagcaaatgatctgatgctgaaacaagacggatgccaccactcgcaagtactccaaggcccgctacgatgaaatcgtgaatgaagtctcatcctacctgaag

SEQ ID NO: 73907 - DNA, 249 bp, Oryza sativa
  Clone ID: PAT_MRT4530_74142C.1
atggcgaaggctggaaagccgcgtcagtactccgaaagtaaaggcatcttgggcgaaggcatctcgggcgaactacaaagacttcgccatgacgagttcagcatcaaggaggccccaacaggccgctcccggtcttttaggcccgtttgccgtagaccaggcccagcctatcagcccattaaagacctatatgtgcaaatgacactgcatacccatgtaaatgtccctttcataagggcaaccatgtaa

SEQ ID NO: 73908 - DNA, 2352 bp, Oryza sativa
  unsure (1)..(2352): unsure at all n locations
  Clone ID: PAT_MRT4530_74143C.1
tttttttagtagttcaggcgtagcactagnagccacattataattaaccatgataaaacatataattcagactctgatcactatcaactgaaagccaaagcaatgctcaacgactatctgctctttgtctttgctttgctcaacgggaagcatttgaaagatgtatactaaccaaattaagtaacatatacacgaatataagcctgtctagccaatatctagtgccaaaaaattattcgtaagtttacctagcagaggtagcaagagatacaacaccacgagacctttcagatttcgacaggaaactagaaactactgaaccaatgaaaaaaaatatttccacaaattcttggtggaaaaagaattcttttggtgcagcctatttggtgcctaaaaatttgtcacctccatcaatgtcctcctccctcttttgctgttgaatcctaaatgtagtggtcaaccgaaacagatgtcactgcatttgatcataaaaactgtaggatatcaatgagttagcaaaatcttgaattattgtcctttgtcatcatgccaaagctcattgcagaaaccatttcgttgcctcttgcagtttatggcttctccaaaggaatcaacaagctgctcagccagaccacttggctcattgattagtgttttgatgaatgtagttacaactctacggtcattctccgttgatcttagactaaaccaggtcaagaacttcatcctgaaatcattatctatgtgtcccttgcattccagcatcctgatcttctgcacacagtactcaaagtcctcatccaactccctcggtcttgcaagctgcttctcacggcaaatagtggaagcaccatcttgttcacagccctctggccgagattcaacagcaggtggttcagcttcagcactccggcccaccgcgcaggtctctgagccaccactatcgttggatcttactggtacaatctttgaattgtaacacttgtccggggaaatgtccatggggacaggtgcctcaacgtttaggtcaggaacagaaaatgtgctgaactgaagtttgcggcacgcaccagataacaattgaccctgttcactgttctctgtttgctccacgtctgtgacacttctgtcacatgaagcttcatgcatatcttcacaaaacccttcaaaacggccttcctcagtccaagcttgccgcaatatcttcccaacatctcggatcttaaatccagtcgacttaaaagcctgtgtcttctctcttctatgtgtatgtgcatctgctcccgctacattctgtgtggtacgtttaaacaataactccttgctccccgtataacatttagattcagaatggcctagtatcccatcatctgtgaatgatataattctgaaggaatactgtgtgcatggggcaaggttaaaaacaagtacttttctttgatctttggacaaaactacaggctcttccatgcttggctcctctctgctcttccagtaccatagtttataacccctgatagtgtcagaggatggtaatggagtttcttttagaataataacaatggaagaagatgttatctctacaaatctgaatctacaggcagcaggtaaggaatcttgaagatgcaggtctggggaactcagcaactcatcagctctttcaatagctagagagcaaagtttctgcaaatcactaccagcaggcaacctgcttacaataccacgtgccatctttgccgacattccatccagtggaccaacttcactttccaattttgcttttgcatcttcaataataccatgcaattctttaaagcgggtagttccccccagtagccgataactcaaatagatgcggtggcagagcatatctactcggcgtgcatctttggcaatcaccaattgccttttccaataacctagtattccggaaacctttccacatgaagcgcaagaataactcccatcaagttgaataatattcccaagattaaagcagccaaccctcttgtgttggagcgcacactcaatatggcaagaagacccacagcagttcttgtcatcattttcagatgcacaaaccaaccatagactaggatccttattgtcatcaaactgatggcaaatacaacatgagcacctcttgcagaaggaatcttcagatgttacaacagctttacaggccaaattcttacagatccaagtgctaatgcatttcacgtcacggacaggacactcgccattcaccacttccttcttacaaacatggccatttgtttcttttaagttagttggagattgtttctgcaattgaaggttcttgcttgctttaacaggagtagctttggtcat

SEQ ID NO: 73909 - DNA, 457 bp, Oryza sativa
  Clone ID: PAT_MRT4530_74144C.1
aacccccccaaaatgctttttttttaggcccggcccaaaattaaaacatgtaaaggggaaacctttggggggaaaaaactcacggaaaaaaaggggaggcgggggaacaggaaaaaaaaaaaattggggcgttttttaatgccggtgggtgacttttttaaaaggggaaggggcggggaggcaaaattgggggggaccccaaaaaggggggggccaccgaggtgggggaaaaaccggatggaccccccctccccccaagaagggccccaagagtttttggggggccaaaacttggccccaaaaaacacccttgggccccaacccaaaaaaggggaaggggtgccctaggcgcgggcccaaagggcccgtgtaaaccccacccttgaaaaattggatcccggtaccgaccttgagggccacaaccacgggttgccaaaaaaagggggcctaaaacccc

SEQ ID NO: 73910 - DNA, 450 bp, Oryza sativa
  Clone ID: PAT_MRT4530_74145C.1
tgctaaaccagttccatttcttgctttgggctccaaacctctggagccctcaacaccccattgcccaagttctcttccagggtggtgaaagaaggtgcctgctgtaattttattttcggttacctccacttggtgctgattgcgagatttctgctagtcaataggaaaggccaactcaattttgtcgcaagagctgttttggactgccattggtttgcagtatgagctgtcaggttaatgtgatgacagcagctcttgtgctcctgtattttgctaacattgctgcgtgtgcggggccatcatatagtatgatcacggtacaacattgtatcatgatttttagtttagtttatagatcggccgcattctgtattgtggacaagattcaggatagaaacttatattcgtagtgtactattttgtgaaatatgttctttttacattgcccgc

SEQ ID NO: 73911 - DNA, 1614 bp, Oryza sativa
  Clone ID: PAT_MRT4530_74146C.1
ccatttcgatccacgtttcctccccttcgtatcgtcatggagaaggccgtgggcctcagctatatctctccctgctaaatgggagaacagcgcgcctactcacatctcactatgcagataatgccacgatgttcatctgaccgacaaagagagatatgagacacctcgctcgaattcggcattccttggggaaagttatgggcctctaaaccaacatggtgaaaagtcagattctgcggcgccgttagcgacctacaagatatctcatggatttttcccacaaacatcaccagctacccgataaagttcctcggcctcccgctggtgatctcctaattcgaaaagatacatgtccaaccattgctcgataaatgcaagacgcggttggtgcctttgcaaggaaggatgatcacggcggaaggaagagcgactcttactaaatatgtcctcacggtgtaactaatctactatctaacagctttaaagatcctagacgagatactacactcgatcgataagatgaggcggaagttcttctgggcaagaagagacgacacatcgtggggatgtgcaaagcaaatagggataaagcctgcagagtgcagacctaagaacctgggtggccttggtgtgcttaacctagaccagttcgccagagcactgagaataagatggctgtggtacaaatggactaaaccggataaaccttggaacagcactgcgatcccctgtggtcaattggacagaaacctcttcatggcgcgacgataatcactctagggttgggaaaacggcaaccttctagaactcacactagctagaaaacaagatgcccaaagagatcgcaccagtaatttttgtggcttccaagcgcaaaactaggacggtgcacgatgccctagcatccaaaacatgggtccgagacatcaacctccccttcggattaaggcagcggatcatctacgacaatacgcccctcggccgactctgcgtctacgtgtgggtcccatgagtgagcaaagggacaccatttacctaaaagctgatggctaatgcagtctgctcggccaaatctgcgtatagactacaattcgttggagcgaccgaaacgatctacaactagactatctcaaaatgttaggcctcgcctaagtgcaagttcttatcatggctaacaatccaaaacaagcaaacttcaaaagaggggatggatgaaccagcagctttgccctccatgccacgcctcgaccgaatcagcattacacctgctggcaaagcgtgggctgcccaaaaggatctgggcagagatagagatagacaactgtggacctctagttacaggagtgggattgtgggaagcttgctcatctatatatggaggattggtggtacaaaatctcatagtaacctcagtacctcacaccctgaggaaggccctaaaattgatcattatcctggtggcctgggagctctggtgtgaaagaaacgtcaggatttgtgtggcatatagcaaccatgccaaccaccatcatcaccaagatcaacgaggcataaactttgatcgaggagggggctacaaagctcacagagattatcccctccggagagtagtcc

SEQ ID NO: 73912 - DNA, 1117 bp, Oryza sativa
  Clone ID: PAT_MRT4530_74147C.1
gtgaaaaagcggtcccaatacagtgctttcaaagacgagcttctagttaatccttcagaagttactcgaagaatggaggaaatgactatatccaaagggaacagacataattctgaaggaactggagtgcttccaagggcagaaattgtccatgatgaacatcctctaagcctcgggaaaactagtgtctggaaccaatttttccaggaatctgaaactatagagcagattgatagagatgttaagcgtactcatcctgagatgcaatttttcaatggggattcttctgatgccttgtctaatcaagagtcgctaaagcgtatacttaccatatttgcaaaattaaatccgggtataagatatgtacaaggaatgaatgaagttttggcaccactctactatgttttcaagaatgatccagaagaaaataatgctgagtcagcagagccggatgcatttttctgtttcgttgagctgcttagtggatttcgggataacttttgcaaacagcttgacaacagtgtggtgggcatacgctccacaatcagcaagttatcccagctcctgaaaaggcacgatgaagagctctggcggcatttagaggttgtgaccaaggttaatccacagttttacgcattcagatggatcaccttgctattgacgcaggaattcaagtttcgcgactgcatccatatatgggatgcactgttaggtgatcctgagggacctcaggccaccttacttcgaatctgttgtgctatgctaattcttgttcgaaggcggctcttggccggggatttcacagcaaacctaaagcttctccagagctatccacccacaaacattgaccacctcttacatatcgctaacaaactgcgagggcctattccctactgattgattatcttttgtttctcatgtttgttcttatatgttagtttgcaatgttcaaatatgtttgtaaatgattctcccatgccctatgtgattggatggttgatttaaagcatcggttctcatatagagtggagtataccttttggagcaaaaaaaaaaaaaaaaaactcgagggggggcccggtacccaattcgccctatagtgagtcgtattacaatt

SEQ ID NO: 73913 - DNA, 414 bp, Oryza sativa
  Clone ID: PAT_MRT4530_74148C.1
atggcttatactggagagaacggaggagacaacatcaacggaggcaatacaaatgcctcaacatcttctgcatcgttctctgggtataacattctaactttatttgattttcttcttgagagagaaggcaaagcgagaggagatgaggagacatacaggtatagaagagaaccagccgataagctgcgtggcacggcatctcccgggactacagctcctactggcgctacatttgaagagaggaaccctgagctgtatgctgaattggtaaaacgtctttcagatcaaaagagaaattccaggaggatgaggctggctggtgcttctgcctattgtgttgtgttcgtcaccctgttgtaccttggcgatcgtgagaagcgtttgtttgagaagtctttcggtgttggcaaatag

SEQ ID NO: 73914 - DNA, 1292 bp, Oryza sativa
  Clone ID: PAT_MRT4530_74149C.1
actcccgtgcgtcgtcactgccgcaactccctcctcttccactccctcaaggcctcaacctactccagctatctcgccgtaccgccgtcgccgcttcctctcgcacgcgcgccgccatgccctcttctcttcattcctcgcgcgcgccgtcgctgtcgtagcttcgtcgtccttcgcctccctcgtgccctcatccagccattgttactgtgcccgcgctcccgcgccggcaagcgagtccgtcatgtccaccagtgaggaggcggggcttccagatccggcaacagcggcctcctcgctggtggattgtcggttgcccggacgagagggatgcgagccactgcactcctcttctcctctttcatctcatctccacgtggatccggtcgtggccctcttcggcagtacaacgctactctccactgtcttcctcacccgttctccatgccgctcacctcccctcggtgccaggatggggagagcaagagcagcagcttgggcaccaaagccacgacggcggaaggcatgggctatggcaaagtacggcgacgacggcagcaaggcacaaactatggcaaggaaggaaagaaaaaagggagtgaaggctagattattcagtactaatgtttaaacatcaccacccaggtgtgcaaatgggaaatgagcagcgctgtcagaaagaaatagaagacactaaacatggacttgaatctggaagtattacatatgacccggcaaagcttaaattttctgatgacatcaaagattctcggtgaacctgacaatcttgacatattattgcatccagtgttccaatttggcaagtccaaaagtaccatttgtttatatctccatttttactagctcactttcctgatatatgtatgatagatcattaggtgggcagttcttcctgccttcttcacattgtagttctcagtgtattttctctatattcttgatctatacatggacttggaataaggtgttcaccctgaataaggagggaggtcagtacatttttcctaccttaaaaatctggaagtatggttgaatattgtattagatgatattcagataatattgttagtttattgttaccgaggaaatgctgtaggcgtcttagagttaagggaccagtcaatcatgaagagcagttgtgcctgtattggtgtatcttcattgcctttttttggtggatgtgcaggttgtaattgtaatctatccctcccatgtgggcttgatgaaatctacacataaatctgtttataactaaaaaaaaaaaaaaaaaa

SEQ ID NO: 73915 - DNA, 513 bp, Oryza sativa
  Clone ID: PAT_MRT4530_7414C.1
gtgcccgtcctgagctaagccataggcgcaagtaaagcatccggggtccccttgagaaagtaaagggaatcgcccgatcgagatgagatgaacgcacaaggaatattcagatgagtcagggcaagcagcaagctccgagttaattccagttttcccccccccgcccttgctgtcttgttctgtgcatgtattagagcaagagaaatagcgcggtagagaaaatacgtgtatgtgacggcgttttccccttttttcttgttgtgaggatttttcccttccttttcgacctgtgggagagaactttgatgctgtgtcgttgcaaccagttctttcatccttgagagccgtagatcctactgggtaaaatgtgtgcctcgattctgtactattaacttgtcacctgagcagatcaaccggtaaggcattgtagctgcttttgtgcaaaaaaaaaaaaaaaaatactcgagactagttctctcctcgtgccgtattcggcacgaggcctcgtgccgt

SEQ ID NO: 73916 - DNA, 789 bp, Oryza sativa
  Clone ID: PAT_MRT4530_74150C.1
tgttcgccggcgaggaaggcagggcttccagatccggcaacggcggcctcctcgctggtggattgtcggttgcccggacgagaggggtgcaatgacgagagtggtgcaagccactgcaccctctcctcctctttcatctcatctccacggcggattcggtcgtggccctcttcggcaatacaacgctgctctccaccctcttcctcccgttctctacgccgctcacctcccctcggtgccaggatggggagagcaagagcagcagcttgggcaccaaagccatgacggcggcaaggcatgggctatggcaaagtatggcgacgacggcagaaaggcacagactatggcaaggtatgtgagtgtaaaggtgaagccaattttattttccaaatggaacatgcaagctatgttaaactaagttcttcagctttcttccttggtgtgcaaacgggaaatgagtagcgctgtcagcaagaaatagaacacactaaacatggacttgaatctggaagtattacatatgacccggcaaagcttaaattttctgatgacatcaaagattctcggtgaacctgacaatcttgacatattattgcatccagcgttctaatttggcgttctgtagtagactcaatagttttctcaattgttatcaccaggttgagaaatcaccaacttttgtatgtgccttatgggttatgtgttttcttgatattaaccatcttatttatgatatacttttattctctgatggtaccaatcaatattattaatggtttgtcttttctg

SEQ ID NO: 73917 - DNA, 552 bp, Oryza sativa
  Clone ID: PAT_MRT4530_74151C.1
atgtccaccagtgaggaggcggggcttccagatccggcaacagcggcctcctcgctggtggattgtcggttgcccggacgagagggatgcgagccactgcactcctcttctcctctttcatctcatctccacggtggatccggtcgtggccctcttcggcagtacaacgctactctccactgtcttcctcacccgttctccatgccgctcacctcccctcggtgccaggatggggagagcaagagcagcagcttgggcaccaaagccacgacggcggaaggcatgggctatggcaaagtacggcgacgacggcagcaaggcacaaactatggcaaggtatgtgagtgtaaaggtgaagccaattttattttccaaatggaacatgcaagccatgttaaactaagttcttcagctttcatccttggtgtgcaaatgggaaatgagcagcgctgtcagaaagaaatagaagacactaaacatggacttgaatctggaagtattacatatgacccggcaaagcttaaattttctgatgacatcaaagattctcgg

SEQ ID NO: 73918 - DNA, 594 bp, Oryza sativa
  Clone ID: PAT_MRT4530_74152C.1
atgaagtcaaggggtgtttctggctcgcagaggctgacaacgggcgagctcggcccgttggtgcgtcgtttgttccacgaccaagaaaaggccgcgactcctgccaaagaaacatacaagggaagtttggcaacagcagcaggagttgtggtgtttcataagtatgaagcacccgccggtactccaaagacaccgcaaggagaaagatttaaggtgtttggagtccggaacgcggatggaagctatggaaaggggttgttttgggcgtcaacaccccatgagaaggaggaggtagcggagttgggaaactcctcacctccgcatgtcaaccgccatttgtctccgccgattatcaaggaagaggccaggaagtttgagggaagcaactcccctcaaccatccgtcaccaagctcgctaagagaattaagcaactccatagggagaatgaagagcatagggagcgcgatgcggagcgtaggctagaaatagccgaccttaggaacgagtttagcttgcttagcagtgcattatgttccaaggtcaaacgcacttttagggagatggagaaggaagaactttattatgctaactag

SEQ ID NO: 73919 - DNA, 388 bp, Oryza sativa
  Clone ID: PAT_MRT4530_74153C.1
aaatgcagaggagttgattgaacgaggaacgccaaaggcaagattcatctgtatctttgttaaacctagtaatggagccaatgacattgttgagtacggacggatcaaggtggagcgtaaattcaaaggtgaaaaagggaagagcaaaccaagcgaacatgtgaggtacagccttatagcggctgatagcatatcaaagttaattatagtcgccgcaatcggcattggtcttgggttaagatttcgggaagaggcattatgcaccactgtcgtcgactggtgtataagcggcttttctattgcgtcactcaccaattttctggttgtgggcgtgaagattcgccaccaccgcctggaagagcagtactccaatgcaagggtgaaatag

SEQ ID NO: 73920 - DNA, 427 bp, Oryza sativa
  Clone ID: PAT_MRT4530_74154C.1
cccacgcgtccgccagggtgcacagttagatgatgcagttaaggcatacatggagatgcggaagtccaggtttaatccagatgaacgctcccttgagggggtactcaatgcctactgcatagcaggtgttatagatgagagcaaagagcagtttgaagaacttcagtccatggtgactgttcctagcattattgcttattgcatgatgttgtcactctatgccaggaatgacaggtggacagatgcttatgatctgttggaagaaatgaaaacaaaccgtgctagtagtacacatcaagtgattgcttccatgatcaaaggggagtatgacgatgactccaattggcaaatggtcgaatatgttcttgacaacagtaacttggaaggctgtgactacagtttacgattctttaatgcactccttgat

SEQ ID NO: 73921 - DNA, 3282 bp, Oryza sativa
  Clone ID: PAT_MRT4530_74155C.1
atggcagcagtgaactcttccatgggggtcatggcgccactcctcaccaaacttgccatgctgctcagcaacaagtgcaagaaactcaagggaatgcgtaagaacattgagttccttagccatgagttgaccgaaatgaatgctgtgttggagaatcttgcagatatggagaagctagatggacagcagaagctgtggaggaatgacatccgcgagatggtctacgacatcgaggactgcattgatgtcttcatgtaccatcttggtgatggtaataacaaggatggcttgctcaggaagactgcacgcaagctcaggaatttgcgtgctcgctatcagattgccgacaagattcaagaactcaaggctcgtgtcatgcaggtggctgagcgccgtgataggtatgccaatctaggtgtatctacctcaagcattcccaaagtggtggaagttgatccgcgtctacctgcactctatgaagatgcaaaaaatcttgtgggcattgacggtccatgtatggaaattactcagtggctaatggatgaagtagagaatggttcgatacaacaacttaaagttctctctgtagttggctttggaggcattggcaagacaactcttgccaaacaagtatacaaccaattgaaaaaacgattcaatttcacatcattcgtgtcagtgtctcaaaaccctgacatggttaagctgctgagaaatttactttcaggaacaggatttcaaggctacggaattcttgatgaccatcaaaagctcattgacaccctcagaggacatcttgctaataagaggtaccttattgtagttgatgacatatggaacactcaagcatggagcattattcggtgtgcttttgctcaaaataatcatggtagcagagttatagttacaacaagaatcgaagatgtagctacaaagtgttgcgttgatttccatggtatggtgtacaagatggagccacttaatgagtttaactcacaaaagttattttgtaaaaggatatttgattcggatagtattcctgagcagtataaaaatgtatcagaagatatgttaagaaaatgcaaaggtgtcccattggcaatcattagcattgctagccttttatccagtgaaggcatgaatgtgggtaagtggaagaagattcataactttatgggttctgagtcggaaacaaatcccactctagaatggatgagacatgtactgaatctgagctaccttgacctctcacataatctcaagacatgcttcctgtatctaggaatatatcctgaagaccatacaattttcaaagctgatttgataaggctatggatagctgaaggatttatccatgagaaacctggtttggatctggaggaaacagctgagagctatttcaacgaactcattaataggagtatgattaagctagatgattatcgttccagtgaggcatgtcatgtccatgaccttatgcttgaccttataatatcgaagtgccaggaggaaaacttcatcactatagcatctaagcagcctgtaaagaatgtaacaaagcttccagttcgtcgtctgtgccatcagttgtcatacggaaacttggccatggaaagaatgaaactatcacaggttcgatcctataatactttccctgcgtttggctgcagtatgcagcctcctatttctatgtttgagcatttgcgggtattggaacttagggcctattctacatccgttttccttgatttgtctgctgtgagcaacctcttcctgttgagacacttgagtatcagaggtttcaggttaaagctgcctcagaaaattgggagactccagtgtttgaggacactagatctactaggcagccttttggttactggttttccatcagatgttatttctctatcatcattgtgtcatctaacagtttcaggtgatgcagtgctgcctaatgggattcagaaactggtctctctacaaactttgttgacctttaattcagggggtttgcccgacatttttactattgtggagaaaatttctcgatttaattcatctgctatcagactggcaaaaacacgtcgtttcaacaatggaggtcttcgttctaccaatggaggtcttcgttctccccctgcctcccttgagtttccaagtttcgatgatggttggccaactgaatccattctggactacctatctcagcatctggatacaccagcttcctcacattcggacctcttctcgccaaatttggttgcttgttcaccgcatattctgaattttgcatcgttatggcttcagcaactcatcatccgtaagaacattcgcaatgtcccatcctggctgtggttttctctgaagctcacaatgctagagcttcgtgttgaggagctcagttgccgcgacgtccaatttcttgctgggctgccctgccttgttgacctcgacttgactgctcaagctacccctgagaacatcatcactaaacgcgttaccacgcgtttgggaagaatcacccataccgacaatttcccaaagctgcagaaatttgttttaacatgtgatttggcatgcctgacgtttgagccaggggcaatgccacagcttcagattctgaagctagatgacaagaagccttctaacttggaggaagggcatggcaccagtggagcggcgcaacatggcaaaactccacttattggcatcgagcacctaccaaggcttgaagaggtccaagtgacaagccactccagcaaggtgcctgcatacagggacgccgtccaaaggcatccaaggagcacactagttaatagagtgatcagctctaaaaacagcactaaagagtggaaggacaaggtgcgggaactggcctacgatattgaggactgtatcgacatcttcctgcaccaacttcatcctagagaggacaaggatagactggtctggaaggcggtccggaagatcaaagcaactatgtgcctgcccgccatcaaatcgccctccaaattcaagaactcaaggcacatgtcgatatacatgatcgatgtatcaacctctggcgataggttcataaggatttgattcccgattgtcgttgctttatgcagaagctggaggccttgttggcatttgtaggttgtttagggcctgtttagttcgcgaaaagaaaatttttgattgtcacatcaggacgatttgaccgaatatcggaaggggtcctcggacacgaaggaaaaaaaaaaaaaaaaaaaactgcgagactagttctctctctcc

SEQ ID NO: 73922 - DNA, 422 bp, Oryza sativa
  Clone ID: PAT_MRT4530_74156C.1
ttagaaacgacgttttggatgtaagtcgttaaagcgatggtacaacaaccttttgcatagctcactacgatattctttcatgtagtctttgatttcaatttggatgtgatatgatgagccccatccacaaattagtgattcaacaaacccggctctgccgcagcagcagccaccggctccgccgcagacgccaccggcttcgccgtagacgccgccgccacagccgccaccaccacgctcacgccactctccctctctggcactactgaccttgtgcgcatcggcgccgctgaagaggaggagccgcaagcaggctccgccgccggctccgcccgccgccgactccgccaccgccgccggctccgccgccgcagccattgtgcttttggggcctcaccgcaaattgtttgcaagaagggctc

SEQ ID NO: 73923 - DNA, 1136 bp, Oryza sativa
  Clone ID: PAT_MRT4530_74157C.1
atgacgacaccaccttgggtcctcctcgaatgcgatgcctacatcgccaccaaccacggcaacgccaccaccgccacgtccaggaccaggaccggccaccccatcgagcccaccatcatcgccaccgaggctgacctcgtcctcctccgcctcgccttagggccccgggacgacagcttcaaaaccagccgccaagattacttcatctaccacgcttcttccaccgccccgaaactcgacaacaggttcatcgacaaacaggttggcatcctgcgctgccttgatgatggcacctacatcgtcgccgcgctctgtagcgccttcaaacgaggtgatcatctctaccgctctggtgcagatgcttggacctgccatccgctctccatccatggtttggtcttcgatccatcatttagccatgtcactagcaaggtcatcacggttggtggtgaagccggaaccatgggctgggtcgacatcaacgatggcattctcttctgcgaccttctccgcgacaccgctgagctccgctacctcccgctgccgccaccactcgagcacaaagacgacatgatagtaggctgtccagggccacttcgggactttgctcttgtccaaggtcggatcaagtacatcgagatgcaggtcgacctctgggatgaccagaatgcatgggtgcttgctgttgacatgaagaacaagaggctaaaagatgtggccgagtttggcgcaggaagaactcttggcattagctctgcctacataagcagtaggatatcagactatcttcctacggctccagaaatattaaacctgtgacgacaaggggtttgttgaccgcaccctcacacaagaagcagacccatataatgcatatgtctcctccctcttggaaaggtggagatcaacagaattctgtgggaggtgaagttgattacatggattttggatgaggaggggcatggctaaggggagagcattttcatgtagtattgctgttgtgttagacttcttattgcttgattatctactgttttgtcagttctatttacgagggggtattgctggtactttgtaccgaggatgactatctaagcacaaaatcttaagagtgtagtttatgcctctgtttattt

SEQ ID NO: 73924 - DNA, 1350 bp, Oryza sativa
  Clone ID: PAT_MRT4530_74158C.1
atgggaggagatgagagtgatgggtggtctgattgggaggagaagaccatcatggatgagtccctccggccgccgacccacgtcgctactgcggcgatgacgacaccaccttgggtcctcctcgaatgcgatgcctacatcgccaccaaccacggcaacgccaccaccgccacgtccaggaccaggaccggccaccccatcgagcccaccatcatcgccaccgaggctgacctcgtcctcctccgcctcgccttagggccccgggacgacagcttcaaaaccagccgccaagattacttcatctaccacgcttcttccaccgccccgaaactcgacaacaggttcatcgacaaacaggttggcatcctgcgctgccttgatgatggcacctacatcgtcgccgcgctctgtagcgccttcaaacgaggtgatcatctctaccgctctggtgcagatgcttggacctgccatccgctctccatccatggtttggtcttcgatccatcatttagccatgtcactagcaaggtcatcacggttggtggtgaagccggaaccatgggctgggtcgacatcaacgatggcattctcttctgcgaccttctccgcgacaccgctgagctccgctacctcccgctgccgccaccactcgagcacaaagacgacatgatagtaggctgtccagggccacttcgggactttgctcttgtccaaggtcggatcaagtacatcgagatgcaggttcatgtcaggccaggctccgctatcaacggcacctacgcctctcaaggctggattgctgccacttggagtgcaccacccaccaatccttggaagcaaggttggcgccaggactgccaaatctctgcctctcatcttgctgttgatcacaacaccatgaattttgagttgctgcctgagcttggcacacctcagcaaaccttggagagacttcacgtgggccttccaaagctcagcttgcactctgatgacattgtttgcttcatggctaaggtcgacctctgggatgaccagaatgcatgggtgcttgctgttgacatgaagaacaagaggctaaaagatgtggccgagtttggcgcaggaagaactcttggcattagctctgcctacataagcagtaggatatcagactatcttcctacggctccaggtttaaagggtaacctgaaacgacaaggggttgtgttgaccgtgccttctcacaagaagcagacccgtgtggtgctgtctaatccctcttggaaaggtggagatcaacaaaattctggaacaagtatggatgataaagaggataacatggatttggacttggacatgttttttggatga

SEQ ID NO: 73925 - DNA, 319 bp, Oryza sativa
  Clone ID: PAT_MRT4530_74159C.1
ttttgggtttttttttttttgggttttttttttttttttttttttttttgaatgtattttttggtttttctctaaaaagtgcaaagacaggttcagaaagagcaaaataaactgaacagaacaagggaggcaaactggacaaagaaagacaaaaacaccgcaaaaaggaaaaatttggggggaaaaaaagcaaacctggggggggaaaaaaggggggacggggggaccaacaaaggggcctggggaaaaccgggagaccaacctataaatgaccggggaactctagtctaaaggcatcgaaaaggccggggccaggaca

SEQ ID NO: 73926 - DNA, 1188 bp, Oryza sativa
  Clone ID: PAT_MRT4530_7415C.1
atgcagctccggcgactccttgctctctccggtgaggtctccggccgcctccgccgccgctcccactcgacgttcgcctctccctcgcgtcctgcgtgggccatggtggtcagcgagccgcaagaggaggcgccggagctacgcgcgaccttccgcctcgcagagcccccgcgtgcctcccaactcctcgtcccctacgacgccatccgtccccgcggtagccagggccccctttgtgccgccgccgaggaagcgaccagcgaggacggcctgctcctcctccgcgccattgttgcgcatggcgcctgcgcctgcgcccacgcgacggctcccaacctccccgcttcgtctcggcctccgggccagaggagcgtcgctcgcgtcgtctgcaaccctctcaccggccagctgctccgcctcccggacatcgacggtgcaagcagcgaggtttcgcccggtctgatgggctacgccggcttgctcacccaagccgacggcggcgacgggccgcccgacaggtacgcggtggccgaggtcagctgcgacgacttcgtcatgcaccgattcctctcggagacggggaggtgggacgcgatgccgggattcctgtccccgctgccggccgcgcgcccgatcgtcgtggaccagccggtggtggctttcggcggccggctgtggtggatcgacctcgcctggggcgccgtctccgtcgacccgttcgccgacgagcccgatttccgattcgtcgagctgccgaggggcagagtgctgccttcatccaacgagatgagcttcgagaggcgacgacggaagaaggtgctgagcacgcaccggcgcgtcggggtcagcgaggggacgctgcgctacgtcgaggtgtccggagtggagcagttcgtggtcaggtcctacgtgctcgacgacgatggcagcagctggacgatggagcagagcacagcgctgcgggcgcaaggggcgcccttcccggggatgccaggcatcgcttgcatcgatccggttaacgccgacgtcgtgtacatcatggtcgggagcgggctcgttttgggagtggatatggagagggggatggggtttgggctttctgtgctggatgagcctgcctggccgacaccctgcgtgctcccgccgtggcttgaatcaacccggatcccttcttctacaggtgtttga

SEQ ID NO: 73927 - DNA, 128 bp, Oryza sativa
  Clone ID: PAT_MRT4530_74160C.1
aaggaccaaactctgggggagaggacctgaggattgcgcgcccttaaaacttttatattttccagtgagacgaacatcacctgctagcactttacctccttctcctgaaagactttggggcagagacc

SEQ ID NO: 73928 - DNA, 306 bp, Oryza sativa
  Clone ID: PAT_MRT4530_74161C.1
atgggcttcactatgggccctcaagtggcgaaaggccattttaagccttataacttctttggttcagtggcgaagacggttgagcggtcagtgccgcgtatctccgacaagcagctgcggtcgtcggcggagaaggtgtcgcaggaaagtagcatatccaagccgctgcgcgcggtcatcggcggaagccgcgcacgacccgcatatatggctaagcagggagcagggaagaagctgctccgacacaagcacgatatagacctcgacctgtctcttgtgacctgtgtgtatgcttctcctgtctga

SEQ ID NO: 73929 - DNA, 324 bp, Oryza sativa
  Clone ID: PAT_MRT4530_74162C.1
atgaccgacgaccgcgtccgcgtctctgccgactgccagtgcgacatttctccgaacacctctgctgcgtcgctccccgcggtctttgcccacttcatggcgcataccacgcgtcctgcagctgggagctcctcaatcgccgaggtgctccactccatagagtaccagtaccaccagggcgctaggccgcatcggtctccgcccgccatgcttcccctcgtcctcgccggcggcggcgcgcaccccaccggcggcaagacggaagccagatttcagcccatccaaacgaagcccttcaaggctgaaggcccaccccaattttga

SEQ ID NO: 73930 - DNA, 500 bp, Oryza sativa
  Clone ID: PAT_MRT4530_74163C.1
ccccggctcatcaaactcagatcgattgtcattgagagcgagcaactagcgctagctactactcgaaggcaaaatggacgtgatggagaagtctcggcgagctcacttcttgttcgacgacgacgaccaaacgccgccgaagcagaacggcccccagaacgacgaccagcacaacaacgacgacggcagcggctgcctctgcgtgtcgtgctacggcggcgtcgcaaaaccaaaggcgcccaagtcgtcgtcgccggcgaaggacgtcgtcgccggcggccgtcctgctgcaggctccaactgtacctgatcttactctaaccatatatagcttgctagcgatcgagctcgatctcatctcgcacctagcttgatcatgtcgagcaaccatgtacgtgttgatcgacatgatcactctagctagctagctagctacttcatatggatgttgaataagggatcatatcggaggaagacatgcatgagtgcttatgcaacta

SEQ ID NO: 73931 - DNA, 324 bp, Oryza sativa
  Clone ID: PAT_MRT4530_74164C.1
atggaggtcggtttcgaggaagttgggcgcgcgggcgaggtcgtgttccgcgcgggagatggagaggagacgggcatgcaggtggcgtggtccgcgcgggacgcggccgacaagtggccgatggtgtgggtgcccgtccgcgtggcggccggatgggcgcgcggctcctcctgggagagggaccgtgatcgtgaggatcacggagagtttgtggctctccaccccatgcgcgacaggcgtatggggttatcccttacaagccgccacaagaacgacggtttagaactagtgatgcctcagggcgacgctacgttcagggtgtaa

SEQ ID NO: 73932 - DNA, 183 bp, Oryza sativa
  Clone ID: PAT_MRT4530_74165C.1
ccaccctaccggactgacgttttacactatagattcggtctatgagaatagcttctccattatagacggctttaccgacaccctggcggcgctccacttgtgcttggaaaaaaacgtgcttggctgaccattgaacgcgatgctggtgtggaatgattatcgacgaccacgtgcaccatcggt

SEQ ID NO: 73933 - DNA, 588 bp, Oryza sativa
  Clone ID: PAT_MRT4530_74166C.1
gaattctggtttctttgctattttgaaaagagaattttcttccctactccactactcatcccaataataataataataataataataataataataataataataataataataataataataataataataataataataataataataataataataataataataataataataataataataataataataataataataataataataatatctatcatgcttaaagaacatttaacaataaatcaagtcataataaaataaataataattacatatatttttttaataagacgaatggtcaaatatatcttaaaaagtcaacgacgttatatattaaaaccggagagagagtatgtggacgtcatcgtgacatcatcatcctttctttttcccttttttctaatagattaaatcttcggaaaatcataactaaataatcgtagctccgattcgagtggttcaagttgctaaatttttctaaaatcaagatctacatgttaaaaatatccacatatactgtttatgcttgtttttctgtacagccgggtatggttgttcaggatggttgggcctgtgcagcat

SEQ ID NO: 73934 - DNA, 1601 bp, Oryza sativa
  Clone ID: PAT_MRT4530_74167C.1
atggccggagatcggctgagctggtcggggctgctgaaatggagcctctcctacgccgacgggacgcggccgtctcgcgccatcagttgtgtggctgatggtggagagttggttgggggtgtgtgggtggtggtgcgcggcagcgaggaggagcggaggtggttatcggctgagctggtcggggctgctgaaatggagcctctcctacgccgacgggacgcggccgtgccgcgccatcagcgaggaggagcggaggtggttggcggaggcggtggagcgtcacatgatggttgacgtggtgagccgcatgagggagatcgcgctactcatgagcaccccgatctccgtcctgggaggcgcacggcatcggttatcaagtacctcagaaattctaatgctcgtatccgagccagagcagctgatgtggtaactacagtggttcaaaatattccaattggtcggctgctgtacatggaacccaatgacttctatcctcttatatgaaaatttaagtcagatcctgatctcactgcccgcataaaagctcttggtgcactatcctccttgattcggaacaacaaaccaggtgtttctgctttcttcattctgttggtggcttggttccggttatcaagtacctcagaaattctaatgctcgtatccgagccagagcagctgatgtggtaactacagcttagtgaaagccattccggttgctccggtgtttgcacagctaggtttcccgcggcttatgatgcatttggtgtccagtgatgacttgggtgttctgagaagctgcattaggaggactgcttgagcttgcaagggacacgacactgggaagtaggagtctactagcagatcatgccaggcttctacgccttccccaggcacgtatagagagaataaggatgatggctccagaagaccttgatgctgcacgcgaggagaggcaactcgtagattcactgtggattacgtgctaccatgaaccgtccacacttcatgtggaaggtcttcttgttttgcctggggaggaatgtttcgaacaacctcctgacgtggctggtagattcttcgagcctctgcggcgaagttcggcaaggagagcaccttctaatgagagatcagatccaggagatggaactgggggaggaatgatgctgcttttaggtccatccccaggcagtagatcaaactcggggagtaattgatcactctgggatgtgaattacatggaaaaggagactgggagtctgctgtcctcttatgtacattgtgcagggctagtgctatagagtgttgctgttaaggggctagtaaaaagtaaataaataatttcccagtttcgaagaaatgtaagtggaaaatatgtgtgatgttcagcagtgtataatatgtctgatgtttagcagtgtgtagtctcattatacaatagaaatgcgaaatacttttgtgtaagagacctaaacgatggtggggtgatagtatgaaatgtaaatgtagcgcccaaaatagaagtcaccctgtacatgttatgttgtatgtggaaggagaatacaggctgaaattaaaaaaaaaaaaaaaaaaaaaaaaaaaaa

SEQ ID NO: 73935 - DNA, 981 bp, Oryza sativa
  Clone ID: PAT_MRT4530_74168C.1
cccacacgcatcccaaccatcctctaacttcacgcacgtatatcgccccacgacaccgccgcgaacacgcggcaaactagagcaaacacgaacccctcggcccgtagctggacgcatccccctatggtcaccgccgtcgggccataggcacgggggaaacgccggcctagacagggcaagggaagggggaaaagaggcggcggtccgcggctcaccctagatcgacggtgacgacgaaaaaggcggccggagcggaggaaggcggcggcgcggctcgggtcgacggggacggcggcgctccggcggtcggcgagctcgacgagggggtgaacgggggcggcgacggtgcgacgaagccgaaggaggcgacgccggggcgggaaacggtccggggcgacgacggtggcggaccggagctcgacggtgacggcggagagagagagcgacgtcgcgagctcgaatctggcgaggaggaagggcggcgagaggcggaaacggacggaggaggtgcggggagggtttaaataaggttggaagggggaggggcggcctgggaggaaggaaaccagcgcggcgttctcgggctccatcaatggcgccggcgggattaggggaggggttccaaacgaatccaagggagagagggagggaaaattggggggaaagggagagggaatcactgggagtatttccccccactttgttgcacccgtcagcgagggtggcgggcgggatttgagggaggaatggcgctagggttcgcacgggagagagagagaggaaggaggccgagcgggaggaggacgacgacccggggtgggacccacgcggccaggcgcgctgtcagcgcacgcacgtgcgtggcactggcgggagggcgccgctcggcttgggcccggaggcagcccaggaggagaggagggagaggcagcccgggagggagagggaggaggagggagctgggccgaggggaaggagcga

SEQ ID NO: 73936 - DNA, 660 bp, Oryza sativa
  Clone ID: PAT_MRT4530_74169C.1
atggttggtgataaggacgcggcggcgctggctggagagctgaccggcgacgcgggcgccagcttgaacggcttctttgaccacacgggtttggagtcggcggtggtaggggaggggcaaggggaaggggaggaggaggaggagctggagtggctttcgaacaaggacgcgttcccgtcggtggacaccatggcggcggaggtggagtcggcggcgcccggggcgccggcgcgcgcggcggtggggccgaggaccaagggtttgcggcggcgccggcgggtgactgctccgtggagcctggcgccccttctgtcgcgcccgcgtcaggcggcggcggcggcggcggacgcgggggcgccgcggcgccggtgcacccactgcgccgtggatgagacgccgcagtggcggctcgggccggacggcccccgcacgctgtgcaacgcgtgcggcgtgcggttcaagtccgggcgcctcttcccggagtaccgcccggcgaacagccccaccttctcgccgctgctgcactccaactcccaccgccgcgtcatggagatgcgcctccagagcgaggaggacgcctcggccgccagccgcgtcaacgccaaggcacgccgcgccgagcgcgcggcggcgcgcctcgccggcaaggacaagaagtga

SEQ ID NO: 73937 - DNA, 1434 bp, Oryza sativa
  Clone ID: PAT_MRT4530_7416C.1
atgcggaagaacttccgcaagcggaacctcgaggcggacgccgccgccgaccactccgacgacgacgacgcccgccggctgaggtatgtggagaacgagctgttgaagaagaggggcaagaaggttgatgtgaaggacaaggaggagaaagaccaggtcgatgagctctacactgtgccagaccacctcaaggttaggaagaagaactcggaagagagctcaacgcagtggaccactggcattgctgaagttcagctgcctattgagtacaaattaagaaacattgaagagaccgaggcagctaaaaagatgctacaagagaaaaggcttgccggtaaaacaaaatcagatgctaacattccgtcgagctataatgctgactttttccatcgcggaaaagattacaccgaaaagttgagaagagagcatcctgaactgtacaaagatcaaggttcacaggctaatggaactggaggtaaatcaatgggtggtaaccatccagatggtgctggtgcagggcggagagaagctgctactgatgagttgttgcttgagcgtttccgcaagcgtgaaaaattccgtgtcatgcgcagataacatgaaatggaataggatgctaacttatgctatttcctttaaagggcaagcggtgtcagtgtgaccacatgatggccctctatacatcggttgattttggcttttgcttctaaagccagtgtccatggctcatcatgttataggcgtatcttcgaagcatttgggaaaattggacaggtcttcatgaaactgatcaatattgttctgtactgagcagcaatccaggatctcgtttctctcttttctttaaaactgctggttcaaccatggataaattgccaatgatctcagatatgcctttccatcccgatcctgaggcttaccttccatgcttatcatttctgctgcttacacaaccaccttgcggcttgcaccttattactgaaaatttcctggatataagcaagcactggcaatgtaccttatgttatattttcatcagaaacactcagctttgttgatgttgcccttctgaaacaaggaaaagctgtcagtaaagaagttgttaatttctgctccgtgcattgatgtgaccttgcataattttttgagccatcatttgtttggcacattatgattatcgctgtattaatgttgaccggctattttgcatctataactggattgaatggcgtaatgcttgtagtgtgcaagctgttagtacatatgttaggttaagagaatgtgggtttgtcacagttcagaaatattgtgtcattttagcatggttgcatgtcgtatttaagacggtcctgaaattgagttggtgaatcatccattcgggagtctcaacctgtgtcctcaggctgtttatttgtaaatattgtgcatgctcat

SEQ ID NO: 73938 - DNA, 287 bp, Oryza sativa
  Clone ID: PAT_MRT4530_74170C.1
tttttgtttttttttttttttttttttttttttttttttttttttttttttttttttttttttttttttttattttttttttatattttaattttttaatacatttttttattttttcaggggaaaaaaacaaaacaccgagggatcatttaaaaccacattgtgcaaaactaaaagtcagtagtagtcagtactagtactgaaaaacaggcacaaaaaaaacattgattgaatgaggccataaaaaacctacgagggagttaaactataccgattgaatggatcca

SEQ ID NO: 73939 - DNA, 384 bp, Oryza sativa
  Clone ID: PAT_MRT4530_74171C.1
atgtcgccgaagcgtctccaagtcggcgcgctctgccccttttccccgccggccactgctcatcgtcccgccgccagcgctgctgctgagacggcccaggcccacggcccacattcctcctctctctttctctctcgcttctccaacgccacacagcgagaaaaaaacgcaacaacgctggcgaccttcctgacgacgccgacgagctcgacctccccgacggtgaggcgttccaggatgggcagtgaggacacaaaagatatgctgaagaatgtggactggaaaacagttggtggttcgaggacagtgccattgtctgggaaatgggcaaatgatttgattgctacctctgaagagttctccttgctcgtgttcagctgctaa

SEQ ID NO: 73940 - DNA, 1034 bp, Oryza sativa
  Clone ID: PAT_MRT4530_74172C.1
atggaaatatgccaggagaaaatcagtttccttggtcatgaaataggagaaggcaaaatacacctacaagaacatattgctaagaaatttttacaatttcctgatgctatgaatgataaaaaggaattacaacaattcttaggaattgtaaattatgctagaaaccacattcaaaatttagcaaagttagcaggaccattatatgctatattaagaaaaaatggtatgaagaaatctatgaattataatggagttgaattcttcacttttggggaagataataaactcagaatattcccaccaaactcttataaatttaaaccaaaggaccatataatcatatatgaagtgcaagaatgtattctggacaatttttggtatcaatataataatatgaagggctatatcctatcaatattaaatagtcttgctgaatattttcatttgataaatgaattaatgccagttgcaaaaaatattgaagccatacagcaaaagcccatttatgtggtttttgaaggaagagtaccaggcgtctatatatcctttgaagagataatatctcaaaaaatagacgcaaagctaacagtaggaatatcatggaagaaatataaagacattgaagaaccattaggacaagctaggaaaatattgggaataaattattatctagagccagcggcaaaggaatatattcaaaagtgcaagaggctagaaacaagaaaaatccagagcccccacattatacaaatataaaggaagaagggtcatccagaaaattgacatataaagaatgcttaacaaagggattagaccccttagatagtgaatatattgatttaaagataaatgaaaaaattgcagaagtctcgactcagtgaaagaaagatttaaaggaagaaattttcaaagaattaaagcaagaattaaatgaaaattttgaagctctgaagaaagcatatgatgagaaatttgaaatagccttttctgatgatgacactatggatatcggtggtcatgggcaaccagacgaa

SEQ ID NO: 73941 - DNA, 144 bp, Oryza sativa
  Clone ID: PAT_MRT4530_74173C.1
atggccgttgtcgagccggacagcggcagagctcatggctatgacaatggcagcgtcgaggttagcggcggcactgccgaggcagagaacagcacgcgaggaagtgcggggcggcggcggaggccggcggcgaacggcaggtaa

SEQ ID NO: 73942 - DNA, 337 bp, Oryza sativa
  unsure (1)..(337): unsure at all n locations
  Clone ID: PAT_MRT4530_74174C.1
aaaaaaattcacccaaaaaatttttgtttacgagggggataaaaaaggggggccccccctttatttaaggcatataacaggaaaaaaaataagttttaaaaatagggttaaagaggacaaaaggggaagaaaaacaaaaagcccctaaagacatccgcggtaaagagaggggcaccttaaaacaggaaaacatttataaagggacaacaaaaaaantttacccccacccttttcaaagaaaaacctttggaactctgggcggggttaaaacttttgaatatcacggggcagaacaaaaaacccccaaattaaaattgtggggggggaaattttgccc

SEQ ID NO: 73943 - DNA, 928 bp, Oryza sativa
  Clone ID: PAT_MRT4530_74175C.1
ctctctctttctacggctgtggagctgaagcatggcctagctgagctagcagctggttcttggttatataaagagagatagctaggatcaagagagaggcagatggcatggagaggtgttgcaatgtgcattggatgtgtagatagagcctgcagatctcgatcgatctcttcaagtccatgccatgcctttccacagctttcttgaacttctcttgtgcctcactcactttcattactggagagatatgcatcatcagtggaagcttatagggagaggagtgcaagaagagggtcaagacggccggcggaagaaatggcattacaaggactttgaattcagttagcaatgccatgagacaggcagagagagagagagagagagagagatgtgatgctaattttccatttcatgtaagttagcttttcataattagatcaagttttctctacttaatttggtgccctttttgcttacgtttttttttccgctgggaggttttgcttacttaatttaagtgcctgctagtttctttttgctagtccagctagccactgcatacttaaattttatatctgccactgtcagctccaattatttgtcgtttgttttttcaaacaacagtctgcatgcatttcggcatcaatagaggaccatcactgtgtagctcgatcattgtagctcatgaaattgatgtctcttccgtaaaggcgtcttcacttttttctcttaccatgcatatcatgcatcaaggctaaaaaggaattcaaccttttccattttgctttgcttagtactacagtaccatgtagggcttctcgcatgcatgacaagaaatgcagcaagattgtggtgttgagtttgaatactcaatgggagcagtatatagccgatcttgatgaatttatcatcacggaatgtgtctatg

SEQ ID NO: 73944 - DNA, 293 bp, Oryza sativa
  Clone ID: PAT_MRT4530_74176C.1
gggtgggggttttttttttttttttttttttttttttttttttttttttttttttttttttttttgggtttcaaaacatttcattattcattatttggtttgaacactttctcggtgcatgcaacacagcaacggggggacccccctgggggggggggaagccagctaagcctagttctggccgggggcaaaaatgctgcactggtgggggttaacccgggacattgacgggaggtggcccccgtactggcttgccctggtcaagcctcacgcgggtcataccccggctggtg

SEQ ID NO: 73945 - DNA, 426 bp, Oryza sativa
  Clone ID: PAT_MRT4530_74177C.1
atggtcgtcttcttcttcgctcatccaatccatgggcgcacgcacgacaacaatttttcaaccccaggggtagcaaccgagggagggtggggagggtcatcggggggcaaatccatgatggccgacgcggagatcgatcgatcacgccggcgcgcgcgccgtcgccctcgccggccggagatcgccgacggatacctagatccatctcaggcctctcgactatactccatcggatttggtagtaattttcctaaccagattctagaagggaagtacactcctatatgtgctttttcacaacgagcaaaggttgcaagagaagccagtaggttttcgattgccatggtggccatggccattgacgattgtgccgaacagagttggtgtttcttggtcaccaaaaaacacctgctgtttttttggatc

SEQ ID NO: 73946 - DNA, 891 bp, Oryza sativa
  Clone ID: PAT_MRT4530_74178C.1
cccacgcgtccggtaattttcctaaccagattctagaagggaagtacactcctatatgtgctttttcacaacgagcaaaggttgcaaggtgtgctctcagcaacaacagttcgctttgaaattgggcctttttttgttgtcattcggaagtagaggggttaggtcctgaaagttacttgcacgaatcaaccccggccacacaccagtatactagtacatgacagtgacaaaacctgataaattcagagaagccagtaggttttcgattgccatggtggccatggccattgacgattgtgccgaacagagttggtgtttcttggtcaccaaaaaacacctgctgtttttttggatctgatcttgcaaccttcaaggagatcgccaagaaaaatcatgcttctgcggagtcttgtttaactctgctcttccatgcatcagcctggcaggatgagatttgagttccagggtgcatctttctgatgtgttcatcctttcttgaacagttcccccttcggtagttccttgcatggtagaaaataaaatctccaagggaaaataagagcaaacacatgagagacacttgcaggagccttactaccggcggctatgaagaagctgctgaatgaagggcgacgagggaggcgtaggcgccatccttgatgttcatcaagacaaacggtgagcaacgatcacggttgtccggttgaccatcactctgtccagcgcgttttgaaccaccctttcggattcagcatccagcgcactggttgctttatccagcagaaggatcttgggatccctcacaatcgcacgagcgaccgccactccctgctttcggcctccagacaacttagctccccgctctcctactgctgggccatatcccttcca

SEQ ID NO: 73947 - DNA, 423 bp, Oryza sativa
  unsure (1)..(423): unsure at all n locations
  Clone ID: PAT_MRT4530_74179C.1
tccatgcgactatcctctcctaagtccatggtgacgctgccatcgttganggatgaacaanaaanaagtcccacggcatccggtgcgactacatccgctcagccaccaacgttatcatggtgacgangacgacctgatnctgttcncngggaagtncgggctgggcgccntccgccaacaagaaatcaacggcggggctganctggaagcacgcnactcccgcctcnaacngcnaacccgccgggttgcncgctcncccgacanacttggnctgccgcgnccgtccggccncatcaatggggcgtcgggnttcgtcctccngcctcnaanaaaatccngcnttcctggtncannatcntcggctnntcanattcattaanctagtccggtcnaaatccantactcctntnttttttagngaat

SEQ ID NO: 73948 - DNA, 476 bp, Oryza sativa
  Clone ID: PAT_MRT4530_7417C.1
ccaccccgccgtcgacgaaccccacccaaacctcgccggggaaccagtccaagctccgtccaaccatgcggaagaacttccgcaagcggaacctcgaggcggacgccgccgccgaccactccgacgacgacgacgcccgccgcgtcgccctggaggagatcaagtacatgcagaagctccgggagaggaagctgggcatccccgccgccgccgccgcagcgggcgcgtcgtcagcggcttctgccgacggggcctccccccgcggaagaggcggcggcggaggtgggttagcggccggaggggatgccgagaaggaggacctcgtcctccaggacaccttcgcgcaggagaccgccgtcaccatcgaggatcccaacatgctgaggtatgtggagaacgagctgttgaagaaagagggcaagaaggttgatgtgaaggacaaggaggagaaagaccaggtcgatgagctctacact

SEQ ID NO: 73949 - DNA, 825 bp, Oryza sativa
  Clone ID: PAT_MRT4530_74180C.1
atgggggagttcccaaccccaagtgagaagaggaagccgctgtacacgaacgggctcgacctcctttgggaagagccacgtgagtttaaggtcggcctcctccctatagctggaagggtgaggaaggccgacggtgggcagagcgtgggtggcggcgaccggctgagcgcgctgagtgacggcgtgatcggccacatcttgtcgttcctcccggcgaatgaggcggcgcgcgcggcggtgttctcgccgcggtggcaccacacgttcaccgccgtccacaccgtctacctcgtggagcccgacgcccccgttgtcgaccacgacgagcttgccaagtacagcccagggtggggccctccgtccgaccccaacccgccaccgccgctgttcaccagcgccatcagcgccgccctcctcgcccgccaccgccgcctcgccgccgtctccttacgcgcgctccgcatctccatgttcgagccacagaagtacagcgtgctgagggggctattcacctgcgcggtgctgcgctcactgtcgctcggctccgtccggctcactctgcccgcggccatcgccctgccgtccctcgagacgctgctcctggccgacgtcaccgaccacgagaggaacatgcagcgcctcatctccggctgcccgcgcctcgccgacctgacgctcgaggcctgctatgagatggccccgctctccgtggcagggctggctctccggtgctgccatggcctagacaccgtcgtcctcgacgacatgtcgtcgccgtcggagctactacaagccttcgagctacaagccacggctctccggtaa

SEQ ID NO: 73950 - DNA, 448 bp, Oryza sativa
  unsure (1)..(448): unsure at all n locations
  Clone ID: PAT_MRT4530_74181C.1
agagatgaatcgaataatttattaatgaatgtttcgtccatttccaccccaccgaatcacacaaataacaatggtcgaaagaaattaatgaattattcacaaaaaaaagtttacttttaatgtatgtatacgaaaagaatgcaaagtggattattttaatttaggttttgtaagttatataattaaatatttatttacgtttttattttaccatcattaaatgtagattctcattttgtgagctatttgtttttattcaaaatttggttgcaagaatgttacgttaattatttgttttggaaaaaaattatttttctgtttgatttgaaaaaaaggcgcagtctattaatctattccaatttgaggagctcaacatcgaaagtcaaggtggcattcggtggaatgacaccncgatgacctctactaccggtagcgtagtctggagaac

SEQ ID NO: 73951 - DNA, 913 bp, Oryza sativa
  unsure (1)..(913): unsure at all n locations
  Clone ID: PAT_MRT4530_74182C.1
cgtccggnaaggnattgagccagtgggcggggatgggnagaccacagccttgttgcctttggatgaacccgttgtctctttgtgtctcacttctttcaaataacaagggagnngggagtaagaatcccttccctttccgatttgtctaaccctctatcatttgcatgtcatattgtttgcaggtcgatccctagttcagtgaggggggtggggtntttgagcaatatgacctaggtactggtacctgggctccagctagtgacggagacattttccataaaccaccaccgagtccccatacacttatccatcatatctttacttgctgcaatcgcagatattggaataaaggaatcatgtattgcagtaaaagacagcctatttggttggtgaagcaagaactgcggtttggggcttgatgggctcttgtttccgctgaggtcttttcctccagaatatctagaggagcaaataaactatgggtgtgttcggagggggcattttacagcagcggctgcggctgcagcagttcaaaactgctgcggcagcgatgccgccgaacagagtcgatgtgttctctattgaaagtccctggatcaatcgtccaattagtgtatggacctttgatgccttcttccctggattaatcgtccaattagtgcatggacctttgatgccttcttcttggctgtttgacggacctttgttgccccatctttaacagtatgctacacatctattatagatactagaaggatatgcgcggcgccacgccgcgcacgacaatgttttgcaaaaacaaaaaaaagaaaacgtagcataattaaatgtgaaccaaagatcacattctttccaattctcaaactaaaagagcataatcttgctcaaaaaaaaaaaaaaaaaacccgcggcc

SEQ ID NO: 73952 - DNA, 327 bp, Oryza sativa
  Clone ID: PAT_MRT4530_74183C.1
atgcagacggcgacgcgctggtgcacggggatggcggctgacacggcgaagctcccctccttcctcgccgccgcctcgcctcatcccctgccaccgccgccgccgccgctccgtgtcgccacctgcgccgcccttcctcgctgctgcctcgcctcctccgccgcctgccgccgtggtgccgtgcgcgttcagagattcggggtaaagaatatccggttttatggttcaggggtgtgggcggcggaccaagcggttatgattgccgtgaccagtgaggcgtcctccccgcagctctctggtgggtgcggcctccgttcgtctgagtga

SEQ ID NO: 73953 - DNA, 333 bp, Oryza sativa
  Clone ID: PAT_MRT4530_74184C.1
atggtgacagcggtggcctccaatggcaacaggggcagcggctgtgcatcccttccgccagatccgatgggaggggaggctgcagccttcatcgacgacagcggcaatggccacgtcctcccttccgctagatctagcgggaggggaggtggcggtggctacaatgggaggggagaaggaggctcgcccctcctctcctcctctccatccgccgatggcagcaggggtggggaaggacgccgacaccatgtgttcaacatcgtccattggagcttcaacgtcgtgttcttgatgtttttgtccgtagtcatgtgttcttataattcactataa

SEQ ID NO: 73954 - DNA, 861 bp, Oryza sativa
  Clone ID: PAT_MRT4530_74185C.1
atggccaccaactccaaacagagtgtgcatatgaatccagggcaaggtgaaacgagctatgctcagaactcagcacttcagatgaagaaaccatatggtcgccttagatgcgtcgtggatgattatgtggcatctttgcatattaagcttaaggagttagtgggggataagtttataaaaacagcccaggataggatgaagactctgatagaggaggcagtcacaggcttatgcacaagctcatgtcctcacccaaagaacatggtgatcgcggacttgggctgctcctccggaccaaacgcgctcacgctcgtctctgccgccgtcgacgccatccaccgctactgcgcgcagcacgagcagctgccgccggagatgtgcgtgctcctgaacgatctgcctgacaacgatttcaacgccgtggcgaagagcttggacacactgaagcacagtggtgatgaagcgctcgctcgccctactgctgtgatcaccggtatggtacctgggtcgttctacgagaggctattcgctcgtggctccttgcatttggtttgctcggctaacagcttgcattggttatccgaggcacctgaagatctcaagaagagtagaatcccgatgcatgatagtgatgaacagttgagatcatcaaggcatcaaattgtcgcggattcttatgctcggcagtttaggaaggatttcatgcgattcttgagcttgagggcacaggagattgtccctggaggccgaatggttgtctcactgttggtcaagcgctcggacaaacctgacactgagttaattcaaccatggacgccggcggtgacggctttaagtgacatggcattaagggtgagttga

SEQ ID NO: 73955 - DNA, 165 bp, Oryza sativa
  Clone ID: PAT_MRT4530_74186C.1
atggggctcaccggattgcgacggagtcgaggacttctctcgccggcgtcggagatggcgcctccgttcccggcgaatccgaggtgggtgggcccgtgtggagaggaatgtgaggctgacaatggggtcccgccatgcagccctggcccacatggcagcgactag

SEQ ID NO: 73956 - DNA, 585 bp, Oryza sativa
  unsure (1)..(585): unsure at all n locations
  Clone ID: PAT_MRT4530_74187C.1
catgctagttgtagtggtggtggtcgccctcatgaaaaatgggaggagctgtcatgcttgtgtgcgctgtatggcttgaaagagatgaactgaccggatncaaggctgtgcgggattgattgtgttgcaacacaagatgcaaggtggccccccgcactgggcatgtgtgtgcgcctgctgtgcgtctgacgcctgactgcgccactgtgctggtgtgcctggacccgcatgcctatcgcantaaaaaaggtggtgcccgcctttgtctggctgcctgctgtcttttgtgtctgccatgatatggtagatagacctgtntgcacccactgtgttatgatgagatgatgtgaaatggaaatgatgagtgtgatgatgggtaatggtggtgtctgaggattntgcacttgnaatgatgatgatgatggtgaccgtaagggcacatgagtctacccatagtgtctgtgaccactgtggtggaaaaccgcgagggggagtgatgatactattatactagtactcatacgtaactaccttttttcgactctttaaatnccttttttttcataaaaaaaaaaaaaaaaaaaa

SEQ ID NO: 73957 - DNA, 579 bp, Oryza sativa
  Clone ID: PAT_MRT4530_74188C.1
atggctcgacgcgccgcagccgccgacggagagtcccgtcgccgccttgccgctcctcatcctcctcgtctttctcctctcaacttcactcggggcgtgcagttcggcgagcaagaggggcggcgacgggcgacagcggcggtgcgggtcgtcgccgccgacatgccggagccggtgcggtggctgccacccaagcttgttcttcccggctgcgtcgccattgctgcacggacaaggtttagctgctacctagctggagcaagagccatcgacaatactgcagccaagaaggacattgctgagaagatcaatcacgcaggcttcggcttcgatgggttggtgacggtggtggcggcacttaccgacgggcagagaagccagcaactagctgaaatggctcaaccagctcgatgcacaacggttttcaacatccaaccgaaggggcaatatcatctcatcaaggcacattttagcgaaaatgaaatcgaaaatggagaaaatggcaaagtagatgtggatcaaatcaactggcacactcatacacctaaaggcaagcttttagacctgcattggagttaa

SEQ ID NO: 73958 - DNA, 353 bp, Oryza sativa
  Clone ID: PAT_MRT4530_74189C.1
ggggcgggcgaaaaaacataactatcggggtcaaaattcaaaaaactcaacaggttgatcatccccagccccagcagctcaaaggagcaaagcattagaacggggtacccaaaatatctgccccaaaactcaggacaaggcccgaaaccgggaaagctatcaggggagggtcgattgaattctgagggcccaggccttgagcttgccgaaaaacccctgcttctcggcggggggctggaagccaccgcgccccaacttggacgagggggcgatgaacctgagcttgatcccctccagggcgagccgcgaggtctgcttcaacagcgactgggggggggggacaactctttttt

SEQ ID NO: 73959 - DNA, 530 bp, Oryza sativa
  Clone ID: PAT_MRT4530_7418C.1
atgatggagcgtacgtgggcgcgcaagatgcatacccatgccaggtgccagcgcattggctctaagaccatcttcgtcgccgagccaatctcgccgagccatatccatcgacagcacgttctttcgagccgagccagactcatcgattttaacagggcggaccggcttccatctgaaaagatcgttttcggcccaagagatcagacacgggtcactcgcgcgcgtggtgttgcacaggcggtcctgtgcggcactgccgcagagaatttttttccgagcggcaggccactcggccacatcgctaaaaagggcctgttcagcgcggcgccgtgcggtggccgtgcgtacgtcgagaggtggaacgggacgcgcggcgaccgaggaacgggtccaggaagaaggggcgacggcgacgcgcgcgctcccgtcccgtggatcgtggcgtgcaggtcatgggccgagaaagaagatatggccgcagggcagcaggagtgcggtctgcctgtggccgggttggtgggccttgcaaa

SEQ ID NO: 73960 - DNA, 248 bp, Oryza sativa
  Clone ID: PAT_MRT4530_74190C.1
aattcaagagtgaacagaggaggaaaggaacatggcttcgtttgcatccacggcggcgcttggggatgcgtmgvcggagctmaamgtagcggcggcggcggcgggcggtgtggggtgcgcgcgtacgmggcgctggcggtggcggcgccggcggcgagggacgcactacgaggtgctcggggtcggggcggragcgagcaggggggagawcaaggcggcgtaccggcgtctggcgagggaggtgcacc

SEQ ID NO: 73961 - DNA, 192 bp, Oryza sativa
  Clone ID: PAT_MRT4530_74191C.1
atggtggtcaatgttgatgacgaggctgttagctcagatagggttggcaattcaggctcgggtgaggatgaggttgtcgtatgcctcaaccaccacgctccctatcccgcgaagaggaggagaagcaacttcagtgatgaatcagatcccacccgcaccgagctccgctcctctgaccgccatgagctctaa

SEQ ID NO: 73962 - DNA, 1985 bp, Oryza sativa
  Clone ID: PAT_MRT4530_74192C.1
ctacgccccatgcctcctcgaccgcgacgactcctcgcgccgccgcgcccgctccttctccttgtcgcgctcccgcgccttgcgctcctcgcgatcgcgctccttctccctgtggtggcgatcgcggtcgcggtcacgctcgccgtccttgtcgtcgcggtggtggtggtggtggtggtggcgagaggaggaggggcgctcgcggtcggggtccttgtccttgtcgcggcggtggtgcttggaggtggtggcctggtgaatctgtggcttttgcaagtctttcagtagaccacagtacaatgcattatctggcatgatcatttcagtgatgttgtatcccagtggatcagccactttcacatagacctcctgcccattgtaccagttatccagcttctcagaccggagattccagatgccaacattgtcgagcgagactagaaccgcagtccaccctccagggaaaacctgagtagtgctgcgagagatggcatcccatttgttgtacctactcctgcaatctggagtccaatcaccattatccatcccaacaacaaagaatgagtaaccatccagatggtaggtctgaacaccagtgtcattgttctgaaagacgatctcgaggaagcccttgtacgatgcgttcagcgtggatgaagccatttttggtggagcattgcctggcattgtggggaagtcagtcttgtacactccagtcaagttgtggagatcagcaagcctcagtggagtctctggtggagagtatgagaccccgtttatcgtccttcgacgctttccattgatgagcaaaggtaactcgttcttgagaacgaaggtctgagtgatgttgatagagtcgtagcggaatgatccctgtggatttggacgtgcagcaccagcagttgtattcattttgatagacctggcttggtccatggaataggacttgtaatagaaatcatttggaccatcaggaaggggaccagaagctcttcctttggagtttgagtactgcaggacagccacaccgttgacatcgtgccagcgagactcgttcgtgacgaaccttgggctcgccacaatgtagtagtcagtgcttgcattttggtccatggtcaccaagaaagagtatgactgtccaacatggatgtcaagattggtgtaattctgctgataagtgtaggttccttcggcctctactaggcgcatattgtgattctggattctgaagttgaggctagttgaggtgccgacattgtgaacacggaagcgataagttttgcctggctcaactccaacagtttcatgttgaaggccttctggaatcaatgtgttgtcatagctgtaagggcctttcccattgatcagaattccatccggtatcccgagatccttaccatcatctagcattttcctcaattcgacgtggctcttggtgtaccaatcaccgatgaacaaggtgatgtcgccgtcgggctgggcgaaggggaccggcacgacggcgcggttgttgacggtgaccgggccgaacccgccggcggctcgctggagaccaagcgaagggaagtagaagaagctgccgatctggtccttgagctggaactggtaggtccagttccacccgggagggatcgggcagttggtgccggcgacgccgtcctgccatgagttcatcctcatctggatgccatcccaggtgaggaggaggggctcatccaggttgttttggacgttcaccctcacgttccagttggttgtcacgttcaggagtgggcccgggaactggttgtttatcgcgatcaccttctgcgagacgccgagcggcgccaccgtcatgtagccgacctcccaccgcacgtcgcgcgtgggctcgccggccgacgcgggggccgccgcggacgccgccgccgccaccacggccgcgaccaccaccgccgcaaccgccgccgccgccgccatcctctctctcgctgccggacgcgtgg

SEQ ID NO: 73963 - DNA, 246 bp, Oryza sativa
  Clone ID: PAT_MRT4530_74193C.1
atggagcaagaaacaggaacagcaacgcgtctgtcaatgaccgacttcgcctccatcaccaaagtgtcatcactttacgttcttcagtgccggctatcaaccacctcctttacgtcggaaccccgcctcgtcgatcttcataggcatggacagcagctcgaggcacatccctgcgacttgcctgacaccggctgtgggcacgcctgcgacaagcaggacctcagcgacacccgtggccatggatag

SEQ ID NO: 73964 - DNA, 359 bp, Oryza sativa
  Clone ID: PAT_MRT4530_74194C.1
caaggtgttcatcgagagctcctacgacctcaacgggttctgggagggcatcgtggacaagtacgaggagctgcggcgggcggggcgcgacgacggccggtgaccgttcgtcacgcacttcgtcgggtgcaagccgtgccggaggtacgccgacagctacccggcggagcggtgccggcgcggcatggagcgcgcgttcaacttcgcggacgaccaaatactgaagctgtacgggttcgcgcacgagtcgctgaataccacggccgtgcggcgcgtcaggaacgagaccggcgagccgctagacgccggcgacgaggagctcggccggttgctgcaccccacgttcagagccgcaaggc

SEQ ID NO: 73965 - DNA, 833 bp, Oryza sativa
  Clone ID: PAT_MRT4530_74195C.1
atcgctaattggtttagagagaggtatatgcaaaacacattacaattacatcccagaaccagtgatacaccgacttggaaactcattctatcacaattccagaccctatgctctacaacacaggtaaaactcggaaatggcagaacaactctgatttggaaggataaatggctgcatcaacgtctggaatttgcttacccagttttatactcatttgctttgcataaggattgcacagttcaatcacaattcagacaaaattcctagcaaatacagctccatcctagcctttcctaccaagcaaaatcagaactacacgcactgctgcaaatcttgcaaaatctctgccccatcccagagaaaacagacacaaagagaattcttgtatactgcacccaaagtctcagcagcaaatgcctatcgcttgctgacataccatggatccatttggaaaccagcagattatatatggatccacaccataccacaaaattgtaagatttttctttggctagcattcaaagacagactaaacaccaaatccaatatggtcagcaaaaactggaatgaagatccccacagctccttgtgcccctgcactagaatcagcagatcacatcctcctaagatgcaacaatgccaataacctccgggaaaaattgaacttactgcagctggccaacaaatccgaatcaagctcggccttcctacaagcagtcatagacatgaatcactcatcaaagggaatagaaccaatttggtttgctgcttgcgcttacacgctgtgaaaatctcgcaacaacatagtgtttgagggacaatttgacaaccca

SEQ ID NO: 73966 - DNA, 1450 bp, Oryza sativa
  Clone ID: PAT_MRT4530_74196C.1
tagatttttttcctattcagccaatattttttcccccaccgccctttccgccgatggaggtccgaccacgagcgcccccgccgccgttacgtgcgagacgcagacctcatcaaatccccgcacacccacgaacactgcctccgcccaggcctcttccgcgagcgacgttgccaccgtcgccgcctcctcggcaagcgctgccgcctccaccgcggccttctccccgcgcgactgccgcctcagccggcgccgaatcccgcgagcgccgccaccgctgccaccgctagcttcccccgtcagatcagcgtgcctccgcgagagccgccgccgccgctgtggcctcctgcgactgctgcttcctcctcctacgactgatgcttcctcccgcgagccacccgcacccgcacgccgtcctcatcccgagcgccggcatgggccacctgctcccgttcggccgcgcgcctcgccgtggcgctctcctccggccacggctgcgaagtctccgtcgtgacggtgctccccaccaaccccccccccccccccaattcctcctccacccgcggccacggagaccgcgtgcttctcttcctcgctcactcctcctcgcgtcctcgcaggagcgactcctcgctgccgccgctcctccgcgtcctcgccggagccgacgcggccgtcctccttcttccccaccgccgcggctgtcctccttgctcgctcctcctccgccccgctgccggcgccgccgcggccgtcctcctcgctcgctcctcctccgccccgctgccggcgctacgccgcgtcctcgccggagccgacttcggccccttctccggcgccggaaccgacctcgacctcggcccctagagatccaccgccggcgacggccttcgcggcggccttggcgaggctcgccgccttcctacgcaacgcctcgtccgccatcgccgccttcaccttctccgatatctcctctgcgccgatcaccccggcttccccctcccagctccaggtgtccgcccacacgccgagcccggcgcgcgccaccacgccggagttcacccgctggtcgccgaacctcggcagcgccagcaccgggacgccgctcgccgccgcctccgtcaccgagttccagccgcagtggctcacgaacagcgccacggactcgtgcttcaggacctcttcctgatccacccatgccttggtgacgaggcctcgcttctccacccgcttcaagaacccctccaccaccgaccgcgccggctgcgcgtcgagccactccatgtagtttgcctgcggatcttttgcctggttgctcgccgggagaagtggccccacggcgaacaccggcgggaagccggaggcgaccttgccctgctgcagggccgcgacggcctccggctccaaggccgccggggatgtcgacgtcgccgacgccgccgccgtcgccagc

SEQ ID NO: 73967 - DNA, 399 bp, Oryza sativa
  Clone ID: PAT_MRT4530_74197C.1
cttgctacagtaaattccccacccttgacccctttatactcctcgatggctgcgacctcctccccagcggcgggagggagaggggccgtgccgcgtgccccaaccgaagcacgccagcggacgcgtggcgcgtgccgggcatcttgcaccgtccccagctgtagagaggcgacccaacttggagacggcccctggaacaccaggcgcaccagcgacagcggaagcgacgaggttacggctcgcaactgctatggggactcggatactagccgaggcgacagcagccgcgcagatccaacccgtggcggaagccgcggcgcggatcacctccgcggcagccgctacgacctggtagaggaccaatgtgacggcagccgagcggatccaacccacggtggc

SEQ ID NO: 73968 - DNA, 1416 bp, Oryza sativa
  Clone ID: PAT_MRT4530_74198C.1
atgccgagctctggcgacgcggcgggcaggcggccgcatgtggtgctcatcccgagcgccggcatgggccacctcgtccccttcggccgcctcgccgtggcgctctcctccggccacggctgcgacgtctccctcgtcacggtgctccccacggtgtccaccgcggagtcgaagcacctcgacgcgctgttcgacgcgttcccggcggtgcggcggctcgacttcgagctcgcgccgttcgacgcgtcggagttccccggcgccgacccgttcttcctccggttcgaggccatgcggcggtcggcgccgctcctcggcccgctcctcaccggcgccggcgcatcggcgctcgccacggacatcgcgctgacatccgtcgtcatacccgtggcgaaggagcagggcctcccgtgccacatcctcttcaccgcctccgccgcgatgctctccctctgcgcctacttccccacatacctcgacgccaacgctggcgacggcggcggcgtcggcgacgtcgacatccccggcgtgtaccgcatccccaaggcctccatcccgcaggcgctgcacgatcccaaccacctcttcacccgccagttcgtcgccaacggccggagcctcacgagcgccgccggcatcctcgtcaacacgttcgacgccttggagccggaggccgtcgcggccctgcagcagggcaaggtcgcctccggcttcccgccggtgttcgccgtggggccacttctcccggcgagcaaccaggcaaaagatccgcaggcaaactacatggagtggctcgacgcgcagccggcgcggtcggtggtgtacgtgagcttcggcagccgcaaggccatctcaggggagcagctcagggagctcgccgccgggctggagaccagcggccacaggttcctgtgggtggtgaagagcaccgtcgtggacagggacgacgccgccgagctcggcgagctgctcggcgaggggttcttgaagcgggtggagaagcgaggcctcgtcaccaaggcatgggtggatcaggaagaggtcctgaagcacgagtccgtggcgctgttcgtgagccactgcggctggaactcggtgacggaggcggcggcgagcggcgtcccggtgctggcgctgccgaggttcggcgaccagcgggtgaactccggcgtggtggcgcgcgccgggctcggcgtgtgggcggacacctggagctgggagggggaagccggggtgatcggcgcagaggagatatcggagaaggtgaaggcggcgatggcggacgaggcgttgcgtaggaaggcggcgagcctcgccaaggccgccgcgaaggccgtcgccggcggtggatcgagccaccgttgtctggtcgagttcgcgcggctgtgccaagggggaacatgtcgcactaattga

SEQ ID NO: 73969 - DNA, 373 bp, Oryza sativa
  unsure (1)..(373): unsure at all n locations
  Clone ID: PAT_MRT4530_74199C.1
tcctccgcgctcttcggcgaaggcgcgggaatcancatgcgcaaagaacgcccgcgaaacccaagccggcggcgtcntcggggancccgtggttacggcgccgaaccgcgtcctctacctcgggccgctctcngggganccgccganctacctcaccggcnaattcccgggcnaatacgggtggganaccncggggctctccnccaaaccngaaaanttcgccaaaaaacggganctggaagtgntcactcccggtgggnnaanctgggnccctcggttncttnttcccggaaccctcccccggaaaagggtttnaatttcggnaaagccntttgnttcaaggnggggntcccnaattttcannaaagggggg

SEQ ID NO: 73970 - DNA, 252 bp, Oryza sativa
  unsure (1)..(252): unsure at all n locations
  Clone ID: PAT_MRT4530_7419C.1
ccaaacctatccaaaatccccatctcgccaccatctgcaaactcgccgccggccaccccgccgtcgacgaaccccacccaaacctcgccggggaaccantccaagctccgtccaaccatgcggaagaacttccgcaagcggaacctcgaggcggacgcgccgccgaccactccgacgacgacgacgcccgcngcgtcgccctggaggagatcaagtacatgcagaagctccgggagaggaagctgggcatcn

SEQ ID NO: 73971 - DNA, 1089 bp, Oryza sativa
  Clone ID: PAT_MRT4530_741C.1
atgctgctctctcattgttttgcagtagcattcgctctctctgcgctgctcgccggcctcgccctcgccatggacgacgcaacgttcggcatggagtggacggcggcggagctgggtgaggcgaggtcggtcatcgctagggtcagcaacgcctacgactccggcgccggcagcagcaacagtgccggcgacaccaagcacgaccgcattatgagggagctccaggcgaggttcccgtcgaggaccatggtccaggtaatcgacttgtaccttaatctcacggcggagacagcagcgcaggcgggggcggcccagccgcaggacgccggcggcgccggcgacgccgccgtcgtccaccctacctttggcctcgcgaacgacaacttcggcatgcccgttgcgaacaacaacgacgacggcgtcgacgccggcatggtgtttggtggagctcctatggaggagggggcggtggcggtgaacggtggggacggtgaggtggtgaacccggacaatgctgatgacgatgtgctttggaccgattatgagcacaggctgttcctgactgggatgcgtgtgtacgggcgtggcgactggagaaacatcgcgaggtacttcgtcggaagcaagacgccggagcaggtctccatgtacgccgataactacttccacatgatggagatcgccgcggccatggaagccgacggcgacgacgatgacgaccaccatgaaaacaataacaacaacttgggcggcgggcagctgcacgccgtcgtcggcgccgtcgagcaccatgaaaattacaacaacaacaacttaggcggcgggcagctgaacgccggcctcggcgccgtcgggcacggccccggtgccgggcacattgctccggcgacctcctccaacaacaacgtcgccgccgccgccgcgaacaacaacgtcgacgcaccgttctgggttccgctgctgtacaacctcgagatagagcagcgcatgatggagatgcaggcgcagtcgcagaaggcctgggatgatcagcagatgaagatggctgaagctgcaactgatccaaaggagggagcagctgataagtga

SEQ ID NO: 73972 - DNA, 582 bp, Oryza sativa
  Clone ID: PAT_MRT4530_74200C.1
atgcgcagatcagggtcacgtctctgttggcattatttagggcatgagcagtgtataagagcagaacacaaatcaatccggcggcaacagcggcgacgctcgcgggaggaagcatcagtcgtaggaggaggaagcagcagtcgcaggaggccacagcggcggcggcggctctcgcggaggcacgctgatctgacgggggaagctagcggtggcagcggtggcggcgctcgcgggattcggcgccggctgaggcggcagtcgcgcggggagaaggccgcggtggaggcggcagcgcttgccgaggaggcggcgacggtggcaacgtcgctcgcggaagaggcctgggcggaggcagtgttcgtgggtgtgcggggatttgatgaggtctgcgtctcgcacgtaacggcggcgggggcgctcgtggtcggacctccatcggcggaaagggcggtgctcacggcgaatcaccagcgacatcagctccgtgccctcttctcctttccatggcggcaagcaacgaagtgcattgaggagagaggagaattccagggaagagagatgcacactgcatttataatgtag

SEQ ID NO: 73973 - DNA, 286 bp, Oryza sativa
  Clone ID: PAT_MRT4530_74201C.1
cggattctctccagaatgaggactttgcaacatctgatgctgtgttcgattgcattggtgaccctccagaagtacgctttgatttggagttttgcgtccacacctcctcccgaaaccatttgtaactgaaggaccgacgtccatttcacccctatcatataaattctataaattcttgccccggattatggaaagcggaaatgggtctctataaaatccttcccaatacacagagtccagaggaacacgccttgctctatatactgattgatatttggttatttat

SEQ ID NO: 73974 - DNA, 339 bp, Oryza sativa
  Clone ID: PAT_MRT4530_74202C.1
ttgttttttttttttttttttttttttttttttttttttttttttttttttttttttttttgggactgaaacatttttatttcctcatcctttttattcattcctcccaaagagacggatccatggaagtttttttgcccttatcaggcaaggaaagcacacacacacgggggcaggggaagggttttgaacaaaaccttaataaacattcaaagctaaaacaaacaaggggaccaaaccaaatccccaaaaaaaaaaacccaggggaaaggccaaattttttttttgtccccaacgcctccgtgtaacccccaccttttggggaattttttttaccct

SEQ ID NO: 73975 - DNA, 161 bp, Oryza sativa
  Clone ID: PAT_MRT4530_74203C.1
gagctgtacgacgccaggcaccggtgattcatttagaactactgtgagacatccgtcaccaatgagcgctacattccaaaagatatgcgtgaccttctgataagccacctgcgatgtctcgagggctaagacctgtttgctgcgagaggatggctcaacat

SEQ ID NO: 73976 - DNA, 316 bp, Oryza sativa
  Clone ID: PAT_MRT4530_74204C.1
ttttttttattaactcattcttcatagatatatattacagagggaccaaaccatgaaagtacatgggtcactgatcagagtacagtatatcactgacagggagctagctaactagctaggagcaatacgctagtcatcaaactacgctactataaacatgggggacaatgcaaatcatcaccagaaaacagaccatatatagctaaatgcattctaaaccaacacttcgaagtaaaaccacgatggattgcggaatcgatcctacatgcgctattcagtgatgagtccatgatcctgacacattaattaacttgcg

SEQ ID NO: 73977 - DNA, 283 bp, Oryza sativa
  unsure (1)..(283): unsure at all n locations
  Clone ID: PAT_MRT4530_74205C.1
cagaaaaccgtacttccaaaataagcaagcnaaacctccggaaccagtgttcggcccaaggcccatctntcctctacgtccggcggcggcgcatcccggcctcgcgctccggcggcggcggccagtntgaggcgganggcaccgcggcacgggagggcagggcgcanggcgacggcgaggaagccaaccgggcgcggcanaagggagaccgcgtcttgtctgcacggctccattagcggctggaggtgggactngagccgggagacccaactagcgtccaccg

SEQ ID NO: 73978 - DNA, 449 bp, Oryza sativa
  Clone ID: PAT_MRT4530_74206C.1
gcacacatatatgtgttaacagtgaaatttggtaaagcccgaagtcatcatcggtttagagtcaatatcggctttagagtactggaatcagccgattgaaggaagcagccgatgggagtcatcaagttgccatgctgtcgtgttttttgactgccaataagggtttcatcggggtttcagccgattttatgacaacagacctccagccgatgtatgctttaaccatcagatcagtacttattctatcatgtcattgttagccaattggtttatactggactatattgttgttatactttattatcaacagccgattgcctttatatcatcatctacattggacatatagccgattgcttaaaccctatcgctatcggctggtatcggcatcggctattatcgacatcggctggaatcactacatcggcttgtcagccgatcgactgttt

SEQ ID NO: 73979 - DNA, 399 bp, Oryza sativa
  Clone ID: PAT_MRT4530_74207C.1
agtattattccatgttgatcccttcaacaacacatgaaaaacctgggcccacaggacgttgtaatcggaattggggcaaaagcacaagagggagcccagtcaacgctgagcgccccccttttcggaaattcaaaagatggaaaaggtgctagataagtaaatgagagaaccacggaatgaaacaagcccttgaaggggcgcccgcacccgtaaaactacatagatacagggcgtcacctgtttaggggagacgtgtcgattcaagggagcaacagcccgccgcaggtttgggggagggaaaccgcgccggcggaaaaaaaccttaagggcgtggggaaaaacggggggttaaaattcctcctaaagctttatgggggcgcccaatatggagggccccgg

SEQ ID NO: 73980 - DNA, 389 bp, Oryza sativa
  Clone ID: PAT_MRT4530_74208C.1
ttttggggtttttaaattgttttgttttttttttttgtttttttttttttgtttttttcttatttgttttttggggaaaatataaatttggtataaacggcccaaaaagaaaattgttccgggcattggcaaaaaggggaaaattacaaaggcgtcttaaaaaaattcaaccggatataaaactctattggagggggggaccaagaaacaagaaggaaccaaagaaaaggaaaaaacctgaaaaggaggggttatttcaaggttccacggagttgcccacacccaaatgggggccactaaaacctttgaggggccacatttaggacaaattttttcaaaagggtaccaaaagggttgggggagaactttggaaaaaaagggcccttggt

SEQ ID NO: 73981 - DNA, 1637 bp, Oryza sativa
  Clone ID: PAT_MRT4530_74209C.1
atggagatcgtgggcgagtgcgagtaccggggcgaggcggtgttggtgacgccgagctcggccacgccgcggcgctccctctacctctccaacctggacgaccagcgattcctccgattctccatcaagtacctctacgtcttcccgccctccgccgccgtggccgccgacgccctcagggccgcgctcgccagggccctcgtccactactacccactggccggaaggctcaggcaccacgccgacgataagcttgtgctcgactgcaatgccgagggcgcgctcttcgccgaggccttcctgcccaccctcaccgccgccgacttcctccgtgccggtgccaccgccaagccgcacaagtcctggaggaagctgctctacagagtccacgccgccaccttcgtcgccgtcccgccgctcgtcgtccaggtgacacaactggggtgcggaggcatggtagtgtgtacagccatcagccactgcgtctgcgacggcatcgcaaccgccaacttcctccacgcctgggccgccttcgccgcagccgacctggacctcgccgccgatcgtgacgacgacctctccgtcgtcctccatgaccgccgcgccttgcgcccgcgctgccctccgcgcgtcgccttcacgcacccggagtaccacaccagcagcagcagcagcagcctcctcctcatccagccccggctgatgccgctggcccccgtctccctgaccttcacagcggcccacctccggcgcctcaaggcccggtcgctccgcagctgcacctccttcgaggcgctggcggcgcacgtgtggcgcgcctgggtcctctccctcgccccgccgcccccgcccgacatgcgcgtcaagctcctcttctccgtcaacgtgcgccgccgcctcaagccggagctcccctggacctactgcggcaacgccttcgtgctggcctgcgccgaggccacgccgaccgagctggcggcgggtgccggggtgcggctggtgcaggaggccaaggactgcatcgacgacgactacgtgcgatccaccgtggacctcctcgaccagcggcgcggcgccaagccggacctggcggcgacgctggtcatctcggcgtggacgcggctggggctggaggacgtcgacttcggcaaggggagggcggcgcacatgggccccctcaccagcgagatttactgcgtcttcctccccgtcctcgccgaccccaacgccgtcaccgtcctgctctcgttgccgcaacccgccgccgacaccttcgagcaccattgctgcagctgcttcctcctcgacctcgacgacgaccagcccgccgtacccgtactagtggacaagcaggaccacgacaaccagctcgtgcgtgcccatcatcaacatgacatcctcgcctagtagcttcttaattaatgcactactaattaactactatttccatcccaaaatataataatttttactacctccgttccaaaatacaattatctctgctttacaactcaaattttgtccaaaatacttattatcactatggaatgccaattatcatataatcactttctatttctattgagaaaatgtttttaacagttcgagtggacgtccaaaaaaaaaaaaaaaaaaaa

SEQ ID NO: 73982 - DNA, 757 bp, Oryza sativa
  unsure (1)..(757): unsure at all n locations
  Clone ID: PAT_MRT4530_7420C.1
ccgacgggtgcctccccccgcggaagaggcggcggcggaggtgggttagcggccggaggggatgccgagaaggaggacctcgtcctccaggacaccttcgcgcaggagaccgccgtcaccatcgaggatcccaacatgtgcgtttttaacttcgcgtgtgattgttcttgccaatctgttgttttcattcatctttgatgatgcggaattgaagcggagcgtatgtgcgtgcgtgggtctgatgtttgaaggctgaggtatgtggagaacgagctgttgaagaagaggggcaagaaggttgatgtgaaggacaaggaggagaaagaccaggtcgatgagctctacactgtgccagaccacctcaaggttggtagccgaacagagcttcgatgcactcctgaaaggatatttcatggttttgatatgtgtgcattgtaatgatggtgccaatcaattttttgcttataggttaggaagaagaactcggaagagagctcaacgcagtggaccactggcattgctgaagttcagctgcctattgagtaagttcttgtgccccttcgtttgttcttgtttataaaaggttcatttgttcatgtttataaaaggttgttaaggtagtcttccatattatgttgtaattcaaaggggaaggtgcccanaatactggcatgcatcataagggagatgtgcatatggggcttgttaataaggatatttattaattgactagctgaatgcctgtgcattgcaacag

SEQ ID NO: 73983 - DNA, 3896 bp, Oryza sativa
  Clone ID: PAT_MRT4530_74210C.1
ccgccagggggcactcaaggaagaacggctcgatccacgggcagcacgggcccaccgtcccgccgcgggagcgagctggacttgacgcggggggttctgcctgctgcctcacgccccgtccccgcggcgactcttactccaggactactcggcgcggcgctgctcggggacctctcgccggatgctctccgcctcggccgcgcggtgcccgtcgcgctccgacacctcggcggcgcccgacaacctgtggttgaccgccagcccctggacctcgggggcgagctcgcgctcgattagcacatccacacccgcgcgctggacgtccacgcccgcgagagcctgatgatgaccaccggcagagcgcccgagatcgatgaggacctccacagccgccagctcgccgtctagggccgcgtgaccatgaagcgcctcttcgcctccaacgtcctggtcactagcctcaacggcctcggcgccgatatcgccaacaacgttgtcactgcgggtgtcaagtgggtaaactttcacgatgatgacattgaggagctatgggacttctcaagcaacttcttcctcacagagaaggctgttggtcaaaacagtgctcaaacttgtgttcagaagctacaggagctcaataatgctgttattatctctactataaccggtgatttgactaaggagcagctttctaatttccagcttcctcaaattcctcttctgcttgatatttggaatagcataaaggctgtggtctttactgatatcagcttagagaaagcagttgagtttgacagttactgccacaaccatcagccaccaattgctttcattaagtcagaaattcgtggcctttttggcagtgtcttttgtgactttggtcctgagtttactgtattggatgttgatggagaggagccacatacaggaatagtagcatcgatcagcaatgacaaccctgcgcttgtttcctgtgttgatgatgagcgtctggagttccaggatggtgatttagttgtgttctcagaagtccatggaatgagtgaactaaatgatgggaaaccaagaaagattaagaacgctaggccttattcttttactctagaagaagacactacctcatatgggacatatgttagaggtggtattgttactcaggtcaagccaccaaaggttcttaaattcaaaaccttgaaagacgccattaaggaaccaggagaatttctcatgagcgatttctccaaattcgaccgtccaccacttctgcatttggctttccaagctttggataagtttaggaatgatttgaggcgattccctattgctgggtctagtgatgatgtgcaaagactgatagattttgctattagcattaacgagtccctgggtgatagcaaacttgaagagctcgacaaaaagctcctgcatcattttgcaagtggttccagggctgttctgaaccctatggctgcaatgtttggtggcattgtaggtcaagaggttgtgaaagcatgctcagggaaattccatccactttaccagttcttctattttgattctgttgaatctctccctgttgaaccattggagccagccgagttgaagccagagaatactagatatgatgcacaaatcagtgtttttggatctaaccttcaaaagaaacttgagcaggcgaaaatatttatggttggttctggggcgcttggatgtgaattcttgaaaaacctagcactaatgggcatttcttgcaatcagaatggaaagctgacagtgacagatgatgatgttattgaaaagagcaatctcagtcgccagtttctcttccgtgactggaacattggtcagcccaagtccacggttgctgctactgctgctatggcaattaatcctaagcttcatgtcgaggcccttcagaacagagcaagtcctgagactgaaaatgtgttcaacgatgccttttgggagagcctggatgctgttgtcaatgcgttggacaatgttaccgcaagaatgtatattgactcccgatgtgtatatttccagaagccactcttggaatctgggactctgggtgctaaatgtaacacacagatggtcatacctcacctaacagagaactatggcgcatccagagatccacctgaaaagcaggcgccgatgtgtactgtacattcatttcctcataatattgatcattgcctaacctgggctaggtctgagtttgagggtttgcttgagaagacccccactgaagtaaatgccttcctatcgaatcctggtggatatgcaactgtagcaagaactgctggtgatgcacaggctagggatcagcttgagcgcgttattgaatgtctcgagagagagaagtgtgagacattccaagattgtattacctgggcccggctcaagtttgaggattatttctccaaccgtgtgaagcaactgacatacactttccctgaagatgcgatgaccagctctggtgctcctttctggtctgctccaaagcgtttcccacgaccactggagttcttgacatctgatccaagccagcttaactttattttggctgctgcaattttaagggcagagacatttgggatacccatacctgactgggtcaaaaacccagcaaagatggctgaagctgttgacaaggtgattgttcctgatttccaaccaaaacagggggttaagatagttacagatgagaaggctactagtctttcgtctgcatctgttgatgatgctgctgtcattgaagagcttattgcaaagttagaagcaatttccaaaacactgcaaccaggattccagatgaaaccaatccagtttgagaaggatgatgacaccaattaccatatggacgtgatagctggttttgctaacatgcgggcaaggaactatagcattcctgaagtggacaagctgaaggcgaagttcatagctggcaggatcatccctgccattgccacctcaactgcgatggctactggtcttgtctgcttggaactgtacaaggtactcggtggtgggcacaaggttgaagactacaggaacacatttgcaaaccttgcaatccccctcttctctatggctgagccggtccctcccaagaccatcaagcaccaggacatggcctggactgtttgggaccgctggaccataactggcaacatcacgctgagggagcttctggactggctcaaggagaagggcctgaatgcatacagcatatcttgcggcacctcgctgctgtacaactcaatgttcccgaggcacaaggagcgtctagacaagaaggtggtcgatgtggcgagggaggtggcaaaggtggaggtgcccccataccggcgccatcttgacgtggtggtggcttgtgaggacgatgatgacaacgacgttgacatcccactggtatcaatctacttccggtgaagtaggggctgtcactccgttgacatggcgttggatttggtcttttcagagagacgatgtataagttgcaccggtgcctgtaaactaagtgggggtttaagccacattactgattttattttgctaccatcttgatagagctcgttcagatgggtggtttgttaccatccccgaaacttgatacgataccatcatattgataattgatgcatgatgataccgtacgactgaattagatatggcatatgccctgtttgcgactcgtatgaagaacagcaatttagtgtctgttttcgtgaatctcagctacccaacgctcgagccttgcccgctgcccggggggcctcgcgccacccagttacttgtgaaatcttttgcttcaaaaaaaaaaaaaaaaaaaaaaaaaaaaaaaaaggggcctcgtgccgattcctcagcccggggatccactagtt

SEQ ID NO: 73984 - DNA, 145 bp, Oryza sativa
  Clone ID: PAT_MRT4530_74211C.1
agggacagcaaaagggaacacaaattccttgatcaacagggcctgaaacatccgctacaaaacttagtaccccacaaaatctcaagaaaagaaaaccaagcattcacgggtgaagaacgttttgacgaaatttgacttttttttt

SEQ ID NO: 73985 - DNA, 146 bp, Oryza sativa
  Clone ID: PAT_MRT4530_74212C.1
atcgatctgttcttccactcaatcaaggaagggaaaaagagaggatacgatgagtacatatggattgcgagactcctcgctaatccaaacatatggtctgatggtatacacaaacaaggaatgaagccggcccatacaaaggaatg

SEQ ID NO: 73986 - DNA, 337 bp, Oryza sativa
  Clone ID: PAT_MRT4530_74213C.1
agtgcacattttttgcatgccagattggccatcaacttctgaatggaatcatccagaacagttggagatccattgtaaaacatttttttgtcttccagctcgtaatttcgtatacatggatcaatattttcctctacaaaaccaaacctattgatccccaacaaacttgccatcgaacaaaacaatcgtggcaatacattgtacaacaacaagaaaactagcctaccacaacttgagacttcactacctgtcgctattgttggcgctgatgcagaaactattcacaacataccggctgatactccttttgaagcttctcccacaaacacatcataag

SEQ ID NO: 73987 - DNA, 867 bp, Oryza sativa
  Clone ID: PAT_MRT4530_74214C.1
atgtcaactctcaccaaagcagcaaggagtctgctagctgtgccgcagagagaaaccttcattacaagtctatgccttaagctctacttgatgggcaattactcgagagataaaggatttctattaagtgaagcgattgatggtggaatagtaaaagatttggaccttgctattttgaacgagaaggaacctgaagattgcgatgacaaagatatgttttgtcaggccagagttctgaaagcctttgctggtgcttttcctcgtgtgcttcacttcctcacaaggctctctgtacaacgtgttatcttcaccgagacattcatcatattctgtttgactgttgcactcagctggacattcctcagggaactatttcttgcatgtggtgcccaattgggcttcgaaggcttcatgttaagcgaagttttacaaggcaccaaagatttgcatactttgacaatagatttccaaggagaaaagctttgggtacaacctgaacaaaaacaattctgccctgcattcaacaatctaaagactttatctattctttgtgtttatgttgaatttgacctgttatgggctttaaacctccttgaagctgcgccatccgttgagctacttttcattgatacctgggaacatatatgcttggtggaccaaatggatgaagagggaagaaaggatatctatggagaaagaacacatccttcatgggagatatccgagtttactggcaccagaaaatggcgattgaaaaaactccagtttgccggctttaggccactcaagcaacagctggtatttttaaaagccatcatggatcttagggacaatatttcatcgccatctcagataattttcctgtga

SEQ ID NO: 73988 - DNA, 1116 bp, Oryza sativa
  Clone ID: PAT_MRT4530_74215C.1
atgccgccgtccgcatcctcattcttcctccccattatcatcatcctcgttgtcgtcagagggaggcgggagaacacatggaagggtgaggcggcgtcggcgggcgagcgcggtggtggagaggaggcggcggcggtggctgcgacgcgggaggggaggccggcgccgacccagaagcagaaaccgaaggcaacggcgtgggcgagcgtgaggcagaggggcgcggaacaagactgtcgatttttaggatcggcaatatatgttacggggtgcgctagatcaaggagagatggtgacgtagggatttatcctggttcaagcccttggggagagatatgcaggatcctcgggatttatattatatcccgggaatctctctttctttatttacaagcatgccgcatgggcctaggacactcggctcatcccatgcggtgcggcccaaggcttgtcgttgggtacccagataccgtgtaccccacaaagacggagcgaggcggcgttggtgacggagcaggtctcggggctcttggcattggcgtcgacggaggggatgttggctgcagcggtgatgagcagcgccacggcgggcgggcgcgggagcaggtgcatgaggtccgggaagttgaggtccaaaatatagaagaaaagaacatgaacacaatcaaaaacgagttataccctaagaatggccctccgctagtgtttgaggcagaacaggagctgaagaagttgattccgatgaacaggagaagaaccacgagcagttgtgcggaagcactccccaaaaacctgatcgcccatctaccggtgcaggagggggaggggaagagaatcaatcacgattacttctgcttccgttaccgcagtaaaaacgtaatcaatcaaggaattgattctctcgccgttactgaagtaatcgctgcggaattatttggattcaattctcctctcatctatctctatgacccttatagcgtgcaggagggggaggtgaagagaatcaatcctgattgcttccgcttccgttactgctgtgacaacgtaatcaatcaaggaattgattctctcgccgttactgaagtaatcgctgtggaattaccgttattgaagtaa

SEQ ID NO: 73989 - DNA, 298 bp, Oryza sativa
  unsure (1)..(298): unsure at all n locations
  Clone ID: PAT_MRT4530_74216C.1
tagttctagctgcgccccccccccccccnnnccccntcgggcgccgttcgctccggcgactccacccgccgcgcgncgggatccgcccccgcagccgccctcgtcgtcgcctngtggttcccgcggcccgngcttttcttctgatcagcagcggtcggtngcgtcggggggatcgattcnatcggctcgcgcgngcgcgcgcgcgcgacaatcgcgctgccctcgntntncggcaagtagccggcttctatnggttgcgtcgggtgttgctaggggttcagttggtgtnacttgacta

SEQ ID NO: 73990 - DNA, 494 bp, Oryza sativa
  Clone ID: PAT_MRT4530_74217C.1
gaggaagctggcacgcctgcatgtgctggtatgctatagaggggtcgacctatgcgttcgtttcatcagtgcaaatcagcttgaaccaacgcttattgagtgcctattagctggtaacatcactacggttaatcatgcttgtggcagctcaattgagtatcagtctaacctagacatattctacggatttgggactgagctactaagtgatgctttagagcatcaccacagtgtcatgcaggaggctgctagagacagaatgatcagagaggagagatcgtacatgtgaagaatggcctgtaattgttgaaaccgactctgacacaacttaccgaccaagcacaatgctaatgcccagaagtttaatatagtgaacaacaacagacatgttaccgatggaacggattggatgagaacttatgcacaatcaaggctagagttatcattgattatactaggcgtgctgattcatacagaccacgtgctggaaggat

SEQ ID NO: 73991 - DNA, 1956 bp, Oryza sativa
  Clone ID: PAT_MRT4530_74218C.1
atgcacggcatggacggacgcgtgatcgccgtcgacaggggaggggtcgccgtccggcgccggccttgtcccctgtcggatcctgccccggcaacgcaaccaccaccaccgcgcacgcacgcacgcacgcgcgatgccaacgtcgtctgcctccctcgatcgtttgtggagcaaaaattaacgggcaggccgagctcgcctgcatgtagctcgatcatctgcggaaagcccaaccaaccaaccaaccatgcgttgtacgtccatcgacgtggttgccgggcctcctatagaaacccggaagaaaaagtacaaccaatgaggctcgaagtctatgtccgatttacaggtggtcgggccctgcacctgctgctgctgggctcggttgaagtggcgcagcaactggaacccgtgtttgcctcgaaagggtcgagctcccgcccccatccggaattcatagaggtggcaggcaaagcaggcagaggaagagagatatggaggatgaggcgcggcaactggatcgaaggaagaaggaagaagggaggtagagaggtggcaccaaccggatctgggctagggaggtttattggagaagaagcgccgccgcagcaggcttccttcttcccctagctagctgctggctgctgctgcttctctgggccctcgtggtggtcttctcatgtcaccaccgccggccgctagtgcctttctgggagccaaccaggaggccccgaatcagatcttggcgtaggtttgctcgactcgctgttgttgacggtgaggagggcgcttgcctcgtctttctttcttccaaagagcctgctcttttcttgggtttggcctaggaggaggggtttttggtgttcttggtagggaggaggattcttggcatttggcgagagaggggggaaatcttttgtttccttgtctgattctgctcggtcggtgagtggtgcggcggcggcggcggccatggaggcaatcacgatgtcgccgtcctccgtctcctcacaccatctcgacgtcgacgctgcctccaccagcgaggacatgtcgtcgttgcaggaaggcctcctcttctcggacagcctcaaggacctgaggaatctgcgttcacagctatactcagcggcggaatattttgaagtattctacagaaacaattctcagaaatctacggtgatgacaagtctgaaagattacacagttgaggcccttgttagcactgtcgaccatctgggctttgtgtcatacaaggtggataaccttgtcaaggaaagatccgatgaggttaatgagacagaatttcgagtatcctcagttgagcagagagtacggatttgccaacagacaatcgaccaggagggaagatctcaacaatctcttctcattagagcaccaaaataccacaggcgcacagatatagtggaatcagccattcatccagtttcagaacctccacggtatagcaggcaacatatgagccgtaaaatgcacaagtcacaatctatctctacgccagttggcaggcaatctacaatgaggagcgcgcgttcaccatctccttcagctcgtggcacacatcatcgatcacggtccttgtcaccttctcgaaaagcacgagctaaatccccatctccccaaatcatcagcacacaaacaaaaggcatgttatcttcactagatgaaacaagagcaggttcaccaataccgaattccaatccccttgcacgatctgccacggttgcaagaaggccacctgttcatccaaagcatttttactcgtatgctctccaagtctccatttctcctgataccaaggaaccatgtcgtttggctgtcagcaaactctcagaagcatgccaatccaaagttccaaaccctgatatagtattatggtatatgattatatcctatgctgctatacaattttcaatgaacttggatatgtccaagggc

SEQ ID NO: 73992 - DNA, 628 bp, Oryza sativa
  Clone ID: PAT_MRT4530_74219C.1
ttttgttttagtggggtcctattgccacaccgatacaaggttccagacttctccaagtttttagggcaagatgatatatctacaatggaacacatcagccgattcttagctcaatgtggtgaagcatcggttgaggaggctctgaaagttagattttttttccatcatctttgactggattggctttcacatggttttcatcattaccatcaaattctatccgaggatgggccgatcttaagaagcaatttcatgattacttctttgctggaatcaatgagttaaaacttttagacttaatatcggttgagcagcaagaaggagaatcggctatggaatatattcagagatttcgtaatattcgcagccaatgttatgatttgagcctaagtgatgagcagttagtagatcttgcattacaaggattgtcagcacctatcagagagatttttttgccacgagtttgacagtctggctcatctaatgcaaacagcatcggctctagttttggagttatcaagatcagacagaaataattttgaagcatgagttctcatactccaaaattggggggcatgtgttaacagtgaagtttggtaagccccgaagtcaacatcagagcttcaga

SEQ ID NO: 73993 - DNA, 383 bp, Oryza sativa
  Clone ID: PAT_MRT4530_7421C.1
cacgcgtactgaatttttgtatcctaagaatggccgcccttttttttttttttttttgttttttttaaaatttttgttgttgcccctttaacattttttttatttttttagtggaaaaaacagcaatttgataataatttggtaaaaataaaacaattttttttaattaaaaaaaaacgaaatagctgggcaaaaaggaatcaaacacaataaaccactgctaagattacggatggacacttcactagactgaggacaatgttaaatggttgtacgcccagggcgttgttggtgaaaggggaagaaaggaggccttgccaggaataagaagaggccgttgctggtgacgatggtttggaccatgaaaacgaacaaggggaaca

SEQ ID NO: 73994 - DNA, 458 bp, Oryza sativa
  Clone ID: PAT_MRT4530_74220C.1
atggcactagtcgatggtggcggcgtagctacggcgatcttcaagcaatgtgaaggtgagaccatcgaagaagttggtgctgcggtgcagacaaaggaacaacaaggtcagggcggtgcttcggtgaggaagaaaggccgaacaatgccagggatcgagctcgtcctcatggagctgagggaggtggcggcgcggcaaagcgatgcgctaacgaggagaaacaggcggcttgatgatgcccagtttggaggagaaagaggaggagagtggggaagcgtcaatagagctcaggatgggaaaaagggaaaggcgtacaccaccatgggttttgtccacaacacaatcacatgtccgaaggcgcaaatcatattcggactggatgaggaggcccgaatccgaatacagaacgtgcagaacttcatctcttgccttctatggaccaaaagtgatgtggtgag

SEQ ID NO: 73995 - DNA, 159 bp, Oryza sativa
  Clone ID: PAT_MRT4530_74221C.1
atggcgtgcctggagctggagccgatgagatctgcaccggagctgccaccggcgccgctgctgctggaggagatggcgcgcctggagctggagccggagatggcgcgcctggagctggagccggagatggcgcgcctggagctggagccggtgccgtga

SEQ ID NO: 73996 - DNA, 473 bp, Oryza sativa
  Clone ID: PAT_MRT4530_74222C.1
aagccgggaaaaaaaccaaccagcgggggggctaaagggcccattccccccacaaatttgaaaaaaaaataatccccccggggggggggaaaaatttttcccccccgggggggggatttttccccccccggggaaccaggaaagaattttttttaaccccccccctggtcgggggacccgcccaacccttggtgacccgcaacgaactcggaacatcgtttcgaaaccccccatgggccaggggccccccggcccccccaagggtgaaacatgggcaagggaaagggcccctgccctttttcttggcaaaaaccccccccccatatccggggggacccttttgcccagggggttcaaaaaaaccctttgggccggggcccttttggttgggaaagcccattgaccccgaccagggggggcccttctgcttgggggaggcaaaggacccctatccctaaggggttttggtagcc

SEQ ID NO: 73997 - DNA, 1253 bp, Oryza sativa
  Clone ID: PAT_MRT4530_74223C.1
ctgcaggaattcggcccgggggtggttttgcggtgtttgtgttgatgatggccgtgcaggcgcagtacgtcgcccacgcctcccgctcctcctcctccgcggcgtacgccatcaggccggctctggagaacgcggcgccgagcagcggcgcatcggcgttgttcctggacgaggccgtctcagcggcgctgctacagcagcagcttgttgttgctgctgcggcggtgggcggcggcggcaacaacaacaacacggcggtgttcagtgacctgcgaagcgagcttacttgtagccagcgccgctttgacgacttcggcggcggcttcgtgccgcggaagcgcgcgcgggttggcggcgagggagaggcggcggcgggtctgttgatgagcagcagcgtcatggagggcggcgggcaccgcgcgctgttgccgccgccaccgccgcaggtgacgccgcaggcgttcggggacgtgcacaagagtagcagcagggtcgtcggctccggcgcggcgtccaccagcggccgccctgtctgcggtggtggcctcctgttgtcgcatctctaccgccagagcgtcgaggtcgacgcgctcgtccgcttcgaggtgcgcgccaccgatcgcgcatttatttatcgccatgggcgctggagctccgtgtcgttttgtctgctctcctctctcgaatgggcgtttgactcgatctgcacctacctacagaatgagaggctgcgcgccgggctggaggaggcgcggcgccggcacctgcgggcggtggtgtcggcggtggatcgcgccgccgcgcggcggctgcacgccgcggaggccgagctggagcgcgccctggggcggaacgcggagctcgacgagaggctccgccagatgggcgcggaggggcaggcgtggctgggcatcgccaagagccacgaggccgccgccgcgggcctccgcgccacgctcgaccagctcctccagtcgccctgcgccgccgccgccgccgccgccgagggcgagggcgatgccgaggacgcgcagtcgtgctgcttcgtgcaggcgcccgacggaggcgcagccgaggtgtccggcggcgggaacgggaggagggcgtgcagggcctgcggcgaggcggacgcgtgcgtgctgctgctgccgtgccggcacctctgcctgtgccgcggctgcgaggccgccgccgacgcgtgccccgtctgcgcggccaccaagaacgcctcgctccacgtcctcctcccctga

SEQ ID NO: 73998 - DNA, 565 bp, Oryza sativa
  Clone ID: PAT_MRT4530_74224C.1
ttttttttttttttcaaattatattaagtgaaaatatattaaataattattgagtgaaaatttgttgaacactgaaaaaaatctggcaatccaaaaaaactacaaatcatgattcagtcgacgatgttttatcaactccatgttatgcttgatgtcttcagcgtctttttccccgtctcacgccagtacccaaagaacgaaagtctgaaccgatttcaggacacatccaatcaattcgttcgaatacataattcatggcttttcaacgttaattaaagcatcacattcatatatcagtacatgacatggcaaaccacaaagccaaggttgccataatctaagctacgatcaaattacagaaatctttgcatttgcgaataaatgcccaagagagaatagattaaatcgaatgcactatttcatacacgtttggtattcacttccaaatatgagagtatgcactaaaccttaggagaatatgattgcgtccatattctaatacagaagtatatgatacttgcttcagaaaaatctgacaaggagaaacaaagttcaaactcgtcat

SEQ ID NO: 73999 - DNA, 1803 bp, Oryza sativa
  Clone ID: PAT_MRT4530_74225C.1
atggctatcggtggcttgtcccatcctcgccctcacatggatgtagtctttggctggctctggcttctcctcagctgccgccgcgtcgccatcgccatcatctccaacatgctcccgagccggccgataaggcgccgatggccgccatctcatcagtcatcaccactgccctgcggagacgacacgagcgagctgagcgcggagtcgaagtgcgccacggactccgccgccgccggcgccatcatcatcatcatcatctgttcaaccgccaccgcccatgatggcatcatcgttatcgtccccggcggcggcggcggcgtacagcaaccacatccatccacgccgacgctagggccgcccgcgtcatcgtcgtcgtcctcgtcgtcaagcggccgccagcgctggaggcttgccctggatcagcagtgccaagcgctagacggggtccacctctccgacgtcgcccagcacgccgatggccgccgcgccgccgaccacgagggagcgaaagaggagacctggtggggaacgtggggaacgaagggcaaatacgagatggtgcagaggccgcgcaaaagggcgcggacgacgtcgccgtgctcgccgccggcgtcgtcgtggcgggacctcccgctggacatcgccggcgaggtcctccgccgcctcccgtcctacgccgaccgcatctgcttcggcgccacgtgccgctcgtggcgcacgtccgcgcgggaacaccgcgcgccgccgccgctgtcgccgtgcctctgcttcgccgacggcagcttccgcggcttcttcccggaggacgcgcggccgttccggctgcccgccgccgccggctggctcggctcctgcggcgagtggctcctgtaccggcgccacgacgacggcgcgtacctgctcgtcgaccccttctccaaggccgccgccatggcgccgctccccagcgtgtcccgtctccatgtccgccacgaccccatcgtcgccgtcgacgagcgagacctgcggtggtgcaggccgacgtggctcccgcgcgagaacaccggcgagccgcaggccgcggcgtccttgctcaagctcgccgtgtccccggccgccgacgtggtggcggcggtggtcggcgaagggaggcacggcaagctcgcggtgtgccggccgggggcgccggcgtggtccgtcagcggcggcgacggctggaggcggatcaaagacacggcgttctaccagggcaagctctacgccgtcgaccacaacgaggacctcctcgccgtgacgctcgccgccgacggcgagccaccggccgtgtcccgcatcgaccgcgtgatcaacggcaagccaccgggggcggccgccctcctccgcgtgacgctgcactacctcgtggactccggcggcgagctgctgctcgttcgccgggaggtccagcgctcgtcgatggtgaggacgcagccgtggcagcacacggcggagctgcaggatcgcttcgccgtgttcagggccgacttccggaggtcgcggtggaggcgggtgaaaaccatcggcgacgagtccggcggccgcgcgctgttcgtcgggcggtggtgctccagggcggtgcgcgtcgccggcgaccggtgggccgatcaggtcttcttcctcgaggacggcaccggcgacgagtggcacacacgggcgcagcgctgctcgctgagggggagcaccttcgggtgcgtgaggccgaatgagctcctgccgttgatgacgacggcggacggccaggatttggatgcgacttggatattccctcgggaggcaaaattgtga

SEQ ID NO: 74000 - DNA, 208 bp, Oryza sativa
  Clone ID: PAT_MRT4530_74226C.1
cgagtaaaaacataggcggaattttttgaagtggcagcagcagttgacacataagttgcaaacccgaatttttattagtttacagacattggttggtgtttaggcgtatcaccagcgaatttaacaaacgcggcaagaatggtaaattggatgaattgcatgatgaaccattctacaatggcgggtgggccattcacgagcctggtgt

SEQ ID NO: 74001 - DNA, 477 bp, Oryza sativa
  Clone ID: PAT_MRT4530_74227C.1
atgaacggctgtactggtggtgctggaggagtggcagcagggaggctcccggcggtgagcctccagcaggcacagtggaagctagtagatgagcgatgtgagctccgggaggaggagatggagtacgtgcgatggttccaccgctatgagctcgttgcaaccggtgcaactccttcgttgccaaacacatcagggtgcccctctaaacttgggctcccatccacaaggagaattgaaaggttagggttccctgatgataatgatcacaccctccgtgtcaagtttattggtggtgatcacatgctaaaggactactcatccaccttgattatccacttggaggtcatcgatggccagctagtaacactagtgattgagtcatttgtggtggacattctagaggggaacaccaaagatgaaataagctattttatcgagaacttgctcaagtttaacctaaggaccctccgtgtctga

SEQ ID NO: 74002 - DNA, 267 bp, Oryza sativa
  Clone ID: PAT_MRT4530_74228C.1
atggtggtgttcgatggattacgtggatccgtattggcacaaactcagcaggatcatatcgaggacaagaagcagcagactagcaatgcaaacacgagccggcattccattaaaatcctcgatccatatactgcaagtagttgcctagttggtgtgcagggtcatggttggcaggtggcaacttatttaatgttatggatgggttgggaatggcctgactacaccggatccttatccgtggatatgtaccgccatggttccttctga

SEQ ID NO: 74003 - DNA, 318 bp, Oryza sativa
  Clone ID: PAT_MRT4530_74229C.1
atggcgtggaaaccacatattacaaagggaatagcagaactcgacgataccgacaagaccgtagtcgagttggttcgactagatcaccccggcgacttggctcctgaaagctccgacttcgtaggatgtggtggttctgttggcggtgagattcgatgccttaggtcctccccggaggtcccttttataccgcgggagacatccatatatgcgcaggtataccatatcagtgcaggacgtatatacaagggtagagggtataccttatccgtaaccctgacagtagcccccgacttctgcttaaatgaactcatgtaa

SEQ ID NO: 74004 - DNA, 342 bp, Oryza sativa
  Clone ID: PAT_MRT4530_7422C.1
atggggaatagcataattagagtcatactttctccacctactctttctcctcactatatggtcgttgtcttcaccactatcatcgtcataagaattgtcggtgatatggacccggggggggcctcggggtgccacgtcacaccactcgggcccgtgaggcatactaccccgaggccctcatccggccaccacgtggcggggggcaggtatgccctgtcccatcggcacgctgccaagtgtgcccctatatatggtgaatccaccaaagtctccatgcatttaagagggaatgacggggatgtcctccgtgtcaggcggaggacggcgctgggccccacctag

SEQ ID NO: 74005 - DNA, 207 bp, Oryza sativa
  unsure (1)..(207): unsure at all n locations
  Clone ID: PAT_MRT4530_74230C.1
ctcactaaatccgcgtcaggctaaacataaagggtggtttntcctcacccctataaatnttacatcaagtgctgcacaatacatatatatatgttggtggctgtctttataaactcactaactctgtatatatatcatcactagctctaaattaagactctagcatcttcttttattacttgaacgaacctcctaaaagcgacaccc

SEQ ID NO: 74006 - DNA, 399 bp, Oryza sativa
  unsure (1)..(399): unsure at all n locations
  Clone ID: PAT_MRT4530_74231C.1
attgggatgcattgctggccctatgccccttgggtgccccactagatgcatgtgacgcagctgctggcaatgcctctgatgaatggactggaaatgtaagatggaaaccacctggatggatgctgacctgattgtntgcttnatggtgacctgtncataatagnncccgatgatacctaccaatagtgctgccctcccccgaaatgatgatgactggctgtnatggtgatggatgtggcccactggggcaatgcaatgagcccctggtgatagggcatactgataaccaaacctgtgcctggtgtgctggtgacctgaaaatgagcctcangtaacgcaatatgcgccataatataaaaanncanatgantatatgctcaaaaaaaaaaaaaaaaaaaa

SEQ ID NO: 74007 - DNA, 1211 bp, Oryza sativa
  Clone ID: PAT_MRT4530_74232C.1
tttttgcaaccgggactattatggattttggccgaccgaccaaagatgcatggagcgcgcgcacgggcggcgccgaaggcggcaagctacaagcgcgtgggtgggtagtgctggagagccctccgcatcgtcgccgcctcctcctccctctcatcggcgccaccctcctcctcccccagtcaccacccttctccaccatcgccaccgccgtctccccatcagcgccgtcgtcttcctcctcccatcagtgtcaacgtcttcctctccccgtccgcccgtcgcagccaacgccccacgcccaccgccgggaagcatgagtaccgtcgatctcaaccttccccgctcctccctcttccccgcctcctctatgtccccactcatttctctcccctcctctctctctcacttctcccccttgtcccgtctagcctctttccctcccactcctgcggatccaacggctactccccctcctgcgtggatctcaccgcctctctgccctccaccaagccccgcagcaagcaccaagccgtcgctgaccaggtcgtcgtctcaccgaccgagcagcaagcaccaagccgtcacgccccgcagcaccgagccgtcgccacacccgtgggagggggagggggaggagctcgtcgcgccccgcagcaatgagtcgtcgccgcgaccgttgcagcaccaagccacgtgggagggggaggacgaggaggaggaggagctcgccgcgccccctgtcgccgtcgagccccccgacggctcctcccatcgtcgtcgccatgcccccacctcccgtcgcagtcgctgcgcgtcccgttgccgtcgagcccctcgatggctcctcctgttgccgtcgccgcacccccccgacgaccgcctcccgtcgcagctgtgcgcccacctcccgttgccttcgccaccacacacagctgccggagccgccgccaccacccgagaaccccgccaaacttcctacaaacgctcctaaaccgccacgtgcccccctacaaacgctcctacgccgccacgtccaccttcgaaaagtgcatcaaaatccttcccgtgatccaccgcctcaatccctcacttctccccggccatccctcgaatcaaatcagcgcattcgggtaaaatcgatgacggaggagaaagaaagctttgaaggccaatgggcgccgtccgacgtaacggaagagaacctgaaggag

SEQ ID NO: 74008 - DNA, 345 bp, Oryza sativa
  Clone ID: PAT_MRT4530_74233C.1
gtacacacattatccagtgcatgatattattcatgaggtagtcacaaatgttgtcaacaacaaggaagtcggatacagtggttggagtacacagggaacaagccttgtgcacaaactcaattcttatgtaagtaaagaaatgctataatggttccctagaaataagaacatactaactggttttgtttcttaaatcataggttgctcatggaccatcctctaattctgcatggccgggcctctttgcggaaattttatgaattttgacaaaggagggcccttaatgcacttctatggtctatactggcacttgaattttattattgctgtacattggtcccatta

SEQ ID NO: 74009 - DNA, 477 bp, Oryza sativa
  Clone ID: PAT_MRT4530_74234C.1
atgggaggagccgtcggggggctcgacggcgacagggggcgcggcgagctcctcctcctcctcgtcctccccctcccacgtggcttggtgctgcaacggtcgcggcgacgactcattgctgcggggcgcgacgagctcctccccctccccctcccacgggtgtggcgacggctcggtgctgcggggcgtgacggcttggtgcttgctgctcggtcgagaaaaaggacaacatgccactccgaatcgggttttgacaaaatgccaccccctacaatacaaaggataaaatgccactttaataggttactttcaggatattttgtcactttggaagattttaagaccaaaatacccttggatgtggataaattggaagagggaggagcggggaaggttgagatcgacggtactcatgcttcccggcggtgggcgtggggcgttggctgcgacgggcggacggggagaggaagacgttga

SEQ ID NO: 74010 - DNA, 607 bp, Oryza sativa
  Clone ID: PAT_MRT4530_74235C.1
atgaataagaaacttcctccgcttaacgcattaaaagcctttgagtcagccgctcgtcatttaaactttactaaagcggcagatgatttattcgtcactcaagctgcggtaagtcatcaaattaaattattagaagactttttaggcgtaccattgttttatcgtcgtaatcgtcttttagaattgaccgaaataggacggcaatattttgaagaaatccaaccgctttttcaacaaattgcgctatcgactgagaaaataaaattaaaaaatagcaggcaaattttatcaattagtaccacaccttcttttggtatgcattggctagtgcctcgtttaaatgaatttcatcataaatatcctgatattgaagttcgtttagttacagccgctcaagacgaaggattgttaggtaaagatatcgatgttgctatttattatggtagcggtaattggcagaatttagaagcggtcaaattagtacaagcgcgtattatgattttagcctcgtctgaatatttgcaacgaaatccaatgaccaagcctgaagatttaaccggtaaaaatttgatccatgtttgttcacatactaaatggaaacagatgg

SEQ ID NO: 74011 - DNA, 1444 bp, Oryza sativa
  Clone ID: PAT_MRT4530_74236C.1
cgggccccccctcgaattttttttttttttttttttttttttttttttttttttttttttaaattgagggacctaaagtgaacttatttccttgagcaaccaaacggtatacaaatacaccgtactccaagctaccatcatatacgtacagaaattgacaaatatgtctcgatttgagtcgctcaaatcattgaaagcgctgaattttcgttgcactgttagccgcatcgagccatcaattaatgctgcctgtaggcgatgaaccgcgcgaggtgtcgcagcggcgcggcgcgctcggcgtcgaacccgtcgagctccgcctcggccatggcgaggaggtcggcggcgtactcgcgggccttgtcgacgccgagcagcttcgggtaagtggccttgtcggcctcgacgtccttcccggccgtcttcccgagctgctccgatgtgctcgtcatgtcgagcacgtcgtcgaccacctggaagaggagcccgacgcagcgcgcgtaccgccggaccctctccacctcggcgtccgcgcccccgccgacgatggcgccggacacggcggcggcctcgaggagcctcgccgtcttgtgcacgtggatgtactccagcatggcgaggctgacggggaggccctcgctctccttgtcggcgacctgcccggcggcgaccccgccggtgcccgaggcgctcccgagctcggcgaccgcccggagcgtgcggtccgcggggacgccgtggtcgccgcagccgcgcgccacgtgctcgaacgcgagggcgtggagcgcgtcgccggcgaggagggcggtgaactcgccgaaggcgacgtggttggaggggcggccccggcggagggcgtcgtcgtccatgcacggcatgtcgtcgtggatgagcgacatggtgtggatcatctcgaccgcgcaggcgacgggcgtggccgccgcggcgtccccgccgacgagctcgcacgcggccagcgcgagcacggggcgcacccgcttgccgccggcgaggacggagtagcgcatggactcgcagagccgctccgggaagccgcgcggcatggcccggtccagcgcgtcgtgcacggcgtcggccctggcagacagataccgctgaaagtcgaagctaccaccgccgacgccgacgccgacgtcgccgccgttcagctccggcgtgaccatggcgcccagggagcacctcacgtcgacggagacggagcacccgcggcggcagcggcggcggcacgcggccggcgagagaagaagggaaggggatctctggaacgtcacggaggggttcgggcttcgtcggaggcagccggaggcggcgaccttggccacggccgtggattgagcgaggacgtgcatgtcgattgctgcgcgcgggaaggggacgagacgacacgagaaggaagaaagctcagagtttgcggacgcgtggg

SEQ ID NO: 74012 - DNA, 273 bp, Oryza sativa
  Clone ID: PAT_MRT4530_74237C.1
cggacgcgtgggaaaaaaaaaaacaactaaaaaaataaaaaaatgataaaaaaagaaaaaaaataatagaaacataaaaaaaataaaaagagaagagagaataaataaaaaaaaaataaaaaaattctggttcgcaggcgcccttttaaaaggatcaaagttaattaccccgtgtatgcaacgaaaaagcttttttatagggtaaccaaaataaaattaactgcccgaggtttaaaaacgtttgaattggaaaaaccttgcgttaaccaaatt

SEQ ID NO: 74013 - DNA, 486 bp, Oryza sativa
  Clone ID: PAT_MRT4530_74238C.1
ataccatgggtgcaatttactcacaataatatagcaacttttagcattcaggatttatcctaaaacatgacaacttctctaccaacattctcttcccaacttcactaaaaaaattctctttccaaccagtcacaaccttccaccattcactttttccaccgtcatctactttttaaccaatcacagcatcttccaatttaattccacctacttttttaataaccatatccaactgtaaaacttcttatattctgtggcagaggtagtagcaatttgcacacctttcacaagtgtacatacgcaaccatcaaccttttggttcagcatccctagcccttgcaatcaccctaggcctcctcttcttggttactgtcaatggttgtggtgatcagacctgttcaacatgtcacactcttgtggatccttcaaacttcttttggtgccctacccgtgaatgggtgttcagatgatgctacaggtgtcctc

SEQ ID NO: 74014 - DNA, 303 bp, Oryza sativa
  Clone ID: PAT_MRT4530_74239C.1
atgcggagggctgcggaggagctgcggcggctcggcgacgaggcggccctccgctggcggtggctgcgaaggagcggtagctcggcgacgaggaatacgataggcgacaaggcggccctccgctggcggcggaggagcggcggctcggtgacgaggaagacgaccgacgacggcggcgccggcacggatccccccacggccgccacggccgtttcctccgcacctcacggtcgccgctgctcctccctccgcgagccagctccgccgccgcagcacctctgtaggatcaaggaggccgactag

SEQ ID NO: 74015 - DNA, 306 bp, Oryza sativa
  Clone ID: PAT_MRT4530_7423C.1
atgggcgggcttttggtttggtcgtcggagggcaagaaatttgcacatagccgattccctgcgcggcggcgcagctaccccaaccacgccgtctccatcctggtcctcgtcggcgtcgtcttcatcctggtcctcgtcaacaccgtctccatcctgctagcacgccacctcccccgatgcattgcacaaagtgtctcaatggacatactctgtttgggcggcggcgactgctaccacagggaagaggcgcccggtgcaccctacggtttgggcggcggcgaggtggggaaggcgtcgacgaggtga

SEQ ID NO: 74016 - DNA, 220 bp, Oryza sativa
  Clone ID: PAT_MRT4530_74240C.1
ctcaattcctcgtgcatctttaattaccatgcatgtatatatatctggccgagtgtaaatactatatatatatatatgtatgtatgtatgtatgtatgtatgtatgtatgtatgtatgtatgtatgtatgtatgtatgtatgtatgcaccttatatggatacaccttacgtactcatctgtaaaatacataatatattgcgtctaaaaaaaaaaaaaaaa

SEQ ID NO: 74017 - DNA, 619 bp, Oryza sativa
  Clone ID: PAT_MRT4530_74241C.1
gatatgtcaaatggagtatatggtaaactacaggaggcaggtttagtgtccagaaattgatgaaagggatacttttgataaatgcccaggcaggtgctgtcttgctgaagccagatgcatctactataacagcatccaacaggaggggtctatccgtacaatacatatcctttcgtgtatatatacacgaagatttttactataacttaaatgctgacttatagaaccaagtgaaggatcttttgctttaagaactcctacaatgaatgtcttttttaacactttcttgcctctttttctggtggagctcaaagcattaaaagtttctgaatactcgtcgttcgaaagagttctagcaacatcagcgtttgtccagcagttgcttggccacaaggtacccagcaatacaccatgtttggcctagacgacactgtttcccaatgaagcgtgctcgtttggtgtcatagtcttcaggccattggtcgatagcaattcgcctctcagctacctctacagctttggcagcaatctctggtctgctcatcttgatagatgctactgtgagctgtcataacaatgttggccaggatcctccattatgatatgaccaaagcgtatt

SEQ ID NO: 74018 - DNA, 211 bp, Oryza sativa
  Clone ID: PAT_MRT4530_74242C.1
ccccgggcgccgatggtggacgcgtggataaaaaagagatcgaacggcgagcacgatttgcggacgcgctgcggcgatcgctccctcgccctctcacctcaatcggaccggaatcacctctcgccgacgccgtcgacgatagtgatggtaggacgaggaggcctgaagaagaacagatcgacctgccgggcttctgccttcgtctcatcag

SEQ ID NO: 74019 - DNA, 2066 bp, Oryza sativa
  Clone ID: PAT_MRT4530_74243C.1
ctctcttcttcttcctctagtcctctcctgcctgcttcgtctactcctctcccaactccgatcccctcctctgcgagctcccggtggccggacccgtccggcgacgacgatgagccgctcgccggcacggcgccctgctcagatctgaagagctgcgagaatccgaggctgctcttgctggtttagctccggcggcggcggcggcggcggcgatggaggaggaggtggaggcggcgaacagggcggcggtggagagttgccacagggtgctggccttgctgtcgcagcagcaggaccctgcgttgctcaggagcatagcttcagagacaggagaggcctgtgccaagttcaggaaggtggtctccctcctcggcaatggcggcggcggcggcggcggcggcggcggtggtggacatgctagaggcaggatggccgggagaagcaggccttcggcggtgctgagagagaagggattcttggagagcagcagcggcggcggccagctggggatgatgatgtccggtgctgccactccgtctactagctccgccgcgcatttgcgcaaccggattggcggaggcagcggcgtgccaccggattcgttgcgggggctcgatttggtcagctcgagcagcaagggtggtgctcatcagttcgatcctccgaagctggtgcagccgttgtcggttcagttccagttcggcgctaccgcgcataggtacccgttccagcagcatcagcatcagcagaagttgcaggctgagatgttcaagaggagcaacagcgggatcagccttaagtttgatagccctagtgccaccgggacgatgtcgtcggcgttcatgtcgtcgcttagcatggacggcagcgtggctagcttggaagggaagccgccgttccatttgatcagcggcccggtcgcgagcgacccggtgaacgctcaccatgtgcccaaacggcggtgcacggggagaggggaggatggaagtggcaagtgtgccacaaccggaaggtgccattgctcaaagaggaggaagttgcgaattaagaggtcaattaaagtgcccgccattagcaacaaaatagcagacatacctccagatgaatactcatggcgaaagtatggtcagaagccgattaagggttcgcctcatccaaggggttactacaaatgtagcagcgtccggggctgcccagcgaggaagcacgtcgagcggtgcgtagacgacccggcgatgctcatcgtgacgtatgaaggtgagcataaccatactcggctgccaacacagtcagcccagacctaggaaacctgtagtatttcacgcgagccattcagaaaatgcagaggctccaagcttttgctcggggacggtcggaccggtcatgtgaaagtaggtcagcaaactgtgaaagtaggagtaacaaacagggaagccatctgatgagagctatagtgattcgcttgggtccttaactgagctacaagccatgtcgcatttctgctatggtctcaatgttctactgtccaaagtggggacatacacaacttgttctctcttttatgagctatggcactatcagattaagagagaatggaggaagaacatgtgattggatagtgaccggcaagatttgctcaaagaagggagggattaggtttgaagatttcaaaggaagattgacaaaaggaagtgaacaactgaaacatcgtgtaagcctggaaaaggataagcaggatttggcttttagcgtgcacaagtttacttgcaatgacttgcctctgtatgttgcttttgctttattgaaagatcaaaattttcttttggcagaagaatcattcagcattaaagctgtttctacttgctaacatactgacacacttggaccatcagggtttttttttccaggtgttagctgttgggtatgatttctcagtcgtacttctgcttttgtgtaaagcattccatgttatgttaatgactttgacatcaactgctatcctgaggttctttaaaagctctgcagtctacacaataaatggaatctcaaacatcaaatattcataa

SEQ ID NO: 74020 - DNA, 2892 bp, Oryza sativa
  Clone ID: PAT_MRT4530_74244C.1
cccacgcgtccggaaaaaaataatttattttttataggagaaaaaaagaggagaaaaaaaagggaagaaagagatggacgaggcgtgggagagggcggtggaggcggcgctgcaggccgccggagaggggagctcgtcgccggcgaggagcctgacgctggacggcgccgtgaagtgcctgcacggacggctgcccgcggcggagattctggagcggtaccagagcctggagcacctgtcgatcgccggcgtcggggtcgcgtcgcttgccgggttccctcggctgcggaacctgacgcgcctgacgctctccgacaaccgcatcgccggcggcctcgaccacctcgtcgcccacgcgcccgcctcgctccgcgacctcgacctcagcaacaatcgaatccaggacgtcggcgacctctcgccgctcgccaacctccgcctcgtctcgctcgacctctacgagtgccccgtcacgcgggtcaaggattacagatccaaggtgttcggcatgatccggactctcaagtacctcgacaagatggacgccgacgagaacgagaggccggagtcggatgacgacgacgacgacggggatggcgacggcgacggcgaggaggaggaggacgacgacgatgacgaggatgaggatcctggcagcggcgaggtggccaacggaggcgtctcccacccgcgcggtggcgtggcgtcgcacccggtggaggtgaacggtgtgatcgatgtggacgaggacgagagcgacgccgacgaggtcgtcccgaacgggggagacgaacaccacgctaatgggtttcgggtcgcggccgttggggacgaggatgaatatgtggaggaggaagacgatgatgatgaggaagactatgaggaggaggatgatttgggggaggagatcgatgaggatggtgatgacgaagacgctgttgttgaggtgcatgatgtaccaagtagcagtgatgaggaggaagacggcatcgaggaagaggatgaggaggagcacgggacacgggattccgggtggggtggcgtcacaagtttcataaggggcccctgtctctggtgattcctgggctggtctccaaatctcgccgccggtgaaggaggtagaagtggaggtggaggtggggggaggatggcgtcggagccggtggcgagggcggtggcggaggaggtggggaggtgggggagcatgaagcagacgggggtgagcctgcgctacatgatggagttcgggtcgcgccccacggagcggaacctgctgctctccgcgcagttcctgcagaaggagctcccaatccggatcgcgcgccgcgcgctcgagctcgagtccctccccttcggcctctcccgcaagcccgccatcctcaaggtgcgggattggtacttggactctttccgcgacatcagatactttccagaagtgaggaataggaacgacgagctcgcttttacgcagatgatcaagatgatcaaagtacgccacaataatgtggttccaacgatggcactgggagttcaacagctcaagaacgagcagtatcgcacaaggaagatccccactgcatttgacgagatccacgagtttcttgacagattctacatgtcaaggattgggatccgcatgcttatagggcagcatgtggctttgcatgatcctgacccagagcctggcgtcataggcctcattaatacagaattgtcccctatacaggtggctcaagctgccagtgaagatgcccgttctatttgtttgagggaatatggatcagctcctgagattgacatctatggagacccaacttttacatttccatatgtttcatcacatctacatctcatgctatttgaattggtgaagaactccttgcgtgcagtacaggaacgatatatgaattccgataaagatgttcctccagttagaattatcgttgctgatggggcagaggatgtaactatcaaggttagtgatgaaggtggtggaataccaaggagcggccttccaagaattttcacatatctatatagcactgcaaagaatccacctgatatggattgccctagtgaaggagtaactatggctggatatggctatggtcttccaatcagtcgcctgtatgctcgatattttggtggtgacctgcaaatcatctctatggaaggatacggcaccgatgcttacctgcacttgtcacggttgggagattcggaggagcccttgccttgaaggcttccctgtcctgataccatctctgtaattaattaggttgctcttgtctcttgtaattcctgggctggtttggaatattgttttcaagtgccagccacctatagctgttaaccttctacagtagttgccacggtttcatcacttcagctttgcagcagcatgagcacaagtctcctctctctctttctctctctctctactctgccttgtagcgaaatgtagaattcttctgccacgcacatggcattgttcatacttctcgtacttgttgagcttcatggcttggtgcagattgtactttgatagttatcagtagtaagctaacttcatcaagtgaatgtcttttgttctacaaaaaaaaaaaaaaaaaaaaaaaaaaaaaaaaaaaaaaaaaaaaaagggggaggcctcggccgaattcctgcagcccgggcacgtatctgatttaataaccaaggtgaatgtctaataatttaccctttgttcagctgaggctgtctgctctactatgtgctgactaaggccaattacttgttatagaattagatgctgaacaatccattcatgtttaactgattattttttgtgtatctctttgttttgcaattatcacaaattctagatttataatccactatatgttgatctga

SEQ ID NO: 74021 - DNA, 518 bp, Oryza sativa
  Clone ID: PAT_MRT4530_74245C.1
ggaggtggcggcgcggttcaggtcgctggtcgacaccggggacatcggcgccatcaggcagacgcagcacctcatactgggacggttgcaagatagcaatgcagttctcacacattttaacgagtactctgaacaatgctttgcggaggtgtctaatgactttgctagtaaaactcgtcttctcaaatccatgaaggacgatcttgaccatattttcttgaagctgagaagcatgaaatcgaggctagcggcaacatatccagatgctttccccgatggtgcaatggcaaaaactatggaccaaagaccggaccttgaaagtccgcttgattaaaacagcttatcattttgactgagatctccggttgagtccttctgtactcatcttgaagaagaatgttttgtctgcacttttgccgaaaatgtatctttgagaaacgtctgcttctgtttattaagttgtgtaaccttgtagtcctatgttttttagataatggataagttataaccctcgtgcc

SEQ ID NO: 74022 - DNA, 1100 bp, Oryza sativa
  Clone ID: PAT_MRT4530_74246C.1
atggcgtcggagccggtggcgagggcggtggcggaggaggtggggaggtgggggagcatgaagcagacgggggtgagcctgcgctacatgatggagttcgggtcgcgccccacggagcggaacctgctgctctccgcgcagttcctgcagaaggagctcccaatccggatcgcgcgccgcgcgctcgagctcgagtccctccccttcggcctctcccgcaagcccgccatcctcaaggtaattctgggggagtggagtgtgaataaggtgcgggattggtacttggactctttccgcgacatcagatactttccagaagtgaggaataggaacgacgagctcgcttttacgcagatgatcaagatgatcaaagtacgccacaataatgtggttccaacgatggcactgggagttcaacagctcaagaacgagcagtatcgcacaaggaagatccccactgcatttgacgagatccacgagtttcttgacagattctacatgtcaaggattgggatccgcatgcttatagggcagcatgtggctttgcatgatcctgacccagagcctggcgtcataggcctcattaatacagaattgtcccctatacaggtggctcaagctgccagtgaagatgcccgttctatttgtttgagggaatatggatcagctcctgagattgacatctatggagacccaacttttacatttccatatgtttcatcacatctacatctcatgctatttgaattggtgaagaactccttgcgtgcagtacaggaacgatatatgaattccgataaagatgttcctccagttagaattatcgttgctgatggggcagaggatgtaacttatcaaggttagtgatgaaggtggtggaataccaaggagcggtcttccaagaattttcacatatctatatagcacttgcaagaatccacctgatatggattgccctaatgaaggagtaactatggctggatatgggttttggtctttcaatcagtcgcctgtatgctcgatattttggtggtgacctgcaaatcatctctatggaaggatacggtattcccacacttcatttcctttctgatttctaa

SEQ ID NO: 74023 - DNA, 804 bp, Oryza sativa
  Clone ID: PAT_MRT4530_74247C.1
atggctagagctccaagagaccgtactctatcaagccggcgtgctagttcagctaccagtgctgtaccttcgtattaccagaaaacaaaaaaggcatccaaggaaaatggattgcaactaacctcagagaaaaaggactggaaacgtgccacttgctcaatatgtttggagcatccacataaagctgttctcctcctctgttcttctcacagcaaaggttgtcgtccgtacatgtgtgacaccaaccgtcagcactctaattgtcttgagcagttcaaaaatgcttattcgaggggaaagccagcttgtgaattatcaggtgcagtggcacaagctagcaagaagccacaggagatggagcttgtgtgccctatctgccgtggggatgttaaaggatggacagtggttgagccagccagaagatttctcaaccgcaagaggaggacttgcatgcatgagggatgctcttttggtggatcatacagaaaactccgcaaccatgtgaggtccaatcatccttcatcaaatcctcgtgaaatcgattctgcaagcttagctgagtggaaggagcttgaatatgagaaggataggcaggatgcaataagcataattacagcattgaatccagggtcaacaatcatgggggactatttcattgaccccaacagtgacagcaacgactcgtttgactatagctctgactctttgacattctcagatagtgatcctggaactcagcttaatggttccactagttctcgaaggcccgctcggattattcctaatgcccgtgtaagatactaa

SEQ ID NO: 74024 - DNA, 2928 bp, Oryza sativa
  Clone ID: PAT_MRT4530_74248C.1
atggatgaagatggaaacgtggggattggaggcaaatacacagatgggctcatttctcattcactcagagtgtcaaaacagcgatcatgcgtccacaagtacgctgccggagccaatgtcagcctgcaatgcaggtcatcaaagcaggagcatatgagcaccactgaggtcagatttgaggactggatggcagaggctgtggtgtttggaatcctatgcaagattggatccatcttgagttcacatctaacacaggcgttcgttgcacacttgggaaaggaggtatcagttttcattgaaattgaaagcagtattaagcaaatcagaagtgagtttaggttgatgcaagctttcctgcaagacggccaagaaaaagaaagtcatagcaggctggcagaaacctttctacacgaagttcagcaggtatcatttgaagttgaagacattctggatgaatttgtctatttgtttggccaaaaacaaaccgcatctctaaaatcattgaggaacttctttccaaaatctaaaagtatgatgcactggcagagactagcagcagagctcaaagaagcgcagaaccgcctccagaatttgcgaaatttgaaggttcagtacaatattgacttatccgaagaaagtcctagttctatcaggtatgaagatagccaagttcacacaatccaacacataaagcataataacaaaattgttggttttgcaaacgagcgagactgcctacaagagctgctgatgacaaacgagaaatcatgctcaataatttccatatggggcatgggaggttcaggtaaaactactcttgtcaaaactgtttttgaaagaaaagctatcaagaatcgttttgattgcctgatctgggtaactgtgtcacaaacatatgacattactgaaataatgagaaagattatacaatgtgcattgaaggaaacttgcccagctgacctagaaagcatgtgtagtgaaggtgtagccctgaagctccaggggactttgcagggaaggacatacatgatgatcttggatgatgtgtgggatacaaatgtttggttcaacttggaaccttttctagatttgaacagcagaggaagcaaggttgtaattactactcgcataaacgatgttgcttctttggcagatgacaagaaccgccttcaactacgaggactaaacgaggcagagtcttgggacctcttttgcatgtgggcattcagacatactgaagatcaaacatgtcctctcagattggagagagtagcaagacagattgttggcaggtgtgaaggtctgccattagctataacggctgtaggcaatttgctatcattcaaaagactggattcgtttgagtgggataaattctataatcaactaaattgggaattgcacaatcgattggataaccaaggacttaacatggtgacccgactcctaggtttaagctacaggcatctaccagcccacttgaagaactgtttccttttgtccagtatctttccagaggactatatgatacacgggaagtggctaagtagactgttaatagcagaaggtttagttgaaccaaggaaaaatatgacactggaggagattgcaacagagtacattgaaaagctagtagatcgctgcctgctccaagttgtcaggagggataagcttggaagaatatggcaactccagatgcatgacattgtgagggaactggcaatttcaatatctgaaaaggaaggattctgcatgatttatactagtaaagaagcacatacatcagtggttgggtgcgagcctcgtcgtttatcagttcatgagaattatgacagagtccagcaaattataaatgctcaacgtattcgttctttctacccatatcaattggatagtgattattccgtgatgtcaaatgtgcaatgggtgtcaacaagtgctagatacttgaaggggggttttttccccaagcaacttcctgaatcaattgacaggctccaaaatctccgaactttggacatctaccttactgaaataggaaaactgcccagcggcgtaaccaggctaaggttgctacgccatctgattgcaggcaaagctgaagctacttattttggccttgccgatgtctactcaggtgtgcaaatgcctaatggaacatggcaatcgctggacataaatgtattcacaggcatttctgcaagcaacaagttggtggaacaattggctaagttaacacagctgagatcgctgaagctgtcagacgttaaaagtactcactatgccaagctatttgtatccatcagcaagatgcgtcttctacagagcctgctaattgagactgccaatagggatgagtgtgtgagcttggaagccctgaaccctgcacctcatcaccttgaactactctttatgaaaggcaaactccatgagagcgtcataggctgccacctgtttgaggtaaataggctaagcctccgagagctgaatcttcagaatagcaggctcagcattgatccgcttccatcactctccaatttttgtaacctgacccttcttggtctgttcaacacttacagtggagaaagcttgctctttcaggcagggtggtttcctaagctccaaacactcactttggctgagctgcaaaatgtcaattcaatagtgatacaggagtatagcatggcaaatctctacaacctagctctcatctgcttgaaaaatctggagtatttgccccaaggcatggaattcctaaaatctgttgaagagttcaatctagtgggcatgcaccacaagttcatggaagatgtacaagctggttcctcatatgagaaagtcaaacacataccggtagttgactactttgaccaaagcaaagggaggtgggatcgactttcacgagtttatggcaaaggtaacccatga

SEQ ID NO: 74025 - DNA, 3516 bp, Oryza sativa
  Clone ID: PAT_MRT4530_74249C.1
atggcgtcgccgcagcagcagctcgaccactcggcgctcccgcccgccatcaagtccgccgcggccctccgcgacgcccgctccgcccgcgccatccacgccgccgcgctccgccgcggcttgctccaccgcccctccccggccgtcgccaacgcgctgctcaccgcctacgcgcgctgcggccgcctcgccgccgcgctcgaggtgttcggctccatctccgactccgcgcatgacgccgtctccttcaactccctcatctccgcgctctgcctcttccgccgctgggaccacgcgctcgccgcgctccgcgccatgctcgccggcggccacccgctcacttccttcacgctcgtcagcgtcctccgcgccgtctcccacctccccgccgccgccgccgccgttcgcctcggccgcgaggcgcacgccttcgcgctcaagaacggcctcctccatggccaccagcgcttcgccttcaacgcgctcctctccatgtacgcccgcctcggcctcgtcgccgacgcgcagaggctcttcgccggcgccacgcccggccgcggcgacgtcgtcacgtggaacaccatggtcagcgtgctcgtgcagagcgggatgttcgacgaggccgtccagacgctctacgacatggtggcgctcggcgtgcggcccgacggcgtcacgttcgcgagcgcgctcccggcgtgctcgcggctagagctgctcgacgtcggccgggagatgcacgcctacgtcatcaaggacgacgagctcgccgccaactcgttcgtggcgagcgcgctggtggacatgtacgccacgcacgagcaggtggggaaggcgaggcaggtgttcgacatggtgcccgactccgggaagcagctcgggatgtggaacgccatgatctgcggctacgcgcaggccggcatggacgaggaggcgcttcgtctgttcgcgcggatggaggcagaggccggcttcgtgccctgcgagaccaccatggccagcgtgctgccggcgtgcgcgcgctccgaggcgttcgccggcaaggaggccgtgcacgggtacgtggtgaagcgcggcatggcgggcaaccggttcgtgcagaacgcgctcatggacatgtacgcgcgcctcggcaagacggacgtcgcccgccggatcttcgccatggtcgacctccctgacgtcgtctcctggaacaccctcatcaccggctgcgtcgtccagggccacgtcgccgacgcgttccagctcgcccgcgagatgcagcagctagaagaaggcggcgtggtgccgaacgccatcaccctgatgaccctcctgccggggtgcgccatcctggcggcgccggcgagggggaaggagatccacgggtacgcggtgaggcacgcgctggacacggacgtggccgtcgggagcgcgctggtggacatgtacgccaagtgcgggtgcctggcgctgtcgagggcggtgttcgaccggctgccgcggcggaacaccatcacctggaacgtcctcatcatggcgtacggcatgcacgggctcggcggcgaggccacggtgctgttcgaccggatgacggcgagcggcgaggcgaggcccaacgaggtgaccttcatggcggccctggcggcgtgcagccactccggcatggtggaccgtgggctgcagctgttccacgccatggagcgcgaccacggcgtcgagccgacgccggacatcctcgcctgcgtcgtggacatcctggggcgcgccggcaggctggacgaggcgtacgccatggtgacctcgatgaaaaccgtgatggagaccagcaggatgcggcggcgaggcgtggcgaaggagcccgggtgcagctggatcgaggtcgacggcgcgatccaccggttcatggccggcgagtcggcgcacccggcgagcgaggaggtgcacgcgcacatggaggcgctctggggggagatggtggcgcgcgggtacacgccggacacgtcgtgcgtgctccacgacatggacgacggcgacaaggcggccgtgctccggtgccacagcgagaagctcgccatcgcgttcgggctgctcagggcggcgccgggcgccaccattagggtggccaagaacctgagggtgtgcaacgactgccatgaggcggccaagttcttgtcaaagatggtcgggagggagatcgtgctcagggatagactagcagcagagctcaaagaagcgcagaaccgcctccagaatttgcgaaatttgaaggttcagtacaatattgacttatccgaagaaagtcctagttctatcagtatctttccagaggactatatgatacacgggaagtggctaagtagactgttaatagcagaaggtttagttgaaccaaggaaaaatatgacactggaggagattgcaacagagtacattgaaaagctagtagatcgctgcctgctccaagttgtcaggagggataagcttggaagaatatggcaactccagatgcatgacattgtgagggaactggcaatttcaatatctgaaaaggaaggattctgcatgatttatactagtaaagaagcacatacatcagtggttgggtgcgagcctcgtcgtttatcagttcatgagaattatgacagagtccagcaaattataaatgctcaacgtattcgttctttctacccatatcaattggatagtgattattccgtgatgtcaaatgtgcaatgggtgtcaacaagtgctagatacttgaaggttctagaattaagcaatattccaatcacaacactgccgagagacattgggagcttgttcaatttacattatttaggattgagacgaaccaaggtcaagcaacttcctgaatcaattgacaggctccaaaatctccgaactttggacatctaccttactgaaataggaaaactgcccagcggcgtaaccaggctaaggttgctacgccatctgattgcaggcaaagctgaagctacttattttggccttgccgatgtctactcaggtgtgcaaatgcctaatggaacatggcaatcgctggacataaatgtattcacaggcatttctgcaagcaacaagttggtggaacaattggctaagttaacacagctgagatcgctgaagctgtcagacgttaaaagtactcactatgccaagctatttgtatccatcagcaagatgcgtcttctacagagcctgctaattgagactgccaatagggatgagtgtgtgagcttggaagccctgaaccctgcacctcatcaccttgaactactctttatgaaaggcaaactccatgagagcgtcataggctgccacctgtttgaggagtatagcatggcaaatctctacaacctagctctcatctgcttgaaaaatctggagtatttgccccaaggcatggaattcctaaaatctgttgaagagttcaatctagtgggcatgcaccacaagttcatggaagatgtacaagctggttcctcatatgagaaagtcaaacacataccg

SEQ ID NO: 74026 - DNA, 199 bp, Oryza sativa
  unsure (1)..(199): unsure at all n locations
  Clone ID: PAT_MRT4530_7424C.1
tttgtttagctnntncatcgatcgatctatcctgtcggtgccgccggggctcttcggcgcacggtgccctctcgtgccttggagaccccgattcggccgctgcgacggcgacgacgagccttagtaggacagacttgttctccaagagaagttactggagcgaagagaaatggacacccggattaaggtggcgctggac

SEQ ID NO: 74027 - DNA, 707 bp, Oryza sativa
  Clone ID: PAT_MRT4530_74250C.1
gtcgagcggcgccgcgcggtggccggcgccggcgattggcttggtgcggcggcgagagaagaccggcggtcgccgtgctcgtcctcgtgtccgtcctcctcccgtgcctctcctggttgcccctgtggggatggagccatggaggagtttggctgtgtgagacccaccattggccagccaaatagagtggccaaatttagctagtggagggagggttttggccagctggatggcttagctatccggttggagaggctgttggagtacttttttttttttgctagaatggttaaaatttggcttggagagtgggatgaagaggctattggagatgttcttactacacaattatttcttgtttgcttgcatgcatgaatgctcgacgggtcaagttacatcatcctacatgtgtttttgatcttgtaaatcttacccttttttccctgcatttcagcattgcagcactcttacctgcaaagcagttcgttatgacgttatgttggcttatgatcaacgcagggttcacaaatcctgatatctaatcaaaatttgttcacaagcagcggcatgggatttcgcgaaatccgttgataaaccgataaaaatcaataaaattcaaataaattttataaaaaaaaataaattttaggtttggttttttttgaactagaccaaaaaactgaatggcgtgtgtttttcgatgcgaa

SEQ ID NO: 74028 - DNA, 1005 bp, Oryza sativa
  unsure (1)..(1005): unsure at all n locations
  Clone ID: PAT_MRT4530_74251C.1
cagcgttcttgctcttggaaatcttctggccttcgaagattcctgcagccgtcgagcaaagaggaacatctactagtcggagcacggccactttggttccaggnaccaaactccaagcgcgtgggcccggtcggctcttcgccgtgtgcaggctttattgcattgcaggaaaagatggcagcttctcatggaaatgcgatctttgttctgctgctgtgcactctctttctcccgtcccttgcatgtgacagcggtggcgtgaagtttgggtacactggttctatcggccctgacttctgggggaatttgagtgccgacttcacgcgttgctcgaacggaaagcagcagtccccaattgacatcgacaccaacaacctggttcatgaactgaatatggagccactccatagaaattataccgctgcaaatgctactcttgtcgacaacatcttcaacgtcgcgctgcggtacgaagaggcagcaggggttctgagcattaacggggtgaagtacacgctgaagcagatgcactggcactctccttccgagcacaccatcaacggcttcaggttcccactggagctccacatggttcacaccaacgaaaatggcaacatcaccgttctggcctttctctaccgatttggcaggccagacccgttcttcgaacaggataagctggctgcgctcaacgcggagggctgcaaggcagagaaaggcagcccggtccctgccggatctgtgagcttgctgacgatgaggcagcacgtgcacatatactacagatacgttgggtcactgaccacgccaccgtgcgccgagaacgtgatctggaacatccctgccatgccgagagagatgacaccgcagcaggccgccgatctgatggctcccctggacgaaggctaccgccggaacagcaggccgacgcagcagatgaacggccgcaccgtgcagctctaccacaggttctgggggaagaagaagaggaggagctccccgtag

SEQ ID NO: 74029 - DNA, 1143 bp, Oryza sativa
  Clone ID: PAT_MRT4530_74252C.1
atggctgatgaattcaagattgtgctcacgaggaaggagaggttcctctacctcgccaaagccgtcgtgttccttgtgatcttcgcgctcggcgtggtcgccggcctatggacggccaccgggcctcgccggtgctgcagcacatacaccaacattcttttcccgagcaccaccgtgtaccgctaccgcggcggcggcggcggtagcttctcggagttcgtggctccgacgcggctcatgcacgatatgacggacgagcagctgttctggcgcgctacgatggcgccggcgtcgtccggtggcgcgtacccgttccagcgcgtgcccaaggtggccttcatgttcctcgccggccgcggcgtcctgccgctggcgccgctctgggagcgattcttccgtggacacgagggcctcttctccatctacgtccacgcgccgcccgggatggtgctcaacgtgtccgacgactcgccgttctacggccggcagatccccagccaggaaacctcatggggatccataacactcatggacgccgagaagcggctgctggcgaacgcgctgctggacttctccaacgatcggttcgtcctcctctccgagagctgcataccggtgcagagcttcccggtggcgtacggctacctcaccggctcgcgccacagcttcgtggaggtctactaccacaagggcaagacgtgccgcggccggtacagccgccgcatggagccggacatcacgctgccgcagtggaggaagggctcccagtggttcgagctcaggcgagacctcgccgtggccgccctgacggacgccaggtactacccgctcttccggcggcactgccggccgtcgtgctaccccgacgagcactacctcccgacgttcgtcgccatgctccacggcgcggacaactcgaaccgcaccgtgacgtacgtcgactggtccagaggcggcgcgcacccggcgacgtacaccgccggcgacgtcacgccggagctgatcctgagcatcaggaggagcgaggtgccctgcatgtacaactcccggccgaccacggcgtgcttcctgttcgcgaggaagttctccgccgacgcgctggagccgctgctcaacatctcatcgacggtgatgcagtactag

SEQ ID NO: 74030 - DNA, 489 bp, Oryza sativa
  Clone ID: PAT_MRT4530_74253C.1
atggctaccaccgcccccactcccccatccgctgctggcttggctgctcgccctccgcttgcttccgggtcactcctcccctcgatgtctccttcctcctcccgctcgctcccggccaccacttcactgcccccacggtcgcggtcaacggccgtcacctggatttggacccgggtcggagattttttcaccaccccgctgagcaccgcggttaaaaacgcctcctcctctctgtttttcttttcctttttcaccgacgacgacgagagggagaggggccgcaggacacgcacacacgcgggcgcctgcgtgcggcgggacccgggcgacggcggtggggtaaaccggggacgcctgcgccacgtgaagccaaatctaccgctcgccactgttgtggtcgcatcgccattccccaacgaggttgatggatctggcaagctcggggagcagcgccactgcggcggaagaggggcggcgtcggcgcaatag

SEQ ID NO: 74031 - DNA, 756 bp, Oryza sativa
  Clone ID: PAT_MRT4530_74254C.1
atgaggctggatccgttggaaagagggctccaagagctttccatcaagtacttacgggccgaaaacagaggtcgtatgcagattcggtggccatttgaagtcagcagtgtagtaggtggccgaatcagattccagcacttggaggacttgatcttgatatctccttgttcatccatgatcggtggcgacttgcgcggcagtggtacagacggctgcagcgatggtggcgaggtgggcagcggcgtgacagtttgctgcggcggtgatggtgacttgggcggcggtgccgacggcttgtgcagaggaggcggggacaaggagagaacggcgatgtgctactcgtggagagaagattggagggaggcgtcggagcagcatcgggcggcgttgagcaggggcggcttcggcgcggcgtggggcaacatcggccggcgtggggtgggcgatggggagacggccgccgggcggcctggggcggcgtcgggtggcgtgggggcgggcgacggggagacggacgcaggagcagggcggcaccgggatggctgccgcaccgacgggctgcttggcaagccttgccaacaacgcaatgatgctgtttgtgaggtcgtcacagtcgccactggacatcagcgctacgagcatcaccacaacatcggtgtttgtattttctacggcgactgtcggaacaagaaatcattttctctggcgggtgacctagcccaaccgccagcgaaaatggttttcgcaagcaactag

SEQ ID NO: 74032 - DNA, 225 bp, Oryza sativa
  Clone ID: PAT_MRT4530_74255C.1
ttttggttttttattttttttttttttttttctttttattaattatatcaacccatcccaaacataccccacaacacccacttaagcccacaaaaaccacacgcagttaacaccggcaaggaaacccgctttttaagaagacgcacacgcgcacttaacacattttctcctgccccaaacataccagctcgcaccatctcccacaccacaagttcataagacaag

SEQ ID NO: 74033 - DNA, 510 bp, Oryza sativa
  unsure (1)..(510): unsure at all n locations
  Clone ID: PAT_MRT4530_74256C.1
atctggcccaggcgatnatgagatcaacctccaantaactntcagtagaaagaaaaatcaaacaatgcaacgctttgcatgcaggagttagagagtggacaagcaaaaatttagcctgtgtactactgaacttttttatcagtgcaacgtcatagtgaagcaattagtctgcttcatgatgatgattagtacgtagtactactaaataacactaatagcttcttgcaacaaggtcttggtaatgacatcacacatcactggaccctggccatgcatgcatgtccaagtataatcttgctgacctagttggtgcaatcttcttatttccaaaatttgtttgagtgtttagctaggttaaatcgagacagatgaaacaaggttctgaattcagtatctatgtgtgtcatttcatatgtgtctcaggcgatgaactagtgtaaaactgcattaaaaattttctgatctatccctagtttttataataatttccagttcaaaaaaaaaaaaaaa

SEQ ID NO: 74034 - DNA, 515 bp, Oryza sativa
  Clone ID: PAT_MRT4530_74257C.1
gttgtgtgatacgctcgcctaactttggctaattctgctgatatttgctcttcttctgtcatatcaccttgccgctgcttctgatcatctcccgttcttgcattcttcttcttcttcttcttctccggcgtggtgtgctgctgacggctgacgctggctggtcgtggacatgtcgaagaagattgtggtgaagctggatctccatgacaacaaggacaagcagaaggccatgaagggcgtctccacgctttccggcatcgacgccatttccatggacatggcgtcgcgcaagatgacggtgatcggcacggttgacccggtgaacgtggtgagcaagctgcgcaaggcgtcctggccggcctacatcgagtccctcggcccggccaaggagccggagaagaagaaggagggcggcggcgatgccaagaaggatggcggcgatggcaagaaggagggaggaggagacggcaagaaggaaggcggcgatgggaagaaggaaggtgacggcaagaagg

SEQ ID NO: 74035 - DNA, 177 bp, Oryza sativa
  Clone ID: PAT_MRT4530_74259C.1
atgggcaatgggcggtggcagcagagcgcgggaatggcacggcgggcggcgccgaggagagcgttggaggaggcgggctacgtcatcatcgttatggggagaggggcaaatgagtttgatgatcatgacgcagcaactaagatggcggtcgtgtacgttgtcacagtgccggcttag

SEQ ID NO: 74036 - DNA, 174 bp, Oryza sativa
  Clone ID: PAT_MRT4530_7425C.1
atgcttcccgacagaaccaccttaatctacgagctggagaagaaggctcaagatagccgatgcggagtagaggagagaggagaggtgatgcccacagagctggctggcgcaagactcgaagctccccacttagacccgtactcacttcatgcaagctcgccgactggatccacg

SEQ ID NO: 74037 - DNA, 873 bp, Oryza sativa
  Clone ID: PAT_MRT4530_74260C.1
atggatgataagaaccaggaaggcgaacccgtgccgacgacgaagccgcaggagaggctgagcaacaaggaagaatatgccacctccacggaggccggcggcggcggcagcagccgatggtctcgtcaagatccggtcatgagacgttttgattttgattaatgccaccatgaagtaagagtaagagtaagagagctatcgatatttttatacttccatagatgttatgtgtgttcgatgctcacacagagcaaagtaagaaagctttttttgccaacaatgaaagtaaaaactcacaacattataaatatctaaggagtagtttaataaaatctaaaaataatttaaatatataataaaagtaatttatgacatatattttagttagaatataatcatgtgagatcttgttataaagatttagttacaatgaatacaataatataagtggattatatatcagataaataatttttttaaaaaaatcatttgaagcatggttattagagatctttctttactattacattcttggatatcccctcctggaaaagagatactctcttcgtttcaggtcatgagacgttttgattttgattaaagtcaaattactttaaatatgacaaagtttatagaaaaatataataatatttataatacgaaattagttttattaaatcaataattgaatatattttcacaataaatttgttttgagttaaaaatattattattttttttacaaacttaatcaaacttgaagcagtttgattttgaccaaagtcaacacgttagctgaaacggagggagtacacgctgatattgattaggactaagtattatacaagcactctcttcactcgtagtattaat

SEQ ID NO: 74038 - DNA, 440 bp, Oryza sativa
  Clone ID: PAT_MRT4530_74261C.1
cttgcggcaatttccagttcatgtcacataatcaatgtatgttccttttctatgcaccgggtgtctttgacacacacggtagatttctttcaccggtttacaacttcgaaccaagggtcacaatattacttttcaatggtaaattaagcccaaaaaccgggaggaatttgggttaaaaattcctacccaaggtaatgggcttttggttcctcgttaacaattagtctttttaacaagctggcctttcaggtggaccattttttggtgaatggggggccccttggttagaaggctaggagtggcactttaacccaacctggaaaggggaccttaagggttctgggtggcctttaacatttaaaattcaaaattcccggacatgggacacaaggacggttttgtattcaatttggccccggttgaaccccaggtccccactt

SEQ ID NO: 74039 - DNA, 201 bp, Oryza sativa
  Clone ID: PAT_MRT4530_74262C.1
ccacgcgtccgatcacggttttttttgttgcgaatgggcatgtgcccaggactgagaataggctagccagggagtgaaggatagaagactaagagatacatcagtgcagggccgaacactctctacgactcctatagatagagcacatgaacaatatagagaaaactagctgcgagtgcatctgaactgtacttcagcact

SEQ ID NO: 74040 - DNA, 411 bp, Oryza sativa
  Clone ID: PAT_MRT4530_74263C.1
atggatcgagcaagggagggacccgaggctagtggttgcaacagggccggtattgtcgaaggggagggtggcagccagcaggtcacggctgtagccacagatgatactaccaatgctggaggagaaggcagcatagaggctcatggggagagagcgatggcggcgacggaaccccgacgtggtcggaaggctatgctaggggccgctccccttccttctaccatgccttctccttcgctcctggcccgccaaagccgtcaaccaccattccccaatcgagctcgtcggcgtcatcgctatgtgcccatgtggggaaaggaaaagaggacaaaggaacataaaaggatgagaggagaagaaagagccggtgacactaacatgtgggcctcacatgctgactcaatcaattag

SEQ ID NO: 74041 - DNA, 570 bp, Oryza sativa
  Clone ID: PAT_MRT4530_74264C.1
atgggtgaccgaccaggagattcttcccaggtgcacacgagtgaggacaatgtgttggtcggagctgaagtaacggcgacggtggcgggacctgatgcaggagctagctggagcggtggcggcgatgggtgtgggccggagtggtggcggccggcgggagctgaagcggcggacggcggtggcggcaggctggagctgacgcgagtggaggggaggaggagaaggaggaggcactggactacgaggtcgcacctcctcgcggcggcgatgcgaatggatgcggggaggtggtggacggcgacgaggagctcagatcccggcatagggagtggcggcggcggcggaggagaaggagcccaagcctccgccacgggccgcagccgcttctctcagcccatggactctcgaacggcccacctcaacccgcgactagtgttttgtgcgagcggcggcggcgccgccgccggcgagaggagttactccgagcagatggggcggcgggtcctgaacaacgcgcggcgcacgacggcgaaggcagcccatctccggcgtcacggcctccttccttag

SEQ ID NO: 74042 - DNA, 292 bp, Oryza sativa
  unsure (1)..(292): unsure at all n locations
  Clone ID: PAT_MRT4530_74265C.1
ngatacccgcgcacacgactccagcaattggcgaaactctggcggcaaagaccagcgcatggtaggagagccggggtctgtcctttacgtatgatggacagcctatgctcgctacattggatgaatatgtcatgctctagcaggaaagggacgaagatccgataagagtgtgggcacaacagcgctacattgagcagcaactgaacaccgaccatgaagggccatattgatcacgcgtgagccctaacagaccagcctgtgctgagaaggtacctggtgcaaaatcaaatgg

SEQ ID NO: 74043 - DNA, 385 bp, Oryza sativa
  Clone ID: PAT_MRT4530_74266C.1
ccccactcccatccccgccgccgccgtgccactcccatggccactcaacggcctgtcggcgtcctcctcctcctcctgctcgccggctgcgcgctgccgatcgctcgatcccgcgcggggccaagaacggacgagggtggcggaggtggcgcggtggcactcgacacgagacacgagctcctgcggacgcacgggctgtcgggtgggctgccgcctcgcggggtggagtcgtacagtgtcggctaggccaccgggctgctggaggcgcgactggtggagccgtgctaccccaagtacgacgaccgtgacctgcccttcttgcacaccgtggtgctatgctacctgcatcttcgcgcgcacccacgctttgagggcctgtcccagg

SEQ ID NO: 74044 - DNA, 614 bp, Oryza sativa
  unsure (1)..(614): unsure at all n locations
  Clone ID: PAT_MRT4530_74267C.1
ggccgcttttttttttttttttttaagcacaaccgaacaagcactgtttatttcatgaaattcttatggaagagattgtatcatgtattacaagtttacaacagcaaccacagccagataggtagaattaagcgcctgaacggaacatatggcgccttggacatttgaactcaattcacctaataggtaaaatgaaaagatagcctcaaagccgtaagttcagttcaaaactcaactcttctcaagcaatgaacctcatcccgttctaatcaatgattctacaagagaatcacacaatactaggtgccctttgcactattcggttgcgctaaccaggaggaactccccctcgcacactaggtcaccaccaacgtaagcttttccttccatcttggcaagaccaaatcttttctgatacttggtcagagtcattctcatgatcaaggtatcccctgcaattactggcttacggaacctcactttatcaattcctgcanagaagaaattgtcccgagatccgncaatttcaggctgcaacatcaccagacccccaacctgggccatagcctcaaccatgagaacaccaggcattatggggttcggtcggggaaatg

SEQ ID NO: 74045 - DNA, 286 bp, Oryza sativa
  Clone ID: PAT_MRT4530_74268C.1
ggcaaaagaaaacccagtacagttttattttggaaaaaaaaacatgcaaattaaaaaattttaacaatgtaatcggtactaaaaactggggattggcaaaaaaaaaaaaaaagtttaacattattggaggctagggggggggggtaaaattaaaaaatcttacatgagctggggtaaaaaaggcaaaaatttttttccactggaagggttgtttttccaactccacaaagggggcaaacaacttaaaaaaagtcatgagctgggttttttgaaagcatttccatgg

SEQ ID NO: 74046 - DNA, 940 bp, Oryza sativa
  Clone ID: PAT_MRT4530_74269C.1
atttgcggccgcggcggccgttggggttcggattcccaccccgcgtgcagcttaggcgaaccctcctccctccgttccacacgccccagttccccgctctctccccctcacctcctcatcctcctcctccgctgccgccgccgcctccgccatgggcagggggaagttcaagggcaagcccaccggccgccgcaacttctccacccccgaggagatcgctgctggtacttcaggtcgtccacgcacatttaagaagaatttagctgaggaggaaaaggaggaggaagaagacgacatagaagaatctgaagaggaagaatctgaagatgagtctgaagggaaggctaaacataaaggaactgaaggtcttattcagattgaaaacccgaacttagtgaaagcaaagaatataaaagccaaggaagttgatctcggaaagacaactgagctctcgaggcgtgaaagagaggagatcgagaaacagaaagctcatgagcgctatatgaagcttcaggagcaaggaaaaacagaacaagctaggaaagatttggaacgtcttgctttaataagacaacaaagagctgatgctgcaaagaaacgtgaagaggagaaagctgccaaagaacagaggaaggctgaagcacgcaaataactgcggcaaccatgtggacaatgaaggcgtgagctgcgtcggctggatatttatttcttatatatatgcccctagtatcttttaaactcggtctcgatttcgatatttccataaaattatgcattgactaactgtagtattgtcgacgtggcttgatgtaaacttgagcttggcagggtgcatatgtagtatgatcagtttatgcaaaatttgcgtttacttacgttgatatataaatcaagaacgttgtgaataaaaaaaaaaaaaaaaactcgagactagttctcc

SEQ ID NO: 74047 - DNA, 251 bp, Oryza sativa
  Clone ID: PAT_MRT4530_7426C.1
aaaccgccccccctttttttttttttttaataacaattcttctccatatttgactctacgggggtatctgcactgcggtacaattattttcatcgtcttattcaccaaatcaccattctctaatcattactcagtatggctccatcttaacctacttttgttcataatgttaagattctttccaatttgtacattatgcttaaaccttctcaaacatatttttttattacttttaccctatatttcaatta

SEQ ID NO: 74048 - DNA, 1923 bp, Oryza sativa
  Clone ID: PAT_MRT4530_74270C.1
tattttattttattttttttttttttttttttgctactaacacaaatattacgcacgtttacgttacaacggctacgaacaaacagagcagagcagagcactcgtggcacaagcgagcagaggaggcggcggcgaggctcgtcggctcaggaggaggtggcgatgcgtggctcccatatgaagagcttgccgctgagctgcccgcatcggcgcatgtggttcatgagctcctccttgctccgccggcgccggcaggtcgtcatcagcagcttgctctcgccgccggggttgtcactgcccgacggagccgaggtcgcgctcagagatgaggctgcgacgagagctgcggccgccgtggtggtggacccggtcgggcgtctcgggggattgggtgcggtggcggcggtgtcgctgatgtcggaggcggcgatggccggctcggcgttgacgaacttgttgatgacgagcgaggagcggtgcacccgcggcccaacactgccgccgccgttgctgcgcgcctgcggctgcgtgctgaccttgacctcgacgatggtgcccctgtccacgacctcgacctcctcctcgtcatcctcgtcgtcctcctcctcctcctcgtcgtgcgcgacctcgtcggcctgctgctcgggttcttcttggtcattgttctcgtcgtcctcgtccgaggagggagcggcggtgtcggcgaaggagaggagcaggcgcccgccgcagcgctgcgcgcggaacagcgtggcggacggcacggggacggccttgacgacgaggcggccgtcgcggcggtcctgcgtcatctgcaccgcccccaccgtgcgccgcgccagcgacggcagcggcggcgggaacgcgcgtggcgggctggcgcgcgcggccacctcctccgcgcccccgtcggagtcatcgtccgacgcggggcacgagcggtcggtggacccatcggcgtcggagaagccgtcggagccggtctcggagccgaggctctcggtgcaaatctccaggctcttctggctgagcaggctcgacgacctccgcacgagcgggtgcacgtacggcgccgccgcctgctgctgcttccccgccgccaccggcggcctctgcgactggatcatgttccacacgtcgtccctctccggccggtcgtcgtcgtcgccgccgtgatcggtctcctgcagcagcagcacggcctgcccgggcccgccgccgctcgcatcatcatccaccgccaccttcttcccgccgtcggcgcccagctcggcagcggcggcgtggcacggcagtcgctgctcggcggtctcgaacactgtcactgccatgtctcccttggtcctcttgtcgcaggtagcgtcacacaagtcacaaccccccacacacacacaccacagtacacggtacagtggcaaagcagtaacaccacgagtgatggcgctagccgctacgttgtcctcgtcgcagcaccgcgttttttttatatatgtatttggtttagtttttacctcgtgggacggcaacgggagaacggggagcaaaaccaaacaaaaaccgggagatcacacgcgcgcgcgatatataggcggatgtgcgcggtttgacgggagaagctgtggaaacgaacgagaggctgggctgcgcggcggggtggggttggggagataagcttggtagactctaacgcgcgtctcggttttgttccgtgtttcgccggtggaatttttctcttgtttttgctggtgtctggtgatggtggtggctgctatcttctacacacgcgagcgcatgcagctagctgtaagcctcacaacgacgacttctgctttggcggcctaagagatcgacgaggagagatcactcactcggctgggggagatggcaagaggcttcagttcagcctgcagcccggggatccac

SEQ ID NO: 74049 - DNA, 517 bp, Oryza sativa
  Clone ID: PAT_MRT4530_74271C.1
aagtactcgagccaagaaggacagagctaggtgagctgcacagatggccccctccgtgactggcgtgtagggcaccaccgtcgctccctcccaggggctcaagtccaccgtcggcatgcccgtcgaccgacgttccaggaactccagcttgctgaacgtgagcaaaggcgtgaggatcaggtgcatgcaggtagtgaggcaattgatgacatcaagatactggagaccctctcctacctgactccgatcaccgtggaggacctactgaagcagatcgagtacctgctccattccaagagagtgccctgcctcgagtgtaataaggctggattcgtctaccgtgagaaccacagatcccccggatactacgatggcaggtactgaaccatgtggaagctgcccatgttcgggtgcactgacgccacaccagcgctgaaggagctcgaggaggccaagaatgcgtaccctgatgcattcagtgcgatcatcggctattacaacgtgaggcatgtgcatc

SEQ ID NO: 74050 - DNA, 242 bp, Oryza sativa
  Clone ID: PAT_MRT4530_74272C.1
cccgcaagatcgtcggcgccgccgcactcggcatgctgccgcgcgcgcttttgtcgccggtggccgcgctcctccagtcacgccaagcgggggaaacgcttcccctagcaccgacgaagcctcccagagactcaaaacgcccagttgttgcctcggcccagaccaatttcgctagcgactcgagctccgccgccacaggcagctatggccaccgggaaccccgtgagcgccgctgtgtttag

SEQ ID NO: 74051 - DNA, 405 bp, Oryza sativa
  Clone ID: PAT_MRT4530_74273C.1
ggtgtgtaaaagttatttcccccaataaaatataatgttgttttggactgatagatggattggtgggtgacccctaaacatacagtttccaaacctttataatataattctgacaaaacatgtgactattgcaaaggtaaaaataaaaggtttggagcatataaaatttagaagaactttgcatggtgacaaactcagagattgggacagaatcaaaattagttgggatagtctgaatttgcaggatggttgtgaagacaaaatctggtggaatttgacaaaagatggtgttttttctgtgaaatctttttatagagctcttaaaatgcaacagaagctggaagcaaaccgaagaagactgcaattggcggccatgctcataagacaagttgcaagtgaaatttt

SEQ ID NO: 74052 - DNA, 399 bp, Oryza sativa
  Clone ID: PAT_MRT4530_74274C.1
atgcagccccacgtcgggtgccaagttccgccggaacgtaaaaaaacaaaagtagaagtaaaaaggatagcgatgcgccgaattcggcagcggcgtgaagcggaggaagggagcggcgacggcggcggcggcgtctgcgggcgctctgagggacggcaacgacgtgaagccgacccccgccagcgcccggccgtgaagggaaagagcggctgcggcgagaaacggaggggagggagcggcggcggatccccagcggctggagcttcacgcgcggtcgggggcagcggcggtggctacctccacccatatgtccttgggttcgagcttggccttcatcagcgccgcgtcgtacgtcctcgggctcgacctcgccgttcatctgcacgctccctgtcctga

SEQ ID NO: 74053 - DNA, 436 bp, Oryza sativa
  Clone ID: PAT_MRT4530_74275C.1
ttttttttaccagaaatgtagtagtagcagcattgtttgtacaatgtaggaagtgatgataatacatacatacagtgtagaagaagatgaatgagacaggcaacatatgctcgagaccattgatgtacactagtagtagtatacagtactgtacatatatattgtcatgaaaaatttcctttttgatcatcatctcaaaggccaccacttattttttgcagaccatggatcatcagagtgtctcatggttttgatgttgtcttcttcatgaggatcacactcactcactcacttgacattttagcccctttttttgtagagatcaatatacactcagaattcagaaaagaaagaaagaaagaaagaaagaattggggagagagaggaaaggaagaatgacaattgacatgcaccatgagtgaccaaagatgaacat

SEQ ID NO: 74054 - DNA, 4369 bp, Oryza sativa
  Clone ID: PAT_MRT4530_74276C.1
atggacgcgtcgagcgagctgcagtgcgtggggaggctggaggtcgccgcgccgccgccggcgcgctacctccggggggaagcgaatggcaaggcagttgtgctgctaactggagctccaaggtatcaaatgttgccattggagactgatctcaacacactcccgatgataccaaatattccagaaaaggttttcccgatggacgcaaagagtactgaaggatcacgatatggaagtggacttgccaaccaaaacttatcaaggaagtgtgaagcactggctgtgtcaggcctagctgaatatggtgatgaaatagatgtggttgctccaactgatatcctaaagcagattttcaaaataccatactccaaggcacaagtatctattgctgttaaccgtattggagatacacttattctaaacacaggtcctgatgttgatgaaggtgaaaagatattcaggagacaaagcaaccaccccaaaggatctgatccttcaatgtttcttaattttgcaatgcattcagtgagagcagaagcttgtgattgcccaccaagtcatcaaccatcaaaggagaagcaaacggcatccgctatcttgcgtggaccatttggccaaagggagggtccattggattcgccatcgtcatctagttttagcacttcaccttatctggaccagaatatcagtaaaagtagaaaaacatcacatggtgctcgtgaaagcctgtactggggtgcaagggaaaataagcagaaagttaaagggtctgaccctgttaagaaaaccactcatgttggtgacaaacccagatgcgacgtgcaagaatccgagaaaagtaggagggtgggaaacaatggatttcggaaggtttgcttttggcagtttcataatttccatatgcttttgggtagcgacttgcttatatttagcaatgagaaatatatggcggtcagcttacacctctgggatgtttcgagacaggttactccactgaactggcttgaagcttggctagataatataatggcaagtgtgccagaattggctatatgttatcatcaaaatggtgttgtgcaaggttatgagctcttgaaaaatgatgatatttttctacttaagggtgtatctgatgatggtacacctgcatttcatccacaagttgtccagcaaaatggccttgctgtcctgaggttcctgcaagataactgtaagcaagaccctggtgcatattggttgtacaagggtgctgaagaggatgttatacagctgtatgatctgtctatcttacctcaaaatcatactgctggtgatcatagatctacttgtggtcctatgtcttctttaatgaagaagggtagaaaggagtcgttgttctctttgggcacactcttgtaccgtgttgctcacaggatgtctttatcaaaggtgcctagtaatagagcaaaatgtgcgaagttcttcaaaaaatgtttggactttctcagcgaacaggatcacttggttgtccgggcgtatgctcatgaacagtttgcaaggctcatccttaggtgttacgaggagttggaattgacatctgaatcatttttgcttgaatctgaagttactcttactgacttggatgagtctccagacctgagccttgagaatttaccatcgaagcaaaatgaagtgctgacagagattagcgaggaaccagcaaccttagatggaatgttggaatgttcacggtcaggatcttctcaagcgtcaaatagtttagtggatccgggtcatgttgacattagtcctgtatcttcagctacaaaaggagatgttactgtggatagcttggtaatgtgtcagtctggaactcaggtatcaaggacaattgctgatgcaatatcctccaagttggcagctatacaccatgtatcacaagctatcaaatcccttcgatggaaccgacagctccagaatacacaagatgattgcgttggcaatgcagataccatttgggagaaacctgttgacttctctttatgccgatgtggtgacattgactgtattgaagtttgcgacattagagagtggctaccaaaatcgaaaatggatcacaaattatggaaacttgttcttttgctaggtgaatcttatctggcactaggagaggcatacaagaatgacgggcagcttcgtcgcactcttaaagttgtggaattggcttgtctagtttatgggtctatgcctaaaaatctcgagggtgagcaattcatctcatccatgtccaatagttcgttgagtgttgaagatggtgatctaaaggcaaatcttgttttggatgaagcagactatttcaaaaatgctaaatgtttcaattatgatgtttctgctgggcagttgcctccaaactatttattttgggttaaggcgtggatgcttgtaggggatgtctatgcagaatatcacagattgagaggtcaacaagcaccagtgttgcctgaacaaaagcctgatggtgaagttagaatgtcaaatgaagttgcaatggaggtcaaacgtcttaagagaaaactgggaaaggataagcagaattgtggcacatgttcactgataaattgtagctgccaaagtgatagggcaaatagtggcagcagtgcaagcagcagtagttctgaggcctctacactatatggaagaaagaaaaacaaaaaatcatctggcaggaacttccattcacagtctagagaaactaaagagaatcccagcacccaggactctatgggagattctgaaaaaagaaataatgatggggatcctgataaatctaaagaagatgtttccagtgtgagggttggtggtatctttaagttccttggaggacctgaaccaggagatgttgaatacaatttgcattctgctattcattgctacgatgcagccaagggagtcatttttgcatttccagtgcccttggctgaaaaatccaccattcttaagaaaagaggctgggcattcaatgaactgggctgccataggcttgaaagtagaaatctgggtaatgctgaaattgcttttgctgatgctattaaagcatttcaagaggttgctgaccacactaatgttatattaatcaactgtaacttaggtcatggtagaagagctttagcagagcaatttgtgtcaaggatagatgaatttcagaagtatgattttcctcaagatgcatatatgcaatcctttaagtctgctaagtcggaatattttcaagctataaactattacacagcagctaagaggcaactaacatatgctgacaatgaggttgataaagtactttacaatgaggtttacactcagtatgcccatacacacctgaggcttggaatgcttttggcaagggaaagcttcttaactgacagttatgaaggtggatttgttgatgaatcatctaatagaacagttcttgagatttcagcaagtgatgctttcagagaggctttgtctacatatgaatctcttggtgaacatcgcaagcaggaagccgcttttggccactttcagcttgcttgttatcagagggatctatgcttaaggttcctcgatttaattgacaaggaggtcaaacagaagaatgaggataaatatcgtcagaaagctaagtggtatggttctttagcagaaaagaactggcagagagctttagaattttatggtccaaagacacattctaccatgttcttaaacatccttatggcacaatctgccctttccgttaacctctctgattcgttccactcaagtgtgatgcttgaaaatgcattggtgcacttgctggacggtcgccatgtggttgaagcaaatgatgagtattcaaacgacttggatctggacataaaaccgaaattctggagccagctgcagcgcctgctgaagagcatgttggcagctgctcgaccggcagcttctgtcggccaggccaacgccagcaacagcagaggagacaccgccaaactaaaagagatgtatcgtctgtcgctcaaatcaacctctctgggccagctgcacgcgttgcacaagatttgggtctcctaacacatctctgttgtacaaacatagacatcagattgctctacaaacgagtgttgtacatgttgattacatcgtcatcagcatctttgagcttgtaacttatgctgtcttttatgtttttatccatttgttatttattttttaaaatctctgggatgacttacatgctgattgtaaatttgcaattgtagtaatagttgtggaatgtgttgtaacttacaaataccatcggcttgcattgtaactttacaacgtggagttgtactgctgcctttcaaatcaaatgctcgttttcttc

SEQ ID NO: 74055 - DNA, 394 bp, Oryza sativa
  Clone ID: PAT_MRT4530_74277C.1
aaaaaaacatacctttgggggtcaaaattcaaaaaccccaccgggggggtcatccggggcccccggggttcaggggggcaaagcttttaaccgggggccccaaaaattcggccccaaaacccggggcagggcccgaaccggggaaggctttcgggggggggccgatggaattcggggggcccaggccttgggctggccaaaaacccctggtttttcgggggggggctggaagcgcccggccccgaacttggacgggggggcaaaaaactggggcttgatcccccccggggcgagcccgggggtttgtttaaacagcgacggggggggggggaccactttttttttgggaccggcgcagaacccctgggtcaagggggagccccccccccccccc

SEQ ID NO: 74056 - DNA, 3825 bp, Oryza sativa
  Clone ID: PAT_MRT4530_74278C.1
atggaggcggagccgccgccggagaaccgccacgacgaccaccacccctccacttccggcggaggcctgggctacttccacctccgcctcctctgccccgccgcgccactcctcctcctcctccgctccgaccgcctctactccctctccctctcccgccgccgcggcccccgcctccgcctcctcgcctcccctcgccgccgccacggccggcgacggcgggccctcctcctcagcacatcgggctgcgccctccgcctcacccaccgctcctccagcgccgacgccgtgcgcgtcaacggccggcccctcctccgcggtgggtgcccggccgatctggccgtcggcgacgaggtctcgctactccgccgtggcaccaggtatggattcttggtggagaaattcgtctcctgcgaacggcccaaattggcggcggcggagccctgcggggaggttcttgtgctgcgggccgagtcgctccggaagcggctgagggcgatctcggagagtcatgatcctctctctttcttgagggattcacattgtgtggagaacggcagcgatgatgttagggtgaaaaaggcgagagaagaagatgttttcttgcccctgaacctgaatgctccaattgaccctgttgccgtggagggtttactgcgagaagactgtaatcttggccaggggaaattggagcactgcactgattcagcaattgcaaaaaatgaaactgatgaattgattcaacggagcaaggggtcctgcgatggcaatacagagcagaaggaatacagcaatgagaacacagagcagcagcacaatgagaatgagggttgctattcagatgggagcacattcttcctgaatcgcctcattggtattgggtctgatatgagggtggagcaacggagtggagtgacacttccacagcttctgcatcccatggatagcttggagcgagtatttatcgcaacattcacctccgatgtttcctggtttctggattactgtaaggttccacagaacctgccggtgacgatagcatgccacaacaaggagaggtgctggagtgcgagtcgcgaaagtagaaccgcagccgcgttcaaagtaagagtgtaacctgggagtctttattgccaaagatggaagattctagcatgcggatccttattaagagatatccctgttctgtcttgcactcttgcagtcttagatcatacattcaatggttaaagttaaattcaaatctttgtacagtgtatgaatgtggtgcttgttccctccaagcagagaggaagaatgggctttgatggcaatggccagtgcgcttcatttcttacgacactttttagtaaagttgaggaatcaaaatcagatttcgctactcaattagtttcattcatagcattccttatcaatgaagttcctagccaatcatattggataaatgagatagccaagtataattttgaaggagctgctggatacctcattgcttccgttccagggatatatgcacgcaatcctcactatctggagtccaattattgcctttcaagaaaacagatattacacaccaaatcggcacataggatgtttcttggttctgtccaaacatccgtagttggtctgtcccatcggtttcatataccatctgatgctggttctaaactgaaagccctgtctgtacttcttagtaaatgccatgtgaacatgcatggaactacagaagtgatcttgaagaggaatacaaatatacctgcagatgctaatgctgtgagtgtcctagttgctgatctggataaatttaccgaggaagcaaataaccatgtccaatgccctgaaatagattcagtccatcttggtttcctgcctagagaggttgcaaagtgggtatctcccctcagtgacttggggttcttcacattttctggatttatctaccccagagaagccctggaagctgcatatggagcaactaacacaaaagtgcagttgcttctctatgtatcaaagggtccagagttttctcaaatttcaagactgatccaggatgaacattttcctcttctgtgctcattagtagcatccttaaagcggtcccttggactttggcgattagaagaggtgttgtcacatttcaaatggcctgaaacacttgagactgattttttctacaggattccttacttcagatttaaaatatttgtaggtgcttcatccattgggacttcaattaatccacaattcattgcaagctttgcttcagcagctggtaaacgatgtaatcaggatttggactccgaagagtctgatccagagagaacatggcaaagactgagatctactggcatatttcgtgacgcaatcccacatccatacgagaggatagggcatcctatgcatgtcaaggttgcccagagacgcttcgagtctcgtctaggcagacactcattcggctggacttactgtgggtctcacaatttcagtccagcagcctggggacaacaacttcctccaccaaaagcaaatcctactgaagccagagccgtttcttctggtccgaggctacacatttgcaactatgagctcggcatcatcctcattattccaccatctgccatgtcaaagcagatcagtggaaggaggcacgagatcaatgacattgtcctgccattcgtcgtccctccaccgcaatataagctgggcgataggcctgcgacatcgttagccatgcgagaggccatggctgaagctagaattctgcagagtaacgatttagtactggacttgtcacaggatacagacgaggatatacctgatgaagatgatgagcatgtgattgagctgtctgattgctcccctgaagagaaggaagaggagaagatctacgcagagacgctgtgggagcaatctgctagtgctagggggtacatgttttacaccacagaagaatcacaaccgtccaaacagttctggacggtagtgccgttttactccctcccccaacattctgaagcgtttctcgatgtcttgcagattgtggtgttgggagggagtggattcgttggctctgctatctgcaaagctgctgtctctaagggtattgaggttgtgagcctcagcaggtcagggagaccatcttactctgatccttgggttgatcaagttacttggctagcaggagatgttttctatgcaagatgggatgaagtgttagttggtgccactgctgttgtgtctacccttggaggattcggtaatgaagaacagatgaaaaggataaacggtgaggcaaatgtaacagcagtagatgctgcaaaagaatttggaatccccaaattcattttaatttctgttcatgattacaatcttccatcctttcttcttaactcgggttacttcactggtaagagaaaggctgaatctgaagtcctctccaaatacccaacctcaggtgttgtactgaggcctggtttcatttatggtaaaaggaaagtagatggttttgagataccactcgatgttgtaggacaaccattagaaaagctactttcctctgttgaaaatttcacaaaaccgctgagttcattgccagcttctgacttactccttgcacccccagtgagtgtggatgatgttgcctatgctgtgatcaatggagttatagatgacagcttctttggtgtcttcacgattgagcaaatcaaggaagccgcggcgaaatgtatgaatgtggtgcttgttccctccaagcagagaggaagaatgggctttgatggcaaaggccaatgcgcttcatttcttacgagatgcattgccaaatga

SEQ ID NO: 74057 - DNA, 300 bp, Oryza sativa
  Clone ID: PAT_MRT4530_74279C.1
atgcggacgggacaggcgctcggcgtcggcgtggcggcggaatgcgtcagcgtgggcaacggggatcgcgggggagggcggcggatggaactcctggccgtggcggtggaggcggagaaggtgtatggcttgaaaggcattagtcttgccttcggaagggaagaggatgaagtgcccgagaagaagccgcgggtgcttgctcaaagtaatgctgccaatctcaacaacaagggcggggaggatcagagacaacaagaacatcatccaagatatgatggatcagttgatgcgaggcgctaa

SEQ ID NO: 74058 - DNA, 219 bp, Oryza sativa
  Clone ID: PAT_MRT4530_7427C.1
gcctccaggtcgaagagtaaaagcacccagtggaatctgcaattatgaacgtcttgtaatgctgcgccttcaggagatggacgagattgtcctctgtttcttgtggatattggtcgagcattgcgacgtttactttccgagggtcgatgaatccacaactcataatagagacgtcgagggcgtccagctgggactgcagcagctcaggcttgacaagcg

SEQ ID NO: 74059 - DNA, 1280 bp, Oryza sativa
  Clone ID: PAT_MRT4530_74280C.1
tttgttcgaaggtgattgggataatccaaattgttactaattgctagctctattgggagataatccataccgcctgttctatttacttgcattaatcgagtgtcaactgtattttccattggttcaaacaggtgtcgtcacatttcaaatggcctgaaacacttgagactgattttttctacagcgctttatccattgggacttcaattaatccacaattcattgcaagctttgctgcagcagttggtaaacgatgtaatcaggatttggactccgaagagtctgatccagagtggggttgctggacagcaaaccatgagctaaagaagccatctatgaatttgttgtttacaacaattgacagagtgaaaaatggggcttgtggaatgcagttatccaggcattcgctttctcttcctgagagaacatggcaaagactgagatctactggcatatttcgtgacgcaatcccacatccatacgagaggatagggcatcctatgcatgtcaaggttgcccagagacgcttcgagtctcgtctaggcagacactcattcggctggacttactgtgggtctcacaatttcagtccagcagcctggggacaacaacttcctccaccaaaagcaaatcctactgaagccagagccgtttcttctggtccgaggctacacatttgcaactatgagctcggcatcatcctcattattccaccatctgccatgtcaaagcagatcagtggaaggaggcacgagatcaatgacattgtcctgccattcgtcgtccctccaccgcaatataagctgggcgataggcctgcgacatcgttagccatgcgagaggccatggctgaagctagaattctgcagagtaacgatttagtactggacttgtcacaggatacagacgaggatatacctgatgaagatgatgagcatgtgattgagctgtctgattgctcccctgaagagaaggaagaggagaagatctacgcagagacgctgtgggagcaagtagactcttcacaaagaccaggctggccagtgaagttgaagtccagatgtttcggatgacaagttcctgtcatcgcatctgatttcaagtgcaggcagccgcacgagatctgacgattctttcttactgaagatatttgattcgattgtgatttgttagaattgtattttacaatgtgtagtatgcattcgttgtcaatctttcttgtaagtatctcaatacatctatacttgaacttcccagcgtatatagttgaagtttatttc

SEQ ID NO: 74060 - DNA, 282 bp, Oryza sativa
  Clone ID: PAT_MRT4530_74281C.1
atggcgacgcgcggcgatggaacggcgcggcgcagcattgggacggcgagcacgatggcgcgggcggggctcgaggcggtgatggcaacggcggtgacgcgatggcgtggcagcggcgcggggctcaagggcgacggcgtcgcgatggagcgcggcgcggcgacaggacggtgcacggcgcggcagtggagtcggcgggacggcgatggcgacggcacgcggcgcggatgttacatttatctcactcgtatggactccaaattggatgattctttgtcctaa

SEQ ID NO: 74061 - DNA, 612 bp, Oryza sativa
  Clone ID: PAT_MRT4530_74282C.1
gctgaatctgaagtcctctccaaatacccaacctcaggtgttgtactgaggcctggtttcatttatggtaaaaggaaagtagatggttttgagataccactcgatgttgtaggacaaccattagaaaagctactttcctctgttgaaaatttcacaaaaccgctgagttcattgccagcttctgacttactccttgcacccccagtgagtgtggatgatgttgcctatgctgtgatcaatggagttatagatgacagcttctttggtgtcttcacgattgagcaaatcaaggaagccgcggcgaaagtaagagtgtaaactgggagtctttattgccaagatggaagattcaaacatgcggctccttattaagagatatccctgttctgtcttgcactcttgcagtcttagatcatacattcaatggttaaagttaaattcaaaactttgtacagtgtatgaatgtggtgcttgttccctccaagcagagaggaagaatgggctttgatggcaaaggccaatgcgcttcatttcttacgagatgcattgccaaatgaatgttcttctggagtacttgtttaaggtggaagtaatcactgattctctgaacct

SEQ ID NO: 74062 - DNA, 494 bp, Oryza sativa
  Clone ID: PAT_MRT4530_74283C.1
ttttggggaaggtgggacccccggaaggaccgggcccggatttccggggcggcccaagccgtccgccaagccgtccggtcaattttaaaacgaaacccggtaaaaaataatcggaactttcgccgggaagagggccaacggcggaataatcttcttcttggcggcggccgcggtggccggaacttcccccgtggccgcggggtcttcgggtttggagaactccaaccggacccgttcggtaagggacaaggccgcctcggggttgaagtaaaccggaatggccgccttgggcggaaccgggaaggccttccgtttaccccgtttggccgtaaggaatggaaagaggacacggaacccggcggaggggcaccggcggttccggatcttttccaaaagcttgaagctcggccgttccaccaaccggaggggcctcccttaccgcttgggaataaacggtttcggggacatgacctggaaggagttccaggcaagcc

SEQ ID NO: 74063 - DNA, 351 bp, Oryza sativa
  unsure (1)..(351): unsure at all n locations
  Clone ID: PAT_MRT4530_74284C.1
aaataaagggagatatattcataatgcgagacgccaaacaaatatcttgaagtgcaaaggaggtaaacaatttaattgttcctgtgaagtcatttcttttttttttgacatctaaaacagngttagtgtggggggggaaaacaacagtgcaagtctggcatccaaaacagtgatgggtgggtggtatgagcagtttggtgtaatggtgccaaagctgtcacaacttataccttgaagcccttgctgttccttgttccttttgcctttttaagttttcttgcttttgtgcgaacatatggtttagggttgttgtggggaatttttggttggtgggcgtagtgcttaatagtt

SEQ ID NO: 74064 - DNA, 728 bp, Oryza sativa
  Clone ID: PAT_MRT4530_74285C.1
cagatgcgtaaggagaaaataccgcatcaggcgccattcgccattcaggctgcgcaactgttgggaagggcgaaggtatttcattgtaatagatgacatgcgaaaagatttgtggagtactattgaatctgccttcccgaaggatggtttcagcagtagaatagtggtgaccacaacagtgcaatcagtagctaaagcctgcagttcagccaatggctatgtatataaaattagaaggctagataagatacactcaaaaaaattgttcttgaaaaatgcttgtcgggggaatatcaagattacattcagcctgattcagtacggattttgaaaaaatgtgatggtcaagcactcgcccttcttacagtaggtcaattcttgcgaaaaatgggctggccaagagaacccaagtgtgaagatgcttgcaaccagctatgcaatcatctggaggatgacgacaccttggagagaatgcgacaggtgctgattcatgagtactctacactatcttgccatgctctcaaagcctgcttgctatattttggcatgttccccagtggtcattcaatcaggagaaaaagactactcaggcgatggtcagctgaaggatttgtagaagcactaccttcaggttcttttcctgatccagcagttgagaatttcaataagctcatggacagaaatatcattcaacccattgatctaagcagcaacgaggaggtgaagac

SEQ ID NO: 74065 - DNA, 450 bp, Oryza sativa
  Clone ID: PAT_MRT4530_74286C.1
accagggaaacgggcgaaaaattatcatcaacttggcacattatacaagcaagcaagcccccaacatcgactttattgggggaaggttctcaattataactattgaatctagaagaggggcagccaaggctccaactttatcggggggaagggggggcaactctgggccatgctttaaaaacacattgcctgcactttggtgggggggggggccaaccccatcggtggggaagaaggggctggtctggggggggaccttgaactcctcgggggggaacttgagcaccggggggaacggggcccccttgggcaccctaaacactttgaaggggagcttgggggcggaggggaggaagaacttaaacgaaacctttccggcttcgggcgcccccgggccgccgccgcccggcggcgccatgggtaggggttgcgttggggcggacccctggg

SEQ ID NO: 74066 - DNA, 273 bp, Oryza sativa
  Clone ID: PAT_MRT4530_74287C.1
atggacactggacagccccgcaattactgcggaaatgacgatagcagcagagccacaggacgacaggagcatcgctgcacgcaggcgcaggcgcaggcgcgcagcagcccggccgcggcaggtggttgccatggatggacgggggagctccgatccgcttgccgttgccgcacgctggcttcccgcggtgacgacgcgctggatcctgcaatgcaatgcgttgcgtggacggagaaaaataaatactcctacaggctacagctttacgagtaa

SEQ ID NO: 74067 - DNA, 357 bp, Oryza sativa
  Clone ID: PAT_MRT4530_74288C.1
atggcggcaagcttcaagaagcccatctcgaaaccaaagtaccgcagaaggaatgcccttatgggttcgccggtgtccagcatgccatcccgatcccctaactgcgatacggtgaacagggactactgctttgtcgggaccggtcagatcgggttcggcggtctaaccgacgaaacaccggtggtcagaccgacggcatcacggcggtcagaccggcgggtacacaccgatcagaccggcggcagcgtcaagaggcagaggcgatttcaggcggttggaccgggtgatccagatcggtcagaccggcagcacaggcgcggtcagaccgatctacatcgatttgagggtaacttttaa

SEQ ID NO: 74068 - DNA, 111 bp, Oryza sativa
  Clone ID: PAT_MRT4530_74289C.1
atggcacccactgggtttgagatcgccagcaccaccactttccccgccaccacccaaatctccttcggcgcatttgacttcctcgtcgacagcgccggcaaactccgtcag

SEQ ID NO: 74069 - DNA, 607 bp, Oryza sativa
  unsure (1)..(607): unsure at all n locations
  Clone ID: PAT_MRT4530_7428C.1
ctgctcggcnacctgccgcagnacgagtgccagaagctgntgctggtgttcaaccgccgctgcctggttcaagtcgcaccgccacccctacgtcggccgcgccatgaacgccctcaccgactacctcatggcggtagcacccatgcatgcacacaccaattactccctccgtttcatatcaaactagccatcttaattttgatcaaatttcatgaaaaaacatagccaacatttttcatatccaaaatatatttacggttagatttcaacaaaactaatttgatcgttttagatgttgctattgttttctataaactcaataaaaaattttaaaaaattaattaggaaaaagatcaagcatcttatataatatgaaacggagggagtaactaatacgtatacgtgtattcttacacatgtacgtacgtatatatggcagcggacggtttcgatgatgtgtatgtatgttgattgattcctgtcaaattaatttctagaggattaagccttagaaggtgatcacggtcgatgtactttgaattttgacgaattaattaatttaaattgtaaaggtggtgaaattttttgaaaaaaaaaaaaaaaaaaa

SEQ ID NO: 74070 - DNA, 111 bp, Oryza sativa
  Clone ID: PAT_MRT4530_74290C.1
ttggaaacgctcggatttttgggtcttgctgggctgagcatgcggggtagcgttacagagcgaggagtggaggtggctggtgtgctgccggcagctgatcagcagcgatag

SEQ ID NO: 74071 - DNA, 1672 bp, Oryza sativa
  Clone ID: PAT_MRT4530_74291C.1
gcaactggaataaaccatccacatcgcgcaggatcactcaatccaagctgtgaaattcccagcatatgccacgttacaacctctggtccttccacaaaaattgaaaaagaaaaaaaaagcaacatttttagaaggctaaaataaacacttcaagaaaccgaacatttacaattccagcgcctagaatttattccagggtggcgagatgccatgcaaggcttgaacagagattcgacactcagacaacagttccaaatccatgaccgatgcgatcgctgggttgattatgactgctgtatatcccgaaattaatctcatcatgcaacatgattagtcaccagacttctcaagttcacacagccaagtggttgtcaatatcaaaactgcgaagatctgaagcaccagttcctatccttttgtttatagtgcagtagtggaatttgatatttccggacttgacatcttcaagatacatcctcaaggtgacaatgatcgaagaaaatgctagagaatcaaatggtatgtcatccaaggcaaaaagtgcacattctagcgattcaggtccaggtgagaagttgggggtcttcaatcttgctcggaaaataatgtaactttggccaatcagtggaatatccaactgagcaaaaggtgaaagtatctctacatctgcacaagcttcctccaatgtttcccgggaggctccttccgctgcagactctccaacctccaaataaccagcaggaagagtccaaaggccataagctggttcgatctttcttctgcaaaggagtactttgttatcatgttccacaagacagccaacaaccattttggggttctcatagtgaactcttccacaagaagagcagacagccctcatcttttcatctccatctggaatagccagtttcgtcgggcttccacaagatgggcaaaagcgtatctttgacttgggcaccacggggggagccggcgagggggcgggggagctggcgttggaggaggaggccgacgacatgcgtggcgggcggagcctactggccgcggaggcggcgcgggggagcggcggcgggtggcggaggaggaggcggtggaggcgcggggagaggcgggcggcgtggtggtggcggtggaggaggaggtggtgggatctgacgaggagcatggcgatggtggattttagtagtaggcgagaggaggggagggttggtgggcggagcggaggagaggaggagagatggaatggcgaggacggcgtccgtccgggcccgggtcaggtcggcgaggtgggggccccggggggtgaggtaggtcggtcggtcgacacgcatcgcgtcgccgccaatggggaggtggcattggcaacggtggccgcgacgtcacctcccggaagatggccagtgacttggcgagggcggacctagcggcggagaggcggtacaaggaggagcaccggaagctgatggcgtacgggatggcggacgggtgggcgtacgggatggcggacgggtgggcgcgcgacctgatggacaaggcgaccgaggctcggtggagggtggacctggggtcgtcggtgtgggtgatcctggcggcgcaggacgtcctcgccaaggcgcaggacgtcttcaaccaggctggggtgtcgtggccaatatggttgtccctcttggta

SEQ ID NO: 74072 - DNA, 427 bp, Oryza sativa
  Clone ID: PAT_MRT4530_74292C.1
gaaagtttctttcttgtcctacaaggactagtatctacccatgggtataaatatgtacacccagggtcaatgtaaaaatatttctcgatcaatacaactcggcgcatcgccaccctctcttctgaggtttcacttctcaaccggcggaatttggcacctgacgctgggctgcgtcggttcagttcgatctccggcgaaggggtaagtcctacgttctgtcggccctggtgaatctatcggctacattagtgttgtttaaggctgcatcgcttcgatctcttggatcgctctagattggttgatatatttgcctacttgatatctcaattctatctccaattgcattgtgtttagagacgcatcggtttagtgcagatctcctaggccagtgtgtgtttttcgcatcaacaccatgtcattttacagc

SEQ ID NO: 74073 - DNA, 177 bp, Oryza sativa
  Clone ID: PAT_MRT4530_74293C.1
tgctgccgccctcaccttttctttggagggctggtccaaactggacgactcgaccgaccttgcacattcctgtgacactgccttcttcagcgatcactgcagaagactgaagaaaactcgcaacaaaacgccctctatacgctactgcgaggagaacacttagacatgggccgacga

SEQ ID NO: 74074 - DNA, 1352 bp, Oryza sativa
  Clone ID: PAT_MRT4530_74294C.1
atggcgcttgccgtcactcccttgccccacctcccgatctctccccctcccaaccgccgtcgacaccaacagtggcccctctcctgtcgtgtaactccatcatctccgcggcaatccctctcagcaacgccgtccaccttcgccctcagcgcagtaggcaaccgtgcctcgctgccgccgccgcgacaacggcttcaaccgccggtggatgagattgagggccgggtagctgccacctccgctaccggccttgaagaggaggtcagcgagggagccgttgctcatgtattcgtagtctccctcctcgatgactccgccgtgccggccgtcgtgaagagaagccttctcgagctctcgctgctgaagtgctcgtccttctcctggtacctctttgtggcagttggtgagatcgagatgcaaaattttaaggagagggcgattgccgtcctcttgaaggtgcccgatctgaaggccggcgccggtggtcgttcttcttcggagcccgtgagggtggcggcggccggctacgtcgtccatggcgtgcctcatggtcggttcagggagcacacgagtagtcggccagcggcagtggtggccctgaaacaacgttcaagccagaaaggaggggaagcttccggctgcagcggtcggtgggactcaaagccggcgtgcggcagcagtcgtcgggactcaaagctggtggcggcggtcctcgggactcgaaaccggcgtgggtcagcggtcgatgggacacgaagcccggccacggcagccgtcaggactcaaagccagtgcagggggcaacccttgacggcagcgacgaaaccaacctcttcaagacatctccaactgagaagaacttcaactctggtgtgggggaaaagagcaagactgagtactacccactgtactcagcaagtcataccggaagaggaggcaagggcggcggcggcaagcggccaccgacggcggcggccggcgagaagacggcggtggccggcgacgtgggcgacggtgcatcgcggcgacgcgcatgcggggagcggcggcgcgcgcgggaggaatatagagggagttctcaccggggttcggccggcgcgggaggagactacggcaaacggcgacgggtgcccacccatgagcgagagccattgcccaccgcggcggttttgggggacctaccggccctcggggagatccggcccctcaaggcgggattggatggggatccgccgcccggggtagctttggcggcggcgaagctaatggcgccggcagattggctcggcggcggctccagcggcggcgagcggcgaccggaggagtggaaaaggcggcggcagcgggagtga

SEQ ID NO: 74075 - DNA, 370 bp, Oryza sativa
  unsure (1)..(370): unsure at all n locations
  Clone ID: PAT_MRT4530_74295C.1
tccccgggctgcaggaattcggcacgaggagcagtcaaccatggccgcaacatctcgaagaagcgcaagttcgttgccgagggggtgttctacgccgagctgaacgagctcctccagcgtgagctctacgnngcgacggctacgccggcgtcgaggtccgcgtcacgcccatgcgcacggagatcatcatccgtgccacgcgcacgcaggaggtgctcggcgagaagggncagcgcatccgcgcgctcacgtcggtcgtccagaagcgtttcaacttcccggacggcgccgtcgagctgtacgccgagcgtgtcgcgaaccgcggtctctgctcgcaggcgcaggccgagtcgctcaagttaccgtctcc

SEQ ID NO: 74076 - DNA, 302 bp, Oryza sativa
  Clone ID: PAT_MRT4530_74296C.1
cggacgcgtgggcggacgcgtgggtgactaagccaaaaaagaggcaatttcactctccgagtcaagccaaaagatgccatttcactttcagattggttgcgattttgctgtaaaagggtgggtgtgttgttctgtttcgttccttttcctgcgattttgctgtgggagaggtgtgtgtgttcgtccttttcctcgtgtatagaagttcatttttttttcccttgttgctcaagttgtaacattccatccagctagagcattaagacccaaattattggacccaaaaaaaaaaaaaaaaaaaa

SEQ ID NO: 74077 - DNA, 1474 bp, Oryza sativa
  Clone ID: PAT_MRT4530_74297C.1
cccatctctagccgccgcgacgcgagcgagcaaagcaatggaggactccgccgccgccgctgccgtcgccgtcgtgacggtgccgttcccgacgcagggtcacctgaaccagctcctccacctgtccatgctgctcgcgtcgcgcggcctcgccgtgcactacgccgcgccggagccgcacctccgggaggcccgcgcgcgggtgcacggctgggacgccgcgggcgcgctccgcctcgccgccgtccgcttccgcgcactcgacatccccggcgggtacgcatcccctccccccgacccctcgtccccgttcccgggccacatgatgcccctcctcgaggccttctgcgacggcgcccgcacgccgctcgccgcgctcctccgcgagctctcggcgtgccaccgccgcgtcgtcgtgctgcacgaccggatggcggcgttcgcggcggtggaggccgcgcgaatccccaacggcgaggcactcggggtgcactgcctcgccgcgtcgtacaatgtcgggtgggtgtaccccgcccaccgcctgctggtggagcacggcctcgtcttccacccgcccgacgcctgtacgaccaaggagttcgtggcgctcgccaagcggatgggccaggagcgcaggcgcgcggccgtcgccggcatggtcgtcaacacctgccgcgcgctggagggggagttcctcgacgtgctcgcgcagatcccgtcctccgatggcgacaagctgttcgccgttgggcctctgagcccggtgctccccgacacgcgcgcgcggggctcgccggaggagagcgcgcgcccgcggcacgagtgcctgagctggctcgacaagcagccgccgtcgtcggtgctgtacatatcgttcggcacgacgtcgacgctccgtggcgagcagatcagggagctcgccgcggcggtgcgcggcagcggccagcggttcatctgggcgctgcgggacgccgaccgcgcggacatggacacgcgcgaggccgaggcggccgtgcacggcgcgcgcctcgcggaggcggcgggcgggctccgggaggagatcgcccggggcgtgggcgtggtggtcaccgggtgggcgccgcagctggagatcctggcgcacggcgcgacggcggcgttcatgagccactgcgggtggaactccgtcgtggagagcatgagccacgggaagcccgtgctggcgtggccgatgcacagcgaccagccgtgggatgccgagctcgtgtgcaagtacctcggcgccggcgtcctcgtgcggccgtgggaggagcgccacgacgtcacgccggcggccgcgatacgcgaggcgatcgagagggcgatggcgtcgggggacggcgcggcgctgcgcgcgagggcggcggcgatcggggaggccgtccgcgccgccgtggccgagggcgggtcgttgcgccaggacatggacgacctcgtcgcctacctgacgaggtga

SEQ ID NO: 74078 - DNA, 183 bp, Oryza sativa
  Clone ID: PAT_MRT4530_74298C.1
ttcgcttatcgacatggaagctgctaaacgccgtgtgagtatttaattaccccctcggtattaaaacagtaatctactttctataaattctaaaaactcttggtaaaaagtatgcctgatatttcaaagaaaaaatcctaacttggatatcctaatatccgatatgaaagcttgaaatagaaa

SEQ ID NO: 74079 - DNA, 428 bp, Oryza sativa
  Clone ID: PAT_MRT4530_74299C.1
aaattagaagaaactgatgaaccatgaagcccataaaacctagagaagaaaggggggaataaaagaaaaaggtagaagcgtctgagtgaagtatatactaaatcctgagacggaagtggcaaagaacctccaaaatttttgcttgcgggattgaattgttcccaatttgagcaagcagcagcctaccacaccacaacgtgtaaaagtcgtaaagcaaggagagccaaagaacacactatcaactacagagtctccgagggcggcaagagtgaacagaacctatggtgattcgattaattcccaccatgaatcacaacatattccaggaacacaccacccaccgaatcaatccaagaacttagtaggaccaatagactcccatgaagcaagaatccgaggaggcaaacatctaaaaaatcaaataaaaa

SEQ ID NO: 74080 - DNA, 4297 bp, Oryza sativa
  Clone ID: PAT_MRT4530_7429C.1
atggctagggtgccgggcgatctagcggctcgtcctgcccttatttctgcatggtggcctccactggagagactgagcgattgcgtgagcttttcactgcccgctcggttgtcgcctgggttgaagaaggggaaagggtggaggcgagcacatttgctgatgatgtgcgcactgcattccgcatccgccgctctgatatccaagtcatgaagttccatcctgaagatttctttctcacgctcactaatcatagtgatcgggaggccatcctgcaagaaccaagactgatgctgagaaatggccgtgtgtatcgcttccgtccatgggacgagaggcgcggtgctgaatgcgtcgacgttcgcttcagggtcagagtatatgtggaaggaatccctatgcatgcaagaacagatgcaactgcggcaaagatcatcggcaagaagagctccatccactacattgaagaatactcaaggcgtcgaaactacaaccgcacttttgactattgggtatggagctcagacccgagctctatcccacgagcaacaaggttgacaatcacgtcagcagacgaggaggggctcccagttgacactcccttcccggagctggaagctgtgcatcctgccccttctgacacaaaaaaggtctcacctatcctgttcttattcatattgacactttgcaagacctggtgtcccgacagacacttcctcgtcggcacctgcttcccctgttttcgtgctttcgtctgttgcaggcaaccaggccccggagatggtggcgaatcagagtgtggctgctgatttcctcaacaacctctccaccccgatgcagcagcctctactcaagatgccgaagacaaagaagcgtcgaccttgccttaataaggtgactttctcaccgcaaaggcacagcgtacatttagcatctaaggctaggcgcaactcaaaacttgaaacaattgctcaggaaattctctcaaataattttggtctgcttgatgttggcaaaccttttgatgaccgcataaaaaaactttatctgcagcagtacaagaaaccgttgtccccagctgctatgaagaccatttcggccttggtggagaaaggcggctgcaaggcaattaggctgaacggcaaggggaaggggaaggttttaaattgcttcatcctcaattggaatgtaagaggccttaatagtcaggctaagcaagataatgttaagttgttagtggatcaaatgaaagcaacagtagtttgtttgcaagaaacaaagatggaaatggtgtctgattctgtgataactcaattcttggggcagcgctttgtgcaggaatttgctttcctccctgcaattggaacgagaggaggcatccttctggcctgcaaccacaactttttctcaatctcatatgttatcctaaaagaccacagtctgactgcttcggttactatgaaaagtgataacacttgctggtccttaactgtagtatatggaccgcaggcagaaacagaaaaaaaccttttcctggatgaactgagaagtttagaaagcatggtgcaccctgcctggcttttacttggagatttcaatctaatttatttggcctctggtaaaaacaatgaccgtcttaacagaagaatgatgcagaggttcaaaggaacaattgacaggttagggataaaggagctggctctgaatggtaggcgttttacttgggctaaagatggagcaaacccgacacaaacaaaaattgaccgagctttctgcaagccggactgggacatattatttggatctgcttacatggctgctttatcctcatcaagttcggatcatgcgcctcttttcttggtgggctgtgaacagagggaactaaatacctcttttcgttttgaagcttactggcttaaattccctgagtttttggaagtagcctctgaatcttggaatagaccaattagagggtcaaatccctttgcaaagctcaacttgaaactaaaaagactagcaagagatctgaagagatggagtaaatttcggattggagatatcagattgcagcatgcaatcgcaaatgaggttattttccaacttgatgtggcccaagaagagagagctcttacagacgaagagcttctgctgaaatctactctaaaatctagagttttaggccttgcaatttcacagaagaagaattaaaagaagcaatatcaaaccttcccccacaaaaagcacctggcccagatagctatataggggctttttttaagaaagcttgggaggtgattaaatcagatttgctacaggccattaaccatttcagctctctgaactcagatagactggaagacctaaattcagcaaacatttgtctaattccgaaaaagggtgaagcaacaagggtggaggacttcagacccataagcttaatgcacagcttcgccaagatattagcaaaaatgttggccaatagattggcgcctaagcttcatgaactcgtctcaccaaaccaaagcgcgttcattcgaaaaagagcaatacatgacaacttcctgtatgtgcagaacatgatcaaaaacttcagcagaaagaaaaaaccgatgcttttcataaaggtcgatatttccaaagcctctgacaccgtaaactggccgtatttgctggaggtactacaaaattttgggtttggacaaagatggagaaattggatttcaaatattttaggaagttcaagctcgagaattctcctcattggaatccctggtaaagctgaagaagcttctctcttggcaaagatagacccaaggcgtagtagattccgatgttctctctacgcggatgatgtggctttattcatcactccatctgagaatgatctgatagcggttaaacgcattctttagacttttgcacagatcagtgggttacatacaaacccgggcaaaactgagatttaccttattgcttgcaacaacttagacctcggcaatctcctttcttctttcatgggaaacctaaagactttcccttgcaactatcttggccttcctctgcatacaaagaaactgagaaaaattgatttgcaacctctcttagacaaggttggagcaaggataccaggatggaagggacgctttttcacgtcagcagggagagatgtcttagtaaaatcaactctttcagcaacaccaatttatcattttacctgctgccatagatgaaatgggtgtttaaaagaattgatcgttacaggagagcttttctttggaaaggtgacgacccggagaaggttagtgcaggcagcagccttgtcaactggcaacaagtttgcaaacccaaagacttgggcggtcttggcattctaaatttggaaaagtttgctagggccctgaggttacgttggctctggttcaattggaaggaggaccataagccatgggcaaatatggatcttccatgcgatgagatggataggtgccttttcaaagctggaacgaagataactgttggaaatggtatcaaaatatctttctggaatgataactggatggatggacaatcgccaaaggatatagcaccagcaatctatcgattagcaaaaagaaagtcaaacagtttaaagaaggatttagaggacaatcactggcttgcaatgctccacccgatcacttctttagtggaaattgaagaattaatccaactgggaggtttgttacaaaacgttaatctagttgctggacaaactgatgacatttcctggagatggacagcgaatggacaatattcagcaaaaagtgcataccttgcacagttccaaggatccaatgctttaactgaatttacacctttgtggagcgcgtttgcggaaccaaaacatcgtttctttggatggcttatccttcatcaacgaaccctcactgctgaaaatttgcttcgacgtcactggccatgtgattggatatgtagtttgtgcaatagtgcctttgaagatgcagcccaccttgcaaaagaatgccctttcacagtgaccgggtggacgcagatttgtatttggatgaattttcagctgcctcaacatcatttgcaaggaaatctatcggactggtggatcagtttctgcactatttcgccaagacagaacaggaacaaggttctgggagctctcatcataacatggtggaacgtttggctagagcgaaacagaagaatttttcaacagatttcaaagaatgaactccaagtcgcctttctggtgaaggaaaatatcgccctaattgagcaatctaggatc

SEQ ID NO: 74081 - DNA, 357 bp, Oryza sativa
  Clone ID: PAT_MRT4530_742C.1
atggcccgtccatctcgcgggctgaagcagcgcattcggatctggaaaaagtacaccgaagctgagtcagggtggccgacgagctcgaccaagtcattggctgcgaggcggtcggagacctatgtcttgagctcgcgccgcctcgagcaaaaagagttggacgaggaggcggcggccatgggccagcgtccacggagcagacgctggacgcggcgtcgtggtggtcgtctccatcgtagcggcaggggatttggtggttcttggcgtcgtggctatgtagctgctactgctaccggttcgctcaagggacgagacgagctgtctcggcgagccgtcgagacggagcccgagaagtag

SEQ ID NO: 74082 - DNA, 324 bp, Oryza sativa
  Clone ID: PAT_MRT4530_74300C.1
atggaggaggagaagggggagaggttcgatctcaaagatcatttctccaccagtgaggggagtgatgcgacggtcgacggcgtggctctgggaaggctaggcgtccgaattcgcgcgcctaggcgtgctagatctgggagcggcgacgaccggggcgatggcttggcacgtcaacatggcaacaagggcgacacacatggcggtcagaggcagccagctgcctcgccggtgcgcgcggtgggttggggcctacggtggcacccagcggcatcgacaagcggtgggttggttgacacagggcacccgtgcggcaaacagagctag

SEQ ID NO: 74083 - DNA, 516 bp, Oryza sativa
  Clone ID: PAT_MRT4530_74301C.1
gcaaaaaaaaaaaaaaatcatcaccatcatttcattgtacaatccaatacaaacggataaaaaataaaaatatggagatccaagctctgatcatccaaagttaataataaactccctaagataaaatccacaatcaacaagatgctttcacagcaagaagacggcgaaggcaaaaacagcaagaaggacggatccagctcccccggcgggggcggctcggggcgcccccaactgtcgcgctccggcggggccgagcgccgccgactcgaaccccgccggcgccttggccggcattggcgcaaaggcggcgaggtcgttggcggtgggcggcaggtaggtgccgttggccatgggcacgtagacggccaacctttggcccttccggcagtgtcccagcgcggcgcttatgtaataaacccggcccggcgtggggaggttgaaaacggaattgcccgtcgtcgagctttagcaccgggtccgaaccctggcagggggggaacgccacccgggtcacct

SEQ ID NO: 74084 - DNA, 3649 bp, Oryza sativa
  Clone ID: PAT_MRT4530_74302C.1
atggggcgcggcccgtcgaagaagctggcaaagcggccgcgggctgcggcgcgtggggatcaggaggagggtgacgggaaggaggtgaaggaggaggaggaggatgaggcgctgctgttcccggtcggcgcggaggtggaggttggcagcgacgacccgggcttcgtcggctccttctacgagggcaccgtcgaggcccacctcccgggtggcgacggatacgtcgtcgcctacaccacgctggaggagggcggcgcggcgctgcgggaggaggcccgcgcccgcgacgtgcgcccgcagccgccgccggtggcgggggcgccgggcgcgccgggcgccggtgggttcgcgatgcacgacatggtggaggcgttccacaacgaggggtggtggtcgggcgtggtcaccggcctgccgctgccgctggacgtgctccccgtcgacccacgccggagggtgtacacggtggcgttcccgacgtcgcgggaggtgatggagttcgaggaggcggcgctgcggccgcaccgcgtgttccgccgcggcagctgggtcccggccgctgatgtggacaatggaggtccagcattcagagagggaagcctagttgaagtgagtagatctgcggaaagctttggccagtcttggaatccagctactattttgaaagtgattggttctacaaatttcttagtacagtatagacacgtcggagatgatggggagctggtcacggagattgttgatactgaatatattcggccagcacgctcaatcattcgtatggactcaaaatacagattttctccatcttctcatgtagaggtctttcatgaaggtagctggtggcctggaattattttggagacttcaagtggtgtatttggcaagatgtatgttgttaaactgaagagttacacaacgggcatggataatgtggatggcgtggataagttgacagttgaaaatacaaaactgagaccacagtttgaatgggatggtcgaaaatggatgcgctgcatgacaaagaaaaaggatacaaaggcaaagaagcttgtcattagagggtctcaattaacctctcgaaaaaagccaattcctgctgacttggcatcatgtaatgacagtgatgaaatcagagataaaccaagctctgataaattgttggagactgcagatgtagtaccacgacctaaagaaactatgaagcaacaaaatgcagtgctggcattagcatctcagataaaacttcctttacagttatcaatgacaggatctggtcatttgaaatatacttcttcacttattctaggtagtcctattgaactaccatcttctcagatggatgtcatgccctctgtgccgcaaactgcagggctgcaagcttcactgtttggggtgtttgggaaactaagacctatcccacaggatccacttttagtaatgcaatcacctcatccagatctcagcagaaatgaaggatcaaaggcatcgactgatcaagaaaagcaatcaactgatgaaggctgttgtctgatttcaagtgctgcaaatagcttcaactttgtgtcatttgctggaattgatgtgtccagaaaaagaaaagaatgtgtttcttttcaagcacctgaggaactaggggtgaatcctgaaactctcagttcttttcacattcaggagatgaagaaaaacagagttgacgaaacaattgagggaacccacgacattgcagcaatctctgaagaacagaccaagctgatttttagagatgaacataatgaactgcctaccaatgttattgctggtccagcaattccttcagaaaaaaatcagccaactccacttgaagacaataaaggtccacgagacagtagcattgttgataaaatcagccaaagtggtataaacgatgttcgccaagatgagaaccttgtactgcatgcaacttcaacattagataattctggtgatgtgaatttgttatcttctgtttcttcaactgaaaaccagaagaaaatatccaaatctgaagggtgtgaaataagtatggatgaagactctggtgaagaattttgtcggagcattttggttatgcctgatgatactagaatggatcaatttccttcagcaaagagtggtcaagctaccaggcatgatgacctcatttgcaaggaaaacttgggagcaatagttgagtgtgtgacgaacactccaacagagaatttgtcttttttgtctccagctatgtttgatgatggggtgccgaaccagtcaccagtcagtgagaattgtcaggataacaaacaagatggcatggacaatgtggatcatggagcaaatgtggtggagttagccagtattattcctgaaactcagcatgccagtgttggtggtccactgtcaaccatatctttagctgcactcgagggtaaaacagtcctttcacatagtttaacgtgggagtctgcacttaatgaacaatctggagtttcacaacagtatcacagctcagccatggtagagtcaccagaatgtgttgctgaaagtagccagtccatcgatgattcgacaataactcagttatgttcttttgatatgagccaatgtattgatgctgaacttggtaacagcttgatcgtttcaaacaacactcaggatacaccaatatccaagtatgtagcaagaacacataactcttcctgccccttgatgcagaaatttcttcatgtgcatgagaatattatggttgatcagccatcagaatccttggctattattgaacttccgtttgtgaagacctccccgatgtgggcacaaattgaggcaatggaagtatttagtaaagtgccacaacgaccaaattttcatcagttacagcagcatcctccggagtttcgtgaagggatagcattgggtttgatgtactctttcaccaatttagcagaaagcataaacatgctgaatgtccatgacgataatgcagtatttgaacataagatgaggtgcatttctgtgttggaagcagacggcttcgatgtcaggcacctacgatctcgtttggaaactctgctcagtttaaaaaacagctggtccaaaatacaggatatgatgaaacgttcggagaagaagattgctcaagaagaaatcgatgatcaacaacgctgtgcagaaattagtgtgctaagtatggttgtccgccagcttgaacaacacgcccatctcttccgttgcataaagaaccgtgctatttcacagcagatgagccatgccatggagaattcaagactcaaagtagaagcaagccaacttaagcaatcatctatgtctaccgagcagcgcttcagtagtgtcgtcgctgcgccatggtaaggtttgtgcaaactaattggtatgcttgcgtattatttagttactgatggtatgtgaatattgctagatgttgtgagttactaatgctagtgctgctgaatctctttagtttgtgtgatggtttcttttggtatgaggagagcacccaacgtatgtaatgggtcgttgttgccctttatgcaagacatcttttgcttatatacaatgactactgatgtacatatagaatgcccagatgaaatttgtgttaaaaaaactcgagactagttctctctctctctcc

SEQ ID NO: 74085 - DNA, 288 bp, Oryza sativa
  Clone ID: PAT_MRT4530_74303C.1
atgcagacagacagagataagggagggagaggagctgtgcgcctgtgctgggagacgcattgtggggaggtagcagcggctggacgtggagtcggcgttgacgacgaaccggcagcctgcccccaagcagcgtcggagacggtggggagggcccagattcgatctgcattcgtcgtgctcgccggagagctaggatgggagaagggcacgctgccgctgccgctactcctcccgctccccgcgtgcaccgtgccgccgccaccgctgctgctgccgctgaaatatttt

SEQ ID NO: 74086 - DNA, 259 bp, Oryza sativa
  Clone ID: PAT_MRT4530_74304C.1
cctatcagaagatcacaatcaccacattttcaaatacatctcccaactcgtctgttgtttcactaacaaggaacacattcttccactcttctaaactactcctcttttctccccacctaagattaaaattaacttgagtccagcctgcttcaacctcgatgaaatacttacagactactcttccccttttctcccccctacacaacagttaaaacattcttccctaacacaaaccttaacttttactatacaaaattta

SEQ ID NO: 74087 - DNA, 619 bp, Oryza sativa
  Clone ID: PAT_MRT4530_74305C.1
aaaatccgaattttcgctaactgtaaattgtacttctatgtagactctagcctcttcttccaatattatttatttttaattctgaatttttattattttttattggatttttatggggactctaaactaatctttcaatattctttaatgtttaatttcgaatttcagttacttctaaattggattcctatattaatttagacacttcttcccatattttttttaattttgaattttagttatttgtaaattgtatttttatatgaactctaaactctacttttaattttattatggttattctgaattttagttagttttaaattcctatatggactatatactctacttctaatatttcttatttttaatttcgaatttctattatttcttaattggatttatatatggactctataggctacttctaatattccttatttttaattccgaatttctattatttcataagtggatttatatatatggactctatagtctacttctaatattccctatttttaattcccaaattctattatttcctaaatggatttctatatggaccctatccttaactctaaaattccctatttttaatttcaaaattcaggtattt

SEQ ID NO: 74088 - DNA, 2757 bp, Oryza sativa
  Clone ID: PAT_MRT4530_74306C.1
atgagtgcgctgcacagccggcagggctcttcccacattccgctcaggtgctcacccacccaaccacctgcaggctccgatccgattccgagcagcatgaacctgtcggaggaatggcgcttcctcttccccgtctcttccgtctttgcgccgccgtccctcgccgtcgcaaaccggaacgagaatgggaatgggaatgggtatggacccctcctcttctcccccctcccgcctcccgccacgctccacaccaatatccccttccccgccttccagtttcatcccccgcactccaagtccaccggcgacgccctccgctactttctcagctccaccgcctccttcctccccacccccgacctccactccctctccagctccctctccgactccaccaccttccgcccgccgccgccgccttccaacctgctcgccaccatcctcctccgcgctccctccacctctctcctcctcttcttcccttccggccacaatgccgaccatctctcctacgctactctccactccactgccgcccccctctcggccgtgcagaccctcacccacggcttcatgcaccccggccaccgcatccaccacctcgccgccacctcctcctgccccccgccgcattcgcactcaccagcagcagctaccccccttgtccacggattccttctcgctgccaccacctactcggtcaattggttcaaggttgagtcttcttcttctagttctacctccccgcctgcgctcgtgcccgcggccaagcaggcgttcgacgccgccgtcgtgcacgcgtgctggagcaagcatctgcactccgactgccttgtgctgctcgacaatgcccacctctgctgcttcgatctccaccaacgccgtggaagcgtccttcgcgttggcactgccactgccaccgagggtggtgcctgcctaagctgcgactacgggccgcaaccgtggacggccgtcgtcgccaccaccaaggccatcctactccttgatctcagatatggtccagatcatcctggaaactgcaaggttctagcgagggttgggatgcaagggttgttcgaccctgatcctcctctcaacagcgaatgccactatcttgcattctgcaaggctccgttcgacgattttctcatgtcggtggcgacggagcgtcttctgttggtgcttgatatcaggcagcctctgacacccgtgctggcatggcagcatggcctccataacccaaatcatattgctatgtttcgcctatctcaactcaggccttccaaggagcatgagtgggcgtccagctcggggatcgccattctggctggttcattctggagtactgggtttaatctcttcttctgtggccccaaggaccaatgctcttcctcttcacagaatgctcatcacctgtatgcttgggatgttccatctcggatttctttgataggccagcactgcagttgcagcaatgggcttatgagagaggtattcactgatcatgagcccatcactaggaacaccgtcgttggctaccacgtgcttccaaacacattgctgcaggacgaatcgtcgtcatcgttcactggctttgctttgatccggttaacgtcgtcggggaagttggagatgcaaagattccgtgcatctggagattttgatgaacatgtcatgtgtgatggatcacatcatcaatctgcggcttgtactacttcatccattatttctccagacactactgctcatggtgaaaagttctcttccagatataagtttttgaagttccattacctatcaaaatacctggagggcaatctgctcagcgcgttggagaatcataatgttgttaacaaaggctcccaccaaattgttattagtgaagatgtatcagcatttgcaaaggagaactctccgccgtgttatcggtcagtttcagatctcctatgcaatgctagtgtgcccatgaacatcttcgaaactgggtgtcagcacatactgaacaatgggctatcttcagatagccttcttgttacattctccaaatacaaggacatgcttgcatgcagtaaaggaaaactgatatatgaatatccagaagttcctgcacgttctcgaaacaatgatgaacatcggcctttcctgttggcaaaaccttcaggcacaggtaacaagctcaccagcgaagcaatatctggagatgctcttgttggtccactactcccaatccctcttctgcttgcaattgaagatagaaacaagggtactatagagagcagcacttgtcagggagaaaccagctcggtaagccgtcgctgtagggaagctcttgaagcctgtgttcctaaaacatcaaatgccaatgcaaccaggtttagtggatggtatgcttcgcgagagttgagaaagaagccatattttgtttatgagcctcagattgatgatagactcactcttgatgagactgctagaaaggagggtaaaaaggcgcatatggatgaaaacttgacaacatttgtttgtggaaaagctggagttcctcattctggaccaaagcaagccgcatccaatttgtttgatagcaattgcagcccagtgaggatggattttgagcttccatttgtagacgtacagcctgctgagcaaaaggcaatccagagcttgaagaatcagtttttatcatggcaaaacaatttcaggccatacaaagatttctgtaactcacatcacatacaattacaaaagccacagcgatag

SEQ ID NO: 74089 - DNA, 288 bp, Oryza sativa
  unsure (1)..(288): unsure at all n locations
  Clone ID: PAT_MRT4530_74307C.1
tgtgtggataaacgaatgcgtgtgctggtgagtgtttgtgggcttgaggtttgcttgccgtgggagaccccagcgatggtgtgcgccantggaagctgcatggatagctggtgtgtgtaattggaactggggttacttgcccctggganatgactagcttgtgcactgcctgcacacaccccttgctgaggcctgggttgacctttgaagcttgcnaacatggcgtgtgacaatggngccagntatttaangtcagaaatttagagccaaaaaaaaaaaaaaaaaaaa

SEQ ID NO: 74090 - DNA, 220 bp, Oryza sativa
  Clone ID: PAT_MRT4530_74308C.1
atccttcaagaaataacaacttatcacctgaattgtacagcaacgtcatccggtgataaatagctaccaaatctcaatgaccaaaatatttaccgtcaccacaaatatattacacatacttctaggcttgacaaaacctaataagcctactctaggggaacgccgagtattttacactgttacacaacaagccatccaataacaaggccctgacagtcct

SEQ ID NO: 74091 - DNA, 399 bp, Oryza sativa
  Clone ID: PAT_MRT4530_74309C.1
atgaggtcaacgaggacggtgccggtgtcagagccgacgccgaggatggatgagcagcgtgcggataagggaggagttgcgtgccctgacgcggtaccgtcccagcggtggtgcaggctggggcggcaacagcagatggtgagcacatgctcccctggggcccgagccgtggcgtggaccatggcagttgtccgtggttgccttgatccggtgacggtggcggtggtggagaaggctcatgcagagggcgcggtggcagccgacggtcgggaagtggtagaggagaaatggcagtcgaaatccttgaataaacccatgcctctctcccacttgttttttgatttcttccatcacaattcacacactgccaaatcaagcagtcagaaggaggagaggtag

SEQ ID NO: 74092 - DNA, 2100 bp, Oryza sativa
  Clone ID: PAT_MRT4530_7430C.1
atggagcaaatctcggattggacatcagattgcacaaactcaagaaaaaggaaaaacttcattccagctctaaacactccctcgggtatagctgtaaccacagaacaaaaggaggctgaacttgagagatatttctcccagagattagggcactctctgaactcagatagattggaagacctaaatttagcaaacatttgtctaattccgaaaaagggtgaagcaacaagggtggaggacttcagactcataagcttaatgcacagcttcgccaagatattagcaaaaatgttggccaatagattggcgcctaagcttcatgaactcgtctcaccaaaccaaagcgcgttcattcggaaaagagcaatacatgacaacttcttgtatgtgcagaacatgatcaaaaacttcaacagaaagaaaaaaccgatgctttttataaaggttgatatttccaaagcctttgacatcgtaaactggccgtatttgctggaggttctgcaaaattttgggtttggacagagatggagaaattggatttcaaatattttaggaaattcaagctcgagaattatcctcaatggaatccctggtaaagcaatttggcacatgcgaggtctaagacaaggggatccactctcaccgatgcttttcatactcgcaatggaaccgctacatcagattttcaaagcagctgaagaagcttctcccttggcaaagatagacccaaagcgtagtagattccgatgttctctctacgcggatgatgtggctttattcatcactccatctgagaacgatctgatagcggttaaacgcattcttgagacttttgcacagatcagtgggctacatacaaacccgggcaaaactgagatttaccctattgcttgcaacaacttagacctcgacaatctcctttcctctttcatgggaaacctgaagactgtcccttgcaactatcttggccttcctctgcatacaaagaaactgagaaaaattgatttgcaacctctcttagacaaggttggagcaaggataccaggatggaagggacgctttttcacgtcagcagggagagaggtcttagtaaaatcaactctttcagcaacaccaatttatcattttactgtgctgccacagatgaaatgggtgtttaaaagaattgatcgttacaggagagcttttctttggaaaggtgacgacccggagaagttcaattggaaggaggaccaaaagccatgggcaaatatggatcttccatgcgatgagatggataggtgccttttcaaagctggaacgaagataactgttggaaatggaatcaaaacatctttctggaatgataactggatggatggacaatcgccaaaggatatagcaccagcaatctatcgattagcaaaaagaaagtcaaacagtttaaagaaggaattagaggataatcactggcttgaaatgctccacccgatcacttctttagtggaaattgaagaattaatccaactaggaggtttgttacaacacattaatctagttgctggacaaactgatgacatttcctggagatggacagcgaatggacaatattcagcaaaaagtgcataccttgcacagttccaaggatccaatgctttaactgaatttacacctttgtggagcgcgtttgcggaaccaaaacatcgtttctttggatggcttatccttcatcaacgaactcttactgctgaaaatttgcttcgacgtcactggccatgtgattggatacgtagtttgtgcaatagtgcctttgaagatgcagcccaccttgcaaaagaatgccctttcacagtgaccgtgtggacgcagatttgtatttggatgaattttcagctgcctcaacatcatttgcaaggaaatctatcggactggtggagcagtttctgcactatttcgccaagacaaaacaggaacaaggttctgagagctctcatcacaacatggtggaacgtttggctagagcgaaacagaagaatttttcaacagatttcaaagaatgaactccaagtcgcctttctggtgaaggaaaatatcgacctaattgagcaatctaggatctga

SEQ ID NO: 74093 - DNA, 412 bp, Oryza sativa
  Clone ID: PAT_MRT4530_74310C.1
gcacaatgctagggaaatgcactttaaccatccaaccgaaccaccttcataccataattacattgatgtgaagagaatcaatgcgggatgagttccatttaaggagaatgaacatgttgaagtgaacttaatgcaaaccccgagattagttttctaacgccaccttattccgatccagcacaagctactggagtggggctgatacagggcaaggatatgattaaaggcccaaacggttttctaaaagtggataaccagccataccatatgaatactgcagaacttggaaaaccgaaacggcaaattacgaaagtattactgctgaccatataaatcttatggattgtgctgaatttccatatacgctattgggctccatcttgaccattgcttcagcctcggacaagaacat

SEQ ID NO: 74094 - DNA, 1146 bp, Oryza sativa
  Clone ID: PAT_MRT4530_74311C.1
atggcgacacggcggcgccgtcgcactccccttcgccgatgcgcgcactcactcaagggtgagtgcgccgccgtcgagcggttgtgccgcggcgccctctcctttctcttgcgggcgtgcgccgtgccgagcggcgtcgccgacgccggcagccttcgcgccgccgcgccatggccgacgccctcgcgccgccacgccctctattcttttctcttctcccccccaccgtctcacccctccacgcgagtgaagagtgagagaccggcgacgacggagatggtggcgccgccgcgggccccctcgccggcgcgcgcgtgcacccgcggatccaccgccgctgccgcctcctcctcctcgacgccgccgttgcctcctcctcctccaccgccgctgcctctcactctctcagatccaccgccgacgccgcctctcactctatcaccctctcacatccaccgccgccgcctcctcctcctcctccaagccgtcgcctcccgactgccaccgccgcctccttctcctcgacgccgccaccgccgcctcgtcctcctcgacaccgccgtcgccctcccggttcaccgaccacggcctcctcctccctcgtcgtccacgagccctcatggatccggcctccccgaccaccgccgccgcctcccggttcaagatccggcctccccgaccgccagcgcctcctccacgcccaagaccgccgccgccggcctcctctcgaagtccgccaccgccggcttcctctccgccaagtcctcaagacagacgtcgcggccgcttcgccgaccgccgttgccacgccgccgcctctcagatcctcaagaccaatgtcaagcccgcccccaccggcctcctttcctcccagctggtggctgcggcgggctatcaagtggcactggaagcggcggcagcggtggtggtggtggtggtggtgcatcaaagatggatggctcggcttcatcattggtcatgcgtcaccgcactgtggccaggttaaattcattggccaagctattatggaatcaagacagcacgaagccgcagaggaggagctccaagcacgagcaggctcgactctcgagtgcacaggcggacaagctcgagcacgacgggcggcgtgacgggcgagctcgatag

SEQ ID NO: 74095 - DNA, 787 bp, Oryza sativa
  Clone ID: PAT_MRT4530_74312C.1
gggccgaatctccttatcagtccgggataaccccaagctctctctccccctccatccctttccccactcaccagtagccaccaccacatctcgcaaggccaaaagccctagccaccgtagtagtagctagtagctatagcgaggtagagagagcgctctagatctctctctcgcggggcgctgggcagatcgacccggcgatggcgaccaaggggaataagctcggggaggtaatgtgggagcaccggctgcaggcggcggccgtggtggcgctggtggcggccacggtggtgtcgatctccgccatcgggcccaggctcggcgccgtggtctccttcttctggccgctgctcgtctccacggggttcttcctcgtggccgtggccgtcctgctccggatctcgccgcccccctccagcaccatcgacgagtccggcaaggagctcatcgacttcgtcgccgggtgccgcccggagcaccaccccccggaggcggcggaggccgccgtggacgtgcctccggagccggagatctagaaaatcgagggtggcgggcgtggcgcgggcggccggcggaatcagcggcgcctcgtcgccgggcggcggtggggttgtgtggggtaatcgccagcatgggcccacctggaagtgcgtgccacccccggtgtacggtgcgcccgtgggctctgtgttagcgtaggattccgcctccgttgtggtccggggtgtacaataccattctcaataaaaacatggcataaattcgtcctaaaaaaaaaaaaaaaaaa

SEQ ID NO: 74096 - DNA, 885 bp, Oryza sativa
  Clone ID: PAT_MRT4530_74313C.1
atggcgacacggcggcgccgtcgcactccccttcgccgatgcgcgcactcactcaagggtgagtgcgccgccgtcgagcggttgtgccgcggcgccctctcctttctcttgcgggcgtgcgccgtgccgagcggcgtcgccgacgccggcagccttcgcgccgccgcgccatggccgacgccctcgcgccgccacgccctctattcttttctcttctccccccccaccgtctcacccctccacgcgagtgaagagtgagagaccggcgacgacggagatggtggcgccgccgcgggccccctcgccggcgcgcgcgtgcacccgcgggtgcgcgcgcggctgtcgagtggctcctcggcggtgcctctttgcccctctccccctccgtggccggcgacgagaggaagtcccagccatcgtcgttgtcgtgctctgcttgacgttggcggcggcggcgatggtggtcgtgacggcgacggtgctgcgcggcagtggtggtcgtaggggatcccggcgaggtggtggcgcggcggtggagtcttcccgtcactggctgcgccccctcgatcgccatattgctcatcctaagaatgtggtcttttacaccacctccatgggtgagtgcgccgccgtcgagcggttgtgccgcggcgccctctcctttctcttgcgggcgtgcgccgtgccgagcggcgtcgccgacgccggcagccttcgcgccgccgcgccatggccgacgccctcgcgccgccacgccctctattcttttctcttctcccccccaccgtctcacccctccacgcgagtgaagagtgagagaccggcgacgacggagatggtggcgccgccgcgggccccctcgccggcgcgcgcgtgcacccgcgg

SEQ ID NO: 74097 - DNA, 756 bp, Oryza sativa
  Clone ID: PAT_MRT4530_74314C.1
ttatcgttccgcctcgcgcatcttcggcttgatcacccgttcaagcgcccggctacaacgacttctacaaccgatcggcatcaagcacgcgtctacactatcaaacttcgggttgccgctgcatcgccctcttgggctgcagtgtcgccgcccatggtccacctccactggttgttggaacactgagaggcaacacctccactgcctcgcccgcgcggtattggcaacaccggcgcgcgtgttcgtcccgagttgtccccgggtctggcaaatccggcatgacgtctcgtctttcacggttcgactacatcggctcttcggcatcatcttcctcaacgactgccgcgattgtgtcaccgtcttcgtctcccgcgcatcctcgcgcaccttggtccacgatgcccctcccgtgcgtccacgaccactctcgacatctatttttcgaccacagcactcttgccggtttcttctccagtctaagtgtccgcactgctcacgcttggactttcctatactattcaacacgtggtgcctgagcaccgtgcggtagtagccgaggtcgaacgtcaggtggctgccggggtccatctccaccacgccgtcgccggctgtcctgcacttgcgctcacgcaggttggcggcgtccagcggcggcgggtcggtgctgttgctgttggcattgccagcgccgccgccgccatagaggcggtcggcgaaggatggtgtgcgcacctctgtccacctctctctccccat

SEQ ID NO: 74098 - DNA, 161 bp, Oryza sativa
  Clone ID: PAT_MRT4530_74315C.1
agggaaagaagcctaagtctggtgggggcataattaaagggggagtggcaaaccttataagtgccctctttattattacacaaaaaataacgtgtggtttcttatatttacgggtggttttcacagcttgtttgttgatcacttaaggaaacctgtcatgg

SEQ ID NO: 74099 - DNA, 350 bp, Oryza sativa
  Clone ID: PAT_MRT4530_74316C.1
gcaaattgcaatcgaagaagaagaagaggaagacgaagaggaggatggatggcggcggggggatctggaggcccacccggcgggcctaccccgccgtcgttgaacgcatccatctcagcgcccccgccccctcccccgccgccgggggctggcgctcccagcttccctctgagggacgcaccaggatctcctactcgatactggccactctgaagaagcatctacccttatcagggcctgaggcgctgcatgaactccaaaagttagcagtgcgatttgcagagacaatctatactggagcctcctgccggtctgactacttgcggacgccgtctacaaaaatgctctct

SEQ ID NO: 74100 - DNA, 153 bp, Oryza sativa
  Clone ID: PAT_MRT4530_74317C.1
atggagcattgctccgtcctcgtgctaaggaatggacgccccaggatgagtggcgtctccttccctgtgtccatgtccagcacaatgaagtcaaccgggatgaagaaatcccgtatcttcactggaacatcctccactatccctgccgggtaa

SEQ ID NO: 74101 - DNA, 390 bp, Oryza sativa
  Clone ID: PAT_MRT4530_74318C.1
cccacgcgtccgcggacgcgtgggtctcaatccttaccgcctcgccataccttcttccactttccgagtgagagcacggagtagttcgagagaacgtctacagtacccagccgcttctagacgacaacacaggtgttcctgccggatctaacagtacctagctgcaaggcgccagagcttgccgacgtaacctccatggctggatccaaggcggaccgcagcgaggagaaaggggctgcttcctccgcaccgacctagcttgagaagatgttcgaggtgccagtggagttgtcggtggtcggcagtctgacgacatcaccgaagacgcgagaagtggagctggtcagccatttgctgggtggcaccgtgccggtcctgttcgtgcagata

SEQ ID NO: 74102 - DNA, 660 bp, Oryza sativa
  Clone ID: PAT_MRT4530_74319C.1
ccatggccgcgggattattaaccctcactaaatgctgggtgccaacaggactgctgtcaaacgcctactatgaattcttaagatatgcggagtgagtggttgtctcacagagcgacccaatgtaattttactatctttgcaaccctagtgtgaagtagcattcttgttacatttttcctttcaccttaagatcaaattgatttgttttccttttactgttatatttgcagaaaccattctatttacttgtctctgcgatctcattgatgattgtttcatgcctttctctcatggggattgtctccttgcctacttaagggaaagtctctgagtcagtttgaacatcatcctgagttggaattcagattaccattggcaccttgatgaaagtgttcattatcatggggatttttccttatgtcatgcagtctgaggatcaagctcgtttgtggaagaagaacagtacacatggcagtatctcacttcaactcatgtatttaatatttctcatcaagacgacacaatcaatgcagagagaatcaaattcagcggtagcacgagcagaaggcaagattgttcatggaaatgactgctcttattttactagctgtaaattaatccccagcattcagtgagggccaataatcactagtgcggcct

SEQ ID NO: 74103 - DNA, 438 bp, Oryza sativa
  Clone ID: PAT_MRT4530_7431C.1
cacacgaatcgacaaaaattctagcatttcaaatcccagattaaaaaaatcctgtaatatgacagtatcaagcctaatcagaattagctgagctagaatttctaatattacatggcaagataatatatgattatttacaacttaatctagtacatcgatcacatcatgttggcaaatggtatgatgatgttatcaagcttagaaggtatgatgatgttgccttgctgtgatccgccgactccagtgctcgtgatgtctgaagggccatctcagaatgaagccgcaggcaggtcatagccatctagatctgatcatatcaagaagagctggggcaacagctgatgcttctggatgcattgctatgcacttcatacagacaccaagcataccggtgtctgtaacttgaccagatctagatggaacttctctttcataccg

SEQ ID NO: 74104 - DNA, 603 bp, Oryza sativa
  Clone ID: PAT_MRT4530_74320C.1
atggcgatgtgggtgttcgggtacgggtccctggtctggaaccccggcttcgcgcacgacgcccgcctcgtcggcttcgtcagggactaccgccgcgtcttctaccagggccaatggggtgttgcttacaaaatttcaacggaacaagataagcagacagctctggagcatctggaagtaagagagaagcaatatgatgagaagatttaccttgatttgtatatggactcctcaccaaaaacaccagccgtcaaaaatgtgatggtatacttagccacaacaaacaagcagagcaaccaaaactaccttggtcctgcaccgctggaagaaatggccaagtatagcacctacttaacttgtagtattggcatattgcaacttaatctgaggcaaatttacctagctgaaggcccatctggacctaacaaagagtacctgttcaaacttgaggatgcattgaacaaaataggtaaggagttgttgatccacatgtccaggatctggcaaatgctgtgcgcaagtatccagacactgcggtatcttgctgaaggatggcatttccctcctctttgggagggtaaaaatataactgaaggaagttag

SEQ ID NO: 74105 - DNA, 1696 bp, Oryza sativa
  Clone ID: PAT_MRT4530_74321C.1
cccacgcgtccggggaggaccgtcacgctcgagcaccagcccggcgccacatgcgtaacgcttctctctcatatgttctttgttgatgtgctacgcgacttgctaatcgttaatccttgtgttgaattgagcatggattacattatgctttaagatgcttctttgttgttgttgttgttgttgatatctttatttcggtacatctgtgaaactgaggtactactggtcagccatgctaataaggagtaagtatgagtttgtgtatcagtgatcggatgaaaacaatgatcatcagataatcagatgtgtacttgtaatcctgtatcctaacttcctaaggtatttaagaatgggctataaggggagacctttctgcagtaatggtaaaagagtggcactgagactctcttgcagtccaaattaaaatggtcattgagataccgagatcgatctgaactctgaagggtggtacaaatggtaaaaaaggagcttgtttgtgatatgcaaaatggactaatgatctcatagctatttggcatgttctcttccatctttttatgctgttctgcaggccaagtaaccctgttctcagtgcatacattgaatttgtaaatgaatctctttgctttatgatgtagtggcgccggccgggacaaaccggccgggtgcccacaccacttcacagctcgcatcgcacgcggcgcaaccaatacgccattccaccggagcagccgggagcgcggaggccatggcgatgtgggtgttcgggtacgggtccctggtctggaaccccggcttcgcgcacgacgcccgcctcgtcggcttcgtcagggactaccgccgcgtcttctaccaggggagcacggaccacaggggcacgccggagttccccgggaggaccgtcacgctcgagcaccagcccggcgccacatgctggggtgttgcttacaaaatttcaacggaacaagataagcagacagctctggagcatctggaagtaagagagaagcaatatgatgagaagatttaccttgatttgtatatggactcctcaccaaaaacaccagccgtcaaaaatgtgatggtatacttagccacaacaaacaagcagagcaaccaaaactaccttggtcctgcaccgctggaagaaatggccaagcaaatttacctagctgaaggcccatctggacctaacaaagagtacctgttcaaacttgaggatgcattgaacaaaataggagttgttgatccacatgtccaggatctggcaaatgctgtgcgcaagtatccagacactgcggtatcttgctgaaggatggcatttccctcctctttgggagggtaaaaatataactgaaggaagttagatcaattcatgctcaaacatcttgaatcttgtaaatgtggacagcttctgccgatattcttgtccatctgtagatggcagtagaaaattcgcaataaggatttaagttgggggtatgaaaactgccacattactgcgttgggaatcaaacccttcttttttactttcaaaacaagattgttctctacttctcttatattgaagcataatcactgtgcatggtctagttagctgcagactgcaggcttggtcactcgaccatgctttgtcgtataaaaaaaaaaaaaaaaaaaaactcgagactagtctctctctctctccctcgtgccg

SEQ ID NO: 74106 - DNA, 341 bp, Oryza sativa
  unsure (1)..(341): unsure at all n locations
  Clone ID: PAT_MRT4530_74322C.1
cccacgcgtccgggttcatgaactcctcgtcaaggaagtaccggtagatttgttttttctttcttttttgtggttctacaacctacactcgtgcgcggatgctagtgtctttccactgtattttccccatttggcctttcatctatgtgcgcatttgctctaatcttgtactagagtgngaaaaaaaaaaaaaaaaaaaaaaaactgaataagaaaacatgcactgatataaattaattaataataaagaagatactacttctttacttgctgctgttaaacagagagaaaaatgatggggggggccgtttagagggaccaaatttattatccttgctaat

SEQ ID NO: 74107 - DNA, 276 bp, Oryza sativa
  Clone ID: PAT_MRT4530_74323C.1
atggccgtgtggcttctcctcaacatccactggcccgtgaagaggacaacagcggtggaggcgactaagggcggtgagcagcagaggcggctcctcctcgactatctcgggcgccacatctgcactccgatggagattgttttctccatcctttctatcacatctcatcgtcacgtgatggctgccagaggcgagcacctgcgttggtcctccatggccaggttcggctgcgccccgggaatggatgaaggagaaaggaaaagagcgacggggtag

SEQ ID NO: 74108 - DNA, 1761 bp, Oryza sativa
  Clone ID: PAT_MRT4530_74324C.1
cacagcgatgcggccccgccgcagagacgcctccgcctccgactccgacgacgccgacgcgcgctcctcctcccctcgcccgcgccgccgccccgaccccgcgccgccgcgcgcgcccctcctcagcagcctcgtggtcaagctgcagccgcgggggccggaggaggagcacggcgcggccgaccggctggagcgccggcgcgatcccccgcccgccgcacgccgccccccgcgggagccctcgcctccagggttcatgcgccgccgggagtcgcgccagacgccgccgccgcagcagccgcacgcggcgccgaggcgccgcggcggcagcgcgtcccctcctccccctcgccgccgcgggagccccctggggtttcggcctaggtatccccagccccgtgaggagccacaaggatatcacccgcactcaggttccatgatacctccacgtggccgcggagtagaaagcagcaatttcaatgacggttcacgttatggatatgagctggcaagtaaaggaggtgaaaggttacaatatgtttctcctcccaatggaagaggaagaccacacaggagggatggtggtgctcctggaaaagatttcatcttcattaatggagaatatgtgcacaggaatgacccaaacttgtctccaagagaaggtgactggatatgtcagaatcccacttgcggaaatcttaattttgctcggcggtctcactgtaacaactgcaacaaggaacgctatgcacctgccatgtacaagtccagctacagtcctgacagacgccagttcaactctccaccacaagggccaccgagtagggttattggtccaccgagtggccgtgatctgccaagggagaaacaaaggtatagatcaccaccgcgtggttggggtatggtccgaccggatgatcatagggactattctacgcagttgtcccaagatcgtccaggacgaatggcagaccctatgcacagggacaggatcaacttcggggatgaacttccacaccgacagcgtgggaagtttgactgggatggctataatcaccgggagcatccacgcgatggaccatatcttgaccgaagagaaccacggttggggtctcccaggggtaactggggacaagctgtacgggacagaagtcattcacccatgcgtaacaagcccatgaacaggggactagacttacgggagagaagccgttcaccctttcgggacaggcccttgaacaaagcctccattggaagaggtggacctgaccgagactatgttcatccatttgacacccatgggcgacctcataatttgggcaatagccgtggccatggttacaggcaggaggatgatctgtttcctattcgcaatcaaggtgaccagcgtgtcctttcccgtcattggaatggaatccactgaaatgtaatatctttcagctgggtacagattcttcgtgttgataggctatctggaaaagcgaatctaataaaaattatctcgatgcttgaggactcctcaagctatgtaacaatgtttaatgttttgcactgtgcagttacttccttggttgggctgttacagtgtaagttacaccagtagaaatgtgtacatgaactgaatttaaatggcaatgctaggaatgaatattggagtggttaaagatgaacgcagccagactgtgcgctgtatgttttattgtgtaaaatcttgaggtgtaaattttgtcaactgcagccatgttttaccaagtaacatgc

SEQ ID NO: 74109 - DNA, 2544 bp, Oryza sativa
  Clone ID: PAT_MRT4530_74325C.1
atggatgggggatacaagagagaaaaagagctggctgaccaaggtttgcaatgttacctaaaaagcatttatctggtgctaagaaaaggaaaaaaagaaaacgaggagatcagtttattgaatcacagaagggtgctatacataaagttcttttcggcatcaagtagtgctgttcctgatgaaaatcctgaggcagattatcctagtactgaagaacaagagcagcaacttgttctttttgtaaatactgaagatgacgctaatcatgatgattcagaacatgaaaatttgcagcgttcaccttgtactgagaatgcaaatgttgatgtacatgagaatatctatgatcctaggacttgggaaaatcttgacaacagggggagagatatattaattgaaaaggggcctatcagagaattcaatctactgttcccttcagatagtagtggtagacatttttcgtatgcttactactctagaaagctgagcaatggtgaggtgattgatagaaaatggttggtttactctaagcatgtggacaaagtatattgtttttgctgtaaactgttcaaatcaaatcagagcaaaagtttgttagcttctgatggattgaaggactggaagcatctcagtggaagactcaaacagcatgagaacagtgtggagcatataaaaaacatgaatacttggaatgaacttaggttgaggttaagccaaaatcagacaattgatgatgatttgcaacggggaatttcaaaggagaaagagcgttggagacaagttttgataagaatagttgctgcagtgaagtttcttgctaaacataatttggcctttcgaggatccaatgagaaactttatcaagataacaatggcaattttctgggcacaattgaaatggttgctgagtttgattctgtgatgcaagaccacattagacgcattcaaaatcatgaagttcaccatcactatctcggccacaatattcagaacgagctaatttcccttcttgctcaggctgtgaaagtttatattatgagggttatcaaggatgctaagtatttctctgtaatattagattgtaccccggatgtcagccatgaagaacaaatgactttaattgtgcgttgtgtcaatttatcgagtaatattccaagagtcgaggagttctttctagagtttttgaaggtggatgatacatcgggattggggctttttaatgaactgatgaaggcattggactcccttgaattgaatgtcagtgatgtgagaggacaaggttatgacaatggttctaatatgaaggggaaacaccaaggagttcagaaacgtttgcttgaaattaatccaagagcattatacatgccatgtgcatgtcatagtctaaatttaactctatgtgatatggcaaaatcgtgcaataaagctatttcgttctttggtgttatacaacgaatatatacactattttcatgctcgacaaaaagatggaagatttttcttgagaatgttccacacttgactgtcaaatcagtgtgtaatacacgatgggagagtcgaataaaaagtgtccaagctattagataccaaactccccaaataaggtcagctttgttggaactagagaaagcttctaccgatgacccaaaagctgtgagtgatgctcaatctttggtcactgcactagagaattttgaatatttagttggaatggttatttggcatgatatattattttctataaatatggtcagcaagaagttgcagtctgagattgtgtgcatggatgctactctcaagcaaatcgaaggtgtcatatcatttttccagaggtacagaaatgaaggcttcacttctagtatagatattgcaaaagtcattgcatctgacatggatatagaaccaaaatttcctacaaaacgtcaagctaaaagaaagaaacattttgatgaacaaaatgaccaaaatgaagaacaacaatcagttgtggagtcctttagagttaattacttcctagtcatgattgatgttgcaattgcctcattgactagtcgatttgagcagttgaaggcatttgaaaatgtgtttggtttcttgttcacctcaaagaatttgaaatccttggatgatactgatctatggcagtgctgcactaattttgtagagacattttcacataataactcatccgatgttgagctaaatgacttcttttctgaattaaaagtgttgcaagcgactttgccagatgctttgaagtcagcacctgagattcttgaattcattacagctgcagattgctatccaaatgttttagttgcctatcgaatcctcttaactgtgcctgtgacagtagcctcaactgaaagaagcttctcaaaattaaagttattgaaaaactatttgagatcaaccatgtcacaagaaagattaaatggcttggctatgtgctgcattgagaagaatgtcttggaaaatattgatctcgataccgtcattaatgattttgcatcaagaaatgcccgaaggagtatttttttatga

SEQ ID NO: 74110 - DNA, 811 bp, Oryza sativa
  unsure (1)..(811): unsure at all n locations
  Clone ID: PAT_MRT4530_74326C.1
caaaaaaggaaccctgaattcctattcactttgtctacttgttctctttcattttcagacatgtgaacctgcaatattaccaccgctgaaggagatttatgaagggaacatcatggaggacatttcagataagatttcattatgggaatatggcttacctgtgatggatagtgactatctatttgtcagtgccttgctgtttaactgctgcattcacatacagggagggcgtactataatgagaaacatcttgatgaggtttgctccataaatatagaaagattccggcgccaaaatatggggcaaagaaatcagagctctctttctcatctacttgcatcattctttcacaagtttttccgcatcgatgccctttcggataaggttatatcgacttacactggtcggttggagagaatccaggacaatccaagatggatggacaagtcatacagcttgtttgttgaagatccatttgagaaacctgataatgctgctagagcagtcggttcctttgagttccaagatattgtcaatgccttcagcaacgcgagcaataagtttgtttctgatgcgcatgcgcttactgaccgaaatggattattgtcactgctttgcacaacctgatgtttggatcaaaacttgggtggaagagccaggtgccagccgttatacaaataccttagtgagtcctcatgacagattttnatgatatcttgactatgtggcacctaacccatacgatgatcatcatcaccagccagccagaggaggaagcaggtcaaggtcagagtccacatgggtatactac

SEQ ID NO: 74111 - DNA, 540 bp, Oryza sativa
  Clone ID: PAT_MRT4530_74327C.1
atgcttgcgcacgagctcacgcaattaacattagccacgtatagtacgattaattattcgtaccgtacgtaccatgagacattgacatggaatgattccaacagacgcggaggccacgcggtgaggggaaaagaaaatcaatgcagtgaactgttgagccatgtcgatctcaccttctcctcccttcacgcatgctctttctctcatgactcaaacctaaacttgcgagtggacattgtggtgtgcgtgtccgccatgactcctgacagcccctatgcggatcgtgggcacagtgccacggcgtttgcgtcgctcaccgtgcgggaagtggaaggtttttcaatcggtaccaaagtgtttttctacagtactgtgcatttcagcatcaagctaataattaaaccgaccatgcatcatcaagcattcgagcaccggaattttgcagacccttcgatgcggacggataggagatccgcaccccatttgcagcccaaaaagtccaacaaatgtgagccattgatccaagtgttgatcaacggt

SEQ ID NO: 74112 - DNA, 556 bp, Oryza sativa
  unsure (1)..(556): unsure at all n locations
  Clone ID: PAT_MRT4530_74328C.1
gtttttatgaagttattttgagtggcattttccctcaaatgtggtgtgtatgaaatttactaaacaatttaacatttgagcttaaatgcatacacatcacatgaaattaatagcaaaacaagttgatttcttctcttcctagcttggttcaactaaagtaattaagagatgataaaatattatttggataaaagatggtgtaaattaaagtatctatatctgaaactagagaatagattttgatttttcttgataaatttattagagaagaatttgcagtacacataaaaacaagccaagaaagtaaaagtaattaaggagggaattaatgtaatgtgcacaattgctagaggaacatttgaaaagtaatccatatttatttgatgtcttttgcatggttgcatttccgattaatgttcatatatatgtgaggccttcgaagtaatttaccaattaaaatgataattngcatgcacattctgtattgtatatagtgatgacataaaatgattctgattggcattgctacaaaatgattttggcattgctgtatatg

SEQ ID NO: 74113 - DNA, 717 bp, Oryza sativa
  Clone ID: PAT_MRT4530_74329C.1
atgaaggggcggacccaagccctgggcaagctggtccgcccctgctgccatgcagctatagaaaataccagccgaacagacccgatgacgacgaaggacgagcagcagcggccagcgggcggtggacggagcgacggcgacgggcggtgggcggagggatggcgggcggcgggcagagggcagagcagaggggcggcgggtggaggcggagagatgacgggcggcgggcggcgtgacgagaacgctgcgagggaggaggcgagctcgtcggggaggccgcggcggctcgccgacctctccacgctagtcggcatccccgtctactccctctacaatccggtgatgctcgacggcggggagccgtgggtagggctcgacggcgacgggcggaggaagagagatggccgcatcgatgtcgagaacgggcgagcgaggcggggcggcgagtcgccgctcctcttccgccctcccaccgccatggcaccgtcgctccgcccaccgccggccaccactccacttccactagcggctccgactttggaggctgtgggggttgtgttggctctgagatttgatgccctaggtcctcctcaagaggtcccttttatatcgcagggcctgcttggcacagctccagctccagctccatccctcctgaagctggagtccagcctccactccctcctgaagctggagtccagcctccaccagaactag

SEQ ID NO: 74114 - DNA, 297 bp, Oryza sativa
  Clone ID: PAT_MRT4530_74330C.1
acaaaaaaacaaacacactcctttttcatctttcaaatgcccaaagggcccccctacagcgggtgaaacttcagacccttttttcaaactgccgcacccgctacgacgtaaaaactggagacaccaaccctgccggggggggaaaccttcgggacccccacctcgcccacgggggaggccccaatctagagggccccttaaaactccaaaaagttggggtttgagccgaactatcgcaaaagggaagggatccaactggctggggacgatgctgtcggggccctgccacgaaaactt

SEQ ID NO: 74115 - DNA, 609 bp, Oryza sativa
  Clone ID: PAT_MRT4530_74331C.1
atggcgacgctcgcccgtctcctcctcctcctctctctctctctctctttcagctcttctcggcgccgacgagagagatgccgaggcgccgctgccggtgccaacctccaccactggcacgtgaggtggccggcggtgcgctttcccaacgacgacgaggtggaggaggagcaggaagagggggacccgccggcgcactcagattcgagccactcggagcacgtgagctgggtgtgcgcggccatcgtggacgtcgttgtggtgggcgctgaccgggaaaaggggttgtgggcttgcggcatcgcggcaaccgcatcggctccaacggagcatggcaagggaggatggctggctaggagcggctccaccggagcggcggcggcggcaaagaaaaaggaagcggcggagacgtatgccgacgccggacgtcgtccccaccgccggatgccgacgctgccgctccccgtcgttgtggcgggctccagatcgccgaatgccgacgccggcgctccccggcgttggtgccctccccgcccacctccgcagctccggcctcgccgtcaccgcccactgccgctcgctctctctgccatcccgcccgccgtctaa

SEQ ID NO: 74116 - DNA, 235 bp, Oryza sativa
  Clone ID: PAT_MRT4530_74332C.1
atctggctgaggggaaaacatttattgtccattttgaaatgggatacatttgcctttttttttcaaatttacatttttgaaggcccctttgaaaccacaaaacaaccccctatggtattttacgccaaaatttggatggaaaagggaggtgatttcctcaaccttttgttgctggggtgtcaggaactgtcccaaaaaatttccaacccctaagcccgagggggaaacaaaagtt

SEQ ID NO: 74117 - DNA, 861 bp, Oryza sativa
  Clone ID: PAT_MRT4530_74333C.1
atggcgacgctcgcccgtctcctcctcctcctctctctctctctctctttcagctcttctcggcgccgacgagagagatgccgaggcgccgctgccggtgccaacctccaccactggcacgtgaggtggccggcggtgcgctttcccaacgacgacgaggtggaggaggagcaggaagagggggacccgccggcgcactcagattcgagccactcggagcacgtgagctgggtgtgcgcggccatcgtggacgtcgttgtggtgggcgctgaccttgtgctctgggaggcgagatgcatgccatctcttgccgtggcggaggtggtctctctccctatctcgctgcctcccgtcgccggatgggagctcgatctccaacctcatttcttgcccgctcgagcttcgacctcaccacttcctcgcggcagcagatccgtagatcaccgagatggaagccacagcgagctccaccggtcgctgatgccgcctctccttgctctgccctaccgcctccctctccgtgccacagcgggaaaaggggttgtgggcttgcggcatcgcggcaaccgcatcggctccaacggagcatggcaagggaggatggctggctaggagcggctccaccggagcggcggcggcggcaaagaaaaaggaagcggcggagacgtatgccgacgccggacgtcgtccccaccgccggatgccgacgctgccgctccccgtcgttgtggcgggctccagatcgccgaatgccgacgccggcgctccccggcgttggtgccctccccgcccacctccgcagctccggcctcgccgtcaccgcccactgccgctcgctctctctgccatcccgcccgccgt

SEQ ID NO: 74118 - DNA, 536 bp, Oryza sativa
  Clone ID: PAT_MRT4530_74334C.1
aaatctgaatccttctcactttacaagctccattttatatatatcagatattacatgtggatgtgcagttcacatattggaacagtcgctacagttacagacaagaatttacactcttttgtggatgaattcaacacgaatcagcagccttttgcagtaggtacataaatagatacctgaccgggtaaacaagtgtaggttcatattacgtacaaaaaagtttaaggacgattcaggcaaactggagcactttgcacgtcagccaacatatcgaagcaagacgccgtcgttcccaagcacgtatcctttgttgtcaccaaggaactttacagagtagagattggctgcgatgttatcagcagctttgtcgcgcacccaggtcttcccgccatttgttgtttttagcaggacaccactttcaccggcggcccatgctttattctttgagcggtagccaacatcaagaattccaaacccccggctttgcactgacgcttcctcaaagtcttcagttattccacttcctttactcaaaa

SEQ ID NO: 74119 - DNA, 186 bp, Oryza sativa
  Clone ID: PAT_MRT4530_74335C.1
tcgcccacgcgtccgtccacgcgtacgagacagtgtggagaggggagaataggcgctgacagctgttgattatacaacaacactatgcaaatgtcaacaaagcacatagagaaggatgtagctacatagcatacaagaccaagcctaactctatgataagacacattgcaagaaagaacttcatgt

SEQ ID NO: 74120 - DNA, 363 bp, Oryza sativa
  Clone ID: PAT_MRT4530_74336C.1
gttttggggtttttttttttttttttttttttttttttttttttttttttttttttttttttttttttattttttttttttttttttttttttaaaaaggggggaacccttatttaggcccggtttcgaacagaatcacccccaaagggcaagggggggggggtttattttaccctaccccggaaccaggtcccaaatacaataccctgggggcccgctttcgggcccaatcgaaaaacccgggggggattgggggggaaaactaggggggaagggacccggcccttctccccggggggttttgagggttcgggcttgcccccttgggaaagcgaaacccattagacgaccacataaaactgg

SEQ ID NO: 74121 - DNA, 817 bp, Oryza sativa
  Clone ID: PAT_MRT4530_74337C.1
cccacgcgtccgcaaaatctcatctcctctcctccgcttcccactcgccttcgcgtagtgatactagtagtagccaagtttcttcgagcgttggatcgcgtggggggctagggtttcgcggccatggagcagaggaacctgttcgtgtcggcgctcagcgtcggggtcggcgtggggctcgggctcgcgtcggcgaggtgggcagctccggggagcggcgagggcggcggcggcgcggggatcggcgtggccgagctggaggcggagctgaggcggctggtggtggacggccgcgagggcgacgtcaccttcgacgaattccgctactacctcagcgagcggaccaaggaggtgctcatcagcgcggcgttcgttcacctgaagcaagcggatttgtccaagcacatccgcaacctctgcgccgcaagccgcgcgatactgctctctggcccaacagagccctacctgcagtccctagcgagagctctgtcgcactattacaaggcacagttgctaatcctggatgtcaccgacttctctctccggatccaaagcaaatatgggagctccagcaaaggcttggctcaaagccagtccatttctgagaccacatttgggaggatgtctgatttgattggatctttcacaatatttccaaagagtgctgaacctagagaatcattgcaacgtcagacaagcagtgcagatgtgaggtccagaggatctgaagcttccagcaatgcacctccactttcgaaaaatgcttcaatgtcttctgatattagcgacgttttctcacagtggtctgcacattcag

SEQ ID NO: 74122 - DNA, 450 bp, Oryza sativa
  Clone ID: PAT_MRT4530_74338C.1
ataatagatctctgcctgctgttttttgaaacgggactaaaaatgatctttagtccctggttatcttgtgagtttgtttttttttacttgggcgatgacatgagttgtcatgttgtttgagcgggtgatgtcaagtttggtgttcaagatgtatgatagaaatgggacgctactttcggatgtgagacatgtgtgccagcaataaggagtagtctaattttgcttaaaagcctacatgagatatgttggttgtgtcaggcagactgtagtaagtagaccatgaatattatgaaggacagaaagaatattatgtatggtgagaggaaagctcatgtttgtacaagccataaggaagttgcaggtgaagtcatggagggtaggtatgctagtgttgctgtgcacaatcatgaaggcggcgagcctggcgtaaactgtttgggctgcttggca

SEQ ID NO: 74123 - DNA, 253 bp, Oryza sativa
  Clone ID: PAT_MRT4530_74339C.1
cacaggacaaataggatcaatgggtatggggaacataatgggactgcagatactgctggctgcacagaagagtacaaagtcattaggaggtatcgcgagcaatcaggaaaagaggaatctatttgtttggaaggagatattggggggggtggggtcttcagcgccaaatatccatctggtagggaaacccaaagattgtggagatcgactccagtgttcgagcaaaacacggagccgatcattctggtgggtt

SEQ ID NO: 74124 - DNA, 298 bp, Oryza sativa
  Clone ID: PAT_MRT4530_7433C.1
ggcgcttacaaccaaaatgcaatagcatgcaaacttggtccatgtaaatgatgcgttggaacaacaattactggtagttaggaaggtactaattgatgcttatcataccatagcatatcatgaatagcaagtttcattttaggagattaagtgttattcatataagaagttcttagaggatcaacttgaagttgtgcagcatcttgatgcacatctggtagtacatgtatcatttcttaatcatcagctgctagaaactgatattcattacatgcacaaggaatatcatttttttttt

SEQ ID NO: 74125 - DNA, 290 bp, Oryza sativa
  Clone ID: PAT_MRT4530_74340C.1
tttttatcaagttcgttattggggactgattggcattgttgagtttgatcaaggggttcgaccatcgactaactattataaaagtcattgaccttgatacaaaagagagagcaatgatgtcggtagctgatgaatgatgctgatgatgtttgggtactacgtaggaaggtgaagtccggcgataattagttcaaagggatgtaacctgattgctattttatatatatatattatagaatatatgacatatctccttaagcctatagaggaagaatggaaaggggatagac

SEQ ID NO: 74126 - DNA, 515 bp, Oryza sativa
  Clone ID: PAT_MRT4530_74341C.1
cgggctgcaggaattcggcacgagggctacttctgctcggaaggaactgtaggggggcgcctcaatcacgcttctaggaagcggtggacatcggctgaaacttctgcaggtgggtaggttgagtgctgggctgacggtagcttgtgaagttcgtagagaccaattggcggtgaccaaagcaaggaaggcgctctgcaggactagcagcgatggcggcagtggcagttgcgcggccgtctgagcatggcttctcgcagccgacgagctcggccggcctcctggcgatgctggacgaagacgagagcgtgctgcaggtttacgccctgaagcagctcaaccggattgtcgacgagttctgggcggagatatctgcagagatctccaaactagaggcgctgtatgaagacgaaggctttgaggaacgtgagctggcagctctcttggcgtcaaaggtgttctatcatctgggagagctggacgagtcccctcacgtatgcactgggtgcgggtccctc

SEQ ID NO: 74127 - DNA, 1048 bp, Oryza sativa
  Clone ID: PAT_MRT4530_74342C.1
tattatcggctcgcggctgaatttgcaagcacgtactacattgttagatttgatcgatcgtgtgagcatgtatagccggcgggcagcggcgggaggagagcagcagcacctgagcaacagggtggtgggattggtgaacctggtgacgcttgtggcgtccgtccccatcatcggcgcggggctctggctgcaggctcacggcgggtcatcgccgtgcgggtccgcgctgcaggcgccgctgctggccatcgggttcgtgaccctcctcgtctcgctggctggcttcctaggcgcctgctaccacgtcccctcggcgctgtggctgtacctcgccgccatgctgctcctcgtgctggccctgctcgggatcaccgtcttcgggctggccgtcaccgcgggagggggcggcacgcaggtggccggcaggccctaccgtgagttccgcctcgccgactactcgtcgtggctgcagcgccacgtgcgggcggagcggtactggaggccggcgctggcctgcgtgctggctgccagggcctgcgacaccctcgccgcctggacgcccctcgactacctccgcaatgacctcacgcccgtgcagtccggttgctgcaagccgcccaccgcgtgcacctactatgacgatgcccagcagcagcagcagcagcccgactgctaccggtggagcaacgcccccggcgtgctgtgctacgggtgcgactcgtgcaaggccggcgtgctggagcagctgcgtcgccactggcacaacgtcaccatcctcaacgtcgtcctcctcctgcttctcatcctcttctactcctgcgcttgctgcgccttccgtaacactgccactgccacatcctccaagacgatcttccatctccatccgcgctgggagtaccgctgtcgttcttccgtctgggagaggcaggcggcatgtggagccgacaatgggaggtcaccgctcggtcgatgggcgccgttgacgaagccaagagaaatgaacaaggtggagcaggagagagagtttgtgtgggacaatagccgagag

SEQ ID NO: 74128 - DNA, 459 bp, Oryza sativa
  Clone ID: PAT_MRT4530_74343C.1
atggcggctatgatggaaatgaggaggggtggcggtggtggggagagctgcggcacggctcggctccagcaagcaccaaggggagcagcgattgggtggggacggagatggagcagcgacgtcgtcttctccccttccacagccatgagcttagtggtagccgctggatctgaccaagcatggggcggtgggggcggagatggagcttggcagcgcaaatcgggtcggtgggtcgacgacctacccagcggcagcacggagtgggggctgcagccgccgtcgagcctcaaggcagcgccctcaacggcgaagtggctgtgcgtggcgtcatccttttgctcatccactccgtcgccaagagtcgtcgccttcaagctgcaccagtggttggggagggaggaaaagcagcattggccggggggtagggggaaggagagtggcattgactggtggaggtag

SEQ ID NO: 74129 - DNA, 648 bp, Oryza sativa
  Clone ID: PAT_MRT4530_74344C.1
cggaggcggcggcgacggcgatggcgtgctacagggaggaggcgccgtgctggatctaatgggttaggcggcaagaacgggcatgtccatgtctggcgaggaggcggggacggtttcggagggatgtggggtgggtgtggctggggggtaggggggagggtgggggtgggggttgggggttgtgaggggaaggcgggatctggtgggggaggcaggggaggcgtccggcagtcggtgtgggaggcgctggcggccggatccggcttcccggaggccagatccggcgtccgacggtcgagaggcggccgcgtctggtggccgggacgcggatccacgtctcctgatctcgtggaggccggatccggtgggggaggtgggggacgatctggtgggggaggcgggggaggagtccggcagtcgatgggggggcgctgtcggccggatccggcgtccgatggccgggggccggcgaggcgtgggagatggaggcggccggcggtcgggaggcggcgagatgtgggaggtcgggaggaagaagagagaggtggaggcgggaggtcgggaggaagtgagggagagggaggagggggaggaggtggcccttgctgggcattggatgggaagggagaagggggaggagagggccgg

SEQ ID NO: 74130 - DNA, 1511 bp, Oryza sativa
  Clone ID: PAT_MRT4530_74345C.1
cgtctactatgaggtggcctcaagcatcgtggcggcaagtcggcctcctagcgtcgaggccatgtcacccacaccctccgcgcagctcgcaacgtcgcccagtccgattttcatcccttggccgcaaaaccgggtcctcgtcccacgtggcattgacgtagcgcttatgtggcaataagatcccgggaaaataataaaaaaccataggacccatctgtcagctacacaaaaataataaaaatagggcggagggcggcgggtggaggggcggcgggtggtgggcagaggggcggtgggcggagggcggaagaacggcggcatagagggggtggcgggcagggaaaaatgtggcgtccggcgaggggggcggagacggtccctggccgccgtccgctgtgcaccgctgctaatctttcgccatcccgtcggccgctgacccacacgcaccgccgctcctctccctccctccagtcggccggcgcgcgttgcctcttctctcgccggcctccccgatgagcttgcctcctccctcgcagcgctctcaaacgagaggatggcggccatggcgagggacagtcgggaggtggaggcggcagcgacctctggtgggaggcgcatccggccgccgaagcgaaggggaagcagagctggcgtccgacggtcgggaggcggccatgtccggcggctgggacgcggatccacgtccccccaccttgtgggcgtccggcagtcggtgtgggagtcgctggcggccggatccggcttcccggaggccagatccggcgtccgacggtcgagaggcggccgcgtccggtggcccggacgcggatccacgtcccctgatctcgtggaggccggatccggtggggggaggcgggggaggagtccggcagtcggtgggggaggcgctggcggccgggaggagggcgggacgcggatccacgtcccctaacctcgtggaggccggatccagtgggggagacgggggaggagtccggcagtcgatgggggaggtgctggcggccggattcggcgtccgatggccgggggggcggcgaggcgtgggaggtggaggcggccggcggtcgggaggcggcgagacgtgggaggtcgggaggaagaagagagaggagaggcacctgcttgccgcccaggggagagggagaggggctggccgccacgagcgcaggggagagggagaggcgtcgaccaccacgggaccacgcaggggggagggattagcgttggccagccgtgcaagggaatgggagaggcaaaggaaaagatggatgaagagtagaaggtgcaagaggattagtcagcccctctcgtctccttcgtccgtccatctcccgctggccccgcgcttgccccacgccgtcgtcggccgccggcccgcgctcgcccaccccctgccggccccactcgcctcgcgccatcgacacctagcgtctaccaccaccactccccctccttcttccaggagtccaggaaaattgcatagaatacag

SEQ ID NO: 74131 - DNA, 618 bp, Oryza sativa
  Clone ID: PAT_MRT4530_74346C.1
atgtccggcggctgggacgcggatccacgtccccccaccttgtggaggcgggatccggtgggggaggcgtgggaggcgtccggcagtcggtgtgggagtcgctggcggccggatccggcttcccggaggccagatccggcgtccgacggtcgagaggcggccgcgtccggtggcccggacgcggatccacgtcccctgatctcgtggaggccggatccggtggggggaggcgggggaggagtccggcagtcggtgggggaggcgctggcggccgggaggagggcgggacgcggatccacgtcccctaacctcgtggaggccggatccagtgggggagacgggggaggagtccggcagtcgatgggggaggtgctggcggccggattcggcgtccgatggccgggggggcggcgaggcgtgggaggtggaggcggccggcggtcgggaggcggcgagacgtgggaggtcgggaggaagaagagagaggtggagacggttggtcgggaggaagtgagggagagagttgaggaagaggagagactggtggggaggaggaagagagaagaggagataaggccgggaggtgggtgggtggtgggccccctgggtgggtggtag

SEQ ID NO: 74132 - DNA, 649 bp, Oryza sativa
  Clone ID: PAT_MRT4530_74347C.1
gcacgagggtaagtaacacgttacagcggcatccccccaggccccaacccgtcaaagcataagcccacacagcgggagaaacactcggcggcgaccggccgtcgcggcctcgccgggaagagcaggttaattagcggccgctcgatcgacgatgtggggggcagcctggtgtccatgctgcggtggccgccggacctcggcgtgccgagcctggcggcgctgctgccgtcgtcggcggccggccactacgcgggcgcgccggccctccgcgggtggcactggcagcactggtggccggagcggctcggctcggcggtgcggcggtggccggagctcgtgcaggacttttcccccgtcgtggacgccgtgctctggggcctcgtcaccgccatcgagtccgtcgcgctcttctccatggtgtgctgcttcttcctcttctgcggctgcacgctatgatcggtgccactcccccaccatatagggtgcgcgtacgtacgtacgtatgcataattgtatatgatcgcttcctagctctgctctgaatctcccaactgtttttgattgattttttttttcagatgattctccattttgttgtcggttattcactgtgttcatgcttcatggcaaattaatttagatgccgcta

SEQ ID NO: 74133 - DNA, 591 bp, Oryza sativa
  Clone ID: PAT_MRT4530_74348C.1
tcagatatcattgcccattgccgtgcctccaaacctccctcgccttgcagatccggcggaggggaggcatgggggcggcggatccggcggcgcgcccccctctcctccctccccttgcagatccagcagagcggcagcatgcggcggcgtgaggtgcggcaccggttgggaggtgtcgtcagcggccgatgtggaggtggagccgccgacaggaggggaggcgtccggcagtcggtgtgggaggcgctggcggccggatccggcttcccggaggccagatccggcgtccgacggtcgagaggcggccgcgtccggtggccgggacgcggatccacgtcccctgatctcgtggaggccggatccggtgggggaggtgggggacgagtccggcagtcggtgtgggaggcgctggcggctgggaggcggccgggatgcgtatccacgtcccccgacctcgtggaggctggatccggtgggggaggcgggggaggagtccggcagtcgatgggggaggcgctgtcggccggatccggtgtccgatggccgggggccggcgaggcgtgggagatggaggcgactggcggtcgggag

SEQ ID NO: 74134 - DNA, 1599 bp, Oryza sativa
  Clone ID: PAT_MRT4530_74349C.1
cccccactcctctcccacatccccccactcctatcccccctctgccaccaccgccggtcaccaccacctcttgccgccggtccgccgccgcaagtcccccctccagatccgacggagggacggcaccaccactgccggtcaccaccacctcttgccgccaggccgccaccgcatgcccccctccagatccgacggagggagggcgccgccgcctctcgtcccgccgccggatctggcggacgggagggcgtcgcgcccagcccgccgcccctcccacctctgccgggccacagccgcctccacgcctccggatctggcggaggcgaggactggcccaccgcctccacgccgtccaccgccaccgccgccgcacctcccgtccacgcccatcctgccgccgccccctaccacccacccagggggcccaccacccacccacctcccggccttatctcctcttctctcttccttctccccaccactctctcctcttcctcaactctctccctcacttcctcccgacctcccgcctccacctctctcttattcctcctgacctcccacgtcccgccgccagccgcctccacctcccgaccgccgcctgcctccacctcccacgcctcgccggcccctcggccatcggacgccggatccggccgccaacgcctcccccatcgactgccagactcctcccctgcctcccccaccggatccagcctccacgaggtcggggaatgtggatccgtgtcccgcccgcctcccggccgccagcgcctcccacaccgactgccagactcctcccccgcctcccctaccggatccggcgctgccgcctccacctcccgatcatccctcgccatggccgccatcctctctgccgccacccctctccctggccggcgcctccttcctcccctcctcctcccacgccgccgatcagcccgcggttcgccgccgccgccgccgccggggtgccgatcagcccacggacgcccaccccgggcagcccgtacaacaagcatgccgccgccgccgccaccgccctcgtcaccgagctcgccgcccgcggcggcgccagctgcaggccgctggtcatcccctcctccgccgccgccatcgccggcatcaccgtatcctcctcctcctccctcctctcccctcctccacaccgccgtccctacacccgcccccactgccgtctccccccacctgcctcctcctccaccagctgcgcgccgggctcctccaccagcgcccggtacgcggcggccgccgacaccacgccgtacggcttcgacgccccgcccagcacctgcgcgagcaccagcggcagcgccaccgcggcgacccccgccgccgccgccagcgggttctgcgccacgaagtcgagcaccccgccgaggccgaggtccgggagcgcgaactccccgcctccgcctccgcctccgccgccgccggatccgcgtggtccgccaccaccaggtccggcctcgccgcggcggcgctcgggctcctcctcctcctcgcggtgaacgcgcacgacctcctggcgcacgccgccggctggtttttgcgcttaggcccgcagtgttttgtatt

SEQ ID NO: 74135 - DNA, 912 bp, Oryza sativa
  Clone ID: PAT_MRT4530_7434C.1
ggactgcatttctcaggtttcgagaggtctagaagaaaagagatggagactagaactggaccaactgccgccgtggccgccggcggtggcgcccacctcgcctgcgccggccgcggcgccctcctcctcgcgctcgtcgccgtcgccgccggcgttttcctccccgtaaccgaatcgtcctgcccgcgagacaattcgcttgtgaaagatgttagcaaaatgtaccaaagcaactatggaagggaaggattctcacatataaccatcgctggtgccctagctcatggaatgaaggaggtggaagtgtggcttcagacatttggaccagggcaaaggacgccgatccacaggcactcgtgcgaggaaatttttgtcgtcttgaaagggaaagggacactcttgctggggtcaagctcaatgaagtatccagggcagcctcaggagattcctgtcttcaagaatagcacattctctgttcctgtaaatgatccgcaccaggtattggaattctgatgaacatgaggatttacaggtgcttgtgatcatttcgcgcccacctgtcaagatatttacatatgacgattggagtgtgcctcatacagcagcaaaactgaagttcccctacttctgggatgaggactgcttaccagcaccgaaggatgaactctagtttctaaaccggctattgcagtgtatcatcttcattcaagatactgctggattgcggtcgatacttgctgtaactcttttcccttctctctaatgtgcagttctgaaaatggtgttctcttgcttaatgttaggacttatgtacttagagcttttgcagtaaggaccactataagtgtaaactacttacataataacgtttcactaatccagacattatctgtgtatataaaaaaaaaaaaa

SEQ ID NO: 74136 - DNA, 345 bp, Oryza sativa
  Clone ID: PAT_MRT4530_74350C.1
atggcggcgcgcggctgtggccatcttcgactcgacaccgccgccatcaagtcgctgccgtcggcgatggcagcgcgcggctgcggccggcgtgggaggtggaggagggacctcctcacccacatcatctcccaccctcaggcgctcgcccagtgcgagctcaccctcaacgccatgggcctcaactcggctccgggcatcggtggtgcccgtaacctcctgcagcttcccgatatcatcctcaacgcccgtaacctcctcaccggcaacaaaaccgcgctcttcgccatcccatggctcgggaggtgctcgccaacggcatccaggacgacgccggcgacgtga

SEQ ID NO: 74137 - DNA, 503 bp, Oryza sativa
  Clone ID: PAT_MRT4530_74351C.1
ccggccgggagactcatcctcattcaactagttagttacagcaagaaaagtaaagcatagtaagtcatctttcgcaatggggaaatgtttaaggccgacccaccaagaagtcatgttgttttgcttggttcttctgctgtgctctgccattcctgcacaaacaagagatataggtcaaaccacaaatgagatccaaaaagatatgtcgaccggtgtgaaaaacaagaatagctttggagaactttattataaacctgatcactgtgttcaaacccccggtgggttctattgctgtgcactggaccagctgtgctatccaactattgggctgtgcataccagaatgcacatcatcaaaggtgcgcagaggatcatgatgagcaagtgattaattacgaataatcatgtactccacccagcagttgggattagttatggatgcctgatttctatgttcaaaacgatatgcagtttctcaaaaaaaaaaaaaaaaaacccgcggcc

SEQ ID NO: 74138 - DNA, 174 bp, Oryza sativa
  unsure (1)..(174): unsure at all n locations
  Clone ID: PAT_MRT4530_74352C.1
gtatgaggcctacaggtgtgtattcttttcaccaggtgcagcacacatcatgcgctaataccattctatcacaccatnctggggtttcttgtacatcatacccgtgtcgcgttctttctttttacatttgaacaacaaggggccacttaattacaggcttctccttgctaataa

SEQ ID NO: 74139 - DNA, 561 bp, Oryza sativa
  Clone ID: PAT_MRT4530_74353C.1
ttggaccattggatatgctttgagattcgtgcacagccttaaccctaaccttttttctcccattcctctccccctcgcgcattccgccgccgccgctcccctcgcgcgcccatctcgccaccacctgatccgccgccgccaccgccccaacacgccgccgcccgcttctccggttggccgaagggagtcaacggcgcaggcgaggtccccccggccggcgccctcccctccacatccctgtcctcttcttccctcaagccgatggcggccgtcgtcccccgtctccgactgcggggcgccaccaccggccgcctcctcctgacatatcttccgctttgcccccgtctcctacaccggcccaccgcgagcttccgaccccgcggcattgcgcggcggcgccgccacctcgccgcccgcccgatccgccgcccaccgcccggctaccgcctcccacggccatccctctaaagccggcgaactctcccccctcttctcacctacccctccccccctcccatccccaccgcaccccggaccctaattcgtcggccctctgccgga

SEQ ID NO: 74140 - DNA, 275 bp, Oryza sativa
  Clone ID: PAT_MRT4530_74354C.1
ccacccggccgcaacagctgcttttcaactgacaaacatccatgtctggcaacagctctcgctggtggcgcatcaatctcactatcgggacattaacattgttcaggccatatcgcagcagctacaactccagcagtttggtgatctctactttgatcggaatctggctcaagctcaagctttggtggctttaacgagccatctagatatggaatctaccctaggtactaaggagcacccagaaccattaccacccttggtggtgtcttgtaatg

SEQ ID NO: 74141 - DNA, 156 bp, Oryza sativa
  Clone ID: PAT_MRT4530_74355C.1
cctattttttttttttttaattctaaaccattcaactttcatatttgtaacatttacaacaggtggcgtcaacacaaacaaaataacctatcttatctcattctaacaccacaaaatattatctgaatcatagacaatcacaaatacctcaccata

SEQ ID NO: 74142 - DNA, 807 bp, Oryza sativa
  Clone ID: PAT_MRT4530_74356C.1
cacaaagaaatgcttctacagatattgcatgatgctcagagatattctgcattccggaaaggtcttgcaatgattgacatttgtcagctgaaaaatgatcctgaagaagtactaaaatggctcaaattttcaactggatggtctgtgctgcacaatagtgagctaagaattggtttaaagaggcacatggaccttctgaaggaacacgaggggaataaaatgaacccattgtccatgcctgaggatgaaaatttagttttggagaagataaatgcagagctgtgttcagaattggagaaaatgataggtacctttgactgggcacttatgagtcagtattactacaaggcgagatttagcaactttgcaagacaatgtgctattcaagcaagagcgagtggagttattcttgttaagcaggctctacctatacgagaaacttggaaggaacagaaacaatccacaagtccaaaagtgtcaaagttgtcgctcgaggattgcttaggctcactacgtcgcccactacgtagaataaatgagcaatttggtagaggtgctgctcgtgagttctcaagggactgtatctccgaaatcgtgacttttgtgaggctgaacgtccatgaccttctacatatagttggcatagcattctatttggaagggaactcgtggagaaacggatcagatggccagttggaattggtaacaaaattaggatcttggctgataattggattccagggaagaatgacgaacaatcggcatgtgatagtgatactgttcggagcttcttcgaggaagatatag

SEQ ID NO: 74143 - DNA, 327 bp, Oryza sativa
  Clone ID: PAT_MRT4530_74357C.1
aagctggacgcgtgcaggtgccggtacggtatagaggggtcgacctatcgcgttcggaccgtgagctcaccgcacgggagaggttccagccgttgtttccccgcccgggcgcgctcaaactgtggatgcagtgatgacagcatctgaacaacatgagccgggagggacgatacgccggcatccgtcgtatggtgaggagctgcaagcgagagcatgcctatgcctctggagcaaggatgatcgtgcactgctggggattactacggcacatagaggtcagctgcgcagcatgctgactacggctaggagccgtacgcgaggatacta

SEQ ID NO: 74144 - DNA, 771 bp, Oryza sativa
  Clone ID: PAT_MRT4530_74358C.1
cgaaaatgtcatcttccacctccgtcctttcccctctcctcgctcacgctcatggccgcgcctcgtcccacctcaagggcgcaacctctcatcgcttcccggctcaacctcgccggattctcggcctcctctccacgacggattctcccggcacctcgcgcgagcgccggcggcggcggcggggaggaggaggacagccgcgtgcaggagctgagggtgcccggttcttggctcacccctgcaggagcagcgcaggaatccgaatggctgagggaaacactgcacaagtggctcgacgacgagtactgcccggagccagccaatgtggacatcagcaacaccgctgcgcggtcattctacgagtccctgacggcgaaagagtctgacctgggagagatcttgctgaagatggtgggagatctgcagaagctgtcatacaaggagagcttccacggcgcgttctcggctgccaatgccgcggtgagtttgatatcgcagaggatggagtcatcatctgatgactgatcattgccaagcaattgctagatgggttttgcttttgaaccatcctagcagggaattggcatctcagatctttgtctactgaattgagttcatcaggtttctttgtgtgcctgggcgggcgcttggttgagaaaattgaaagatgatgtgatcatgtaattgtaacttgtaagtacttgcaacagtcacatgcgattttgagtaaaatacgctaatggttcttaaacttaaaaaaaaaaaaaaaaa

SEQ ID NO: 74145 - DNA, 471 bp, Oryza sativa
  Clone ID: PAT_MRT4530_74359C.1
atggcggcacgggtagcgctgcgccgcgcgttctcggcggcggtggcggcctcgccgtctccgggtctgggtgcgacggcttcaccggtagggtttcagcacggacccctcctccggcgcctcatcaactctgatgcatctgctgccctaaagaacaacaagcatggcttttcttcagaatctagggatgctcgaatggatatcaagaggcgttgtgagctgaaggaacatgagtttttccatctagttgaagaggccttgaaaaccgctgatccagtaaaggcacgccttgtttttgagaagagaaaagagttatctgacctggttcgtgagtacaaggccaactcaggccgttgtttcaggctacttcgttgccggcatgatcgcgtcgaattgacgaagatgaggtttagaagcaccggcgatcgatatgagaaacatgcaaccaacctttatgattatccttggtaa

SEQ ID NO: 74146 - DNA, 662 bp, Oryza sativa
  unsure (1)..(662): unsure at all n locations
  Clone ID: PAT_MRT4530_7435C.1
aggctcgtgccgaattcggcacgcggctttctttgactgctcccttcttctacctcctcggctgtatccagtgctgctgaaggcgaggcgagcacacatggccatgggggatgactactccaaggcgaggcaagccctggcggtgagcgcccacgagtgctcgctggtggacgcggtctcctccgcggccacgccgccgaccgcggacgacggggaggggcacgcggcgggcttcttcgagggcttcgtgctgggcgggatccgcgtggacagcgtccgcccgggcctcgtcgactgctccttcaccgtcccctccaggctcaccgatcggagcgggtgcctggccgcgggcgcggtggtgtcgctggtggacgaggtggggtcggcggcctccatcgccgacgggcgccccgtcaaggtctccaccgacatgtccgtctccttcgtctccctcgcgcaggcccgccccggcgaccgcctgcggatcacggccagggcgctcggccacaaaggggcgtactccgccacccacgttctcatcttcaacgccgccaccggcgaggtcgtcgccgagggcaggcactccctcttcggcaggatgaaggtcgtnttcaccttcaccggcaccgccaccagcaagctgtgaccatggattccaccct

SEQ ID NO: 74147 - DNA, 849 bp, Oryza sativa
  Clone ID: PAT_MRT4530_74360C.1
agctagctagcttcagatcatctaccattcgttttcctagataatttacatatatggcagtaacaaattttcactaggtgcaagcaacagttgcttgcaccccagactgcagtctggacaaacgttttcaaccacaaaataaaggccaatcggtccacatatatattgggaggctttctcggtacagttgaacaatgttgccatgcgtagccttgtagattgcatcttctttatgattcaggcgacgcaattgagtcctacacagcccatttaaattgggtgcagtagtagtaccccttttgccttcttgcggaggagttcagaggggactttgtacaagtcctcgtcaactgccctaacaaccctaggcctcctcgatccatggacaactaccccaccatcaacaacaacagatggcccatccctcctcctcgccgcctggttctccatcccattctttgtgctcctcaccttcactttaaagtgatcaacaatagatcgaagttcttttagacaacggacatatctatattttaccactatgatcattgctttcttgggtggcttctggggaggcggtgagccggcgaccttgaagagcaactcgccggcagtggcgtggtagtagtgtccggccgtgacgacgaggccttgttccatcgccgaatcgaagtactgcgtgattggcagctcctcgcattgctggttccactcaccgaatgccgggatgtgccgcctcctccccttctccatttttgacctgtagatccgccacattgagatttccggctcagtaaccgaaaagggtgtatgaggatgtgggcgaggaagaagatgcttctgataatc

SEQ ID NO: 74148 - DNA, 762 bp, Oryza sativa
  Clone ID: PAT_MRT4530_74361C.1
cggacgcgtgggcgatggcggcacgggtagcgctgcgccgcgcgttctcggcggcggtggcggcctcgccgtctccgggtctgggtgcgacggcttcaccggtagggtttcagcacggacccctcctccggcgcctcatcaactctgatgcatctgctgccctaaagaacaacaagcatggcttttcttcagaatctagggatgctcgaatggatatcaagaggcgttgtgagctgaaggaacatgagtttttccatctagttgaagaggccttgaaaaccgctgatccagtaaaggcacgccttgtttttgagaagagaaaagagttatctgacctggttcgtgagtacaaggccaactcagggctcaagacagcaaacagacgtttgaacttggctgtgattatttcagccgttgtttcaggctacttcgttgccggcatgatcgcgtcgaattgacgaagatgaggtttagaagcaccggcgatcgatatgagaaacatgcaaccaacctttatgattatccttggtaatgtgtatgggcagctgttgtgtataattaagcaccttaagttatccaactctaatgtagctagcttctgttgaaccaaaggctagatttttatctatttattatcttaaaaaaaaaaagtcctcgaacggtgttgataacgtgcagagaggcagagacaaaccagtaactgtatgctgatacaggggaatttaactatttgccacttttaggtttggtaaaaaaaaaaaa

SEQ ID NO: 74149 - DNA, 966 bp, Oryza sativa
  Clone ID: PAT_MRT4530_74362C.1
atgaagggccccgtggaggtcaccttcctggacggcgacgacgacagcgacgacgacgaccggtggtactacagccccaggagggaggccgtcctctgcatcggcgacgacctcgccctcgtcgacgtcaccttccccgtggacgacatggacaccaacccgtggttccgggggatcgcgcagctgtgccgcggccaccgcctccgcgccccgctcgtcgtcggcctcgtcgcgctccgcggccgcgcgccgccctacaactggtgcccgtgggacgcgagcggcgtgcgcggccacccgcgggacccccgcaaccccatccgctgcatcgcgatctgcgtcggcggctcccacgccctcgtctaccagccctgctgcgaccgcggcagctccaagtacaccggcggcgtgctgcctttcagcgagggaggctgcaagatggcgcggctccgcgcgttcctgcgcgacaggcgcgtcacggtggcctgcgtcggcgcgcgcgaggcggcggagaagctcgcggaggagtgggaggtggacgtggcgcggccggtggagctcacggatctgttcgcgcgcgcgttcggcaaggtggccggggtggacacggtgaagccgcccaaggagccggagccggataggcggtggatgaccacgtcggcgctcctgagggcggaggccaaggcggaggcggaggcggccaaggagaaccactacagctacagcaagcgcgggaagcggccggcggcggaggtggtgaaggggctgagcatggagcgcatggcgcacgtggcgctcggcccggagatgcggctggcgccatggccggagaaggcggccgacgcggactggggcagctgctacctggagaagagcgactggaagtacgcggcgcgcgacgcctacctctgcttggagatcgccgccgtctgcctccagaagctcggcgcgcccgtcggtaactga

SEQ ID NO: 74150 - DNA, 1867 bp, Oryza sativa
  Clone ID: PAT_MRT4530_74363C.1
agatcggtctgaccggagtagattagccggtctgaccggtgttgaatctccggtctgaccatcgatgtcacctgccgcgcctgtcaccgacaccggtctgaccgtcgtgtaccccgccggtctgaccaccgtgatgccaccggtctgacgctccccctctatttatacatgaggtaggcagcctaaagccacgaaccaaactcatactaagagtcctaaaacacctcaagaaactaaagtttcactcgatgaaaacagacccagaacaagactatcagcaagcctaaggtatacactgatggtactataagatactcctattttacttctaccggtgaaccaaataacctagaagaagctctaggagataaacattggaaatatgcaatggacttagaatattccgctctcatgaagaataaaacttggcaccttgtccctcgtcaggaaggaaaaaacatcatttattgcaagtgggtatataaggttaaaagaaaagctgatgttagtttagacaggtacaaggctagattggtaactaaagggttcaaacagaggtatggtatagattatgaagatactttcagtactgttgttaaagctgctactatcagaactgttctgtctatagctgtatataggggttggagtctgcgacaactggatgttcagaatgccttcttgcatggagtactagaaggggaagtgtatatgaggcaacctccagggtatgaaaattcctcaaggtcaggttttatttgtaaattggataaaacattatatggcctgaaacaagcgcctagagcctagtatgcaaggttaagtggaaaactgcaacaactgggttttaagccttccaaggctgacacatctttgttctacttcaacaaaggtaatataaccatatttatcttgatatatgtggatgatattatagttgcaagctccacccaaggtgcggtgtcagctctcttacaggaccttaaagaagactttgccttgaaggatcttgggagttacactgcttccttggaactgaattaataaggtaaacaatggtttagttttgtcacaagggaagtatatagctgatgtgttgaagagaacaaatatgatagattgcaaaccagtgaacacgcccttgtcaactatagaaaaaatatctcttcatgaaggagatttgtttgggtctaatgatgctactcaatataggagcatagtaggagccttgcagtacttaactttgactaggccagatatatctttttcagtcaataaggtatgctagttcttacatactcctactgcagtttactgggcagcagtaaaaaggatactaaggtatcttaagtatacttcatgtttggggttaaagtttagtagatcagtatctactcttgttagtgcttttacagatgcagattgagctggctgtcttgatgacatgcgatctaccggaggttttgcagtttatcttggttctaattttgtgtaatggagtgcaagaaaaccagtaacagtttccaggtccaacacagaagcagaatacaaggcactagttaatgctacagttgaggtaatgtgaattcaaacactattaaatgaactcggtattcaagtgccaagggaagcaaagatttggtgtgataatattggtgcgaagcatttatcagctaatctagtttttcatgctcgcactaaacacatagaggtagattatcattttgtcagaacacgtattctgaacaaattgcttgaagttgagtatgtttcctctgaagatcaagttgctgatggcttcaccaaacctctttaagtcaaacaattagagatgtttagatacagtcttaacttgggaagtttagat

SEQ ID NO: 74151 - DNA, 439 bp, Oryza sativa
  Clone ID: PAT_MRT4530_74364C.1
gcacgagggcaggttacacaaataatgttgcatggagaaatcaagtgacggctcgcaagtagtaggagaggacgagcggtagtgcatatgacgtcgaccttgccaagtaacttcaggctcatcccttggagacatgagagatgagcgaccatacaatacaaggccaatgtattctgatctgtttaggatctcttcatcacctcgtctctttatatttctttgttaagccagggttggacggccatctccttgctaggctgaagaaacaatggaacacatcctagtctctgtttttagccttcagaattgaaagttgatcctatagaggttaggcttctcttccatctccccaactcctgacacaaacaacttctccagttgctggtctagggctttgaagggcacaagaaagtaggctaagaaaggatttaactcgctt

SEQ ID NO: 74152 - DNA, 334 bp, Oryza sativa
  Clone ID: PAT_MRT4530_74365C.1
ctgattatgatcattcccagtgtcatcgtcaatgccgatcgatcaatcgatgcatggattggaggcatatggccgtactcgtggctggtggctgctgctgctgcaaatgaatctcttccgatgcatatgtcgacaaacacacgcaaacagatatggcttgatcgatccatccaaatgatgatatgccatatcgatcgcaatctatgcagtgtgtacatctgatttggctaccagtctcgtcagtgtcactcccattgccgccgccgtaattctcgacccggatcgacaaacacatgcgtatacgacagacagggaggtcgattttaatctgctt

SEQ ID NO: 74153 - DNA, 383 bp, Oryza sativa
  Clone ID: PAT_MRT4530_74366C.1
gggaacccccgaaccattataaccacaaaaaattttcgccgggggggggaccggaggccgggagcctcctttaccggccaccgggggccggttttgatcgccctggacaacaaaaacgggaaaaaaaacaaaggggggaggaatgaaaggttactaactagtagtaaaaaacgaaaggaagggtcattttatttatttgcacaaatgccggccccccggggaaggaccggccgaccactcccatgcctaaaaactgggcatttttttggtttccgcctcgccgatttaaaccatagaggccggccccttaattggaaccccgccccgccgccggggaccgatccgtcctcaacacctgggtaaggaggaggagggggtcgggg

SEQ ID NO: 74154 - DNA, 304 bp, Oryza sativa
  unsure (1)..(304): unsure at all n locations
  Clone ID: PAT_MRT4530_74367C.1
ctcgccccgtcgcgctgccggnncctcntncaccgcatccgcccgcgccgccgcctcctctcnncgcagatgtcgccgccgcctcctgtcgccgcagaagtcgccgccgccgccgcctcacgtcggatctgcacgtgccgtctcaccggatctgcgggcgncatccctttgttcaccggtgccggcncctcctccctnncnnccacggngcacgacctcggcgcagttctnttntccccanngcaaggtaatggagctactgatagccttgcagtaatgcttctncncttgcactttcggagaa

SEQ ID NO: 74155 - DNA, 159 bp, Oryza sativa
  Clone ID: PAT_MRT4530_74369C.1
atggcccctgtcgtccaagtggaggacagcaaggtgtatgcatttttcactgaggtcccttgccactctctgcaagggctaaagggggcaaatgcaattttcgccctgccaaaattcgagcacaaaagggtcaccactgaacgcgctgatgaagcctag

SEQ ID NO: 74156 - DNA, 419 bp, Oryza sativa
  Clone ID: PAT_MRT4530_7436C.1
taccgtccgaattcccggtaggcctaccgcgtacgcgtgcgtatcacatagcatagtatagacacatactacaaattaaactgaccacacaacttgctacgagcgttacatggagcgggacgggaggaggatatgcacacacatctctacctcctttagactgaaaagcgtgacaatccgtagtgcagcacccattgatgctatcgcctatacatacattttcacatatattaaggcacatcttgcaggtccttttggtggtgtctgaggaaatccaactacaattacacttacatctccagaatccgtgaagggattctccggaactattaccaacttcttgacaaacgttattatagttcccaatgtcaccacttataattttggactaaatggtggaactgtttttagacttcctt

SEQ ID NO: 74157 - DNA, 1524 bp, Oryza sativa
  Clone ID: PAT_MRT4530_74370C.1
atggcgagcggcgacggcggcgacgacgcgggcgtgaagcgcgtggcggaccgctacctgaagcgcgaggtcctgggagagggaacctacggcgtcgtcttcaaggccgtcgacaccaagactgggaatacagtcgcaataaagaaaatccggctagggaagtacaaggaaggtgtcaatttcactgcattgagggaaattaaacttcttaaggagctgaaagattctaatattatagagctgattgatgctttcccttacaagggaaacttacatcttgtatttgagttcatggagactgatttggaagctgtcatacgagataggaacattgtattatctccagctgatacaaaatcttatattcagatgatgttaaaaggtttagccttctgccataagaaatgggtgctacacagggatatgaaaccaaataatttactcattggcgctgatgggcagcttaagcttgctgactttggtctggcgcgcatatttgggagtccagagcggaacttcactcatcaggtctttgcacgatggtaccgagcaccagaattattatttggcaccaagcagtatggatctgcagttgatatttgggctgctggttgtatttttgctgaactgctgcttaggcgaccgtttctccagttttcaactgaggaaactggaaatggtcaggctctggtgaggattaaattatttaagggcttgcctgagaatatgatgcaagctgaaagttgtcccacgatctctctcctaacgccatggtgttgggcgacaaggtgtcacgcccttgtcctcttgccatccatcagcacagcttattgcctgagatttggttaccctggctacttgttctggccatacatattttggccaaagaagggttttcagggttctagtgacattgatcaacttgggaagatctttgctgcatttggaactccaaagtcttctcaatggccggacatggtttatcttccagattatgttgaataccaatttgtctctgcacctccacttcgctcattgtttccaatggccagtgatgatgcattggatcttctatcaagaatgtttacatatgatccaaaagcaagaattacagctcagcaggctctagaacaccggtactttttatcagtaccagcgccaacaaaaccatcacagcttccaaggccaccacctaagggtgattcagggaataacaagataccagacttgaacctgcaggacggccctgttgttctgtccccgccaagaaagttgcgcagggtgactgcccatgaagggatggaagtccatatgcatcgggcggatagaacagaagagcatccttcaggggcaaggcacatggatgacatgtccagccagagtttagaataccaatatgtcttctatactgaaatttctgtgatttatatttgtggaatgggtaaatggaatgaaaatgtttctttcggacttctggcttcagtatatgcatgtgaacttgtgatagtaaatggacctgactaa

SEQ ID NO: 74158 - DNA, 182 bp, Oryza sativa
  Clone ID: PAT_MRT4530_74371C.1
acgctgtagcttcgaagatccgctctacattgaggttgaagccgacatttgggaaagcgatgggtaaggcatactttgtggctcagtctggtcgtgggcaaaagtacacggatagagatggacaaagttggggtccgatggacatctctagggcaaatgaaggctacacgagctgcggcccg

SEQ ID NO: 74159 - DNA, 350 bp, Oryza sativa
  Clone ID: PAT_MRT4530_74372C.1
atctgtagtcaggataaagtcaaagaagttcctatcatgatagacgctctagggcggaaattcggctatgagcggacagagaagacatcgatgcctgtgcagctttggatgtgcatctgacgcgagcttcacggttacctactccgacggaggatacggcgattcccgcaatgtatgggacatcagccgggatgccagttactagtaccataatcgcatagatcgcactgtgccaggtgcatccgtgatcacctgctccgatagtaccgatcggagaaaaggaatggtccgtattattaacatcggacctgttgtacaactacagatcgaggccgtgccccgcctccggg

SEQ ID NO: 74160 - DNA, 747 bp, Oryza sativa
  Clone ID: PAT_MRT4530_74373C.1
atggctgcggcggcgaacggaggtggcgcggcgctgttcagcgaggaggagctgcgggacgtcagcggggtgcgccggtgcgaggatttcgtggaggtgacgtgcgggtgcaccagccaccgctacggcgacgccgtgggccgcctccgcgtctacgcttccggcgacctcgaggtcagctgcgagtgcacgcccgggtgtcgcgaaggaccattaggttcctcttcttctgtggtacctaatgcacacaagttgacgccttctgcctttgagaaacactctggaagggagactgctggaaagtggaggaatactgtgtgggtcatggttcaaggagagaaggttccattgtcaaagacagctctgctgaaatactactcgctgtctcacaaatctgctaatggttctaacaaaggccgtaatggtcgcctgtcacaccgagatgagtttattcactgtacggaatgtggcaaggagaggaggtttcggctccggtctaaagaagagtgccgtatttaccatgatgctcttgctaaacctaactggacatgtgctgatttgacaactgatagggtcacctgcggcgatgaggaggagcgcgcgagccgcaaggtgctgagaggctgctcccgctccacgtcgtgcaccggctgcgtgaagtgcgtgtgcttcgggtgcgagatctgccgcttcaccgactgcgggtgccagacctgcgtcgacttctaccataactccaaggagtag

SEQ ID NO: 74161 - DNA, 3216 bp, Oryza sativa
  Clone ID: PAT_MRT4530_74374C.1
atggcggtcaccgatctctgcccgacaccgtccaatccaagcccatcgtggcgcaccgcacaatcaatcccctctaactccagcgttgcggacgcggggatgtcaccgccgctctccgcgaacgccacgggcgtcctggacgtgcggcccggaggatacgaacccctgacgggtctcgagcttcatcgggaggataccaccgtagctcggtatctggatatgagttgggtgaacctcagcactattgtgcagtgggttccgacggtgaacattgacaaggggttgacaatcaaggatatcgtggaggagtgcaagctgttctactttgcaggagcggagacaacatcagtgcttctcacatggaccatgctgctattaagcatacacccggagtggcaggaccatgcaagggaagagattatgggattatttaggaagaacaaacctgactacgaaggcttgagccgcctcaaaattgtgacaatgatcttctacgaggttcttcggttgcacccaccgttcatcgagattggttggaaaacatacaaagagatggagataggaggagtcacttacccagctggtgttagcattaaaatccccgtgttgttcatccaccatgatccggactcatggggaagtgatgtgcatgagttcaagcctgagaggttctctgaggggatctctaaggcgtctaaggatccgggagcattcctcccattcggttgggggccacgaatctgcatcggccaaaacttcgcgctgcttgagtccaagatggcattgtgcctgattcttcaacgcttggagtttgagcttgcgccatcatatactcatgcgccgcatactatgatcaattccgaatcaatcaaaacctggtgccaaaaaaaccctaaccctagattaattcccgcccactgccggccgcctcctcctagccgacgccgcctctccccctcccccttctcccactggttccgcccctccccctccccttccctcctatctccctaccggcggtgccgctccctctcgccctctccctcccgtctcacctacacggcggggtacggcatgaagacggcggtgacgaccgtccctccccctctcccctctacccgtcggcctcaacggccgtccctccctcttggcctctttgtttttgtcggcgacggcgcccgctcaaccctcaagatgcagcggcgccctcccaacggcggtgatgatagtgtcaatggcttcccgcgggtggatctagtgacggcgactgcccgcggttgatccacccgtgacgtcgacaacgcagatccgccttcaccaacgcccgggatgccaacgggtgtaaagcaagttcgtatgatcagggaatccaatccgggttggggaatcctcgatgcctgcgtcggcgacggtagggggcaccacatccgtggaggactcaccgtcgcaataggaaacacctccacgggcgtcggcatcaccgttgcgttttgcgcggttgctcccccggcgatgtctcgccttgcgccagccttgaatccaaccaaacacacgatgaccactgaccaggacacgcactgggcctcgtcggaatttgactctgacgagtgctattacaccgccagatgcagagtcctagcggctaacgtcaactccgacttccagtgctgcatcttcaacgtcagggacccaataacgccgtacgttgcctccctccgtgaagagctgttcatctaccagcccgctcgcgcggttgatctcacgaggctccccccttgctaccatggcgtcatcaacattgacgggagtaggaacatcgggatactgtgccgcaacaacggagagtttgttgtggctcaccttggagggatgacttcagtaggagatggtggctccggtctgccgatcactcgcccagtggcagctaagctgtgcaagtatgttggcggcttctggagcactaattggttgcgaatccatcatgctgccggtgaagaccaggatttgtgctggtgggagactgacttggtcgtgccttttggtgattctttgtgctgggtggattacttgaggggcatattgctctgtgatgttttcagtccaatccctgatttccgctatgtccggctgcctgtgaatccttacccaggcaacgacatagaaagctgccctactcctttcactatcacctcctggacattgaccagcgatcgtctttcgtggataaaggatgcctctctagatgctaatgtttttttctcccttgccagcaatgaacatcttcctcagattgtaccggaattccctcttgttgacatggaagatcccaatgtcatctacttcacattgcccctggaagaaggttctaatgataaggcagccttcgttgcacttgacatggtaaggaggactctaggcctgcgaaacacttatacattaagaagcaccttgaaacctggtgacgacaacagctcaacctcctgcaacctctttggcaatgagccattcctaccttttgaattctccaactacctgaatttggatgcggcttacaacagcaccgaaggcgcaaaaacctactacacgctgcaagacgataaggccattcacagtgtaaacaccggtggtagggcacccacggtggaggccggccggagcaacaccgacgtcgaagcctgcgctcaggaggaggtggaggcagggaacgaggaggccggcgagctcaggaggaggcagaggcggggaaggaggaggccggcgagctcgagcagccgggtctggcgaggaggggggcgcggccggcggcctgaggtcggcgcaagaggggccggcatggacgcgcggccagagacgcagaagcccgcgctcctcgggatggcggtgcaaaggcggctggctacgcggaggccggagcagcagaggcgcagaggccagcgtggaggctggaccgtggggggcgctggagccggaacggcagcgtttccagcgtccgcgcaggcccagatggtagtgcaaagggagctggcggtggatgccgaagcaatgccgcctagtcccgggttcttcttcggccagatctggcgaggaggccggcgggtggtggaatggaggggtcctaggccaactctcagggatggtggttcgatgaagtcagctggcggtggggcgtcggtgcagtgtggtggcagtcttgtcgttggcaggactggaagctga

SEQ ID NO: 74162 - DNA, 1212 bp, Oryza sativa
  Clone ID: PAT_MRT4530_74375C.1
atgggcaagaacgggaagaagacggagtcgcaccggcaaggccgaggccgccgtgcctcacgcttccgcggcggcggcggcggcggcgacgaggatggtgacgagttgccttcatctgcctatgatgctccaccgccacaccacgaggactccgacggtgacgacaccgacgaagcagcagccgaggacgaacacgaagggggtgtggatggaggtgaccaggagcagcgggaagtaggttccatgccttccaagttccacctgtaccaactctccgtccagtcgccaaaaggggacattagctacctgcagaagttcttccttatgtacgtcggcgggcgcgtccctctgcacttccaagaggatttctgtggcacggccctcctcagtgctgagtggcttcgtactgatgcaaggcgtacagcagttggcttagatttggaccttgagtcacttgagtggtgtcttgaaaacaacctgagcaagattggagctgatgggtattcaagaatgctacttttccatggaaatgttctacagccaaatgtagctcgcctagtcaagcaaaagatctgtgatgccatgcaagatctgcacgtaaacaatgataatgactctttagcaagtaacatctgtgatcagttggatcctgctagcccaaaatgctcagccaattcaaccatgtcggatttggttttgccggcaagagacattatttgtgcattcaactacagttgctgttgtctccacaggagaaaggacttggttttgtattttaggcatgctttcaatgcactgtcaaaacgaggtggtatatttgtaatggatgtgtatggtggcacatcatctgaacgcaagctacgtctgcagaggaggttccccagcttcacttttgtctgggggcaggaagagttcgatatcataagtcaccaaacaaggatcagtctccacttccaagctggaaagaagcaaatgttacggcatgctttcacgtaccattggcgcctgtggtcgataccagaaatcaaagactgcttggaggaagctggatttaaatcaatccatgtctggatcagggagatgccaaatacccaatcaagtggaaatgctaaagaatataatgccaaccgtgatgtgaaatatgaagaattacagcatttcaatcaagcagatgcttggaatgcatatgttgttggagtagcaaatatctag

SEQ ID NO: 74163 - DNA, 1829 bp, Oryza sativa
  Clone ID: PAT_MRT4530_74376C.1
tgttcttcctttttttttttttttattttgaatctccagcaacaatcaaatggccaacagtacaccatatcactaacatccaaattttcaaacacacgttactgaaattgatccaaacagttttggctatagacatcggctgtattcagccttgaaacctattccactacgacatatcactgcattgcagctcattccgcatcagattctaccatgtcgtcgttgctgtcctgttcagtaatgccctccctctccaattcatccataaggctcctacctacacaggccatgccgcgaccgccaccccttccacttccacgtggtctccctctcctccctctacccctgctcattgccttccttaccttttcgaagtttgcgggattttttgggcaggtagttgtgtaatggccatccctcagtccacaccagctgcacaccctagtacagagcttcttcccccttgcaccaagtgatacattctcttctggacctactgtccgctctttagtctttggtttgggtggtggttcttggcttatgacttcagctgatgtgcccgcaccattgttgcgtgcaacgatatcatccctacatgccacgctgtctggaagcatctcttttctacctaaccgtacaatagccattgcctcagctagcagtgtcttttgtcggtaactttcttccacactgtcaggtccagctgtaacacggtcacgctgaggtggtatcttctcgacctgagcatggatgaatgtccgaagaaggtgcgtgcataataaaccagtatgttcccactgcttgcactcacattcataacgacctttctgaacgtccgctaacactttaaattgtagttggcaccaatcatgcttctcagaatgctccatgtccaacacaatccacctgtttgtgttgccaatgtccatgtcgatcctgaaagctgtgcaatcatccaatgcctcctcgaacaacttgaacacagctcttgtgtacacccttgacatctgcaccacgaatgaccaccttgtctttgttatcggcatgcccaaacaagccctggtctcagcagcctccttcgcttcccgtgaaattatgatatcaagcatcctacgcgcaaaactgtgcagattggtttggtgatcgacgaaatttctcttagctagtttgttcacactctcactctgctgagtagatgtcatcctgccacagtagtccttcttgaagagcgctgggatccatctgtgccttatttcgtacaagttttgcagggtcacactatcctgcaaatcaaactcatcaatgaaccacgaccacgcattttcaaactcctgtggggtgtatgtctggttcacgcacaacaacaattccgattcaatgcgatcgtcccttgcatatagaatgttgagtgcctcagagtgattcttcagtatgagccacctgcacagcctatgtattgtcttcggaaagacatttgttatggccaccgcgatcacattgtcctggtagtttttgaacgttttgaatagccattcgaatgattctatcttcttgtctcgcagtagtgcacaaccaaacagagtgtcttgtatatggtggcttgctccaacgaacatcgccaaggacatcccatatatgttcgtcttgtatgtcgtgtccagagtgactgcatcaccaaagtccgcatactcggcctgactgctagcatggctccaaaaaatgttcttcaccacaccatcctcatcgagctgcatgtcccagtaaaatttagagttctgcatcttgcattcactgaagaaagcgaacagtttgttgatatcatccgccat

SEQ ID NO: 74164 - DNA, 350 bp, Oryza sativa
  Clone ID: PAT_MRT4530_74377C.1
ccaacaagcctactgccttttcccaaattaatatgtaaccttttgggaaaacatcctcacttttttgggaagaaaaaaaaacctacaagtttaaaaaaaaaaaaaaggccccaaaaaagaaggcaaatccttatttgctcatgcaaacaacatatttgcaatggcaaacccagggaaataagggaccagtttatatggatggcctgaacaattcgcagaaaaatcactctttggggttagaaaaaaaaccccgggggggcggggggccattgcccctttgcagccacggggttgttttccctgccatgctcacgtttttgggaatagtaagccttgtttttttgacgggg

SEQ ID NO: 74165 - DNA, 147 bp, Oryza sativa
  Clone ID: PAT_MRT4530_74378C.1
gctggcatcggcgctgtcggaggtggatctcgcatagctctcgacggcgaggaggtgcacgaggaagagcaacttttggcgagcgccagcgaaggcacaggagaggttaacatcgacaccgccgtcgacctcaacaccaccagctga

SEQ ID NO: 74166 - DNA, 657 bp, Oryza sativa
  Clone ID: PAT_MRT4530_74379C.1
atggcacctgttgctgcggaagaggacgatgtgccaaggttgaggaacactcggtcaagggcaacaaggcggcagccagggttgcaggagctcctgaggactgtgcgtggccgtggtaatgagcaagacagcaaggggcgatcgcattgctcccgatctgcacctgcttcaccatcatctgagcgagatcaaaggatgaagaggaggagaaaaatgatcgaggccgatcatagttgtgaggatggagaggaaaaggtgccagagaagatgaatgaaggggaggaggaggaggaggtatcttctgcaccgagctctccactccacatgcccttattacctttcaaattcagtgggtatgactctgatggtcaagagatccttgagccacctgacatggacattgttgatgcttaccagaagagacgtgaggaattcgaagaaaagagaggaggaaaaccattagcacactgctcggggtttctggttgattgggatgaaacaaggaagaagggaattgtaatgacaacctctgatattatttgctcaaagtcaagcttagattgttggtctggtgaagatgagtattctcctaatgctgaggtgtgttgtactctggattcaagcatactgcaacagtgctaccgggattactcctaa

SEQ ID NO: 74167 - DNA, 402 bp, Oryza sativa
  Clone ID: PAT_MRT4530_7437C.1
acaagaggtagaattaattaaggccgactggtcttaaatttgtccatggatctaaaactgtaaatgcgacgacacaatggatacagaggcacgggggcactagcagcatagcagaagcagtagaacgaggcacgagtagcacaagcgtccactgtgtgataggatcggatcggatgagtagacgacgctatggacgaacatgccatcctagggctgggcggcctcgccgacgatggagtacttgccaggcggtgcagcgagtcgtccttgccgcgaaggagcagcgcgtgctgcgcctcctttacgtactgcgggtgaccggccaacgtctggaggcacgtgttatgcagcgcccttgggtacgagaacgacacgtgccacggattgggcccctgaattatc

SEQ ID NO: 74168 - DNA, 372 bp, Oryza sativa
  Clone ID: PAT_MRT4530_74380C.1
tttgtgcgagtttcgttgtttattttgggtttggatctttccggtcactaggattactaatctcttgcaaagaataaacataaaatagaggagaatcgacataaaaatagatggtcaatcaatcggacgatgtcaagaatcagacttatggaaggatggaccaagaactcagaaatgacacgatcaattggaccaaaattcacaagtccgaagtgagcaacaggagaggaggccgcctgctaggaactgggccggttgggccagcccagggttcggccgaaccagccgcagcgccgatggttgcagggtttggctagacggctgggattgatcttcaatgacagttggtggatattaccgacctttccaacc

SEQ ID NO: 74169 - DNA, 162 bp, Oryza sativa
  Clone ID: PAT_MRT4530_74381C.1
gggggggggttttctacacgggaaagttttcattaaccaaatcttttcacaggccccacatccaggtagtttactaattcctttacccacaaggttattgcatcggcaaaacacggggtttgtttatcaaaccctctacaaaggattcgtgttagaaaattc

SEQ ID NO: 74170 - DNA, 408 bp, Oryza sativa
  Clone ID: PAT_MRT4530_74382C.1
atgcggccaggccacggtgccgatgcggaggagctcagccgagcgacggcggcgccgatgcggcggggcacggttgaggggttgctcggcgcgagcgtggtcgtgtggcggcaccgaccccggcgagggcacatcgtgggtcacggcatcagcgccaacgccgtgggcatgcaggcggtcggcgccgacatgcgagcgcagtggcactgttcgaggaagaggagcatcccacggcctgccgccgccccgccgctccgcccgcccctccggcatgctcctgccgccgctctgccggctgtaggcgacgccgcggcgcgaggtgacggcgcgacgaggaagagggacagccgagaggggagagggaatgaaatgcgaggcccacgtggtagtggcgtagctagaatttaa

SEQ ID NO: 74171 - DNA, 306 bp, Oryza sativa
  Clone ID: PAT_MRT4530_74383C.1
atgacggagcccatcacggtgaccgtggcgaggacggacagcgagacaaggacgtcgccgtcaagcagtcagcagtcgcactcgctggcgatgatgacaggcgaaggcaacaagctggtgttcctcgacagcgtgccggagcggccgtacgacctggacacgctgctgcgcgcgtcggtcgaggtgatgcttgcgcgggtggtcgattacgaggagtgcggcggcggcggcggcagcagcgaggtggtggtttgctctggtggtggagagagaaagtggctaagtccataccagtttgtttattag

SEQ ID NO: 74172 - DNA, 614 bp, Oryza sativa
  Clone ID: PAT_MRT4530_74384C.1
agcagtgtgcagatcgtttgagcagctagcaacaaattacaagagggtggcagctagctagttaggccggatggcgcggctgcagcgacgacgtctggtgctggcgctcctgcagctcgccgtggcgctctggttggcggctaccagcggctgcttctcccgccagccgccgagtccgatagccggcgtctcgtcgccgccgattctgccggacggcaaccggccaccgaagtcgcctccagctcccgcatccgcacaacacatgaaccgctcctttcagccgggctgcccgccggattgcaccgaccagcaacgtcagccttaattagttatggactatcaacgacgtacgttcagcatatatactctggttgcaaacgtgttagtatgtactccactctgtaagttcgttccgatttcaaatgtaataatgcaaatttagcgcattgtattctcaactacttgtaagtataatttctattttactagtataaatgtagggccgagcgatcagattggtacatcttcaaaaacaatatcctagacttgattaattatatgtaaaaacgctcaaattaattactgcctctcctttcataaaaaaaaaaaaaaaa

SEQ ID NO: 74173 - DNA, 600 bp, Oryza sativa
  Clone ID: PAT_MRT4530_74385C.1
atggcgcctgtgaaggtgtttgggccggcgaagtcgaccgccgtggctcgggtgctggtgtgcctggaggaggtcggcgctgagtacgagctggtcggcatacacatccccgccggcgagcagaagagcccggcgcatctcgcccgcaacccattcggtcaagttccagctttccaagatggcgatcttatccttttcgacttgctgaaggaaagcaacctctcgcagtctgcaataatggtcgatgtgtggctcgaagttgagtcccaaactttcgacactgccatgtcagcaatcactttccaatgcttaacaatacccactttcatgggcggaattgctgacgacaaaatcgtggaggagaatttggggaaactgaagaaagcccttgaggtttacgaggcacgctcgtgcaggttcaggtacttggccggtgatttcatcagcctggcagatctcagccattttcctatgacgcactacttgttagctactcctcatgcatcagtgctcgatgcatacccacatgtgaagtcttggatcaatgatttgatgaagaggccggctgtgaagagggtgagagagcttatggaggcatga

SEQ ID NO: 74174 - DNA, 1736 bp, Oryza sativa
  unsure (1)..(1736): unsure at all n locations
  Clone ID: PAT_MRT4530_74386C.1
tttttttttttttttttaaacaaatcaaaatgtatcaataagaaattaatcaacaagaattgtatcaaaccaaggtcgtatattacagatctggacttgtatcatctcgaagctttcgttagtttctacttctacatcactatctgtgccaaatttagcccctaaatgctagtatcaaataaaaataaaaagacacactaaatgcatgggcgatcctatcgttctgaaatctgaatgatcttgtgctcccgaagcatcccttgctttcttctatgggaatcttcagcagcaagagactagtcaggtctcttgtaaattagagatgcaaaaggaggatgtactatctctgatgtttcatttgcacattcatagaacggacacttcacgctttcgcggcaaaactttcgcgcgcttttcgattcgtccatcggcgggagatacccgcgcaggccgacgtcgtagaccggcgtgccgtcggggtagaacagcccgtagttccgctcggatgccggccccggcttgaggttctcgttgaacagcgcaaagacgtagacgtcgatgggcgacgacggcctcagcggcgtcccctgcttcatctcgatcctccgcaggaggttgccgatgtagatcccggcgtactccggcgtcgcgccggcctcgtcggggtcgcccctggacggccacccggtctcgggagatcttcacgtcgacgtcggtgtggcccagcgcctgcatcgcggcgtacactgagtcgatctgggcgtacagcatgttgtcgtagttgagcttcgtgtttgggtcggtcacgccggcgttgggctggaagaggacgtactccagcggcacgctgcccgggtcggccttgtaggcgaagtacgggtagcagttgatcaggaacggggaccccgccatggacaggaagttgagcagcggctggatgtacggcacggcgtcgggccggaacgcgccggcggagggagggtaggagctgcccatgatgtccagggagtgcgccgtcgtgacgttcacctggccctgcagcccgagcgcgacgacggcgttgtacacggactgcatcgccggcaggaggttggccttgagcgcggtgtcgttgcccttgaacacctcgttcccgacggtgatgcaggtgatgcgcgcgctcgggaggtaggggcggacgtgctgctgcacccacgcctgcgccgccgccgggtccaccatcgccgacacgttctcgttgccgatgccgacgacgaactccacgcccgtgtcgaggaacgcgctcaggacgttctggtcggcgtcgtagagcttcaccttgctgatctgcattgaccggaggagacccgagaccctggtcggagaagggaggttgtccgcgatctgcccgtagttgatcccgattgacatgccttgagctgatgccgctagcacttgatctgtgaggatgactgcgaggacgaggaggaagaggcgggtcgacggctgcggcggcgacccagttcccggttgctcccctgccgccatggatcactcggctgtggttgaagctcgaagtcaaactgctcttatctccccctttctctctcgcgcgcgtgctcgtgttgtgtggtaaagacgagtgtgtgntcccgcggtagaatgtttgtggtggtagcagcgcgcggatcggcgattcggcggaggtggggcgttattatgcagcggacgcgtgggtcgacgcgggaattccggac

SEQ ID NO: 74175 - DNA, 207 bp, Oryza sativa
  Clone ID: PAT_MRT4530_74387C.1
atgcggctgcactcctcggacgcctcgcgtcgcaggccgcattcgctggacggtcttcgctgtcggcctgcggtggaggccgcgcggccggcacatgcgaaattggcttccacggaccgcgcacggagcgggccgcatggctttgtgcggtgggctatggttgccaacgctgagctgcacttcggtgagaatctgaatggattttga

SEQ ID NO: 74176 - DNA, 194 bp, Oryza sativa
  Clone ID: PAT_MRT4530_74388C.1
gcctcgctctatatctccgccgcgaccggagacgagacaatcctcgcattgttgccacgaagtcggaccgctcacccaaacactccggtgtctctggcgcggacccgttgcacaccctaacaatcaaccgccgtcccaaccgcaagaacgtcggggaccgagcggcgtaccaaccgccgacccgcacccgttag

SEQ ID NO: 74177 - DNA, 1264 bp, Oryza sativa
  Clone ID: PAT_MRT4530_74389C.1
gcggattgggaaaccccaaaacccccacgtcctcctcctccgccgccgccgccgccaccgtcgccgtcgacgagccatgccgccgcggaagcgcccgccgccgccggccaaggcgccggaagccccaccggaaaccaagcccaagatctctccgcccgctaaacccatcgccgcggcgccgccgccgccgaaggcggtcctctcggacaccgtcctcgccgccttgtcgcagcacgagcgccccatctacaagctcgtgttcgccggcggggacaagggcatgtcgcagacggagatccggatcaagaccgggatgccgacgagcaccctcaccaagcacctccgcggcctcacctccaagggcgtcctcaaggtggtcaacagcgtccacaagcgcgccgagaagatctacatggacgtccgcatcgacccgtcgccggagatcaccgggggaacctggtaccgcaacggccagctcgactccgacgccgtcgcctccgcgcggcgcaggtgcctcgaccagatcgacaagctcggcgtcgccacggcggagtccatccacgagggcatcagcagggaatgctccaacctagcctactcgaccgagcaggtcagggacatcctgcgcaccatggcgctcgacagggaggtcgaggaggtgaggagcaccggggcgggggagttcggcgacctcagggcagggagggtgtgctaccggaggggcggcccggtgcagggcggcatgatggagaggatcccgtgtggagtttgccccaggatcgatgagtgctcgccggatggcgttatctcgccgagcacctgcgtctactacaagaagtggctgcagatggacttctaggtggtgagctctcttccgcgccgctgtttatggtgcgatcgcacgcacaattcagcttccaattgctcaattggcatttgatctatgctatggaattgccacagttcatacattgcggcatgtgatcccggataggcccatgagatagacatactagatgatatcatctgattatcttatgtttgtatttaaattagtaagatttgtttctataatcattattacttagccttttcccctgttagtctttctcatgtatttatctgcaacaagtttagaaacctgtccaacatcaatattccaaattctagggtgcgtgagagtttcatccattgttactcaatcataatatgggacctgagcacaataaagcaattgcttctttaaaaaaaaaaaaaaaaaaaa

SEQ ID NO: 74178 - DNA, 442 bp, Oryza sativa
  Clone ID: PAT_MRT4530_7438C.1
atggttacggatatggcataccttctatcctacggcttatggaatatacggatatgggttcggtatctccgagttctacttagagataaagttaactcatggtataaatacacaccccctgggaggggtcctatggcatcgaatcatagcgccaataccaccaccatagcctacaattcggaggacgtgaagcctactcgccgggagatctcgtcgaaaccatctcgacaagggtctcgctgatcctcgtaccaacgtacccaataccctatgtatccggtctacgtgtatcccccgtcgataatcacaacctctccgtctgctgcccgggcctcctccgcgccggcgtcctcctcgagccctccgatgacttcggcctcgagctcgacatcggccccgacctctccgtccccgccccctccccttcctcctcctccctcga

SEQ ID NO: 74179 - DNA, 1558 bp, Oryza sativa
  Clone ID: PAT_MRT4530_74390C.1
ctcctctcctcacctcgatctcctcctcctcctcctccgccgcaccgagcgtttcgcccgcgtcgcctccataattttctttcccctcctctcctcacctcgatctcctcctcctcctcctccgccgcaccgagggtttcgcctccgccttccaccgctgccgcagaggggacgaaccgaggggcaggaatggcggcgcggcacctcagatccggcctccccctcctccgcgcccacctctcccaggagggctcaaggggcttcgcgtcgcaggtggcaaagccgaccgggaaggatatcaaggttccagaagctctgtatggtggcaccggcaactatgctagtgctctgttccttacagcggccaaagctaacttgctggacaaagttgaaactgagattcgcgatgttgtagaggcatccaagaagagtccattgttttctcaattcattaaggacttgtcagtgcccaaagagaccagggtgaaggcaataactgaaattttcgctgaagctggtttttcagatgtcacaaagaatttcttggctgtgctcgccgacaatggcagactgaagcacattgatcgcattgctgagagatttgttgatttgaccatggcacataagggggaggtgaaggtccttgtcaggacagttattccactccccgaaaaagaggagaaggaacttaaggagaccttgcaagatattcttgggaagaacaaaactatcttgattgaacagaagattgactacagcatcatgggagggctagttattcaatttgggcagaaggtgtttgatatgtcgatcaagactagggcgaagcaaatggagatgttcttgaggcaaccccttgatatctaactgccttttggatcgaaagatgcagttgttttgctgctgaaggcatcctcatgtctgttactttgatatggtcttgaaataaatcttcgtttacaagagaacaacactctgttttatcttgttttgtgtgccagaagcctgctgaacaattttatgtcaatttctttgctactaagaaagttatgcaccaaaatgaagggaaattctgtgaagtttgtaattttcaagtgattggcattattctgtttaaaaaaaaaaaaaaaatgttccttatataatcacagaacatgtaaaaggccgaggcctccgggtcgtcggcgaggccgagcgggtcgaagctgccgccggggtagagcgggtcgacgacctcgccgagcggcccgccggcgatgcggtacccctcgacggcgcccatgagcaccacttgcaccgcccagatggcgaggatgctctgcgcgtggatcaggctcgggttccgaggtagtcgagccgccctcgatgaagatatgcgagccgccttaaccaccggcctcgcgaacttgacccgttcgggcgaggagcttcgggaaaaagcaaccgaggggggccaagaatcgcccacgggaattggttaccttcaggctccggttttttgccgaaggtctccgggacggcggagagccccgcggtgtcccacccgcccacgcgtccg

SEQ ID NO: 74180 - DNA, 519 bp, Oryza sativa
  Clone ID: PAT_MRT4530_74391C.1
gtcggtgggcagtccttcacgcagcagaaatagagtttgtgattctgaagatgaagactccaatacaccggcgacaactttcgttgatgttggcccttcacaagttcagagttaccgaggagcacaagaaatattcgattgatgatgcagagcccctcgtgttgtttggccttagctgtggaatgttctcatcacctgctgtcaggattttctcagctgggaatgttcggcaggagcttcaggaatcaatgagagactacatccgagcatcggtcggtataaacgacagcgggaagctcatcgtcccaaagctgcttcagagctatgccaagggcaccgtggaggactctctgctcgccgactggatctgccgtcacctcacaccaaaccaggtcgcagctgtccaagacacttcgtcgtcgcggaaacagcggcttcttggtgtgcgcagcttcagcgtcgttccatttgactcaaaattccggtatctgttcttgcctgacaacagtagctcccagc

SEQ ID NO: 74181 - DNA, 2278 bp, Oryza sativa
  unsure (1)..(2278): unsure at all n locations
  Clone ID: PAT_MRT4530_74392C.1
ccattttccctagagaaaccccaactgagagagagatggcgatggcgccgccgccgccgcccaccgccttctcccgcctccgccgcctcttctccaccgccgccgccaccgccaccgccccgaccccggaatccgtcctctactccctccgcaccctctccaaggacccctccgtcgcgctcgccttcttccgccgctcccaggccggcggccacccgctgggatccgccgcctacaacctcatgctccgcaccctcgcctcccaccccacctccgcgcactcccacttctggcccttcctccgcgacatgaacgacgccggccactccatcgaccagggcacctacctcgccgccctcgcctccttcaagaaggccagcctcaccgccgactacgcctccctcaccgcccactacgccaaggcccaggaggacgccaagggtgggacccccacctccgccgccgccgacgccgtccgtgccctcgaggatggctcggattcggatgctagcgcggagctcgacgagaagctggagggcgtcgacctgccgctaacggagaccgccgtggccagggtgctccgggaggtgagggaccatccgatcaaggctctagccttcttcaggtgggcggggcgtcagattgggtacaagcacggttcggtgtcttacaatgccatggtgagggtgctcgggcgagaggagtccatgcgggagttctgggacctcatccaagagatgaaggccgacgggattcatgtcgatatcgacacctatgtgaagctctcgaggcagttccagaagcgccacatgctcacggaggccgtggagctctatgagctcatgatggatggtccttacaagccatcgaagcaggatggtccggtgctcatcaggcgcattgctctggggccttcgccggaccttgagctggtctatcgtgtggttaggaagttcgaggcggtgtgggagttcaagactaaggatgtttttgatggcatccatagggcgctgacgagtaatgggaggtttgatgaggctgccgagatcgtgaagaggatgaaaggcgaaggtcatcagccagacaatattacgtatagccaactgatctttgggctctgcaaggcaaacaggtttgatgaagctcgcaaagcgcttgatgaaatggaggctgaagggtgtgtccccgacttaaagacttggaccatgttgatccaaggtcactgtgcggctggggaggtggaaaaggccctgcagtacttcacggaaatggttgagaagaatttggaggcagatgcggctttgttggatgtaatggtgaaaggtctctgtagcgatgataagattgatgcgtcgtatgctttctttgttgagatggtagacaaggccaacttgagcccttggcaaggcacttacaagcatataattggtgaattgctgagggtaaagaaacttgaggaggctctgggtctcctgagatcaatgaaagcacgcaagttcccaccttttgcagacccattccctactcacatcgccaagtacgggacatttgatgatgcaaggcagtttctcaaggccttgacggtgaataacaagtacccatcacccactgcctatctgcatgttttcaagtcatttttcacagagggaagatattcagaagctcaggatttactgtataaatgccctttccatatccgcaagcatcctgatgtcaccgagttgtttgaatcaataaaagttgaaagtgagagtgcggcttgatgaagtgcaagaaattattggggtgctcgagcgatagattttcagcagaggcagagggcaaaaactgtgnctgaatgtgatggcagcttagattggatggatagattcccagctgggtcagttcaagcactccatgcttgacggagtttggcaagacaaagattggtaacagagagcagcgatatgatgattatatgctcaagatatttggtctttgaagatgctcctcgcactctgccaacaataatacatgccgaatattatcgcataggcatcttcatgtaccggcacatatctttcatgtaccagcatccccatcagtttcgtcaacatttctttccaggcaccgacttttattacaggttgctgcctgccttcttttcttccccacatctccttttgcagttttgcttagctactgcctgttggttcgctacctctgtctgtctgattgctgtgtcttgggtaatgctgaaacaatttccatatataatacattacagaaaatatttgtt

SEQ ID NO: 74182 - DNA, 415 bp, Oryza sativa
  unsure (1)..(415): unsure at all n locations
  Clone ID: PAT_MRT4530_74393C.1
ctctccncctcctcctcctcctccgccttccacntccacntccactcatgagctcgagctcgagcnagctctagctctctccacccncctccagccaccgcntccacnncccctaggaggctagcacacagcacacagnagcacnagctcgtcgtcgcnggcgcccgtggcaggcggcggcggcggcggttcctcctcgtccgcngctgttgcnagctggcgcgtcttcnagctcctcctcctcctcggtggccgcggcggcgaggaggggcgcgggccgtgccggcggtggcgcccgtcggcggcggcggcgggncgaggtgccaggtggagaagtgcggcgtcgacatcagcgaggctgggcggtacaacggaagcacaaggtgtgcagangcattccaaggagccgtcgtca

SEQ ID NO: 74183 - DNA, 575 bp, Oryza sativa
  unsure (1)..(575): unsure at all n locations
  Clone ID: PAT_MRT4530_74394C.1
gcacgagggaaaaacaaaggtaagaaatgtcagatcagattttgcagagtgttactgcatttacttggtaaaacaagaactgtaagataccaccagcatccattttatagtatccaatgttatttcagaacttcatacacaaagaagataccagttaaaggacttatcctggagatcaaaggtaagaaatagtttctatgcttatttgcaatcttaggattttaatatatgtgcatttcattggtttggagtaaccaacggattattcttgtctgtgagcacagttagttataatgtttgtacttcttgctatgataagttgattagtaatgggattttacagtcaacgggatcttcaggaagacagatagtgaatgtaaaatatttgagtaggaacatttttttttatttccagtgtggcttcagtaataatgtatacatttgtgttgattaaaagtgcaataattttgtactatacagttgacttgtccttttggccatatttcacaccttaaaaatngcttcttagatgtctcactgttgccagtactttcaatcagttaagaatgcacata

SEQ ID NO: 74184 - DNA, 948 bp, Oryza sativa
  Clone ID: PAT_MRT4530_74395C.1
atgggcgccgcctccacgcctcgccaccatctccccctccccaagcggatcttcgcctatgccctctacgccctcctccccctcgccgccctccactacctcctcctctcccctccccctcctcccctcgccaccacctccacctccaccacgccgccggttgcggcggtggcggtggcgaggaaggcggcgccgcggtgcgactactcggagggggagtgggtgcggagcgcgtcggcgccgcggtacaacgggacgagctgcggctcgacgatcaagggcgggcagaactgcatggcgcacgggcggcccgacacggggtacctccactggcggtggcgcccgcgcggcggcggcgggtgcgcgctgccgccgttcgcgccgggggagttcctggagctgcgcggcgaggtcctcggctgccaccactgcccggagccgaaccggacggagacggggttcttcggcgtgttccgcctcgccgtcaagaacgccctccgcgaggtcatcacccgcgccgcccgctccccgtcgcagcagcagaagctcgccgtggtgacgacgttctcgccggcgcacttcgagggggagtgggacgcgcgcgacgcgtgcgcgcggtcggagccgtacgcgccgggggagaaggaggtggggtacatggaccgggagatggggcgcgcggaggcggaggaggtggcggcggcggcggcggacgcgagggtgcgcgcccccggtcgcgtggaggtggaggcgctggaggtgacggcgatggcggcgctgcgcggcgacgggcacccggggccgtacatgaacgcgttcccgttcgccggcggcgagagggcgcgggtgcccaacgactgcgtgcactggtgcctcccgggccccatcgacacgtggaacgagatcctcctccagctcgtcaaacgatggagagactcctcgaaatga

SEQ ID NO: 74185 - DNA, 309 bp, Oryza sativa
  Clone ID: PAT_MRT4530_74396C.1
atggctcggattgggagctgggtcgctggagacggctggctgcgagcggtggaggcggcccaatgccgtgtgacattaggtcgccgacggcgaccaaatccgcggcggagggtagagtttttggcttgggttcgggtggatgcgccatgcggtgtaaatccggactacgtcgatgccatcgcgcgcgcgtaccaatcatgcccattcgcgtgcaaacgcatacatttgatgatcatcactaacatcagccgcagcagattcaagacacaacatgcatcgcgtattccattcactagcggcagcggctgc

SEQ ID NO: 74186 - DNA, 371 bp, Oryza sativa
  unsure (1)..(371): unsure at all n locations
  Clone ID: PAT_MRT4530_74397C.1
ggagcgacccggcccggcggcccgccggggcacnaggacggcccaacgcncangtgctctacgtcttcaaccgcggcggcgtctgcctgctgttaccgcnanttggcaccgggccgctcccgcaacgctcgaancccacccaaagaacaanaaaactcatntttccggccttcctcttcctccctccggttcctttcaaccggccaaanantcnaatcccnacnacntttcttaangccntctttnctnnnccccccnacttnnaaaaaaaattcctttgganttcaaaacccctnnntgggtttngggaaatggnnatnaccttaacctcttnggttcccnncctcccaaantttncccctcccantngc

SEQ ID NO: 74187 - DNA, 1338 bp, Oryza sativa
  Clone ID: PAT_MRT4530_74398C.1
atgggcgccgcctccacgcctcgccaccatctccccctccccaagcggatcttcgcctatgccctctacgccctcctccccctcgccgccctccactacctcctcctctcccctccccctcctcccctcgccaccacctccacctccaccacgccgccggttgcggcggtggcggtggcgaggaaggcggcgccgcggtgcgactactcggagggggagtgggtgcggagcgcgtcggcgccgcggtacaacgggacgagctgcggctcgacgatcaagggcgggcagaactgcatggcgcacgggcggcccgacacggggtacctccactggcggtggcgcccgcgcggcggcggcgggtgcgcgctgccgccgttcgcgccgggggagttcctggagctggtgcgcgggcggcacgtcgcgttcgtgggagactcgctggcgcggaaccagtgcgagtcgctcgtctgcctcctcgcctcggggttccccgccgagctggtgcgcggcggcaacggcggggacggtggggacggggacgaggcgcggaagttccggcggtgggtgttcccgtcgcacaacgccacggtttcggtgttctggtcgccgttcctggtgaacggcacggagaagtcgtcgtcgtcggcggcggcggcgggggcgggggggctcgaccacaaccggctctacctggaccagcccgacgagcggtgggcgggggagctcgacggcatcgacgtggtggtcctctccgccggccactggttcctccacccggcgatgtactacgagcgcggcgaggtgatcggctgccaccactgcccggagccgaaccggacggagacggggttcttcggcgtgttccgcctcgccgtcaagaacgccctccgcgaggtcatcacccgcgccgcccgctccccgtcgcagcagcagaagctcgccgtggtgacgacgttctcgccggcgcacttcgagggggagtgggacgcgcgcgacgcgtgcgcgcggtcggagccgtacgcgccgggggagaaggaggtggggtacatggaccgggagatggggcgcgcggaggcggaggaggtggcggcggcggcggcggacgcgagggtgcgcgcccccggtcgcgtggaggtggaggcgctggaggtgacggcgatggcggcgctgcgcggcgacgggcacccggggccgtacatgaacgcgttcccgttcgccggcggcgagagggcgcgggtgcccaacgactgcgtgcactggtgcctcccgggccccatcgacacgtggaacgagatcctcctccagctcgtcaaacgatggagagactcctcgaaatga

SEQ ID NO: 74188 - DNA, 1291 bp, Oryza sativa
  Clone ID: PAT_MRT4530_74399C.1
tcgtcaatacgacgcccacgacgacgccctttccgccgccgcctccgcctccgcggcgcgtgtcgccaacaacggcggcggcgccgtcgccgcgtcgtcgatggagaagaggtgcgcgtgcggcgacgccgccattgacgccgcccccgccgtgcacctcacacccacactcaacgcgagatcgatcgatcccccctccctctccgatttctcctttccgacgataaaaaaaaaaaagcccaagtctcgccgccgccccccacatggcgcaaggcaccgcgccctccgccggcggcggcgccgccgtccccaccccctccgccgccgcggcggtctccaccaccaccacgacccccccgggcaccccccgcgccaccgccgcctccccccaggccgggtactacgccgtcgagctctacttcgacccggcgctggagaaccaggtgctcaaggcgtggaacgcgctggcgcggcggcagctgagcagccgcctcattgacgccgcctcccgcccgcacctcccgatgctccacctccccgccgcctcgctcccggacccgctccgcctcgccccctccctccgcgcgctcgcctcccgcctcgacccgctcccgctcgcgctctcctcgctggcttccccgccgtcctcgcccgacgccggtgtcctcttcctcgcccccaccccgtccgccgcgctgctcggcatccacgcccagctctgcgagctcctccgcaaggacgccggggtggaggtccccgacgtgttccgccccgaccactgggtcccccggtgcgccgtcgccgtcgacgtgccccgcgggcgcatggccgaggccttctgcgtgctccgcgagctcaagctgctgcccgtctccgggtacgggatggatatcgcgttggtggaggtcggcccggtggtgagggagctcgtgtcctaccctctcggcggcagcggcggcgctggagccgactgagaggtgttgttaatctgtacaatttgaagagcatcctgggtggacaatcatatttgacaaggacatgataattattttcgttgtcctttttacctggttcggggaactaaactgcaaagaaggctagatcatactgtatcctaacacatacagtatttttctaattatttatttaatcttttggttgataatgttcccccacaattgtagagacctgacaaatcattaccaattcaggtttgttgtaatgcattatcgattgttgtgtgccttgaaaaaatactactcctaatcgtgcaatcctcattctggagtct

SEQ ID NO: 74189 - DNA, 505 bp, Oryza sativa
  unsure (1)..(505): unsure at all n locations
  Clone ID: PAT_MRT4530_7439C.1
agaagcgaacaacaaatgtagcatcgatcaacaagatgatcagtctgggatggagctagcggccggcgcgcgtagaattgataaaaaaaaaccatgcatgcatgcacaagcaattaatcgaaaacctacataaaatatgctcaatccggcgtaccaaatggcatangggtgcgtgcgcacgtacgtgctagttgctcgccatcagcaggccgcgccggcggacggcggcggcggcggaggcggcggcgggtgcgggtgtccgccgccgccgctggtgtcggcgggctgcggcttcttccgcttcttcttctcgtagctgacccccctggcgcgggcctggtgctcgcggacctcgcggaggtagagcctcaccgcgcgcaccgcgaacgggttcgactccggccgcccgccgttctcctcgaacgcggcgcggaggcggccgaccagcgcgtcgaggctcccccacgcctggcgcagcgggcaggggcacggcgccggcgggttc

SEQ ID NO: 74190 - DNA, 345 bp, Oryza sativa
  Clone ID: PAT_MRT4530_743C.1
atggcggcgaagaggaaggagccggagacggcggcggcagaggaggacccgtcggactggatcggggccgtggcgagcgtgttcaggatgcttggcgagatgagggagcgggagaagagggaggaggaggagctgcgcgaggagagggagctcgccgcgtgggtggcggcgacgagggccgagagctacgccaggttcaacatgcgcttgccgacgccggaggaggaggcggcgttcgcccgcgaccatgcccacgagatagacttgtccgtcctcaggccggaggactacggagagagcaagcgcggcgtcggcaacgatggcatcctccgtcgcctcgactag

SEQ ID NO: 74191 - DNA, 900 bp, Oryza sativa
  Clone ID: PAT_MRT4530_74400C.1
gcacgccgtccaacaccacccttctccaaagctgcaaaatccaaagcgagaaaccgccattgccacccacctcgattccgctctcgatctcagctcactgctgcattgcggctgtcgctgtcagctcggatcggcgccacggaggccaccgcggacaggagggccgtgcagccggccggcggcggcatggagcccgggttcgggaagcggctgatgcacgtgctgcgcgcggtgtaccacatgctgcggcgcgggctgtgccggaagcgcctcatgatggacctccacctgctcctcggccggggcaagctcgccggcagggcgctccgcgacgtcctcctcgcccaccagccgcacggcggcgcggctgccgtggcggtcatgggaggcggcgccggggtggcgcggggtggtgactcgtcgtcgtcgccgctgtcggcgtcgttcttccaccacaaccccagggacgtggagttcagctgcaccaccacgccgtcctacgcgccgggggtcttccccttcaggttccgcggccgcggcggctcacgccacgccggcggcggcgccagcaactacggcgggctcgacgcctccgccgtggcccgcgtcttcgagatgctcaacgccgacgccgcggctgctgctggcgccggcggggagacgccgctgtcgtcgatgcccggcgccacgccgtccccgttgctggcgctcagcctcggccgcagccccgccgggacgcggcagctccgcgtcaccgactcgccgttccccgtcgagccgccggagggcgccgtcgacggccgcgtcgacgacaaggccaccgacttcatcgagtggttccgccgccagctcctccagcagcaggcgtccgccgcgccaacgccggactaccgtggctag

SEQ ID NO: 74192 - DNA, 336 bp, Oryza sativa
  Clone ID: PAT_MRT4530_74401C.1
ctgggacggttccgggcaccgattcggggttcgagccacgcgtcacgcgacgcgtccgcccacgcgttttttcacgcgtgcgcccacgcgtgcgctcacgcgttcgatggagttcgccgatcgtccgccttggccactacccctgcaagccgctctagtggctgtccggcgaccgcgcccccgtgcatcgggagaccccgccgatcccagggcagagcacgttcctggggacgagggtgcgggacccggcatcggagagcgggaggatcggggccaggttcgggttcgggggtagtaagaaggcgccggggaaaaaggcggctagtacggcggctc

SEQ ID NO: 74193 - DNA, 711 bp, Oryza sativa
  Clone ID: PAT_MRT4530_74402C.1
aggctgcggtcacggctgaaagcgccgcgcgggcgccgctcctgcttcggcgcgctccggtccccctgcggctgcgggccgtcggcgacagaggcggcggaccaggaggaggaggaagaagacgaggaggttgatcagtacggcgcgtgggagtgcggcggcggggagctgatcgacgtggactacagggcggaggagttcatcaacatgttctacgagcaactcagggcgcagagcttccacccgcccactgttctccagtgccgctcgccatgaccggccggtgccatggacgtgcacgtgttgaccagagcgagctagctctatcctcctctctatgcgtacgcgtgggcgtcgtgtattgtgtggttccaaccttcgaggagtcttcacttttgagcgttgcgctgtaccggtggtatctaaggttaaggtaaaggtgtaggtggctaacccgcgaatccatttataaattaaatgtttatttatttaatttataagtaggttcctggattagccacttacaccctcattaatctacggtacttactttcgtcttcttctcattcctctatggctctcagtaatatccctcctcctcggtgttgtaatttgtaagctattatttacatgtgtagagtgtacgtcacctgcgtcagtatatatgaataaaagagtagcaatggagtttgggacaaaaaaaaaaaaaaa

SEQ ID NO: 74194 - DNA, 457 bp, Oryza sativa
  Clone ID: PAT_MRT4530_74403C.1
atcaagggtattaagcaccaaggcctgactgcactaagattatcgtcaccaacatcctgtatattcataaccatttaagggaagcagctaactacaactaaaatcacacataaacacagcctcagctggcattcttatggctggttttcaaggataggttaaatactgaagccaatatggtcagcaaaaagtggaatgatgacccccactgccctgtttgccttgctcttgagacagctgatcacatcatcctaagatgcaaaaataccgacaatctctggagaaaactaggactcttgcatctggcaaacaaagcagaaacaatctctgatttcatccaagcagccattgacaggaaacaacacaaagggtgataccaatctgatttgcagtctgcgcttactctctgtggaaatcacgcaacaacatgatttttgacagacagatggacaatctc

SEQ ID NO: 74195 - DNA, 1046 bp, Oryza sativa
  Clone ID: PAT_MRT4530_74404C.1
atggccgctccgccctcccccacaacagcagcaaccgaggtgagcatccaccgctgtagtggcgagtttgcttttgttgctatgcttgaatttgacggcatgatgatgatcagatccggcgagcagtcggcggcggcgacgaaggcggagaagcagcagcagcggccggcggcgcacagggtggcggaggccggtggggtggtcatggcgctggccaagacggactccaagtatcagcaccacaccggccatggcggccacggccaggccgccgaccaccatgggcccagctcgtcgtcgaaggcggcgacagcggcggcgcagaagatcgagctgccgcggatctacacgacgctgtcgcgcaaggagaaggaggaggacttcatggccatgaaaggcaccaagctgccccagcgacccaagaagaggcccaagcttgtcgagaagcaagtcaacttcgtctgcccaggaatgtggctctcggatgtgaccagatccaagtatatcgtccgcgagaagaagtccaccaagaagctgtactcgccgttcgcaacaaaaatacaggggactgaaagggatggagagcatggacagcgactccgagtgatcgcgaaaacccggagcgcgacgcacagagatagcagcacaagtggggtgaatttcgcgttggagcctggagaaaaatcgcggaaaagagaaacgtaagatcagtagaggaggaagaagaagaggaggaagataggtcaaagatggatggcgatgcaagcatgagccttcttttggtttaggagaaaaaaaaaaagaaaagaccctggaggctggagcccttccacgtttccatcacgccaagctggacggggagtagggagggacaccgagaaaagtcaagcaaccgacgactggcggctggcgccggccactgggaggggagaacgagggaaatttttcaggaagcaagtggggaaaagatgatgaatagttttagactgtcagagacattcagagtctcaggaagaagaaaggagaaaactgatgttagctcgctc

SEQ ID NO: 74196 - DNA, 473 bp, Oryza sativa
  unsure (1)..(473): unsure at all n locations
  Clone ID: PAT_MRT4530_74405C.1
gttgggagctgaatggaaacatcanacccgtcgggggacccaattgtaaaagggggtttgccacggccctttgggggtttgtcacaaactgtacttccaaaaaaacaaaaaaactttggctcattcgttctttaccgcagttcatgtatttgattccattgaactttcaagaacaagtcccaaatgttgcatgagaggccgcacgtctactgtgacagctcttttgatctcatacatacttatctttcatctcatgtcctttcaagcttctgaataaacttataagatctgttcagggaagggtatgtttctatttgttccgtttgggtatgagtttattcatcctaaatgttagatcatttacttttaagcaatattacacaagcagctgcaaacgatggccattctgttaatcttgtgatttaattgttcctttttgttgattnttcagctgcactaactatattttcttt

SEQ ID NO: 74197 - DNA, 410 bp, Oryza sativa
  Clone ID: PAT_MRT4530_74406C.1
agaatacaggataattcacaggctgcctggggacaattttcagctagagcgactgtcacgatagccacttgctgaccaaacagactcataatcaatctagtaagacacaatcatagttgcctccctggtgtacaccacggagggccttgtttaagcaacatacgagctgggagggccagaaggagtgtcaccaccgagaggggtttgagggggagaggctaaagaagaaaggtcctctgtagaaaccttggcaagagcttcagcctccacgatctgctgagaagtggcagaatcgtcagcagccttcttcgcttctgcagcagcggcttgttcagcggccttgcgagcagcctcctcttcagctgccttggcggcttcttcagcggcctcgcaaacaacgtcctggtcag

SEQ ID NO: 74198 - DNA, 499 bp, Oryza sativa
  unsure (1)..(499): unsure at all n locations
  Clone ID: PAT_MRT4530_74407C.1
gggtgnggcntctgcacnaggggngggnnaggnccctcagcccaagatcgatgaggctttatctgaacaagggagatggcggactacctgtntgggccggggcggaaccacctnttcntgcctgggccggtnaacatcccggaccntntgatccgcgccattagccgtcanaaacgaggactaccgctcgccggcggtgcccnccctcaccnagaactcctcgaggacgtcgatcagatnttccataccgncaccggtccccncttcntcttcnccacccccgggacnggggcgtgggaaagcncanttattaanactccntcgccgggggacaaaatcgnctcatncctggtcgggngtttnnccctnctgtggatcgacncccntcnncgcctccanttccacctnganctggtggaaaacnacnggggctccggggcntagcnccccaccntcaactncnacctccnccagtancccngngttccagtcccggcca

SEQ ID NO: 74199 - DNA, 509 bp, Oryza sativa
  Clone ID: PAT_MRT4530_74408C.1
atggtctcctggagagtggcaccagccggaggactcctcctcatcctccttgttgcgcaacaagctagcgcacaagctgcagagaaggtaattagtgtgagtgctgtggtgcagccaaataccaagaagaaaccccctcatcaacaaccaaaaataaggaaatgcactgaggcccagaagcaggacatcctgcacgagtgcagggggtatgtgactgcgggctcccacatcatcctcccagatctacattctgcatgttgcgatgctgcgcggagcgtgcagaacctcgacatggattgcatcgtcgatctcctcaccagcgaagagaggagcaggtacaacgccaacaggatcaaacatcttaacgagatgtgtcgtccctgaagtccccgctgttagcgatatgctctagagctaattatagagttgattgtatcacatactatgtttattgatttatgaataaaatgttttgtgagaatcaaaaaaaaaaaaaaaaaaaaaaaaaa

SEQ ID NO: 74200 - DNA, 456 bp, Oryza sativa
  Clone ID: PAT_MRT4530_74409C.1
atggcgtgggctggtgcagcgccttggttggggcggcgctgcgcggtcatgcgagaggtggtgccagagctagaggccggggcggcgctggggcggcgctgcgcacgcaaggacggccgggctcagcagcgcgaccacaccaggagcgcggctgctccaggccgacttcaggaggttggatcggatggcgccggcgccggcgcggcgaggctcaagccgtcgctgcgggcgttcttctcatgcgggatcttcagcgcctacacgcatctagcactcagcctgacggtgacgcccaacaacaatgtcgcatgccatcaggctggttgtggaggcggcgtcgtcgcaggttgtggaggcggcagcaccggcggtggaggcggcgttgtcgctagttgtggaggcggcggcggaggtgacagaggatgcagcagcgggcggcggcggctgcttcgatga

SEQ ID NO: 74201 - DNA, 2129 bp, Oryza sativa
  Clone ID: PAT_MRT4530_7440C.1
cccccctcctcctgctgctgagcatcgtcgaacaagttgttgtgaattatgtcacccgtttcttggtacatgacactttacaatagcatatcatcaactctccactgccctccgtaatgcactaatgctgtctcaggaaagtccaatgagaagcaaacaacaaaaagattccatgcacgtcacgattagcaagccctgcttagctttccggccggcaagacacaaaaaacactagctagcctagcagcatatgcagcgtctaattacaccacacgatctcgtcgtcttaatttgctggtgaaatggaacgtacaagaagagattcgatcagaggtagacgaagagatggcgcgtttcgcgagctagctgggctggactggattcttctttggctacatgatgcccatgctgttagcgtgctgtaggcgacgccgcgtggcgtcgacgacgtcgaggggatcgtcggcgtcgccgccctcggtgacgacggacgagacgtagctgcgggcgacgtcggagctcatggcggccgctctcgcccggaacttgtggctgcagctgtagcaggtgatctgcagctgcgtggcgtcgacctggcgtatggcgtggtcgcggagcacgtgcgcgcggctgagctccacctgcgcctggtaccgcatccgccgcgcggtcgccagctcctggtcggcgagctccgcctgccgcttcgcctgcgcgcgcgcctcgtccgcggccgccttctcggccatcgccagacgcagctgctcgtgggcggcctccttcagcctcgtcgccgaggccgacacctcgccgctgctgctgctgctgttgttgttgccatcatcgcgtgcgccgccgaacccgatcgagagctgcagccgcattgcgtcggcgaccggctgccgcgacggaagagcagcagcaggcgaatgcggcgaagaggaagcgtagtacccaacggcggtggcaactggagtaccaccgaggctgccgcctgcgcaggtggtggtggtgcgcggtggcatgagctgcagctccaggctgtgggtagtgtggcatcctcctcgccggccaccacacggcgtcggtggcgacagcgccgggtcagtgaaccggtggtggaacgccgcgatgctaccgccagcaggagccggcgccgcagcacggggactcaccattgccggaccaccaccaccagtagcaggccaggccaccgggctcaccaccaggtcgctcgacgggctggcgctggacgccgtccgcgacaacgaagccggcaccgcaaaaagctgctgctgctgagacgacgatgctgccgccggcgcaccaaccacgacgccaccgccgcgtcccggggacgatgacgcctcggcggcgcgtggcctgccggcgttgcacgcgtcctggtgctcgatgaagctctccaccctggagaagacgcggccgcagtcgcaggtgtggccgcgggtgccgcaggtcttgaggtgggccttgtagtcggagtggacggcgtaggccttggagcagcgggcgcacgcccactggcggtggccgctgtgcttgcggcggaagtgcttcttgatgccgacgaggtcgccgagcgcgtgggaggggtcgtggtggaggcacgtcggctccgggcacacgaacacccgcttccgcgccgcctcgccggcctcccgcttcagcagcttccacggcaccttgtgccgccgccggtgcatctgcaggttctggtcgcgctggaacccctggttgcagatctcgcacacgtaccggtcagactccagcagcgtcctcggcgacagcgacaccacctccgcgtccgggtctggcgtgccggctggccgtcgcttcttcttcgccgagccggcggaggcggtggcgatctgcagcgaccggaacggctccgtcgccgcaccggacgcatcctgcggcggcacggccgtcggcgcgcaagaactcagcatgatgtccgcctccgcgcgcgcaccgccggtgaccactcccacctcttcccttacaaccaagaattccccttcctcctccaacctagccaatctctccagctctgtgacggatgaaacacccgtcacagataacccatctctgaccggtatataagtcat

SEQ ID NO: 74202 - DNA, 195 bp, Oryza sativa
  Clone ID: PAT_MRT4530_74410C.1
atggcgacactgggcaatggtgagaccgcctgcgtggaggtacggggatgggtacacggcgataggaggaaggtgggggttgaccacctttgtgtagaggtgttggcgacaactctcctcttctcgtgcttggtagtcggcgacgggatggcgtctgtgtcgttggctactgcgcagatgagagaccacctgtaa

SEQ ID NO: 74203 - DNA, 351 bp, Oryza sativa
  Clone ID: PAT_MRT4530_74411C.1
atgccaccggcgtcgtcggttgcgtcggcggtggagaagctgcaggcggcggcgcaggacgcggcgaactcctcgtcgcgctcggcggccgccttctccgagcaggcgcaccaggtcctcgtgcccagggccgcagggagtattgcaagggctcgtctcaaagttgagtgtattgatatgttgcaaggggtctgtatttgtatagctctcgtgtcatacaagatgcaaccagaagaggcaatgtcgtgttgtctctctatcaacttgtacgaagatcagcgccgtcagctttgcagtcggtgttgtggtgggcttcacattgaagagaagactacgccggtgggctgctag

SEQ ID NO: 74204 - DNA, 328 bp, Oryza sativa
  unsure (1)..(328): unsure at all n locations
  Clone ID: PAT_MRT4530_74412C.1
ggacaaaatagacacatctcctagcatttatacaatcaaagcacaagtgtgacaagcttgtacaaatgagcttagtgctattgacattatccccnatcataatggcatatttctaaacctgcaactctaagagtggcatgaaatctaatccttccaaagatatcatctctagttctctactctgttctacagactagtcctacatggttcatgtaatcatgttcacatacaggctacaaaatagtctacagttctgcaccatccaccatccgacgattgcaagagagctaacacttcgttggctactgacgatagatcatggatgtgc

SEQ ID NO: 74205 - DNA, 400 bp, Oryza sativa
  Clone ID: PAT_MRT4530_74413C.1
ggggggccaaaaaattaccggcgggggaaaaaataacccccccaaatttggtttgggtaaaaaaaatcccaaaaggggggttgggggaactcccaaaaacccaagggaaaaaaaccccccccaaagggccccaggaagggggaattttgaggtttttatttccccaaaattttgactcaaaatttaaaggggcttttttgaccccaaaataaaattggggtgtacaggggcattaagggaacaaaaattccccgcaaaaaaagtccgggaagccggccacaaaggccaataacttttttttaaatttcaggacggaaaacccgaaaccaaaagggccccatgctgggcctcctttttggggggctggctctcccccttttgcaggaaaaactttgggaaa

SEQ ID NO: 74206 - DNA, 248 bp, Oryza sativa
  Clone ID: PAT_MRT4530_74414C.1
gataaccaatggaattgaatagcttattcttccaacaaaatacagtaaataaatcttacaactgggacaatgacaatgtgggcccacccactcaggcagcgaccaaaactgccaaccccaccccaacagctacccccaacaaccccacgccggctgggttcccgccgttcttcccctgcgtaaagtcgccggcggcgccagcgccggtgccggcgacgcccgggctcatgcttgccccgttcggcggg

SEQ ID NO: 74207 - DNA, 973 bp, Oryza sativa
  Clone ID: PAT_MRT4530_74415C.1
cccacgcatgcgggttttaaacaacttgatcaggtgatcaatcaaatcaatagaaacgatggctgcaggcttgcaagtgtttggccagccagcatctactgatgttgccagggtcctgacatgcctctttgagaaggatctggaatttgaacttgtctgcattgatacattcaagagagagcacaagcttcctgagttcattaagctgcgggatcctaatgggcaagtgacatttaaacatggtgacaaaaccatcgtcgattcaagggctatatgccggtacgtttgtactcagtttccagagggaaataagaccctttatggaacgggatctctagaacgggcatcaatagaacagtggcttcaagcagaagctcaaaatttcagccctcccagctcggccctcgtcttccatctcgcatttgctccccatctgaacattccccaggaccatgctgttattgcagaaaatgagaagaaacttcagcaagtcctcaatgtttatgatgagatactctcaaagaatgagtacctggctggtgatgagttcaccctggctgacctttctcaccttccaaactcacattacattgtgagttctgagagaggaaggaagctcttcactggcaggaagaatgtggcaaggtggtacgaccaaatctcaaagcgcgagacatggaagcaggtggtcaagatgcagagggagcatccgggtgcattcgagtaatggcctgatatattgcccaagttcatcgtgtccgttgtcgatcgatctggcttctgctgtcctgtgttgtcatcgtcgctagtttgcctgtcccctgcttatattgtcgtgtgaccaaataatatgaagcctcttcttgttgtgacgtagtttcataccatgtacctcgttgctttacaggtcatttgttttctcccttgtttagtgattaaataaaattgttaatcgacctggcagttctaaatc

SEQ ID NO: 74208 - DNA, 243 bp, Oryza sativa
  Clone ID: PAT_MRT4530_74416C.1
atggccgcgacatctacgatggttgctgaaaatttggtgaaggaggagaggcgcaccggggaggcggttgcggcgaatctgtcggtgacaacggggacaccgctgcttgtatcactgttgcctcagttttctccatcagaagccagttcctcgcaggaacaggaggcatcgatcaccaccgacgatgatcaccatcaagcggcgtcaattatcagtactgcgtccgcgccggcacatcattag

SEQ ID NO: 74209 - DNA, 201 bp, Oryza sativa
  Clone ID: PAT_MRT4530_74417C.1
atgggtttggcagagttcaccagagaattgagcacagtgcagtggaggaggcctctcgccggcactacggttgaggaagaccaggcgcggggaggatgcgatttgcggtgggaggatgcggcgcactgcagtggtaggatatgtgcggcaatgttggtggattggctcattgtgcggatgatggcgcgacgacggggttag

SEQ ID NO: 74210 - DNA, 2358 bp, Oryza sativa
  Clone ID: PAT_MRT4530_74418C.1
atgtcgtcgtcgtcgcggcggccggcgaggagggcggcgttgacggcgaggtcgtcgtacgacgagtcgctggtggacgccgagctggagtcctacctcgggaacgccaggtcgcggcggatcagccggctgcgccgcctctccgccgacgagcggcagcgggagacggagacggaggcgctaatagcgctctcgctgggcttccccattgacgagctgctccccgccgagcggcccctcctgccggcccccgtcgccgccgcccccaacgactacatcgtcgtccgcaaccacatcctcgcctcgtggcgcgccgacccgcgggtgccgctcccgcgctcgcgcgtgcaggagaccgtcgccgccagctacgacaaccttgtcgccgtggcgcacgggttcctcgcccgggagggccacatcaacttcggcgtctccgccgcgttccccgcctccccaccacccgatgcgccgcagcgcctcgccgcatccgtgctcgtcgtcggcgccggtctcgccggcctcgccgccgcgcgccagctgctccgattcggcctccgcgtgctcgtcctcgagggccgcgcccgccccggcggccgcgtctacaccactcatctcggcggggaccaggccgccgttgagctcggcggcagcgtcatcaccggcatccacaccaacccgctcggcgtgctcgccaggcagctcgggattccactccacaaggtgcgagacagttgcccgctctaccaccacgacggccgcaccgtggacatgaagctggacaggagcatggatctggtgttcaacacgcttctagaacacgccacccggctgcgagagtatctcaagaaggcagccgaggggatctcgctaggggaaggtatagagaggctgagacgcttttacaaggtggcgaaaagcgtcgaggagagggaggttctggactggcatttggctaacctggaattctccaatgccggctgcctatcggagctctcgctcgcgcactgggaccaggatgaccagtatgagatggggggagaccattgcttcctagccggagggaatgcgaggctggtacacgcattgtgcgatggtgtgccggtgttgtatgagaagacggtgaagcggattgagcatggggaggatggggtgagcatcaccgtggaaggaggccaggttttcaaggctgacatggcactctgcactgctccacttggagtgctcaagagcaggagcatcatttttgaaccggagttgccagagaggaagcttgaagcaatccagaggttggggtttgggttgttgaacaaagtcgccatggtgtttccccatgtattttgggatgaggagattgacacatttgggtgtttgaataaggagaggagcaagcgtggcgagttctttctcttctacagctaccacactgtctctggtggtgcggtacttatcgcacttgttgcgggagaagctgctttggagtttgaaaaggttgatcctgctgtagcacttcatagggtccttggtattcttaaaggtatctatggccccaaaggtgttacagtgcctgatcccattcaatcatgttgcacaagatggggtagtgatcctctttgctcaggttcatactctcacatcagagttgggtcttctggcactgactatgatattctcgctgagagcgtcaatgaccggttattctttgctggagaagcaacaaatcgtgcataccctgcaacaatgcatggagctttattgagtggactaagggaagcttccaagattctccatgcttcggaaagtagattgaattctgattataagaagtatgccctgcagaaaagcatcagacttataaataatgtactggacgaccttttcatggagccagatctagaatgtggaagattctcgttcgtgttctcctatattacacctgaggaggaacaggctccgggattggctaggattacacttgagaagcctttgcttctgccttccaagaaacgcaaagtaaagggtaatcagaaggatcaggaccctgtggctgagaagatagaccaagaggtgttttatttatacgccaccgtctcgcaagagcaagcaactgaactattggaatgcgacaatgataaaagtaggatagcagttctatgcaaagatcttggtgttaaactaatgggttacgacagtacatacgatgtactattggattcttttagggaggctactattgttttcatcttcccccttttttttctagatgttgttcctatattggtatctggcagtttatgtgttgctgaaatggtggataagctcacttctggaccagtttgtttggcttcattaaattga

SEQ ID NO: 74211 - DNA, 1278 bp, Oryza sativa
  Clone ID: PAT_MRT4530_74419C.1
atgaccgtccggctcggcgccgcgacttgcgtcgtcgcctcctcgccggcgacggcccgcgcggtgctccagacgcacaacgccagcctcgccggccgcggccggcaggacgcgtggcacgccggcggccacgcggagaactccgtgttcgtcctcccgccgggccgcaagtggcgcctgctgcgcaagctcggcgcggcgcacctgttctcgcggcggaagctcgccgagctggcgccgctccgcgacgagatcgtcggcggcctcctccggcgcgtcgccgagcgcgcggaccaccgcggcggcgcgccggtcaacgtggggcgcctggcgctcgcggcgaacgtggagctgctgtggcgctccgtgttctccacccgcctcgacgcggcgacgctcgacgtgctctgcgacgtcgcgcgcgaggccgccgttctcctcgggacgcccaacgtctcggacttcttcccggcggtcgccgcgctcgacctccagggcctgcgtcgcaggctcgccgagctgatgaagaacacgtaccggctggtggacgcgcagatcgaccatcggatgcgctgcagggagttgcgcggcggccgcggcggcgaggccatggacttgctcgacgtgctccttgacatgtccgagcaagagcgggaagatggcgacgacgaggtgataaaccgtgatttgatgagggcgttgctcacggatttattcgttggggggagtgactccaccgcaactactgtagagtgggcaatggcagagttacttcaaaatcctgaaatcatgaaaacgttacaacaagaaataaaaatggttctgggcactagatctcaagttgaagaatctgacattggccaacttccctatctccaagcaattgttaaagaaacactacggctacacccaattgtgcctttgcgactatacgaggcagagaggacagtagaaatagaaggacatacaatccccaaagggagcaaagtaatagtgaatgcatgggctattcatcaaagtgttaaagtttggatacaaccagaaaagttcctccccaagagattcattacaaaagatatcgattttgcagggaggcacatttgcattggattgcctcttgccaaccgaatgctgcacatgatacttggctcgcttatgcaccaatttaaatggacaatgcctcaaatggtgaacaggaatggtttagacatggctgagaagtttggattagcggtgtcaatggctacccggccaaatattatagctagaaaaatgtga

SEQ ID NO: 74212 - DNA, 1870 bp, Oryza sativa
  Clone ID: PAT_MRT4530_7441C.1
ctacatgatgcccatgctgttagcgtgctgtaggcgacgccgcgtggcgtcgacgacgtcgaggggatcgtcggcgtcgccgccctcggtgacgacggaggagacgtagctgcaggcgacgtcggagctcatggcggccggtagtggcgcccccgccgccgcggcgcggaacttgtggcggcagctgaagcaggtgatctggagcagcgtggcgttgacctgccgcacggcgtggtcgcggagcgcgtgggcgcggctcagctccacctgcgcctggtgccgcattcgcctggcggtcgccagctcctgctcggcgagctccacctgccgcctcgcctgcgcgcgggcctcgccggccgcctccttctccgccatcgcctgccgcagctgctcccgcgcctgctccttcgcggtggccgcggccgacgcctcgtcgcttgtcccagccgcgcccatgacctcgtcacggccgatggagagctgcagctgcgtggaggcgtcgttacactgggagacacccgtcgggtgatgctgatgcgccgccgcgtagaagcacgcccccatcccgcccggagcggcggcggcgccacccgcgttgaacggcggcatgagctggagctcgaggttgtgcgcgccagcgcccccgcggtaatgatcgtacgacggcggcggcggcgacggcgccatgtcgaaccggccgcggaaggcggcggccttggggctcggcatcgagggcgccccggccccgggccaggcgacggggctggcaaccacgtcgctggacgggctggtgctcgacgcggtccgcgacagcgacgccgccgccggcgcctgcaggtccagctgcttctcctgctctaacaccgctacgccgccgcacgccgccgtcgacacgttccctccctccgccaccgccgccgcctgcccgcggctggcattgcacgtgtcctggtgctcgatgaagctctccacccgggagaagacgcggccgcagtcgcaggagtggccgcgggtgccgcaggtcttgaggtgggccttgtagtcggagtggacggcgtaggccttggagcagcgggcgcacgcccactggcggtggccgctgtgcttgcggcggaagtgcttcttgatgccgacgaggtcgccgagcgcgtgggacgggtcgtggtggaggcacgtcggctccgggcacacgaacacccgcttcctcgccgcctcgccggcctcccgcttcagcagtttccacggcaccttgtgccgccgccggtgcatctgcaggttctggtctcgctggaacccctggttgcagatctcgcacacgtaccggtccgactccagcagcgtcctcggcgacagcgacaccacctccgcgtccgggtctggcgtgccggctggccgtcgcttcttcttcgccgagccggcggaggcggtggcgatctgcagcgaccggaacggctccggcgtggtcgcctcgtccggcggcggcccggccgtcgtcggggcgcaagaacccaacatggcggcacaggaagaggcaaaataatccctcttttttttcctgttcttgtctgatcacaaactctcagacgatgtgaacagaatgcattgcactcgttcgttctatatagaggacgatgaagaacaacaagagatcgataggcaaaacaataaactggagggaatgggagtactataatatactactcctaccaccatgagcttgcaaggaatcaacaagatgtgagagagggaagaaggaagaaagggtcttggagttggcttttgtgggctgctacagagacaactccaaaggaggagagagagagagagagagagaggaagcagctttccaccggctttaggttttagcagc

SEQ ID NO: 74213 - DNA, 342 bp, Oryza sativa
  Clone ID: PAT_MRT4530_74420C.1
tggttggagccaggatactgtctgttaaactagtcgataaaacagatctatgggacacccctgaacctggtaccagaccagatccaccaactgaagatgcagaagatatggtattcaatgttgcgtggttgataggagggacccctttggttaatgttggagagctgctgatggacgtcagccaggatcttgcaatgtttttagaacagtttaagcctgctaaagttaaattacttaatacttccatgatcattgtctatggtccctgtctaatactctattgttctaagaagaccttcttttttcttgtctctatttcttcctgtttttctcttttttttt

SEQ ID NO: 74214 - DNA, 1305 bp, Oryza sativa
  unsure (1)..(1305): unsure at all n locations
  Clone ID: PAT_MRT4530_74421C.1
ttttttttttttttttttggccaggtaaaaaaatgcccttatctaaaaaaagtgatgatatatccccctcaaagtagattctgacgacaccccacaacaacggataccttcccttcgtacctccgtaccagaaaaaaaacctaacttcctaatgctgcaacagaagtgcntttttttaagcacggagggagtattaaggaacaaatgcattggaatgtaacttcacgaaaatatggaacaaaaaggatgctgcaacagagacggttacaggggccagataagcttacagatttgatatcctataagtctcatgttacaactatatacgtgcacatatatataaccggtgagtaattttacacatcaactgagttctgggactatattaaagcaaatagccaatagagcccatgcaaactccataggcagcctcaggccatctgggctctggtgcaaataggtatatctaagggctccccaacactcaatctggaatggtgaagttgtaggtgggtatctctcaacaacttttccagttttgtccaccaagaacttctcaaaattccatttcacaagatcacccaaaaatcctccagcactcgacttaagaaacttataaataggggctgtgttaggcccgttgacatcaaccttgtcaaaaataggaaattcagctttaaaccttgtacaagcaaactgcttaatctgcgggtttgacccaggttcttgtgcaccaaactgattgcaaggaaatgcaagaatctcaaatccttgagtcttgtacttctcataaagatgagatagttccgtgtaatttgctgttgtcagcccacactgagatgcaacattaacaattagcagcgcccttcccttgaacttgctaagcgcaacatcttttccatcaatgtccttaacggtgaagtcgtggacgctcttcccggtggcggcggtggcgtaggagacccctggcgcccacctccgcgacggcgccgcggcgacgacggggacaggcaccgccgcgctgctcccgtgcgccgtcgccgccccccagtgctgcgccggggggaggaagcggccgccgttcccggtggcgggggtggcgtcggcgacccgtggggccaaccgccgcgacggcgccgcgacgacgggcaccgccgcgctcccgtgcgtcgtcgccgccccccactgccgcgccgggaggaggaagcggcccgcggaggcggaggcggaggcggggcgcgtggccggcgcgaggcaggtgaagcgggccgcggccgccgccgtggtggtggtggtggacgccat

SEQ ID NO: 74215 - DNA, 684 bp, Oryza sativa
  Clone ID: PAT_MRT4530_74422C.1
atgtcgtcgaggctcgcatctcgcgccgcccgcttagctgcggtggcggcatctcgcgccgcccgcttagctgcggcgtccgcatctcgtaccggggccggggacccctcagcgcgggccaccgccactgccgcatctcgcgccgctcgcttagctgcggcggccgcatctcatgccggaggccccacagcgcgcgcgattgcggctgccgtatctcgcgccgcccgctcaatctcctcgaagctccttgacgacgacatcgctgcccgcctctccttccgctacagcaccgagcccccagatgatggtaagtgcgttacagccaaggacctcgagtcagatcaagccgtatgggccttatatgagcgctggtgcaagtcatacaacaagaagcgtgaccatgctgagatgattcgccggttcgacatattcaagctgaaagcatcgcttgtgcacagctggaacaattatgttcatgaagacaaagaggaattagctcgtgcaaaaaagagaagggatttaggcaaacctgtcgatccttggtacctacaagaggaattaggcccatccgccgatgggggagacactgttaaccaatactggcggggcatgttgaaggaaaatgaccaagggatggatctgcctgacatccaaggaggaaaaaaaatgagcactgaagattga

SEQ ID NO: 74216 - DNA, 494 bp, Oryza sativa
  Clone ID: PAT_MRT4530_74423C.1
ggggacaggggccagataagcttacagatttgatatcctataagtctcatgttacaactatatacgtgcacatatatataaccggtgagtaattttacacaagaaaaaaatgatatataatcaagtaaaactctaattatgaggcaaggcatatgtacagaagagcttagctgaagtgtgacctctagtacttatgccgcaaggagtttctggatgtccttctcaatctggaatggtgaagttgtaggtgggtatctctcaacaacttttccagttttgtccaccaagaacttctcaaaattccatttcacaagatcacccaaaaatcctccagcactcgacttaagaaacttataaataggggctgtgttaggcccgttgacatcaaccttgtcaaaaataggaaattcagctttaaaccttgtacaagcaaactgcttaatctgcgggtttgacccaggttcttgtgcaccaaactgattgcaaggaaatgc

SEQ ID NO: 74217 - DNA, 477 bp, Oryza sativa
  Clone ID: PAT_MRT4530_74424C.1
ttttacatgtcaataagttttgtgtgtaaatcaatatgctgtaaggatcttctctggcacgcaaagggtcctattaaatgcaagttcttcctctggtttgcatttcagcggcgctgctggacagccgacctcctcctaaagctaggcttggatagtcactcggcctaccccttctgcgcccaagagcttgagacggcgaaccacatcctcctcgattgcatgttcgctcggcaagtttggctccgtgtgctgtcgcctcttggttggactaccctctctccttcccgtggtagctgcctctaggattggtggccttcttctagggctttcttgccggggcatctccatgccggtttcgattctatggtcctcctggtctcttgacaactatggaaggagcggaactctagagtttttgactttgcgttgtcctcggtctcgggggtccttgagtccatcctttatgagggccatcta

SEQ ID NO: 74218 - DNA, 426 bp, Oryza sativa
  Clone ID: PAT_MRT4530_74425C.1
ttttggttttttttttttttttttttttttttttttttttttttttttttttttttttttttttttttttttttggggggaacgggaaaatctttttccacgcgaacaatgtatccacggggctttgcccatgtccccaggaaaaccccacaaaaagcctaaaattccggggcgtcatggaaccccgcgtaaggggggagggctagcctccattgatcccaccatttccccggggattaacccctcaaccgggcctccggggagcccgagtcccaggcccaagcccattcgtccacctttcctaccccccggttgttgggccccccaaccattttacgttccccggggcggggggccgggcttttacccctaccggggttgacccctggaacccccctgatgcttttgcggggggaacccccctcc

SEQ ID NO: 74219 - DNA, 740 bp, Oryza sativa
  Clone ID: PAT_MRT4530_74426C.1
attccattatgatggccggactactgaatgggatgaatttgagtggtctaaaagagctatccatgtgagtgtcaggaagcagactaagtggtggtatgcaaagcggtttttgcatcctgatgttgttgcccgatatgactacatattcatctgggatgaggacctaggtgttgagcatttcaatgcagagaagtatattgaacttgttaggaagcatgggctagatatctctcagcctggtttgcaacctgacaagggactgacatggcaaatgacaaaacggcgaggtgatcaagaagttcacaaagttactgaggagaggccaggctggtgcactgatccccatctgccaccatgtgcagcatttgttgaaatcatggcaaccgtgttctctagggatgcatggcgctgtgtctggcatatgattcagaatgacttggtccatggatggggtcttgatttcgctctaaggaaatgtgtggagcctgctcatgagaagattggagtcgtcgatgctcaatggattgttcatcaagctgtgccatcacttggaaaccagggcaacgcagagaatggaaaagcaccatgggaaggggtaagagcacgctgtaggaaagaatgggagatatttcaaacgaggctggccgatgccgagaaggcatactacttatcacaaggaatcacaccacccaactcgaccctagtttagaagaacacactaacacgacacgacctcacct

SEQ ID NO: 74220 - DNA, 652 bp, Oryza sativa
  unsure (1)..(652): unsure at all n locations
  Clone ID: PAT_MRT4530_74427C.1
ctggtcaaacacaaaaggtacgtacacttatttcttcccgtacgttacatttcgaagccagctatgcatggttcggttcgtcgactgtaccatacgtagcataagtccataatttggtttagatttgctttgctccggatcccacacttccaaaatgtaaacacgatcatactcgcaagaaacttcatttctacaaaaactgacacacaccgaagacatgctctcttttgtattacaccttcacaagaatactagactggtcgtgttgatctgactggcaaggtcttcctgtggatgctcatgaacttggcaacaaattcttccagtttcaacagtgcacttgcgccaacgggcaatctcttatcatagtaggcatgccaataataaacctccctctttatactagattggattcccttcagaaatagctctgcaagcttctggagtattagtttaggaggtacaaattcaaccaagagtttctgaagcttgcctctcaccaaaaataaccttttaggagaagggtcatccaatatttctgcagcaatttcctgcagaacattctcnccatcctaatggtatagctntgtccatcaatgaaggggtaattgttggctttgcctcgtgccgaattcggcacgaggcctcgtgc

SEQ ID NO: 74221 - DNA, 380 bp, Oryza sativa
  Clone ID: PAT_MRT4530_74428C.1
tcgatattcggcagttagggcgctggagaagtcgattgatgctataagcaccgcaagagaaagcccagtcgacaagaacaagggcaacggagatggcctgcacgaagcagaccaacggtaagttcaccgggggatgggacccgaggacgcatctagtgacccaggcggataggaaaagtgatccgaccacggggggggtgaagaagccacggccatgcaagccgaggaccgtagcgctgaccgagatgcgcaggaacgagacgagtcacggacctgctgatgcggaggatcacgtacaacgcatcatccgccagaacgggcatgactagaagaccgagctgggacaccagaggcatgccgcgatcgcccttcgggaggag

SEQ ID NO: 74222 - DNA, 2249 bp, Oryza sativa
  Clone ID: PAT_MRT4530_74429C.1
aatgattaggtgacactatagaagagctatgacgtcgcatgcacgcgtacgtaagcttggatcctctagagcgggcgtgcgtgccccagatcgcttacttagccagacagagagagaggagagagagggaggagaggttctcgcggcggcgaatgattggggcgcatgtgtgggacaaccagatcctagctgctcatcgcgatacaaatcccatccccgtctcccccccaattccatcgctgtcctccaatctctcctctctcccaatcatcgtctcatctgcgcgccgtctctccccccgattcggcttcgtccccgccgccgtactgcgccgccgccggtgccgacctgctgctgctgcgggggagatctgtccgggtgtgcggctgattcgctttccgtcgctgcagctctacaggtttcttcggcagcaactgtagtagaaaagaaagaggggaagattcgcagttcatatggcaaaacctgctaatagcattggccgtagcacgccaagatcaaatgaggggatgaggctcatattctcggcagttgttggtgttatgttgggatacttgtttggggtttccttccctacagtaaatataaccaagcttcacttcccttccagtattatctcctatatagaagataggaactctggcatcacaacccagacattgttaaatcatgcgtgggcatctgcaaatcgtcataacaaaaacaattccgattcaacctctgaagaagttcctaagatttatgttcccacaaaccctaaaggtgctgaaaggctcccaccaggcattgttgtttctgaaacagatctttttccacggagattgtggggtgatcctagtgaggacctgagtagcgaaccacggtaccttgttacttttacagttggaattacacagaaggctaatattgatgctgctgtcaaaaagttttcagataaattcactatcatgctattccattatgatggccggactactgaatgggatgaatttgagtggtctaaaagagctatccatgtgagtgtcaggaagcagactaagtggtggtatgcaaagcggtttttgcatcctgatgttgttgcccgatatgactacatattcatctgggatgaggacctaggtgttgagcatttcaatgcagagaagtatattgaacttgttaggaagcatgggctagatatctctcagcctggtttgcaacctgacaagggactgacatggcaaatgacaaaacggcgaggtgatcaagaagttcacaaagttactgaggagaggccaggctggtgcactgatccccatctgccaccatgtgcagcatttgttgaaatcatggcaaccgtgttctctagggatgcatggcgctgtgtctggcatatgattcaggtggagtggcactacatgttcaactttaacattgtttataacagtggtattcttacacactgtcttctgcagaatgacttggtccatggatggggtcttgatttcgctctaaggaaatgtgtggagcctgctcatgagaagattggagtcgttgatgctcaatggattgttcatcaagctgtgccatcacttggaaaccagggcaacgcagagaatggaaaagcaccatgggaaggggtaagagcacgctgtaggaaagaatgggagatatttcaaacgaggctggccgatgccgagaaggcatactacttatcacaaggaatcacaccacccaactcgaccctagtttagaagaacacacgaacacgacacgacctcacctgtgatggcaaggtttctatttcggcaacctagctggaccttccatattattcagtacgttcatcaaagcaggtgcctctatatagagctacagttcctttgccagatttgtacatggaaagctctcgtggatcccacgactactgtttaatcctagctttggttcagttggttctagtctcattttgtttttgggtagtgtgactagctgcgatgtaagtaggcgatgtagcatggattctgagggccgagcactttgtttatacaatctgttgtatcattgactggatgcaatgttggcgttgcattgattcccattacttgtttcatcatgtaaattattcagctggtcttactgttttatggagttaaggtcgagcattttgttttaaaaaaaaaaaaaaaaaaaaaaaaaaaaaaaaaaaaacaaaaacaacggagaaagaggggtgatcctagtgaggacct

SEQ ID NO: 74223 - DNA, 446 bp, Oryza sativa
  Clone ID: PAT_MRT4530_7442C.1
tttatatacgctacttatacgtcagagatagcttgactgttctaggggtcttgcaggcgggagcgggccaccgccgttgcggtggacgccatcgagcgtggaatggcgcgctggcgataatggagatggggtcctgggcatgagcggtctagcgctcctcgcaatgctggtctctcatacagaagctataggactggctcggcaaccacagcctgttaatgaccgatgcatctactgctcgtggttgaccccctctgagatggctagctacatgaattgcaggtggatttaccttttaacgcagacttggagctctgacacatattactgtagtgattgcgtgttgtgaagtggctacaccaatggccagccgtgtgtggcatatgtaatggatcatggtggtggcgacgtcaccttttgtgaggaagtacaagagtttatttcat

SEQ ID NO: 74224 - DNA, 843 bp, Oryza sativa
  Clone ID: PAT_MRT4530_74430C.1
atggccgcgtccgccggcctgctcgccttcctgtccgatgcgtcggggcacaagacgctactgctcgcacacccaatcacgcgcatcctcacagcgctccccatcaccccaaccccgcgcctctcccccaccatcggcctcgttgccggcccgacctccatcattgccgtcgtggccagggatgaccttgtgtgccctttcgccgtcaagaacatctccgatgtggacacctgtggatgttgcgcgacggcggcggtagcggcggccacggaggtcgcgcagatgccgccggaggtgcacgcgcagttcgccgcggcggagggtgggcacgggttcgagtgcgcggcgcacggcgactatgtcgtgctcgcgccgcgcgggcccgtggcccgggcgcccacgagcgcgctcgtgttcgactcccgccgcaacgagtggtggtgggcactgctgtgcccgtacgtcgtcgtcgcgcatcacggcagcgccggcgggacgggaggaagaagaggcggcgacgacacgacgacggtgaggcggcagagcgagcaggtggagtgggagccgagccacatgtcacgcactcggcgtggaagccgtgccgcaccaggggaggaacctagcctcatcgtcctcctcgagctccgcgaggcacaccgcgtacttgacaccgtcgtcctcctcctccttcgcagccggcgccgccatgctgcaactgtacaccgtgaccggcagcgaccgcaacacctctgggtcaacccctcctccccttccaccgtccccgccgctcccagagtgccgccgctgcggccgcccccgcccacgcccgctggagaaaagtga

SEQ ID NO: 74225 - DNA, 1126 bp, Oryza sativa
  Clone ID: PAT_MRT4530_74431C.1
atggctctccccaccacctcccccctcgccgcggccgcagcgaggccctgcgcgttcccgacgccgtggagatgtcgctcgccccctcttcgccgcctcccgcacgtctcctgccaggcgaaccgagggggttctcgggacggcaattcgttgagcacctcggcggcggcggcggcggcggcgtcgccgccgccgaggtggcgtgccgcggtgtccgcggcgctcgcggcggcgattgtgtccgcggcgccggcctacgcggatcttaacaagttcgaggcggagcagcgtggggagttcggcattggctccgctgcgcagtttgggtcggccgacctcaagaaggccgtccatgttaatgagaacttcaggcgggcaaacttcactgctgctgatatgagggagtcaaatttcagtggttccacattcaatggtgcctatcttgaaaaggctgttgcttatagagcaaattttactggtgcagatttgagtgatagcttgatggatcgcatggtgctcaatgaagctaaccttacaaatgctgtgcttgtacggtcagtccttacgcgtagcgatcttggtggagcaatcattgaaggtgcagacttcagtgatgctgttattgacctgacacagaaacaggctttgtgcaaatatgcaaatggaacaaaccctttaacaggggtcagcacacggaaaagccttggatgcggcaacagtcgccgaaatgcatatgggagcccttcctcccctcttttgagtgctccaccacccaaacttctggaccgtgatggtttctgcgatgaagcaactggtatgtgtgacgcaaaataaaagaagaattatccagcatactgcagaaattgagcactgaatgctgtatatacattggagactgaacaaaagacaaagcagatcggttcaggattcagagaaattgttctcgttttgcgaatgttgtagcattgcagagagatcaggtaaactaggactgtagacaagttatgtgtactgaacgactgatgccgtatatatatgtatatcaaagtgttgccgaattcattccttgcatatctactggttactgcttgcactagctaataaccaatggagtgcttctgtcagt

SEQ ID NO: 74226 - DNA, 178 bp, Oryza sativa
  Clone ID: PAT_MRT4530_74432C.1
atggagcaagaacggtctaactcggcggggattagaatagcaagagtttcacccgccgttcagtgcgcggattttccacccgtctccggaggtaatggagcgggcgtctttggcttttctatccacacctttggttttggtgcaaaagacggcttcgactgctctagcttcttggccg

SEQ ID NO: 74227 - DNA, 166 bp, Oryza sativa
  Clone ID: PAT_MRT4530_74433C.1
gtacttctagaacgcaagcggtcatccttctttaaaagaagatggatattcatacgacgcccgtattcagacctattacttatacaaggcgctaaaactctacaggttctaccccatggactgaatggacggagccaaagcaacagcaaaacgtcacggaagagga

SEQ ID NO: 74228 - DNA, 303 bp, Oryza sativa
  Clone ID: PAT_MRT4530_74434C.1
gggacaggggaagaaatctgaaagcaagtcacaaaatcctacctttcataagcagaacaactttactaccactttccaaatttacagcgcacagtatttttttaaacaatggacactcctttgcatttgacgcctacgtacattataattaaaacccccccctcgtttgtcttggggcaagctcgggctttatttcgggcttttttccgctgccccggaagtaaaaatacacaccctggataacccacatgcttgtcagagacttccggcaaaacattgcgaattcaataaaataaaaccccc

SEQ ID NO: 74229 - DNA, 631 bp, Oryza sativa
  Clone ID: PAT_MRT4530_74435C.1
gtcacaatatgaataactcaccctatatcacagactcgcagtgcgagaaaggctgttaaaagttctagacggtccactgctttataatttgagtcaggtgcattaggaagtaatgatctacagggaattgtagcactatacacctacctgaaacaaatacactagcagtatacaaaagttgtatgaagtggcattgaggcaataccaattgtttgtcatatggttagtactaccacgagtttctccacacaagaattactcagcagaaagatttcagggtcaagatgctttaacttgtgattctttaagctgttctttcaacctcagaacctcacgacagtagaaagaaaggtccttcttcagcttggtggatgcttccagatactttgtgtccatcagcttcatctcatttattgcttctttaagccttccacggtgtgcatcaagttctggttgcatccaccgaatctgcatcctaagctttgtgttctctttgttataagccgaagcatcatttttcattttggcttccacgatagatatcctagaactcaactcatctatagtagctttggcctgtattaactttttactatgattctcttttaaaacctctgattcattgatgact

SEQ ID NO: 74230 - DNA, 2874 bp, Oryza sativa
  Clone ID: PAT_MRT4530_74436C.1
atggccgcagtcatccctaagctgagcaagctgctcatggaagagtatggactacaaaatagtgtgaaggaggggatcacatttctcaattctgagcttgagagcatgcaagctgaggttgacaagatctcaaaggtgccactagatcaacttgacagtcaaatcaagatttgggctagagatgttcgggagctatcttatgacatcgaggacaatgttgatacattcatgctatgtgtcgatgatcttgaggcacgcaagaagcatgacttcacatggttaattgacaagtattgtaagtcattgtctgagctaaagatccaccacaaaatagccaatgatatcaaacatgacattatcccagtaaaggaagttgtggaacgacatgataggtataatgctgatgatgttgattctaagcttccaacaattatagaccctcgcatcttgaaactttatgacaatgtcaccaagcctgttggtgttgacaaggcaagtggtgatctaattaagaagttgtccatggagaccgatcagtcatcccagaagctcaagatgatatcagttgttggatttggaggattgggcaagacaactcttgccaaagaagtttttggcatgcttagagtgcaatttagctatgcttgttttgtttcagtgggtcggaaacctgatataaagaaagttttgaagagcatcctgattgaagttaataagcagaagcacatgtccgatctagcaaaactaagcgaaagacatctgattgatgagatccgagaatatctcgaaaacaggaggtatttggttgttttggatgacatatgggagatatccacatgggatattattaaatgtgctatcgtagatagtaattgcggaagtagagtaattgcaactactcgtatttcccaagttgctgaagaagttggtgatatttataacatggagccactttctgatgataattccaaaagattattcaatagaagaatatttggtgctgactgcataggtacaactaataatcaatcaattgaggcaatggaaaaggtattaaagaaatgtggtggtgttccattgtctattattacaatagctagtttgttggttgataaacctctagaggattggtctaacgtgtttgactcaattggttttcggctagaagataatgatggttttcagaacacgaggaagatactatcttttagcttctatgatatgccttcatacctaaagaattgtttgttgcacctaagaattttccccgaagattgtttgattgagaaagagtctttgatatggaaatggatagccgaaggcttcgtacatgtggaacaaggaaaagggttatttgaggtcggtgaaagatacttcactgagcttattaacaaaagcatgatccaaccaatggatttcaacaattatgagggcaccttggatggttgccgcatccacgacatggttttggacctcatccgcatcatttcaactgaagaaaactctacaacagttttggatagaatgcatgaagagcacaacacatctctagtgagcagaaatgtccgtaggttagcactgcatattagttggaatcaagatatagacaataaccttcctgtggacatggcacgtctcaggtcattcaatgcctttgagtgtcctacaagcatgatgcctccacttctggacttccatgctctacgtgtgctagcactggaagattgtgatatcaccggaggttactttctcaagcatcttgggaacctacgacagttgaggtatctaggaatgagaaacactggtaaagttgagctcccacaggaaattgggaatcttaggcacttgcaaacattggatgtcagggacagttttcttgatgcacttcccgtaactgtttatgaactaagcaagctgctatgcttatgcatggactcattcactgaagttcctgctgggctcgggaatctgaagtccctacaagagcttcgggtctatgtatcggatgacagctgcccaaactttgctgcggagctgctcaaactaactgatctgaaaattctccacattaattggtattgggaagtagacgaggtctcgctgaaggatttggtggagtctctccgcagcctgcgtggaatcgaggacctagattttttttcctgttcagatgctgagatgagtggctgggaaggttgggagcctccccggcagctgcgcaggttctctatagacagtgtccgtgtcaccctgccacggttgccgtcgtgggtgaactccacttgcgtcccacatctctcccacctggaccttcgagtgaaggccatggagatgcaggaccttgaagccctcgcgagaatatcagagctccgcttcctctctgtgaatgtcgaagcaggattttcatggaccgtccccggcggcggattattcccaaacctgaggcgttgccacacggacattgcgctcacatttttgcatggggcgatgccgatgctcatggagattgaattgtgtgtggtggcatccgggggtggtgccaccagctatgacgttggcttggggaacctcttactcctgaagaccgtggaagtttggatagcttgtgagggtgcgacggccagtcagtggctgataaaggaagacaaagaagatggtgatgatgaggatatttcagcaaccgaccaagagttgtgtgatgaaggaggcaaagaggacacggctttcagattaattggcgaaaataaacacacccttgcaccggcgagaggaggagctcctgctcggcagcagggcggaggagctcccttctccggtgagccattttctgggccagcgtcaaggatgggggcgccgagccagctggcgaggtga

SEQ ID NO: 74231 - DNA, 4428 bp, Oryza sativa
  Clone ID: PAT_MRT4530_74437C.1
atggagcggatccacgtcgccgtgcgggcgcggccgctcacggcggaggacgctggaagcagcccgtggcgggtctccggcaacgccatcgcgctctccacccagccctccatccgcttcgagttcgataggatattcggcgaggagtgccgcaccgccgacgtctacggggcccgcaccaagcacatcgtcgactccgcagtaagaggtttcaacggcacagtttttgcatatggacaaactaacagtgggaagacttatacaatgagagggtctggtaatgaacctgggataatacctcttgcagttcatgatctattcaggactatcgaagagcatttggacagagaatttcttctccgcatgtcttatatggaaatttataatgaggaaataaatgatcttcttgtcccggaacatcggaaattgcagattcatgaaagcatcgagaggggcatatatgttgctggcttaagagaggaaattgttacctgtcctgaacaagtactggagtttatgtcatttggagaatctcaccgtcatattggggaaacaaacatgaatgtgtacagcagtcgttctcataccatatttcgcatggtaatcgagagtcgagaaaaggttgatgaaagtgaagcgggagagtcgtgtgatgctgttcgagtatctgttctgaatctggtagatttagctggttcagaacgtgctgcaaagactggtgctgaaggtgtgagacttaaggagggctctcacattaacaaaagtcttatgacccttggtacagtcatcaagaaactaagcgaaggcatagaaggtcagggggggcatgttccttaccgagatagtaagttgacaaggattttgcaacctgctctgggtggaaatgccaatacagccattatatgtaatataactcttgcacaggtccatgcagatgagaccaaaagcagcttacaatttgccagtagagcattacgtgttacaaattgtgcatgtgttaacgagattttaacagatgctgcattattaaaacgccaaaggaaagaaattgaagaacttcgagcgaaactaaggagtgaactggaaaaggagagaatttctttggagctggaggaggaaaagaaagccaaagaacagcgtgataagaggttgattgagcaagcaaagaaaattgaaaaccttagttcattggtattaaattcagaaagggatgatagaactactgtttctagtaagaacaaaagacggttgacatggtgtcctggactactctctagacaatttgatggtcaggttttagagtctgtgcaagaagaccctccgagcagcacagttaggcatggacgtaatatggagatgccactgcattttgaagagctaatacaagaaagctgtgaaagcagtattaaacattatactgatgcttactcatctggtagtttatcctgtgaagatgattctcttccagattcacatgctttgctacatgttaccagccgaagaaagccaaatacgatgaaaaaatcagatcaagaacagcttatggggttggcgagtgaacgaattattccccaagaacttaatgactggaaatacaccacacaaagtcaggaaaacatcaaagcttgtgttaatggtttatctgctcgagaatcagaagcaattcttgtcattaagcaacttgaagatcagataaagttgctggagttagagaagagttcttttcaaaataacttggatgatgttcttgaattagcaactcagcagaaagcttctttccatgagaagtacgaagagcttcagcagaatgctctggttgcacaagaacaagctaaaattgctaatgaaaagctttccaaacaagaagcagcatatgaattccttactggtatatttgtggagactgaaagcatagctgtgcaaatggatcaatcaacacgctcagttgacaatgctctttctttcattgaagagctcttccagaatctcttcatgatggccaaaaacttcactgtaagcatcgacaattaccaaccattttgctccattatatatattgacctagtgctatggactggatatggtaagggtccgaagatcggtgataggacactcacccttgcaccagcagggcttctccttgctgagctaaaagaggttgaagcaaagcagtttgtttgtggagatattacacagttcagttctgtcattagggattacgagaacatttcaaactgtttgcgagaaaaactcagcaaacttgaaatggagaagaaaatattagatgaacaatccctagatcagaaagatgaacttcaacggttgaaatctagcttagaaagttgtgagaaagctatggaggattgtaatattcaaaatgagctggagaaagatagcattctatcggagctcctaactctccaaaaggaagtcgtatacttgtcatcatcttctttgatgaaagagaaggagtctatccgaaaggaacttgacagaacaaaaacaaagttaaaagagaccgagaacaaacttaaaaattccattcaagagaagataaaacttgagagtgaaaaggctgaggcccagagagaaataaagaagctacagagccaaaggactcttcttgaacgtgatttacggaaacgtgattcgtttactgttgacaaaagacatgaacagagtgtgaagtcgaaggagcttgccggtatctatgatcaagctgtccagattcaggaggactacggaaagcttgagatgcatgcttttgatatggaggctgaaattgcttcgttacaagaagctttagttactaccattgcagaaaaggaagaagcattatctagagtggagcttctcacatcagcagtggaagatcttgaaagtaggttgaattcagcagaatcagagactagttccttgcttgaggagactgctgtcttgactaggaagttagatgcatctgaatctatctctaaaaaacttgaggcttctattagttctttatcaagggaaaaagaagacatgggaattgaacttactgatgttcttctggaaatggagtctgaaagatcaacgtggactgccaaggagaaagcttatcttgaagccaaacaaaaactgaatatctgcaataagaacaattgcaaattatcagaagatttgattaaggtccagatccagcgcatctctggcgggttccgcgcgtctccctggcacgagaggctggagttgcggcggcggccgacggcggtggtgaaggcagcaagggggacggttggatctggcccctccaggtccagatttgggtgtgtcctagtcggggttgggcgaggccggacccctcgtggcggcggcgtcgacgggtgggtggcctgtgtggcgccgatgagctccgcagctcagtggagctccgccggtccgggtgaggtggcagagcaggtgttgcggtgtgcaggtggcatttggtggcatttggtggcttccgttgcggacactatgtttggatgggactccgaggtgaaagccttgctcggcttgccgatgctagcaacggcgacgccatcgggcatcgttcaccttgttgaaggcgttgctattggagccctcgttcaactccacatcaagggatttctccgggagacttttgaagaatcagaacgacttctgaagaaagaaagaaacattgacaccggtgtgaatgaaaatgaacttcaccaacaactattgtcgattacagaagaacgtgacaagttactttctgagattaaatatatgaattcagtcatcaatgaatcagagttaatacaggccaaagctactatagatgagttgagttctaggatatctatcgtggaagccaaaatgaaaaatagttactggttaccattatcaaacttaggaatagatgaatgttttgatgcttcggcttataacaaagagaacacaaagcttaggatgcagattcggtggatgcaaccagaacttgatgcacaccgtggaaggcttaaagaagcaataaatgagatgaagctgatggacacaaagtatctggaagcatccaccaagctgaagaaggacctttctttctactgtcgtgaggttctgaggttgaaagaacagcttaaagaatcacaagttaaagcatcttgaccctggaatctttctgctgagtaattcttgtgtggacacactcgtggtagcactatccatatgacgcacaattggtattgcctcaatgccacttcatacaagttctgtatgctgctagtgtatttgtttcaggtaggtgtatagtgctacaattccctgtagatcactacgtcctaatgcacttggctcgcattatatagcagtggaccgtctataacgtttgacagcctttctcgcactgagagtctgtgatatagggtgagttattcatattgtgac

SEQ ID NO: 74232 - DNA, 143 bp, Oryza sativa
  Clone ID: PAT_MRT4530_74438C.1
atggccggaggcccgactgcccggcccaagcacggcacccgttacaaccacggcggcagcacgcagttctcgtgggaggataaggccatcggccacatcgtcaggccattgtcaagcaagcacctcggcggctcgtggtacct

SEQ ID NO: 74233 - DNA, 647 bp, Oryza sativa
  unsure (1)..(647): unsure at all n locations
  Clone ID: PAT_MRT4530_74439C.1
ccaagaacaccggtcgttttgctcgtgagctgtctcggggtagtgcaggccaggcgggacagactgtgaaaccaagacctcttcagttataacagcgcgctctcctgcgcctcatcacacacacacacacacacaccccacgcattcaagcagccctggtgttgtacagatcatccgaggcgacgtttctcngaggcgatcatggccaccaagatgttccgcgccgccgccgtcgtcgtcgtcagctgccgcaggtgtcattgcacatcagccaggggttgcttctggcatgccagatgggcccagcgccgagcccgacagtcacggcagcacgcacagccagtctcgtccttcggtcgtcgccagccgttctctgcccaggcacagtggcagcntcctcttcgccaacctgcgctactgagttggttgaggtcgtcgcagcgcgcgcgtgtccatgaggctggctccatgcacgactctgttcttctctgcttgatcactcgcctagtgtgccttctttaccccctggttcttacctgtacttagcttcttccttccggtgcgctagattaaccgttcttgccttcttgtgatacccatctatgtgtattgattcagatcatttcataccaaaaaaaaaaaaaaaa

SEQ ID NO: 74234 - DNA, 137 bp, Oryza sativa
  Clone ID: PAT_MRT4530_7443C.1
tcctgatgctacatacaccatacttattgacatgttgagaagcaattgcagattacgagcactggatatttgctcgagaaaggccaaactaaagcaagactggatgcagggcatcctgcctggacagagcgggatac

SEQ ID NO: 74235 - DNA, 402 bp, Oryza sativa
  Clone ID: PAT_MRT4530_74440C.1
atggactggatgaccatctccgccagcagcgccatcgacttcgccaggccatctatctccatacgagttgaatcacacctcgcgaccccggagtgtctccatggcctggtccttcctcacttccagcatagtcctctcgagtttcgcgacctcaaacttcgtcctccaatactagattcgacgatcctggtcagcaagcgcactcttgagatgtggctcgaacgcaagcactggaatgatcactggcaactcaggctacccgtgctgctgaacatcctcgacatcaacatctctacagatgacaacaaagtactcaagatcaaaatgctgaagaaagctaaggtgatgactgcagacacaaaggcagttggagccaatgagagttttacaaagcatgactaa

SEQ ID NO: 74236 - DNA, 966 bp, Oryza sativa
  Clone ID: PAT_MRT4530_74441C.1
atggatcgccaatggcgttgcctcgctgctgcggcttctactagtggtaatagtaagcttcctccgctgccgatggcgctgggcggcgccgtggagtacgggcagctcgtccatggcgcggcggcgcccgtggcgccgttcttcgtggacgccgagcagcagagcctgtcgccggcgacggccatggttcttggcgccgggtggtataactataaccttgtcacgccgtcgcaggcggcgcagctgcaccaccggctgcgacgggcggtgggcgcggcgccgtgctcgatgaagcggtgcggtggcatggcggcggcggcggcggggcggcttgcgctggtggggccggcgccggtgcaggcgaagctgtaccgcggcgtgcggcagcggcactgggggaaatgggtggcggagatccggctgccgcggaaccggacgcggctgtggctgggcacgtacgacaccgccgaggacgccgcgctcgcctacgacggtgccgcgttccggctgcgcggcgacgccgcccgcctcaacttccccgagctccggcgcggagggcggcaccacgcgccggcgctcagcgcgtccgtcgacgccaagatcctccaagccaccaccaccaccacggcggacaccgccgccgccgcagcaccggcgtcgacgaacaccacgccgccgccgtcgccgcgcgtcgtcaagaccgagccgggctgctgctccgtctccgaagcctccacgacgacgacggccgacgccgccgacgtctcgtccacagggtcttccccatccccgacctcatcgaatcaggccgccaccgccacgccgccggcgccgcggccgccgccgccgttgccggagacgattcagcagctggacttcacggaggcgccatgggacgaggccgacggcttcgcgctgcgccggtatccgtcgtgggagatcgactgggacgccatcctctcctga

SEQ ID NO: 74237 - DNA, 1731 bp, Oryza sativa
  Clone ID: PAT_MRT4530_74442C.1
atgttacgcacgccggatttgggtgatcctccggtggcggagatcactcacccgtttcaccctcacaagctgaggctggccgacaacgtcaccgacggtcactggcctttccggtgcggcggctgcaaggagctcgccgccggccgccgcaggtacaggtgcgagccctgcgacctcaccctctacacgtgctgcgccaccgcgccgctcaccctagagcacccgctgctcccgggccggcacttccgcctcctcgagcggcctccgccgccgccgccatggctcgccgccgacgaccgtggcggcggcggctggaggccggcgtgcgacgcgtgcggcgacctcctgcgcggcgacggcttcgcctaccactgcgccgatgggcacggcctcgtcggcctgaacctccacccgcgctgcgcgaggctgaggctgccagtggcggcagctcgcggcgccgccgccgtcaagctctgccgcagggcggctccccgccgacggtgcggcgtctgcatgtccggcgaggatgggtaccgtcacgggttctggacctgccgcttccgccgcagcggcggcgacgagctcgtcgacgtgcacctgtcgtgcttgaaggagttgatgtcacactcacacgagactctgactaatttgtatgagattctaatggaggacgggacgccgacaaatgattgtggtgaaggtgcatctgcacaagataatagcagttacagtggggaaagtaacggtgatgcggaggagttcgagaaccagaatggaacaaacaacggtatggtgccggagatgaagacgatcacccaccccagccacccggagcacaagcttagaatggtgaccaccaccggcgaagcgccgttcaagtgcgacgcctgcaaggagcccggagacgggccgaggtaccactgcctcacctgcgaggacctcaacatgcacaagttctgtgcccatgcgccgagcacgctctaccaccatctcttcggccgcacgttcgagcttctcgccaagccaccgcaaggacgaccggagaaaccgcaccccgccgccaccggtggtggcagaggcgaaagcggcggcaggtggtgcgacacctgcggcgaccatgtgttcggtctcgtctaccactgctcaggcgccaacctcgacctccacccatgctgtgcgagcctgcaggaactcccggtccaaaaccgggagacgttggaccaaccgaaagaaagtcttgctacgcctcaaaagctagttaaagagggactagccaagatcactatcgacggggtcgccttcgacatcgcggcgttcagcaagtgcagcctatgcagcagacaggaggaggagggcccggatcactgctgccgccgcctccgccgccaggagcaatggtgctactacaactccgacgtcgtcgacggcggcggcgaggccgtgtccctgcacgtgtcctgcatcaagcagatcgcacggaggagatggcaggcagctcgggacatgaaatgtggagggcagatcatgctggcgatcagcgaggagatgatcggtgaaggtggtcctctccatggcattccgtcggagcgagatcggaacatcgtcggcgcggtggtgcgcgtcatcatcgcggtgatatttggagataggacagccatggagggagacatcagctcttgggtagctttaggtctcccatggctgacaaatttatttaccgttcaaagataa

SEQ ID NO: 74238 - DNA, 198 bp, Oryza sativa
  Clone ID: PAT_MRT4530_74443C.1
atgccgttagacgtctcctcgccaatcctggccgtgtggctggagggggtcgcctccatcgcccgcttgaaggatgtgctccatctcaacctggagctccccccaggggacacagtagaagcagcatcagctccactgtgcgctgcttttgcacgcaccatcctgcaagatttttctcttctccatgaggctaggtga

SEQ ID NO: 74239 - DNA, 112 bp, Oryza sativa
  Clone ID: PAT_MRT4530_74444C.1
atgctgtaaacgcattggaagatttttgtgtatgaatcatacgttattaaatacatttacaggacacagcaacgccgggaacctctgctcagtggacaaaaagacgtgttgc

SEQ ID NO: 74240 - DNA, 574 bp, Oryza sativa
  Clone ID: PAT_MRT4530_74445C.1
ggatgagaatcccttgtgcccgcatgaatgtcatgttgccaatgtacaaactgacatccagcatttagcagctacaagcacgtaaatccatgaggctaaggaatgtacaaatcacgcgagttggcgttccagtagttcattggaaacttaatttgccaggcagacttagactaacaagaggtcatctcctcctaacagctccgtagttcctagtgacccgaggtggaggtttcttcggcctgtcatcttcatcatcgtcatcatcatctttgctcatcagcatgctctggatggatgaaatatctgcttttctacccctttttgcagtagcgcctctacccctacctctaccacctctaggagctgcccttttccgtccagtttgttggggactctcctccggttctgaagattcaacaacttcgtttgcttcattagtctcattttcctcatctgaagaagattgcacttcctcactgcggatagcagcacttgaccttgattggctgaaattcagagtggtctgcttcattgaggccgtccctcttcccctgccccttctggaagttccagt

SEQ ID NO: 74241 - DNA, 1919 bp, Oryza sativa
  Clone ID: PAT_MRT4530_74446C.1
ctgtgctgagagccaacccagttcagttgtataagcaagactctgaaggattgtaccccatacacgtcgctgcctcctccggtgccaatctgacagtcaagtcctttattagagagcgacctgagatcgctggtttacgcgattctaaggggaggactttccttcatgttgccgttgaaagggaaagatggaatgtagttgtgtatgcttgccatactcaatcgttggctaggattttgaatatgcaagacaacgatggaaacactgcattgcacatagcagtgaagcatgggaataaggctatcttctgttctctactgatgaataaggaggtaaacttaaatatatcaaataataaggggcaaactgctttagatatatcgcagagtaagattcttgcaggatatttctatggatggaaccctaacaaactgatattgcgggcactaacgttttgcaatgcaagaggtggttgtcgtcgggtagatcacctgcaggaacaatatattattcatcaaaaacaagtagatgaagtgagggaatcggacaaaatgacaaattcaacacaaactttgggtattgcctcagtgctgattgttactgtcacgtttggcgtaatgtttgccataccaggaggtgacaaagcagacgatcacaataatggtggcacaccaacacttgctggaagttatatatttgatgcattcatcatggctaacacaatagcattcatttgctcgagcttggctatcatcaacctcatgtactctggaatgcctatggttagtctaccacttcgccgtcggcactttaacatatctctactcctggccttcagttcagtgacaagtttgggtactgcctttgcactaggtatgtatttagtgctggccccagtgactcgatgcactgcaattgcaatctgtgcaatgatgatgattgcatcactgtgcttatatacggagcctttaaatggcgttcgttttgcaatagcactatatgttaggaggggcaatcgggtattgctagttattgcacagattctacttattcgaacgctaattatatatttgttttgcattgccgccttcacaatgctcatgcagtggcagctcctcaacgcaagccgccataacaagttttacctctagttgaagatcgaaaccgatgcagctcaacccgaacccgaaagcaagaactcgtcgaaaccatgatcgtctccacctcccacctcagtatacgccgcttttcctccagacgcgttctccttcccccaatcgctctccctctcggctcccgactcccgactcgactcccagtctcccacctgtcgcccctccttcccccaacctctctccgagcaaaccctaatcgtcgccgccaccttctcctctctcccctgacgccatcaccgccgtggatctcttcccctctctccctctgatgccgcagttgtctcctcctcctcctcctcacccgccacgccgcccgattctacgcggtgacgagccaaccctacgcagtggcgagacgatcccggctgcggctatcctacccgcgacgaggaggcgactatcctcctcgcccaaagacgacccgggcggcggagatcctccacgtgacgcgggtaccccggcggcgacacatccgccgccgccgccgccgtcgccgtgaccgctgcatgcccgccgtccagatccgtcgtcgtcgtcaccgtgcccgccgtcgtcgtcgccgtgcccgctgccgtacgtcgaggaagggagcaccgcgcatgggaggttggtgaagggaggccaccgccgttgccgagcctgccgctgtcgcgccggatgggaggtcgaggaaggccgccgccgccggtgccgagcccgccgctgccacgcgccgcgccgcgcagcagccgccgctcccgctcc

SEQ ID NO: 74242 - DNA, 1595 bp, Oryza sativa
  Clone ID: PAT_MRT4530_74447C.1
atggcgaacgcgaagctgcccaagcaggcgctgctgccgccgcgcagcccgttcccgacggcggcggcggcggcggggccgtacgccggcgaccacggcccgatcgcgcggccgcagggtgcgccgcaccacaggcacgggcacggccacgggcaccaccagcgcacgtcgtcggagagcttcatcgaggagcagccgtcgtggctcgacgacctgctcaacgagcccgagacgccggtgcggcagcacggccgggccggccaccgccggtcgtcgagtgactcgtttgcgatgttcgacggaggcgccgccgccggcgcttacgccaatggctttgaagggatgggaggaggaggaggaggagggcaggccgcgccgtggggtggtgtgcaggagtactatgcgaagccaagctcgtttggtaggcaccagggccggccatgggagcagggcatgaacaatttggtgaattacaggcaaagcggcggtccaccgatgccggcgaaggagaaggttggtgggcaccatgggtcgccgagcgtgttgagggatcatgatcatggtatggacaggagatcctcggacgaatcggggcatgatcagaaggttgggcctgagaggaaggagggcgtgccgccgaagcatgcacaatccgaggcggacaccaagcgcgctaaacagcaatatgctcaaaggtcccgcgttcggaagcttcaatatattgcagagcttgagagaaaagttcaggcattacagtcagaagggatagatgtgtctgctgaaatggagtttcttagccaacagaatattatgcttgacttggaaaacaaagccttaaagcaaaggctggaaagtctagctcaagagcaactaattaaacgctttcaacaggagatgtttgagcgggaaattggtcgtctcagatcattgtaccagcagcagcagcagcaacagaagcagccgcaacctactactaccctcagtcgaagtaacagcagagacctggattcacagtttgctaatctgtctctgaaacacaaagaccccaactctgggcctcttcgtactcagtcctcgtcaatcttgtgagttccacacaaagttgccacaactcctagataactctttgtggctgtcatctgcatcaagaaaggagcaggcgcacctggaatcgtgtacccccatctatggtgaataataacactggaaaggctaataactgtggatctgatctttattcttttggaatatgcacctggcggtcatcctcagctcacttccattgttgatgctcgaccagtcggaggtgtttagggtttttctttgtagtttgatgcttttattatcgcatcgttgtaccattttcgaaatgctagggttctaatttgttaccgtcctgttccctgtgatcatgcattatgttagcgatatttggattagtcttgcctttatcaatggaatgtggagcactagtcagcatctggtacatacagatgttttgaaattgtgccacatccttgagaaaccgtatgtgttgtaacattgttattcaataagctagtgcaaatgaagtattagcgttgttcagtgttccc

SEQ ID NO: 74243 - DNA, 493 bp, Oryza sativa
  unsure (1)..(493): unsure at all n locations
  Clone ID: PAT_MRT4530_74448C.1
ctcgtgccctgctctgcttctataaaccctcctcctcttcctctgatatcagttctacagccaagatacgaagtgaagttctctctcctttccgctctcttcggatgttcttttaccttgctttcatcgcaagtgctggtctgggtggactgatagctactacacaactgattggggccctcgcgaatccatcaagagcagctgatgtaccagaaatactcaagggtcttggcatagatttcggggcagttgccatctttgcttttctatatagtggagacaacaaggctaagaataaacaaatagctagacttgcaagggaagaaaccctcgccaatcttaaggttcgtatcaatgaacggaaaaccattcctataagctcattgagggggatcgcccgccttgtcattcttttcgggcctgcctccttcattgcagagtctntcaaacttagtgaacctttcacggaaatgctgttggaacgaggggtccn

SEQ ID NO: 74244 - DNA, 386 bp, Oryza sativa
  Clone ID: PAT_MRT4530_74449C.1
tttgtttatagctcaaatgaaattggtgcggtagttgtggatgctgctaaggtgtctgggttgtaaaatacacccaggacatgcttaattgcactgcttgagctgaagcatagcacgtggaatgctgagacagctaccacgacatcatgaactgtaccatttgatatgagttgaatggtaaaacagtaacctaacattgtgaacaaatgtaatcctttagaagctaagctgagccttacacaagtaaaagaggatgaacctgccatcgaggaaaagaacattaactcatgatatggtggagcattgcaaaaaaaggatgcttcaagatcacacatgaaacacgggtgagcaagagcactaataaaatgatgcagagaatgttatac

SEQ ID NO: 74245 - DNA, 455 bp, Oryza sativa
  Clone ID: PAT_MRT4530_7444C.1
cggaattcccgggtcgacccacgcgtccgcggttcttttatttttatagcattcgggtggggtgggcaaatccatcatcgcatgttcatatctgatgaaatgaaggtgaccactcagatcaagcccatggtctgctcttagacgtcgacgacgccgtcgcggctgccgcggagcgcgagcggcaaggcgcccacctcgccgccgttcagctccaacgcctcgtgccgccaccaccagcagccgccgtgagcctcggtgtcgactcccgtcaccccggcgccgacgcgccaccacctaatgtctctgttcatcagctgtatgacgatcaggaccgacgacgactcgccgccgacggcctgcacccacagcgacaaggcggcgacggccaagcacgctgtcctactactagtcgatgctgacgccgaggaagctcatgcaacgagcgatccgcgcgt

SEQ ID NO: 74246 - DNA, 147 bp, Oryza sativa
  Clone ID: PAT_MRT4530_74450C.1
atgaagaaaaatgcattatcgaatttggatagatatgacctggtgacgtgcatgatctgcccccgatggtttgggaaggtgattaacgtagttgttgatgaagatggtattgcttgggataagttccttcaactagagttaatttga

SEQ ID NO: 74247 - DNA, 161 bp, Oryza sativa
  Clone ID: PAT_MRT4530_74451C.1
atggcagttgctagtgtcgcactcaaacgggagaggaggaaacgacggtcgtcgacgtccacgctcgactacgagcggaggtggcagccggcgtcatcacactgcgagcgggaacagaggaggcggtgggcaaagccattggcaagctggaataaaggccg

SEQ ID NO: 74248 - DNA, 316 bp, Oryza sativa
  Clone ID: PAT_MRT4530_74452C.1
ggcaaaacaagaaattatccattaacttaccaccaaaaaaaagccgccccccgaaaggtaccccccctttgggatatttaaccagggcaggacgctaagtttttttacaaaacagcccttccattctccaaaataaaaatcctagacctagagctaatttcaaaaaaaatttcagggggaagattttccaacatgccggcttttgagggaattctggcttcagggcccaaacatggttttacccgggaacagggcccccaaggatggggcccccataaacagccatagggggggcaaaattgggttgaagccggcc

SEQ ID NO: 74249 - DNA, 174 bp, Oryza sativa
  Clone ID: PAT_MRT4530_74453C.1
aggggagagggtttcttgacacattattgctgcaaaacatatacagtcacgcattgaatttacaagtttattactagttacacggcgagaaatgggagaaaaaaaaatacaatatcacgacagatacgcgcgcaaagctgtcattgccatcacagctcgagtaggctaacggat

SEQ ID NO: 74250 - DNA, 3099 bp, Oryza sativa
  unsure (1)..(3099): unsure at all n locations
  Clone ID: PAT_MRT4530_74454C.1
atggcagcgcatacagtgacggacccactggaggagctatggaaccacacgatgtcgatggacaagacgcacctgatgtgcttctacccgagcaagatcaccatgggtggcgtctggacgggcgacaatccgctcgacttctccatacctctcctcctcttccagatcctcctcatcacctccaccacccgcgccgccaccctcctcctntntcctntccgtctccccacctacatctcccagatcctcgccggcttcctccttggcccctccgtccttggccacctccctcacttctccaacctcgtcttccccgtccgtagcctcttcgtccttgagtccatggcccttctcggcctcgtctactacaccttcatcgtcggcgtcgagatcgaggtctccgccatcacccgcgccggcatccgtagcttcggcttcgccattggctgcacgctcccgcccttcctcgtcggcgctctcaccggctacgtcgcgctcagcactgacgacaaacacaagggtgacacgttcctcaacaagctctccttccccatcttcctcggctccaccttctcctccaccgccttcgccgtcctcgcccgcaacatcgccgagctgaagcttgccggcaccgacgtcggccagctcacgctctctgcgtcactcatcaacgacaccttcgcctggaccggcctcaccgtcgccacggtgctcggccactcgcgctgcaccatcacgcagaccacgtggacgctcacgtcgggcgtcgtcatcttcggcgccagctacctcctgctccgccccatgctcctgcggctggcgaggcgcgccgccgagggggaggcggtcggcgaggaccgcgagtgctggattctgatcggcgtcatggtggcggcgctggtggcggacgcggggggcacgcacgccatattcggcgccttcgtgttcgggctcgcggtgcccaacgggccggtcggggtggcgctggtggagaaggtggaggacttcgtgcggcctccgcaccgacaccncaagatcaccaacatgcattctgccgtgttgctcatggtcgctgccatggtcgctgcggtcttgaaggtcgtcgccgcaatcggcgtcgccgaccaccaagaacaacaccacctcgccgccgccctggtccgcaagcgccccgcctccgacatggacctgccaccgccgcgccgccatgtcaccggcgacctgtccgatgtcacggccgccgcggcgggcgcgccgacgttgtctgccagcgcgcagctccccgcgctgcccacgcagctcccggcgttccaccacacggacatggacctcgccgcgcccgcgccgccggcgccgcagcagcaggtggcggcgggtgagggtgggccgcccagcacggcttgggtggatggcatcatccgtgacatcatcgccagcagcggcgccgcggtctccgtcgcgcagctcatccacaacgtgcgtgagatcatccggccatgtaaccccgacctcgcgtccatcctcgagctccgcctccgctctctcctcaactccgaccccgccgccgccgccgccgccgccgtcgcatcctgctctcctccctcccgacgccacggcgccaccgccaccacccacgtcggtcgccgcgctccctccccctccgccagcgcagcccgacaagcggcgtcgcgagcctcagtgtcaggagcaggagcccaaccagccgcagtcgccgaagccccccaccgcggaggaaaccgccgccgccgccgcggccgccgcagcggcggctgccgcggccgccaaggagcgtaaggaggagcagcggcggaagcagcgcgacgaggagggcctccacttgctgacgctgctgctccagtgcgcggagtcggtgaacgcggacaacctggacgaggcgcaccgcgcgctgctggagatcgcggagctcgccacgccgttcggcacctcgacgcagcgcgtggcggcctacttcgcggaggccatgtcggcgcggctggtgagctcgtgcctggggctgtacgcgccgctcccgagcccgtccccggcgggcgcgcgggtccacgggcgcgtggcggcggcgttccaggtgttcaacgggatcagcccgttcgtgaagttctcgcacttcacggcgaaccaggcgatccaggaggcgttcgagagggaggagagggtgcacatcatcgacctggacatcatgcaggggctccaatggccggggctgttccacatcctggcgtcgcggccgggggggccgccgagggtgaggctgaccgggctgggggcgtccatggaggcgctggaggcgacggggaagaggctgtcggacttcgcggacacgctgggattgccgttcgagttctgcccggtggctgacaaggccgggaatctggacccggagaagctgggcgtcacgcgccgcgaggccgtcgccgtccactggctgcgccactccctctacgatgtcaccggctccgactccaacacgctctggctcatccagaggttggcgccaaaggttgtaacaatggtggagcaggatctgagccactcaggctccttcctggcacgttttgtggaggccatccactactattcggcactgttcgactcgcttgatgcgagttacagcgaggatagcccggagcggcatgtcgtggagcaacaactcttgtcacgggagatccgcaatgtgctagccgtgggcggtccagcacgcaccggcgatgttaagtttgggagctggcgcgagaagcttgcgcagtcgggcttccgtgtgtcgtcgcttgctggaagtgccgctgctcaggccgtgctgctgcttgggatgttcccttccgatgggtacacgctcattgaggagaatggcgccctgaagcttggatggaaggatctgtgccttctcactgcctctgcttggcgcccaattcaggcttcgggacgttagtactgagggggaatttatagagctgaagtatcacttgatcttacttaggtgcaattacctagtccttttgcttcttttagctgctcaatttggtcaattctgagaaaagaaaaataaaaaaaattctgatc

SEQ ID NO: 74251 - DNA, 3069 bp, Oryza sativa
  Clone ID: PAT_MRT4530_74455C.1
atggagagcgcggcgcagagcctcgtaagcaatgtggggacactggtggggcaggagttcaaccagctgcgcggcgtcggcgtggaggtggctcgccttcggaacgagctggccaccatccacgccctcctccggatgcagtcggaggccgacgaggccgccgtggaccacttcgcccgcgagtggctgaagcagctgcgcgaggtggcctacgacgccgaggactgcgtccacctctaccacttccgcatccggtgccgctccggccagctatccgtctggaccaattgcaagcgcctcctcaccaccctcctcgctcgccgccagctcgccggcgacatcagggcgctccgtgcgctcgcctcctccatcaacgagcagcattgcagctacgggttcagcctcgactcgctgcggcgcagcacggccgatgcagcagctttaggcaccatgccggcatcggcgcgtgtcgtcgtcgtcgacgccgatgatcatgatgagttcgtcgacaacaatggccaagctacggagctagccaacaaggtgagtgcactaagagagggagttgacgatgacaagaagcgcagggtgttctccatcgtggggttcggagggctcgggaagacgatgctggcgagggaggtgtgtcggcggctggagacggtgtttcacttccaagcgcaggtggccgtgtcgcagacattcagcggcaaggaccttcagggattgctcaggcgcgttcttcggcagatcacgcagcctatcgtcgaccgagagactgtagacgacgcagagatcacccagctgcaagcggctgcggctagctcgcagcctaatgttaatatcgacaccatggatgtcgacgacctggcaaccgagctcaaaaagaggctcgacaacaagaggattttggttaaaaaagttggtccaacagattcccaaaagagctccgaacgttttggagttcccatctccagttttctcgttgacatgacatttgatatgacatgtaagtgcattgttttttataaaaatgttgtgtacctcattttgatcgatgatgtatggagcatagcagcttgggatgcgatccggtccaagttaccagtcacagacagcaattgcggcagcagaatcatagttaccactcgtatacataccgtggcaaaagcatgcagtgctgctagtgattacatccatcatatgaagaagctagacgatacagaatccaagcagttgttcatcagcaaagcatttggctctaaaagtccttgccctgatgatttgaaagatgcaatggaaagtatcctaaaaaaatgtagtgggctaccattggccattgttagcattgccagcctattggcaaactataaacctccagaaggcaaagaaatgtgggaaacaattaagaactcaattggttcacagatggaaaacaaccctaccctcgaggggatgaggcaaatactcacactgagttataaccacctacctcatcacctcaaggcttgcatgatgtatcttagcattttcccggaggattatatgatcgccaaggatcgactgttgaagagatggatctccgaaggattgattgttgagaagcggggattgtgccagatggatcttgcggaaggctactttaatgagctagtgagtaggaatatggttgacatggtgatcagtaaggccacttttaatttgcatcaagggatcagagaagaccagttccgagtgcatgatatgatgcttgagatactggtgtccaaatccctagagtctaactttgttagcctagtaggtgggcagtatgaagggatgtcttatactgatcacacaattcgccgtctctccatacatggtggagtagaggcaggaaaggacccttcttcatcatctaaaaagatggcagcgcatcgtggcacggggggagatagcataaagggaatgatgatgcaacatgtccgatcactaagcatatttgatcctgaagcgcacaacattctttctcggctaggcgagttcaccctgctaagggtacttgatctagaagactgcactggcctaacaaacaagcatatgagttgtatctgccggatgtaccttctaaggttcttgagcttgagaggtacagatgtcaaggtgatgccatcaagaattggtgatctcgagcatttgcagatgcttgatgtacgtcaaacacagctcaaggatctgccaaaatcagttacaaagctagagaagctggagcacctgctattctttgaccagggtgattctggttggatgctgccccaagggatcaacaaaatgaaggcactacgccagttaaaaaaagcagctgtggtatttgatgccaaggtcgctgaggagattggtgcactgggtcaattgcaagagctagctatctttgtcgacacgggaaagaaaatgaataatggtgtcgtcaaaaagcttgccagctccctgagcaagatgtactccctgcgatggctcgacatcggcaatcttgatgccggtaaatggccttttgctccaataatggaatttctacatgatatagagccaccaccacaactgctccggtaccttaggatctgtgggcacatggacaggttgcctgactgggtagagtcactccatgatcttgttgaattgcagttacggtggacgcacgttgatggtttccaactattcaacgtcctctgtaagttgcccaacctgaagaggctattcctgggaatttactttattcacggaaaacatatggttgtgcacagtagccagcactttcgggagctcaaggaactgattctgggttatactcctagtagttgtgatgtttacgaatttgaggaaggatccatgccaaatgtggagaggctagttgtgtatttcggcgaccaaactaaaaaaattgttggcattgagcacttcaagaaacttaaagaggttgaatatattggttcgaaagacaatttgagacctgtactagagccggtagagcagatgaataacaagcgagacgtgtcccaacggataacaattaaagtgaggtatgactggtaa

SEQ ID NO: 74252 - DNA, 530 bp, Oryza sativa
  Clone ID: PAT_MRT4530_74456C.1
gccgaggctcccgtctctttgtctcctccgctccttgcgccgccgccaagacacaggggaggggcggcgatctccatctggcgaggagagcagagcaggggaggggaggggaggggatcctggtgagcctctttctttctttctgattcatctctctctcccccatcgggactggaatttgcttgcgttcgttcgttcgttaaccctagcttgtcttcccttaatttcagagccttaaccttaatacaagtaacagtttgtttgttccccgaaaagtcccaagttggatccgcccctgattactccagtgatctggcacacattctatttgcccaaaagatttataacttccctagctaccaataagaaaccctgttcagtttgtgttacaaggagcaaacttgtgagtgtttgtttggctcattgttcttgccaaactcccttttcccgctttttagtaaccccatcacattattacgatttttacaatacaactgtgctagttgggtacattgccagttttgttgcta

SEQ ID NO: 74253 - DNA, 384 bp, Oryza sativa
  Clone ID: PAT_MRT4530_74457C.1
atgacggcggggcggtgtggagcggagcggcgacacgggcggcaggcgcgggcaggcgtggaaggcgctgacggcggcggcgaccaggcggtcggccaccacgacgcgtcgacatggatgctcttccaccttctagactctcagctcgccactgcccctagggctgccgccactgaaggggtcgacctccaattgctccttaccgagggccttgcaccgatgctcaggtcgccgtcatttcaggccgccgctgccctacggcagccaccgccaccggtgtcgacctccgtctgctcctcgccgagggccttgcgcccgctgctaccactagggccgccagcgccgacgggagtcgccgccataccgggccgacgcagaccctag

SEQ ID NO: 74254 - DNA, 874 bp, Oryza sativa
  Clone ID: PAT_MRT4530_74458C.1
acgtctgggatgcggagaactgtaaagacgggaagaccgctgcaactatgacgaggaagtggatgacgacggccaggacagatgggaggcaggcaggacgtgcttctatttgcactaattcaatcgccgcacgccgtcgagccctcctcactgctgctgctgccagaggagatctctcgcggtcgctgccgaagcggttggcggccatgaggatgcccccgatggcgccgagcaccccgcacgcgaggagagcggccgcgaaggcgatctccatgacgggcgcgccctgggccctcccacggcgctgccgacaaggtcgtcctcgtcggagatggagaaggagtggtccacgtacgccacgcctggctaccctcgcctcctcctctgcctctgcctgtcggtgccggatccgatctatgaactactcttccccacctcctccttcctcgctcgcagcctcgacggcgccgcctccaccagcgataccgccggcagcgggagaaggaggcctacctccgcgtcgaacagcgcgtactcgccgccaaaccatctccgccggaggttgaggaggaagaggatgcagattcagatggggacttggcggcggctagggttggggattgcttcgtttgattttggatcggctagggttggggaacatgggaagacaggacatgacaccctcatccacaaaaaagacttcccggtgaagcaacaaataggtgaccagtgcggattccatgtgtgccacaacatgcgccttctgtatagagaaaagggcacaataaccaagtctctgcctaccagctttgaggaggttcgcgaggagatagccagcttcatcctccgcgaaataattaaccccmaaggaatg

SEQ ID NO: 74255 - DNA, 512 bp, Oryza sativa
  Clone ID: PAT_MRT4530_74459C.1
ggcattagtagaattcagaattgagacttcatttttatagggtacctctatgagctgactgtgctacagaaggataaaatcgaagatgagcaggccaaagaggttggagtgattgacgccgattggagggaaccgtttatcaagtttttaactcagcaaaaattgcctcaagacaagaatcaagctgagcgtatttcatggcgcagcaagctttatgttatggtcaaagctgagttttacaagaaaagcccatccggggtactacagtgttgtgtttctcttgacgagggcagacaattgttgcaagatattcactcgggcatttgtggaaatcatgccactgcgcgcacactagtcggcaaggcataccgacaaggtttcttttggcctaccgcggtgactgatgctgagaagatcgtactgtcgtgtgtaggttgtcagtcttttttttgctagacagactcatctgcctgcccaggaattgcgtacatgccatccaatatggcaatatt

SEQ ID NO: 74256 - DNA, 242 bp, Oryza sativa
  Clone ID: PAT_MRT4530_7445C.1
tgtttctcagaggtgggttggcttctcctccccctcccggttcggttcggttcggttcgggtccggttcgatttcggtttttccttcggttcgggggttggtgggaaaagcatggcggtgcccgaagtttagaaccgctgcttcgacggatgcctctcctgggccaccgatcaccgatcctctcaagtcgccttctccacttacagcgagatccttgagtccaagatcattaaccatcggta

SEQ ID NO: 74257 - DNA, 243 bp, Oryza sativa
  Clone ID: PAT_MRT4530_74460C.1
atgtcgccaggagccagccgagccatgggtgcgcgcagcgcggggcgagcaaagcacgaggccacgagcgccgttaattcgcgaggtccacgctcctgcgcgtgggcgtggcacattgccacacgcccacacgacacggctcagctcagcgtcgcaggcggcgtctcctcctccatggtccacaccgatagcgagcgcggctttggcgagcctgaagccatcggcctcgtcgggcagctctag

SEQ ID NO: 74258 - DNA, 3201 bp, Oryza sativa
  Clone ID: PAT_MRT4530_74461C.1
atgcctgccgcggcagtctccggcggcggcgcggccgacgccgaggagctgttccgcacgagacgcatcccggagatccgcgcggcggagggcgccacgcgccgcgagatctccgccaaggaggaggagctccgccagctcgtcggccgcagctaccgcgacctcctcgactccgcggactcgatactcctcatcaagcagtcctccgacgccgtctccggcaacctctcccgcatctccgactccctcgcgtcgctcgcgccgccccccgaggctccccccgccgcatcgccctccccgtccggcgggcgggtccggctctacgcgtcggcggcgcgcgccaagtacctcgtcgacacccccgagcacatctgggggcggctcgacgagggcctgctcctggaggccgcggggcggtacgtgcgggcgcaggtggtgcacggcgtgctctcccgcgacgccgcggcggccgcgcggttcccgctgctcgcgcaccaggcgcagctggtggaggcgttccggccccagatcgcgcagcgcgctcgcgagcgcctcgccgaccgccgcctctccgtcgccgcccacgccgacgcgctcgcggccgctgcctcaatcgacgcaccgtcgctcaccccgacccaggcactccaactcttcctctcctcccgccgcgcctggatctcccaagccctaaccacccttgcctccgatctgacctcctactcctccgtgctgtgcgatgtcgccaagatcgtgcgtgtcacgctgggccatgtcgggcagttgtttgtgcttgcgctcaatgatttgccactgtttttcaagacggtgctcgatttgccgcccccttcacagctgttcggtggcattccagaccctgtggaagagacacggttgtggaaagaacactgggatcaacttgaggccaccatggtgctacttgagccagatgctgttgcaaggacttgtacagattggctgaagggatgctgtgatgagatttttggtgtgattgctggagggcaaagactagttgatgccattgagagtggggaagggcttggatcagtgcaaagacttgtgcgggaggcattagatgggagggaaggactggaagggactctggagcaatggctgaagagtgtgtttggatcagagattgaatcaccatgggatcagatccgtggcctcatcttgaaggaagggaaggacatttttgaggattggatggaagaagcctttgtgcaacggatgaaagacattgtgcacttggaattcggcagcttggatgatagtgtaaatattaagaaatcaattgatggtattggtgccaatgctgatccaaaggatgccggtgatttcatggtgtatttgcggaaagtttcaactggaggtggtgtctggttctctgagtctaagatcaagaaaggtggaattttggcacatttgaaaccgattgctgatgaaaatgatttccacagctgccttacctcatattttgggccagaagttagtcgcatcaggaatgcaattgacagcaaatgcaagactatccttgaggatctgttaagttttgtggactcgcacaattctgctcccagattgaaggagctggtgccatacctccaagagaaatgctataagaccatctctgggatactgaatggattggaagctgagcttggaaaattgtctgcttccttgagaaccaaaaaaggggagagcaatatgcttgcagcatctgttatcgtggagagatctctcttcattggccgcctcatgtttgcattgagataccactcgagtcatgtacccttgatcctaggatccccaaggcagtgggtaaaggaggctggtggtgcagcatttatgagattatcgtcgccctcaccaagacattcaagagcatcgtttgatacagcgatgccttttacccccaggaggcacacacagtcaagcccaaggagtcctggaaggcaattttctgacaaccccagaagacaaactattgctgctgctgcttccctatttggtgctgatgatagctccaatcccagacttgatgaactaaacaagaccttacaggcactctgcattgcagcccatggattgtggatagcatggttgtccactgaattatcacagcttctctcatatgacctcaacaaagatgattcattgtccttatcaacccctttacggggatgggaagtcacagtcatcaaacaagaggaatccactgagggccccttggagatgcaaatagcacttccatcaatgccttcactgtacattatatcctttctttatcaagcatgtttggagattcataaaattggagggcacatcctggacaaatctatattgcaaaactttgcatgggacttgttacagaaggttattgatatctatgaaagctttttggtatcaatcgagtctggtaaatctctggtttcagaaaagggggttctgcaaatactgctcgatttgcgcttcattggcgatgttctgtcaggaggcaaaagttcttccaccaaaactactgaaacacagagaacacatgactcttcgccaagcgccattgctaagacttccttcaggagaaaacagtcacaattgcaggcagattcagctaccatagagcctataaacaagctgatcaataagttctcacagagattggatccgatagactgggctacgtacgaaccttatctgtgggagaatgagaagcaatcttacaagcgctatgttgttcttttcggcttcttggttcaactgaatcacatgtatactggaactgtgcaaaagttaccgactaaatcaaatacagattcaaacattatgaggtgctcccaagtcccaagattcaaatacctaccgatcagtgccccagctctatcatcaagagcacacaaatcatcattacagtcaacatccgatgattccacatctagaagcccttggaaatcatattcaaatggagaaagatctacggcatcagaatttgatgataatgttagccttggaggtgctgctccattgctcaagtcatttgttacccaggtgagtaacctactgcatatttttagtttactagtaatagtgcacgtgcaaggcacattcttgcaagggcatgttcatacatacactgagttcagaaacatggcaaggatatccaatcctaaccatgaatggtaa

SEQ ID NO: 74259 - DNA, 2495 bp, Oryza sativa
  Clone ID: PAT_MRT4530_74462C.1
gcacgaggagacaaaacagcttgccttttgaaaaaggaaaaagaagaagaagaagaagaagaagaagaagaagaaaaaacacggcgaaaaccctagatctctcgctagcttcgttctccttcgctcgcattgctggttggggttcgcctttctatgaccggagactctcagtgaggaaaggcgatggcctccgccgccgtcatcccgtcgtccgcgcccggcgccgccgccgcaggtgcggccgcggttgagagcgctgggtgggtggtggacgagcgggacggcttcatttcatggctgcgcggagagttcgcggcggccaacgccatcatcgacctgctgctgctccacctccgctccgtcggcgagcccggggagttcgagcacgtcgccgccgcggtgcagcagcggcgccaccactgggcgcccgtgatccacatgcagcagttcttccccgtcggcgacgtcgcgtacgcgctccagcaggccgggtggcgccgccgcgcgccgccgcaccaccagcagcagggccccggcgcctcgccgtccccgccgccccctcccccgcgcggccgcccctcgttctcggcgtcccactcgcaccatcgccacggtggtcaccatcatcgctccgattcggtgcgcggcggcggcactggtgcgacggctggatccgataaagatggacgtgaagttcataacaaggaagagaaaggaatgaaggaagcagagaatgtggttgaagctaaaagctcacagttggagtctcttgtttctcatgaaggtgaaaaaactcctaggccgcaagctgttgctgaaggaagcagtaaagtggttccaactcctgtggagtatacggtcaatgacattattgatggcaagacggttaatgctgttgaagggcttaaggtttatgaagggttggtaaatgagaatgagaaaaacaagattctctctttacttaatgaaacaaaagcttcttttcgtcgaggagggcttgaagctgggcagactgtaataattggaaaaagaccaatgaagggtcatgggagggaaattattcagctgggcattcctatcgttgaaggccctcctgaagatgactatccaagagagacaaaagtggaggctgttcctggattgctgcatgatctgtttgaccgcttgtgtcagaaggaaattataccaacaaaaccagattattgtgttattgattactacaatgaggatcaaatgatttttttccccagggggattattctcaccctcaccaatcccctccttgattgtgatatggtgttcggccgagttatttcaggagaacgaggtgatcatagaggtcctctgaagctctctctctcgacagggtctcttctggtgttgcatgggaagagtgctgatgttgctaagcgagctattcctgctgcatgtaagcagcggatcctactaagcttcgggaagtctttatcgagaaaacaagtaccatctgaaagtgtttcacggtttactaccccgttgacaccacctcctatgccctggggtcctccaaggccggctaacatggcgcgtcattcttcaagccctaaacactttggatatgccccaaacagtggcgtacttccagcgccggccattggagcgcatcacattcctccatcagatggaatgcagccactctttgtagcacctgctccagttgctgctgcagccatgcctttcccatcacctgttcctttgccaaactcaacaacagcttggatggcagaagctgctccaaggtctgctccacaacgactcccagttcctggcacgggggtcttccttcctcctggatcgggtcacgcactgcctcatcagatgatgacagcttctcagtctcctgccgagccaatctcttcaacagattcatctgcttacgtgcataacaagagcaccagcaccatgggggagatggccaacggtgacgtttctccaaagagctcaccagcaaaacaatccgacgcggttgagcagaaaccagagtgcaatgggagctcgaatggtggcagtagcttggtggataagaagtctgctgtaagtaaggagcagcagaatggtgggatgaagaaggttgggagcaacaaggtccagccgaatgccgcaaaatagaggcagggttgtagtacatagacaacaacaaaaagacatgaagagatgaggaaacttcaattttttggatcgtgtggttgcaagcacagaaagaaatcccaggagtatgctgcgctcaagtgagagcttcatcgacagcagtgttgctgtcgcggctgtcgcccatggcctgagacctcgctgtcgagttcttaggactgaatgctatattaaattttgtagctgctctgtagcacaactggatgatcactctgctctaagttatccttggcaattatcttatggagatatggggctatgtgctatgaccatttttgcggcatttgttttttgcaaaaaaaaaaaaa

SEQ ID NO: 74260 - DNA, 336 bp, Oryza sativa
  Clone ID: PAT_MRT4530_74463C.1
atggggcggtgggcgagcccaaagacccgtggcgtcggagggaagccgtaccggaatgacagctcgcaaaaggacgcgacgcggatcaaggccgggatcccaagcgacgatgagggcgacgtggatcgcgaggacgtccccttctcagagaaggaagaggccgccatgaacaggatccacgcgagagccatggccaagaaggctgccgcctccgccgcgatcgcccccgcccccgccgtcgtccccgccgcgatcgcccccgtccccgccgacgtccccgccgcgatcgcccccgtccccaccgacgcccccgacgcgatcgcccccggcccgtga

SEQ ID NO: 74261 - DNA, 327 bp, Oryza sativa
  Clone ID: PAT_MRT4530_74464C.1
tggaccgcatggaccggccatgcggattaggccccacgtttgaggacaccccagaatatgtgctgtgacacaaattgcaatggtggaaaaatggaaccacagtgttgatgatgggaaatgtgctgtgcacaaaatgtgtggtacaaggcagatgtgcagtgtgtggcgccacagttgggcaggcgctcacgacaggtgggagctgcgagctgggcggcacgcggcaaccacatgggttggtttggtgggagaagatgacctggggagataacaatgagggggatgcgatacaaggaggaagatatgggtattttttgctgcccacga

SEQ ID NO: 74262 - DNA, 1368 bp, Oryza sativa
  Clone ID: PAT_MRT4530_74465C.1
atggccgtcggggagctgggtgatggtgctgcatcggaggggatggcgcggttatccctatcagcaacggtgacggccatggcggctacggctacggctacggcgacctccagcgtcttcgacaacgacgacctcctccgcgagatcctcgtccgcgtcgcgttgccccactgcctagtccgcgcctccctcgtctgcaagtcctggctccgcaacgcctccgacctggtcttcctccgccgcttccgcagcctccacccccctccgacgctggggttctacatcgattcctcggtactctcttgccctcgcttcgtagccctgcaaggccatcctcctgagctaggtgttctcctcggccgcgccagccgacacttcgatgcgtggagcgatgtgcccttgagcatgtgggattccagaaatgggcgtgtgcttgtcgaaatctatgggaaacttgcggtgcatagtcctcttcttccgcctgctgatatttctgtctacccacagacccctctgaaagtgtggctagatcgttctttcacctacaacctccatgaatttcttcctgaggatggtggtaatgggagagagtactaccgactggctttaggctacaaatgcaagtgcatgatagcttatctgtttcatttggttgatggcatctgggttggtcgtgcgtccgacactatttcattcccaggacctgatgaacaggccgagctggtcataccattaggagttcatgcttttggaaaattatttctcctcactaacttcagcatcatcattgtgttggattgcaagactctggagttgaccaaagtgaatattactgatgagattgaattggaagattgtgatgaggttgatctgtgcgaaggcaagctcgaggatgagtttactctcaggctggagaatcgtgtgcccatgtcagtattctcggaatcgcaaacgctgggaaggggcagttggggcgttgcacgcattaaaggaggctcagcctgggccctcacctcgctcgctccccccgccaaatggtggctgggcgagggcctcggggcaaagcggtgcaagggcccgaggggcatgacgtggcaccccgaggccccgacccccccggccgctcctgcggttcgcggactgcgggggcaggaccaggctgtagggacacatggcaggatgggaagggggtcggctataccacacctcgactccctcgcccgccacgcatgtggcggtactggtgacgtgcttccggcatcgcgcattacggcggataggcaccttagtctcccccgcaagatcatgtcggaaggcgccgccgtgatggcgggggagtcgcggccgcggccgcggtacccggagtga

SEQ ID NO: 74263 - DNA, 575 bp, Oryza sativa
  Clone ID: PAT_MRT4530_74466C.1
gtgatctaggaggctgatccaattggtgcattgtcattgtcagagggatgccatatgagggttgtacgtgtatctgatattctgataagttcttgccatgcttctatactcaagaggacctgattgatctcctctttttgcagggatatgtgtacaccacatcaacggaggtgccactgcctatggatctgatggacgggactatgatgtcgtgcccacatcatatttctttaccgcacgcatgttggacagtcgtcgatcattcatgacagaggcaattcatgcgatattgattacagagcatgcactacatgggctagacactgatagccttgttgccgatgctagcgcctatacacctatgcgctaagagtttacggccattggtgatatccccccgtcaggtctgacggagtacgcctgcaccatttacagtcgtggggagtcatctaactgaaatgacacgtgtttcatggatcttaccgatttagcagatcgacatgatgctgaagcgctggtaccactgtgtcaaaataaccttatgcattgcacacggtgcgacctttgcgagaggc

SEQ ID NO: 74264 - DNA, 578 bp, Oryza sativa
  Clone ID: PAT_MRT4530_74467C.1
aactagtggatccccgggctgcaggcggcacgaggcttctccttgtccttctcccatcggcgggaaaacccgcgcggtgagctgagttgatctctctctcaagaaccgaacgtgctctggcgatggaggccgtcgtcggcgtcaagtacaggccggtggtgttccccaacggcggcgcggcggcggctgcggcggggaagagcaaggcgacgccggcgtcggcgacggcggcggtgtacagggagtgcttgaagaatcacgcggcgagcttgggcgggcacgcggtggatgggtgcggggagttcatgccgtcgccggcggcggatgccgctgatccggcgtcgctcaagtgcgccgcgtgtgggtgccaccgcaacttccaccgccggctccccgaggcgccgccctccccgcctctcctcgcgctgcctccgccaccgccgccaccgccaccgccaccgccgccgccgcagcctcagcagcatctgccgcggaccgcggcggtggcggtggcggtggcgccgcagctgctgctgcatgggagccaccagcgtcgcgagcagtcgccggagaccgac

SEQ ID NO: 74265 - DNA, 3408 bp, Oryza sativa
  Clone ID: PAT_MRT4530_74468C.1
atggccattgttctggatgcgttcgcgtcatacgtcggcgacctgctcaagcaggtggccaaggacgaggtcaacctcctcttcggcgtctccggtgagatcgccaccctccacgacaagctgcgcatcctcaaggactacctcgctgacgccgatcgccgacgtatcaccgaccagagtgtccaagggtgggtgacgaagctcaagcacgccatgtacgacgccaccgacatcctcgacctctgccacctcaaggccatgcagcgccagcgcggtggtggcagctcatcctcctccaaccctgtgggctgcctggactcgctgctcttctgcctccgcaatccactcttcgcccacgacattggaagccgcatcaaggcgctcaacaccaggctcgacgccatctgcaagagcgctgccgctttcagcttcctcaagctggaggcctacgaggacatggcagcgccccgacggtccagcgccaccgaccgcaggacggacccggtgctggggaaggagagatcgggtgttgttggggagaaaatcgaggaggacaccagcgcgctggtgcaaaggctcaccaacggcaacacggctatgacaacgatcatggtggttgccgtggtgggcaccggcgggatcggcaagacgacgctggcgaagaaggtgttcaacgacgagaccatccagaaagcattccacaagaagatatggctgagcgtgacggaagaccagaaccaggtggagctcctgagggaggccatcaagtccgccggcggcgccagtggcgccggcgatgctcgagacagcaacagcaagtcccttcttgtcgacgccatcaggaacaagaggttcttccttgtgctagacgacatgtggagtgacagggcatggtggaacctgctcagggagcccttcagccatggcgccgtcggcagccgtgtcctcatacccactcgacatgacgacgttgcccgagggatgcaagccgtccgccccttccaccacgtccacaaactgtatcctcgagatgcctggtcactcctcaagaaacaggtagcgtcaagtgatatggaggagcttgaaattgacgacatgctcaaggacatcggaatggaaataatagacaaatgtgacggattacctcttgctgtaaaagtaatgggaggactgttgcgcaggagggagaaacagagagccgattgggaacaagttctgcaagattttatatggtcagtacctcctggtgaactaaatgatgcggtatacctgagctatcaagatttgccttcttgtttgaagcagtgctttctgcactactccctcctcccaaaaaatgtagaattctacgatgtcacggtcattggcatgtggataagtgaaggatttcttcacggggacactgatgatttagaaaaattaggagaaaggtactatcaagagttaatttacagaaacctaatagagccagatgtagaatacgctgatcaatgtgttagcaccatgcatgatgtcattcgttcatttgctcaagatatctctagagatgaagcacttgtagtttcaacttcagatgaaagaggcaaaggtgcacttagatcacaaaagtttcttaggctgtctgtagaaaccaatgattttcaaccgaacgatgaacttgagtggaaactcatacaaggccagggatcacttagaacactaatagtgattggcgagctcaagattgaccatggggattcgttgattaattttacaagcctaaggactctgcacatagaagacacaaattgtagtgcatccttggttgaatccttgcaccaactcaagcacttgaggtatctgttcctagaatgcagcgacatagctagactactacagaacatcagcaaactcaaattattgcagtaccttgagattatatctgaaaatttggtcagacttcctaacagcattgtaaagctagggcagcttaggcatcttgaccttctaggcataagcataagtggcataccccgacagttctgtcgactgacaaatttgaggtatttgtatgggtttcctgtacaagcagatggtgactggtgtagtttacaagagctgggtcctcttgctaagctacggagacttgcactaagaaagctagagaatgtacccgttacctccttggctagagaggctaggcttggtgagaagttgcatcttcgctacttgagattagagtgtagcagtagacttggtgaagatgggttagtagaagatgagaaaggtgtctctgaggaagaacagcggcgaatcgaggaggtgttggatgagcttaccccacccttgtgcctagaaaatattgatatcacaggctattttggacagcggctaccaaggtggatgatgtcaggagcagcaggtgcatatatgaggttgttgattgtgacgatggatgacctggtctgctgcacccagctccctgacggcctctgccagctcccatgcctcaacttctttcaggtcacccgtgcccctgcaatcaagcatgttagccctaaatttgttactatgcagccatcatcgagccaattccgccatgcccatgcattcccaaagttgaaggagatgaggctgatcgacatggtggagtttgaggagtgggagtgggatcatcaactgaataatgtcccggccatgcctgaattggaggagcttatgctcgaaaactgcaagctgagatgccttcctcctggcctttcctcacaagcgacggctttgacaagcatgggtctatgtgacatcaaatatctcaactttgtagagagctttgcttctcttgtcaagcttgagctgcaagataaccctgacctagagagggtcacttcaatgcctaggttgcagaagctcatcatcataggctgcccgaagatgaggacattggagggtgtgcctgagctacggaagctagcgctggaggattgcgacatggaacaactcccgagatacctacagcaaggtgtgagtcctatgcatctggtgttggactgcagcttagagctgctcacatccatagcccttggagaatctggtcctgagtggggcaagttgagccatgtccagcatgtcaaggcctatgctgaccaaggagacgataaaaggaagtggcatgtgttatacacaagagaaccctacagtttcgagacaaatatcggtgacagcccttcttccaattctggaggtaaatcagcccagctgcttcttctgatttctgtccataatactcttttttccttatttttacccatgtttgttccatctttcaactgcatgatgcacctccctactgtttccatttcgcttaatggacagcttcagaggatgagtaggagacaaatacttcgacggctcaaggcacccaaggggtaa

SEQ ID NO: 74266 - DNA, 360 bp, Oryza sativa
  Clone ID: PAT_MRT4530_74469C.1
atgaactcgcagaagaagcgcagccccaagatcgagcccttccggcaccgcgtggatgcggacccaaagtccttcgacaaatcgtggaagaagctcgaggacgccatccgcgagatttacaaccacaacgccagcggcctctccttcgaggagctgtacaggttgatagatctacgccgcatcccctgccctgatttttttctgttttatgctaggttgattttggcgcggcgtcccatgtggggggcgggggatacggggaatcgagttttgtatgaaacgccagctcgattagtagatttagtttctcacactgtcatcgttggagtcatttttttttccttaggttttgctgtatga

SEQ ID NO: 74267 - DNA, 535 bp, Oryza sativa
  Clone ID: PAT_MRT4530_7446C.1
ggcacaacccaaatgactcatctattgataatgaaggtttgtcccctttatgctccctggtttactgcaataatgtagatttatcccttatatgctccccaatttaatccaaatgactcatgtattctggtagtgaaggttgtggtccctttttgtgctccctgtattactgccataatgcaggtttgtctttcttatgctccccgattcactgcaaaatgtacagcataagttccaatgtatatcatcaaagaaccttttgtgatgaaaatgatatttacttgtcaagcacttcataatatgaaattgcatggcagtcatgtactcatgtttatgaccacattgttattaaactccgtgcgcaagccgtccatggagtaaaacaaaaagtaggaacgggcttcatttgtgctctttgaagttgaacagatcaatcacacatcactgatacgtgagagagattgacccgtaactactctgggtgactgattgatagaatcgcgtcaatttgggttactgataaacttgcaaaatc

SEQ ID NO: 74268 - DNA, 607 bp, Oryza sativa
  Clone ID: PAT_MRT4530_74470C.1
ttaattatgaaactgatgcgaaatgtcatcttatttgggctgaatttatttgtatgtagtagtgtgctacttgcggctgaattaccaagctataaagcgattgaaatgcaaattaatgatgcaaaaaagctagataagaacgatagcaataatgcactggtgaaacacttagaagaaacgcgcagtttgttagagaaaattgctcaacaaaaaaatgataatgaagatttaacgaaagagattaaaggcgcgagcgttgcattaggcattagccaagcgaatattgaaaaactaaaaaatgtaattgtgccaacagttgatatgttggaaaaaagttcgattggcgtttacaaaaagcattaacgagtttagaaactgaattagaaatgattcagaccgaattaaccactatcaatggtaatttagtagcacaaaatgccgtgcctgataaagcacaattagccttagcagataatgcaactcggcgacagatgattaacgctgcactaggtaataccaacctttcttcagcagaaaaagttaaatttgaaacagaattaaccttattagatctacaaaatggttataactatgatttattacgtgg

SEQ ID NO: 74269 - DNA, 1215 bp, Oryza sativa
  Clone ID: PAT_MRT4530_74471C.1
atggccgacgtcgtgcgcgcgggcgcggcgtcgcggcggtggcgccacctctcgacgcgcgttccttccctgcgcttcggcttcaccgaggacggcgtcgacgcgaagccgaagcggcgcgagaaattcgaccggttcgtcgccttcgtgaaccacgtcctcgacgcgcgcgccgccagcgccggcatcgagcagctggcgatctccatccaactgtatgaccgcggcgccgcgcatgccgtcgccgcgtggattcggggatacggctcgtcggcgccggagccggagccgatagcagccgcctactcagccggctcgtgttgtccgcggctccggaagctacggctggtgagcgtagtcgggctgagatcgagcgctgtggctcgacgccgacgttcgctgcaacagttccctaggaaccgggcgtttggtgtgcttgagctcaacacgccgaatcttcgctccctcaagatgtgctgttacgcccctggaacattgagaatctcggcgccgaggctggaggagttgagatcctccaacaacgtgatagacatgaggtggcaatgcgtagagcaactcgacgttggtgacctgtcgtgcgtgcggggactcagggagatcgacctgagctctcgtgggcaccccgtccgcgacgccggcattaacgatggccccattcatctcctgcggcgttgtactgccatcgaaagtcttggtgttcgccttgtttctccagataaggaatacgtagttatctgggatgcagaggcagaggaattgatagatgaagaggaagagaaagaagaggttgatgacatgatgaaagatgtaccacatttgcccggagtcacatctttgacaataagggattctaccctaaacgaacgtgctcttatgactggcgtaacatgtctccttgcacgatgtaactctctcagatactttcagctcaacatgaccagcccgattatggattccaccattgctgctggtaatcaagctagcatcatctcgcttccacatctcacggaagttgagataagtggcttccgaggacggaagtgcgaagcccgcttgatggaacggctgcatgcaagcgccactgctctcaacaagatcacattacgtttcgactggctgtttacagtagaaagtagcagagaggaacgcataaattcgctgcccctaatccctttcggtgaggttggcaagtag

SEQ ID NO: 74270 - DNA, 2395 bp, Oryza sativa
  Clone ID: PAT_MRT4530_74472C.1
cggccgctcgccccagaccctcttttgttccctgcctctggtgtttgtcctgtttttttggcacggcggtgcaaatgattatgtctgaacattgcaaatgattattagcactgacacggaaactgcaatgattcagagttccatacacagcggaattagacggcgacgatattacaacgggtttatgtccagatcagataaacgccgatgctctctgcaccccacttacacttcatagaggctatgaaaaacagcacgggatttttatacagtttacggcaaaaaggaaggctactagcttactgctactggtggtcgttcgcttcggtttttacttcctactgaagaggttgcgcagcttgcctcgctcaagcttctcgagcagcttcttggcgccggcgacgtccatctcggagagcttcttgaggtagccaatggcgccgtgcgagatcatcagcttcttgcagcgcttgctcgccgacagcgtgaggaggcaggagatggcgtacttcttggccgtgttctgggggctcggctccagcagctgcaccaggttggggacgctcttctcgtccttcttgatgtccctggcgttcgccaggcagctcatcaggctcgccaccgcctgcgccgccacctcgcgcgcgccgttcgacttcgcctccagcagccgcaccagcagcggcatgcacccgtgctcgccgaccaggcgcttcatctccgacgagctcgacaccctgcagatcgccgccgcggccgcctgctgcgcgcccacggagccctcgcggagcacgtggacgaggcgggggagcacgcccagcgacaccaggctgtccggcgagatggcgctgctcaccaggttgcggagcgcgcccacggcggactcctgcggcagcgggccgtcgaggtaggcgagcaggctgcggaggccgccctcggacacgacggcgcggcggaggccgtcgttgctcgacgtgaggctctggaggcactccgcggcgtactccttgcagccgagcacgacgccgcagtcgagcaggttgaccatgacgcgcacgatcccttcctccgccagcgcttggcgcacctcgggcaccgcggagaggttcttgagcgcgccggccgccgcggactgcgagatggagtccccggtctggcagatgtcgatcagcgggcggacgccgctgtggccgacgatggcgcgggcaatgtcgggcgacatggacagccgctgcagcgtgatcacggccttctcccggccgaccaggctgccggactcgaccagccggatgagcggcggcagcgcgccctccgacaccagcaagcactcgcagctgccggactcggccagcaagcagaggacggtggccgccttctccctgatcttgggcgccgtcgccgtcagcagctgcaccagcgccgccacgttgccgcggccgagcgccgacagcacgctcttctcgtcctcgcgtagcgcgtcgaggagcccatccaccgcccggtgcttcgcctccgcgtgcccgatctgaagcctcgcaagcagctcccgcacatccgtctgcgccgccgcctcagccgccggcgccaccggtggcacggtcgcgtcggacagcacaccggtcttgataagcagcgcgcaatcccggaggttcaggtcgagcttcccggcgagcgcgtcgaggtcactctgcatctgcagcttcccggccctcggcggctcgcggcagcgcgccccgagctcggcggcctcggcgagcgtggcggccaccgactgcagaagctcgcggcagagcgagttcttggagaagcacgggtggctggacaggtcggacaggcacggcggcaccctctccagcctcgccgcgataaccttccaccggccgccgaagccggtcgccgcgcgcgccgcgtccagcgccgccggcaccagcgaccgcgcccgctccagcagctcctccgccgtcccggccggcgccggcgggtcgccggccgccggacagcaatgcaagctcattcctcggtcgaagctacaacaccgcacctcgtgatctgcagtgttcggagtatggagtagattagtgctcactctcagttcagccaagaacgaagcagacaaatctccgaaccgcgcctccccttctgctccgaacccggaggccgcccctctcccccccctcgaagcgtcgccgatcgccagcgcgcagagaagaatagccgctcctcctcctgctgctgctgctgctgctgcgatcaacgagacgctaatcaccatcaagcgccggccatcatcatagcgagaagcttcagctcttccatcattatctgttgcagcattgaagcagaaactgctcttaactataccaagcttcagctggcaaagagtggttagcgccat

SEQ ID NO: 74271 - DNA, 1535 bp, Oryza sativa
  unsure (1)..(1535): unsure at all n locations
  Clone ID: PAT_MRT4530_74473C.1
gtaatccaagagagaggtactaggcaggtagcttcatggaggacatcgtcgcttaccatttcttggtttcaattgggtgatgctgtgttgcaggaagatgcctcgtttagttatattccccttcttccgactagatttggggaatttggctaaagaaaggtagacgcatcatggggctcttaggtatggtgggcgactcattcggntgctcagctactggtgagcggcttgtctctgctgcaagggatggagacatccaggaggctatggccctgttggagcttaacccccgccttgcgcgctctccccccccgcccccgtgctgcccgcgcccccccgccgccccctgacagcgactcgggcggcgccggctcaccgcttcacttggcagcccttcatgggcatgctgagtgcgtgcaattgctgttagaccttggagcctctgtttcagaggtcactatcaatgatggttcaactattgatctcataggttcaggaagcacacctctccactatgcggcctgtggtggaagtgctgtatgctgtcaacttcttgttgcagccggagcaaacatgagagctcaaaatactaacgggttgacccctttgatggtggctcgttcatggcacaaaagtagtgttgaaggtatcctaaccaaacggccagaagttccagtacgcattcttccatcatcatatctgtctctcccactgatgagcattgtcaaaattgccagggaatgtgggtggagaaaaacttctgtctcatctgtttgccatgacccatgcgccatatgtttggatacggaatgtacagtgtctgcagaagggtgtggccatgagttctgcaccaaatgtgcgctctacttgtgcgccaccgctagcagctcaacatctatccgtggtgttcctggctccataccttgccctttgtgccgccacacgattgtctcattcgttagactcacaagtacaaccccaataaaggagcttccgtggacgaacaaatcgttagctctatgtgcagcaggggcaagcaccggttccaaatatgctggtcctgcagcaatcactagttccaagtatgccggttctttgcaccgaaggtctgagatgcgcagcctgcgctcctcttcagttgatctaggctgctcatcgtttcgaaccgcgagctcagggaagctgtcgtcgataaagctgaattgcaccggagccgacgagacgatgccctgcctcgtcaattgcttcaggccggatgtgcagcggtcgtcttcgtatagggaaagaattaggagatattcacaattttcatagcattactgtctatttgtatttgtgcctcccatccattttgtgagtttccgggggtttggcagtacaaacttgtgcagtgtttgttcatgcttttctcttggcttcttcatacctgtagtctgttctgttcttctgcttgtggtcttgtaacatgacatgtgatcctcatggttaagatgtgtttgtgtacatgatctataaaaaaaaacttatctgaaacc

SEQ ID NO: 74272 - DNA, 2742 bp, Oryza sativa
  Clone ID: PAT_MRT4530_74474C.1
ccctttattgtcttgcatttggaggagaagtatgaatccttagaccaaatgaagcttgatagcattgtgcatctcatcttgcatgagatcaactgcctactgaacactatatctgatgctcaggatgtgaaacagaatgaacttgttgagaagtcactcgttgtcacactcttggaacactttggacaagaggtggctgatctaaggtcagagcgaaacaccctgaagcaagagcagcaagcaaagagcgaggaattgctccagcttcagagagaaaaacaagaacttgtgaatatcactgatgagttctgggaagaagtggagactcgtaatcgcaaagtggatgagctaagggcagaagcaaagttcttggtcggacagttgtcagaactgcaagggtctcggaggtcattgcaaagtgagattatcaagcttattcaagaaaactcaatgctatccgatgaactatgtgattccagagagaaagagagggttttcgaagatgattttagcattctgatcagtgaggtaatgagcaaagatatcctttctgtggtctttagaagccttcatgaagagaggacattgcaattggtgtctttgcatagtgattttgcacaactgcaagcagcaggcagtgagctttatcaggacatcaaaatgatgaacatgaagcttggggatttagaaaaagaaagtaatgagtgcaacaaagaactcagtagaaccatcagtatttgtaattcgactagtacagaaaatgctataggaagtggatatccagtgggaagggacaccgatcacctgaattctggaaggagccaactggagtaccatgtaaacatggaaacgggtcgcgtccaggttgacatggctggccttgagaaatcaaatgaaatgctacaagaggaagtacataaaatgcagagtgaaatggaagttcttacaagcaaggagaactctgcaattgacatcaaatcttgtgatgaagacatcaaaagattgctggctaacatgcaaatggccatcgtgaatgcggctctattcaaggagaaggtccttgagctcataataacatgtgaaagttttgagataagcagtatggtacagaaggaggtgctcaaggaagagatcacccgtaggaactcatatgtagatgagctgaaggacaagctgaatgctgttgagattgagaacagaaggctgaaagttgatttgaatggagattttacagtgttggggtcattgcagaatgaagtcagtgccctagagaaacaaaccttatcccttgccaatgattgtttgcaatcaaataagctcaggatggaggaaaatgcattatcaactcaggttttgaagaccaatatgagatcgagtggtgatcagaatacagtacggacagtaaaagacatggagctgcagaaattgcatgggaccatcaaagcactccagaaggtggttacggatacagccgtccttcttgatcaagagaggcttgatttcaatgccaatctgcaagaagcgaggaagcagattgaggtgctgaagctgaaggagattttggatgatgacttgattgaaatgaattatgagcaaatgctgaaagacattcagcttgacctcatccaaatttcttctggtaataaaaccggttcccttggtcaggccaataaaactgtagcacaggcaaatgagaagatgcttgactctcatggcatcgttggagctagcagtagccatgtacgcaatgatttgagaccgccgcaaagtgagtcgtttgagagggacaattacaaaaggcctccctctgaactgatggtcgtgaaagaactcagcattgacaagcaagagttaccaaggtcaatcaccacggagccgcaccaagagtggaagaacaaggtaatcgaaagattggcttctgatgcacaaaggctcaatgccctccaatccagtattcaggagctcaaaacaaacacagaggcatcagaagggctcgagctcgagagcgttaggtaccaaataagagaagctgagggcttcatcactcagctgatcgatagcaacggtaaactgtccaagaaggctgaggagttcacatctgaagatggtcttgatggggacaacattgacttgaggagcagacaccagcgcaagatcatggagcgtgcgaggaagatggcggagaagattgggaggcttgaggtggaaatgcagaaggtgcaggaagctctgctgaaatacgaggagcagactagcacaagaacatcaaaaaccatgcaccggcgatcgaaagtgcagctggtagattttctctatggtagaaggcgggacagtcggaagcaacagcgatgttccccatgtggttgcatgaaagcaaatgccattgatgactaactcgccttcatgccgcttcttttttaaggcaaaatggaaggctaagcttttcagtttcagaactgtagcaagtcatctgctgttcatggtttcttaggtaaataagtggacatgtaaggattgtaaatggtagtcattgacagtttctttttttctgaaaccatatggacaataaccatctgttataaattttatttcttagcttgtaaaattaaggtcaactttatttcttatcatgttccatgatatgtgtaaagagaacatgacaatgtttttcttttttctgtaagaaagacgggttataattaattatttgaagaaccttttatgtggatttttgcacaacaa

SEQ ID NO: 74273 - DNA, 1878 bp, Oryza sativa
  Clone ID: PAT_MRT4530_74475C.1
atgtggacgccgtcgcgggggtcggcgagcgggcggcgggcgacgggtcaccgccgcatcgcggactacctcgccgacgaccggacggaggcgtcgacggagaacgggtcgttcaacacggcctacagcgacgagctgttcgcgccgacgtcgtcgtccgccggcggcgatggcgtcggtggaatgctgccggcgttcctcgccgaccagagcgacctcgtggaggtcatgctggagctcgacgaggagtccatggtggtgcggagcgtgacgcccaccacgggcgcgctgtacgggcccacgtcgttggccgggggcggcgccgcgcacacgccgccggggagcgggcggagcctgagccggtgctcgtcgacgtcgtcgcggatacgcaagaagttcgcgtggctacggtcgccgtcgcccgcgccggcgcctcgcgcccccacgccgtcggagccgccgccgccgcgggaggcggcgatggccgcacgcgagcggcggcgcatccaggcgcggctgaaccgtgctcgctccggcgccaggcgcgccctcataggcctccgcttcatcagccgcaccaccggctccgccgaggccgccgagctctggacccgcctgatcgtgctgagcgcgtcggcgaacaagctgtcgaagctgaaggagcaggcggaggagtacgcgtcgctgatcatggaggagctcgacccggaggacctcggctacatcgagctgtggcagctggaggcgctgctgctccagcgagacgcgtacatgaactacagccggccgctcagcagcggcagcacggcgcagtggagccagaacctcggcggcggcggcggagggcagcaaggagggcaagggcaggggcaggggcagtcggaggggaggaggaacgactggaggcggcggtggagcccgcggcgagcggcggcgagggcgcaggtggcggcggaggagaactggcggcgcgcgtgggtgctggcgctgtggttcgccgccatggcgggactgttcgcgtggaagttcgtgcagtaccgccgcacgccggcgttccgggtgatggggtactgcctcccgacggcgaagggcgccgccgagacgctcaagctcaacatggcgctcgtcctcctccccgtctgccgcaacacgctgacgtggctccgctcctcctgggcccgcttcttcgtccccttcgacgacagcatcaccttccacaaggtggagagtagctcgggctttaagtgggccccaccggggcggtccaatcagtgtagcgtggccggggaacccgcgggtacagaagatccccggcccggtcggctcagggtcaaagcgccggtcattcaaaagtctccccgaccgacagggctcccactgtcatgtggggccactatcatcgcgacggcaatcgcgctgggcatctgcacgcacgcggggacgcacctggcgtgcgacttcccgcggctgatcgggtcgagccgggaggagtacgagctgctgctgtccggcttcttcggcgcgtcgcggccgacgtaccggggcctcctcgccggcgtcgagggggtcaccgggatcgtcatggtggtgctcatggtggtctccttcacgctggcgacgcggccgctgcggaagcgggaggcgccgcgcctcccgttcccgctcggccacctcgccggcttcaacgccttctggtactcgcaccacctcctcatcgtcgtctacctccttctgctcgttcatggctggttcatgttcctcgtcaccaagtggcaccagaggacgggtcatcctcctcctcctggtcctgcctgttacggtgatgggcacagggcaccattggaaaaaaaaaggagagaaattttagttgcaaattaa

SEQ ID NO: 74274 - DNA, 209 bp, Oryza sativa
  Clone ID: PAT_MRT4530_74476C.1
aataaggaatcaaatgattagcaccagcgttgtatttggttatttactgaaatctcctgttggggagatggttggattgttagtgtggatgatttagcatatataatttggggattttatagttggtttccatttgtgtatgcagcgaaatttggcatgtaatttcatctgttcttatsagacaaaattcgatgtatttctttcgacac

SEQ ID NO: 74275 - DNA, 2622 bp, Oryza sativa
  Clone ID: PAT_MRT4530_74477C.1
atggccgcacgcgagcggcggcgcatccaggcgcggctgaaccggtcccgctccggcgccaggcgcgccctcaagggcctccgcttcatcagccgcaccaccggctccgccgaggccgccgagctctggacccgcgtcgagcaccgcttcaacgccctctcccgcgacggcctcctctcccgcgacaacttcggcgactgcatcggtaagcaagcaaagccatcctccatgtccatggcgcgccgcgcgcgggcgcgatcacgcgatgacacggcgtacggcgccggcattggtgcagggatggaggactcgaaggagttcgccgtgggcatcttcgacgcgctggcgcggcggcggcggcaggagctcgagcggatcagcaaggaggagctctacgacttctggctgatcgtgctgagcgcgtcggcgaacaagctgtcgaagctgaaggagcaggcggaggagtacgcgtcgctgatcatggaggagctcgacccggaggacctcggctacatcgagctgtggcagctggaggcgctgctgctccagcgagacgcgtacatgaactacagccggccgctcagcagcggcagcacggcgcagtggagccagaacctcggcggcggcggcggagggcagcaaggagggcaagggcaggggcaggggcagtcggaggggaggaggaacgactggaggcggcggtggagcccgcggcgagcggcggcgagggcgcaggtggcggcggaggagaactggcggcgcgcgtgggtgctggcgctgtggttcgccgccatggcgggactgttcgcgtggaagttcgtgcagtaccgccgcacgccggcgttccgggtgatggggtactgcctcccgacggcgaagggcgccgccgagacgctcaagctcaacatggcgctcgtcctcctccccgtctgccgcaacacgctgacgtggctccgctcctcctgggcccgcttcttcgtccccttcgacgacagcatcaccttccacaaggtggagagtagctcgggctttaagtgggccccaccggggcggtccaatcagtgtagcgtggccggggaacccgcgggtacagaagatccccggcccggtcggctcagggtcaaagcgccggtcattcaaaagtctccccgaccgacagggctcccactgtcatgtggggccactatcatcgcgacggcaatcgcgctgggcatctgcacgcacgcggggacgcacctggcgtgcgacttcccgcggctgatcgggtcgagccgggaggagtacgagctgctgctgtccggcttcttcggcgcgtcgcggccgacgtaccggggcctcctcgccggcgtcgagggggtcaccgggatcgtcatggtggtgctcatggtggtctccttcacgctggcgacgcggccgctgcggaagcgggaggcgccgcgcctcccgttcccgctcggccacctcgccggcttcaacgccttctggtactcgcaccacctcctcatcgtcgtctacctccttctgctcgttcatggctggttcatgttcctcgtcaccaagtggcaccagaggacgacatggatgtacattgctgtgccattgatgctttatgtcggcgaaaggacgctacgggccttcagatccaaggcttatgcagtaaaaatcctgaaggtgtgtcttctaccgggtaatgtgttgaccatcacaatgtcaaagccttatggattcagatacaggagtgggcagtacattttccttcagtgtccaacgatctctccatttgaatggcaccctttctccatcacttcagcacctggagatgactacatcagtgtccatatccagaccaggggggactggacgcaggagctcaagcgcattttcgtcgagaactatttcgtgccaagcgttccgagaagagcttcatttggagctctaggcatggcagaacagaagagtccaccaaggttgcttgtagatggcccttatggcgcgccggcgcaggatttcaggaactacgatgttcttctccttgtcggcctcgggatcggtgcgacgcctttcataagcattcttagagatctgctgaacaacatcaagctggctgatgagctgatggatctggcaatggagactagcaggtctgacgacagcgccaacagcttcagtgtgtcgacggcgagcagcaacaagaggagagcgtacaggacgagcagggcacacttctactgggttacaagagagccagggtcattcgaatggttcaagggggtgatgaatgaagttgctgaaatggacaagaagggtgtcatagagctgcacaactatctcacaagtgtgtatgaagagcgtgatgccaggtcgacgctgctctcaatggtgcaggccctgaaccatgcaaagcatggtgtagatattgtgtcaggcacaagggtcaggacacattttgcaaggcctaactggaaggaggtcttcactagaattgcttccaagcaccccaattctacagtaggggtattttactgtggaaagcccacactagccaaagaattgaagaaactatcacttgacatgagccacaaaacgacaactcgcttccatttccacaaggagtacttctga

SEQ ID NO: 74276 - DNA, 2607 bp, Oryza sativa
  Clone ID: PAT_MRT4530_74478C.1
atggcggcgcgcgagcgccgccgcatccaggcccgcctcaaccgctccagcaccggcgccaagcgcgccctcaagggcctccgcttcatcagccgcaccaccggcaccgtccaggccgccgagctctggcgccgcgtcgaggaccgcttcaacgccctcgcccgcgacggcctcctctcccgcgacgacttcggcgaatgcatcggaatggtggactccaaggagttcgccgtcggcatcttcgacgcgctggcgcggcggcggcgacagaatctggagcggatcaccagagaggagctctacgacttctggctccagatctccgaccagagcttcgacgcgcgcctccagatcttcttcgacatggtggacaccaacgtggatgggaggataacgagggaggaagtacaggagctgatcgtcctgagcgcgtcggcgaacaagctggcgaagctgaaggagcaagcggaggagtacgcgtcgctcatcatggaggagctcgacccggagaacctcggctacattgagctgtggcagctggaggcgctgctgctccagcgcgacagctacatgaattacagccggccgctgagcacggcgagcggcgcccagtggagccagaacctcggcggcgccgccgtggcggcgggggcggcagcagcaacaggcggaggagcgcacgcggcggtggcggcgagaggggggcagcagcagcagcagcagcaggaggggaggaggggagggtggggggtgaggaaggcggcggcgagggtgagggtggcggcggaggagaactggcggcgggcgtgggtggtggcgctgtggttcgccgccatggcgtcgctgttcgtgtggaagttcgtgcagtaccggcgcacgccggcgttccgggtgatggggtactgcctcccgacggcgaagggcgccgccgagacgctcaagctcaacatggcgctcgtcctcctccccgtctgccgcaacacgctgacgtggctccgctcctcctgggcccgcttcttcgtccccttcgacgacaacatcaccttccacaagatgattgcgacggcgatcgtggtggggatcacgctgcacgcggggaaccatctggcgtgcgatttcccgaggctgatcgcgtcggggccggaggagtaccggctggtggcggacgcgttcgggccggagaagccgacctacgtggggctcctctcgggcgtggagggcatcacgggggtcgccatggtggtgctcatgaccgtctccttcacgctggccacccacccgttccgcaagggcgagaagggtggcagcggcggtggcgcagccgccaccgtcctccccacggtagcgcggctcccctcgccgttcaaccgcctcgcggggttcaacgccttctggtactcccaccacctcctcggcatcgtctacgctcttcttatcgcccatgggtacttcctcttcctcgtccgtcgctggtatttgaaaacgttcttttatgaaacttttctttttgttggatgggaggaggaccacctggcattcaagaggaatgggcgttttatgacatggatgtacatttctgttccattgatgctgtatgtcggtgaaaggatgctacgagccttgcggtcaaatgcttatgctgtcaaaatcttgaaggtctgccttctacctggaaatgtattgaccataacaatgtcaaagccctacggatttcgatatagaagtggacagtacatatttcttcagtgtcccacaatttctcccttcgaatggcatcccttctccatcacttcagctcctggagatgactacctcagtgttcacatccgaacaaacggagactggacacaggagctgaagcgcatattcgtcgagaactacttctcgccacaccttaacagaagagcttcattcagcgagctaggcgccacagaaccaagaagcttaccaagattgctcgtcgacggtccctatggcgcccctgcacaggatttcagaaactacgacgtgctgcttcttgtcggcctcgggatcggggcgacaccattcatcagcatcctgagggacctacttaacaatattaagctagctgaagagctgatggacttggcaatggagaccagtagatctgaggacagtgccaacagcttcagtgtgtcaacagcaagtagcaacaagaagagggcatacagaacaagccgcgcacatttttactgggttacccgggagccattgtcatttgagtggttcaaaggagtgatgaatgaggttgctgaaatggacaagaagggtgtgatagagctgcacaattatctgacgagcgtttacgaggagcgcgatgcgcggacaactctgctgtccatggtgcaagctctgaaccatgccaagcatggtgttgacatcgtctcaggcacaagggtgaggacacattttgcaagaccaaactggaaagaagtcttcaccaggattgcctccaagcaccccaattcaacagttggagttttctactgcggcgcgccgacgctagccaaggagctgaagaccctgtcccacgagatgagccacaggacggggactcgcttccatttccacaaggagtacttctga

SEQ ID NO: 74277 - DNA, 237 bp, Oryza sativa
  Clone ID: PAT_MRT4530_74479C.1
atggcgtcgctgttcgtgtggaagttcgtgcagtaccggcgcacgccggcgttccgggtgatggggtactgcctcccgacggcgaagggcgccgccgagacgctcaagctcaacatggcgctcgtcctcctccccgtctgccgcaacacgctgacgtggctccgctcctcctgggcccgcttcttcgtccccttcgacgacaacatcaccttccacaagtcgtatgtcccattttaa

SEQ ID NO: 74278 - DNA, 297 bp, Oryza sativa
  Clone ID: PAT_MRT4530_7447C.1
atggtgtccttgtactggatgggcatgctccacccggcgaacggcaccatcttcccgccgtgcgcgacgtggaagtcgtacagcgccgtcttcttcagctccgcctccgccgcctcggccgcgcccgccaggtgccgccgcgccgtcgacgtcgcgccggcggcgcggcgggcgagcgtggcgcacgcgagtagccctctcatcttctttcaccaccgtcgtttgtgggggtttcgcgggatacgggcatacggccctccaatgctccatgttgatgcagcaattgctgagagatag

SEQ ID NO: 74279 - DNA, 1906 bp, Oryza sativa
  Clone ID: PAT_MRT4530_74480C.1
aaaaggcccgcccggcacggcccggcccaggcacggccaagcacggcccaccagccatcgggccagcacggcccgatcgtcacttcgtgccgggccgtgccagcccatgggctgcgcctcccgcccaggcacggcccaccagccgtcgggccgtgccgggccggccgtgccgacccggcccaacgtgccggtggagaggcctaggcacggcccggtggtcgggacgggcaggcacgggcccgacccctgacgggccgtgccgtgcttgggccaggccaaaacgccgtgccgtgggccgggccatcgggcctcgggccttttggccatctatattcattggcgactctcgtcttctttagttaccgtacctaatgctatggagatcaggagaagctatatcctttttctttttacttctatgagaaattcagaagtactccttgtggaaatggaagcgagtccccgtcctgtggctcatctcgtgggacagggtcttcagctccttggctagcgtcggcgcgccgcagtagaaaactccaactgttgaattggggtgcttggaggcaatcctggtgaagacttctttccagtttggtcttgcaaaatgtgtcctcacccttgtgcctgagacgatgtcaacaccatgcttggcatggttcagagcttgcaccatggacagcagagttgtccgcgcatcgcgctcctcgtaaacgctcgtcagataattgtgcagctctatcacacccttcttgtccatttcagcaacctcattcatcacccccttgaaccattcgaatgaccctggctctcttgtaacccagtagaagtgtgccctgctcgtcctgtacgctctcctcttgttgctgctcgccgtcgacacactgaagctgttggcgctgtcgtcagacctgctagtctccattgccagatccatcagctcatcagccagcttgatgttgttcagcagatctctaagaatgcttatgaaaggcgtcgcaccgatcccgaggccgacaaggagaagaacatcgtagttcctgaaatcctgcgccggcgcgccataagggccatctacaagcaaccttggtggactcttctgttctgccatgcctagagctccaaatgaagctcttctcggaacgcttggcacgaaatagttctcgacgaaaatgcgcttgagctcctgcgtccagtcccccctggtctggatatggacactgatgtagtcatctccaggtgctgaagtgatggagaaagggtgccattcaaatggagagatcgttggacactgaaggaaaatgtactgcccactcctgtatctgaatccataaggctttgacattgtgatggtcaacacattacccggtagaaggcagaccttcaagattttgacagcataagcatttgaccgcaaggctcgtagcatcctttcaccgacatacagcatcaatggaacagaaatgtacatccatgtcgttttcaaataccagcgacggacgaggaagaggaagtacccatgggcgataagaagagcgtagacgatgccgaggaggtggtgggagtaccagaaggcgttgaaccccgcgaggcggttgaacggcgaggggagccgcgctaccgtggggaggacggtggcggctgcgccaccgccgctgccacccttctcgcccttgcggaacgggtgggtggccagcgtgaaggagacggtcatgagcaccaccatggcgacccccgtgatgccctccacgcccgagaggagccccacgtaggtcggcttctccggcccgaacgcgtccgccaccagccggtactcctccggccccgacgcgatcagcctcgggaaatcgcacgccagatggttccccgcgtgcagcgtgatccccaccacgatcgccgtcgcaatcat

SEQ ID NO: 74280 - DNA, 303 bp, Oryza sativa
  Clone ID: PAT_MRT4530_74481C.1
atggaggaatgcacgccgcattacttggcacgtggtggggttcacgtgagccacacactgagtgcacccacaagggctgactgcactgtagagaggatgacccttgtcaccaccgtcatgaaacacaatgacaccgtcgaagaaagctggtggagcaccgtagccagcaatcaccaaaacacagaggggaggaggtcggcagcggccatgcggacggcgacgagacaacgtgacgcaaagagggaggaggacgttggcgatcatgctggtgttggcggaggaggtcactggccacgcggatga

SEQ ID NO: 74281 - DNA, 474 bp, Oryza sativa
  Clone ID: PAT_MRT4530_74482C.1
acaggacggagggagtagtatttagatgatggtgataggtcagtagttgctgacactgtgactggggttacataaactctttacaggtaaaagtaaaaaagaattacttactgatcgaatgcacctcttatactatctcctttctgttcagctctctcaaggctaagattaatttaaccacatacatagagacatctaatctaatttgttgagatctacacaccgagatgttacaggctaggagtggtacagggtcttgagcctctttgctgcctggatgaagcccagaatcacctgcaactcatccaattgctgctgagactgaaaatgctgctggaccccatggaagagctgttcctttgatggatcggggttcatgcttacaagattgaagtgcttccagtatctccacagggtaggagtttcgagtcttgtcaagtttactctcgtttgcaatattgaactggggtgaaa

SEQ ID NO: 74282 - DNA, 372 bp, Oryza sativa
  Clone ID: PAT_MRT4530_74483C.1
ggcacctatatgaactgtcgttgggacacacgtacggaaacagatatgtgttgccgggtcactggtgcatgtgagcactgggactttctgaacacattaaagacaccaatgcaatcttttcacttggattacattacgaggacatgcacaccatcgctgacgcatcgaatacgggaagaaatattatggatataagaggcgattgttgagactaattcaaagcctcattgtggatatagataaagagagagagaggcaaacggggtagaccaatgacacgtatgcctgccaatggtacgatgttctgaaatctgatgtgtattgtcatgatcgcattgtgcaagtgatatctgaagttgcagtatactacta

SEQ ID NO: 74283 - DNA, 271 bp, Oryza sativa
  Clone ID: PAT_MRT4530_74484C.1
cttatataggggttggtcttgccctctacaggccctcctccatgtccaactcggggtagaaaccaaaggaaacccaaaacatgccttcccgagtaaggaaaccccgagacccaacgaaacacaatcggactcggtcctgccggtcagaccggccacacaccgccggtctgaccggccctcaaccggcggtctgaccacccaacacacggcggtcagaccggccaactcggaggaaaccggtagactttccaaattttggcaatcccttcct

SEQ ID NO: 74284 - DNA, 1403 bp, Oryza sativa
  Clone ID: PAT_MRT4530_74485C.1
atgcaaagccccagcaagatctctgatgcctctggctcaatgccccctgccacgtctgtgcgcaaaggttccaagaagaactgcttcactccattgttcctctgttgggctccttcgtcgacattctcgcctttgctggcacctgccattcttggcgtgctgccttctcatcatacccatcaaaatctgcctttcgcaccttactcccaccactcctcgtccgacccaatgtccgcgtcaaatccccttgtatcccttctaccagcaatggtcctcacaagctactacgctcatgtcagtggttactgtctcgttgttgatgtgttcaccggtgctgaggtttcaccaccacgtcttccattcagcaaggaccatgaggagatctacttttgtggcactctgacggctcctatcacgtcacccaactcacatctccttatcagcaaccggtcatctctgttcgattggccggttggaagtgactcctggtctgagctcaagcttcctgttaatcgggtcgatcagattgtggaattcaatggtcagctcatcgccgtgattgaatacaagctgtacactttgcagttggcccccaagcttcgcctgaagaagatgaaaaccctgtggtgggatgacatgagtgaatgtccatatttgagaccatggctagtggtttgcgatggcatgcttctcattgttgaccactacataactttgtcatttggagcaccagtcaactacagaccgtaccgcctggacatgtcagccaagcctgcaaaatgggtggaggtaaagaagctggagaactgggcactctttatcgggggtgatgcgagaagcccgccgtttgctttcaagaacccggagcgctggggagggaggagcaactgcttgtactatgctcactactcccagccatggagccttcatgggttgggtgatgatgcagatgctgtgtgggatcctaccactgatgataaccttgtgttcaaaagaaactggtacagtcagctgcaggccttctgggtgtatccaagcatgttctattcagacggagacggccagtgattggcacacgcacgagtgctctgctcttattagcttcttctgaaattgcccccttgtgatgtagagcagagacttgtgcaacttggcctagaaatctaggagatcctcatggtggtctttatgtctagtttaacacttgcagtcgttttgtagttcagttattagctgcattaccatctgatagtacgggtgtgactgcactggatgcaagtgtagttaactagttgttgcttttccactggtgatggtaggtaatgtttcgttctgtaagggtttggaacttttgttcttcttcacagccatggtttggaacactaatgtaatgcttgtgccac

SEQ ID NO: 74285 - DNA, 384 bp, Oryza sativa
  Clone ID: PAT_MRT4530_74486C.1
atggagctccggtggattttggcttcggggagatggctgccgggcttcctctccttcttgcgaacccaacggcggcagcggcgaccaaaagcggcggctaaggcggctgctagctgcggctggagacacagcgaccacggcggcgctctggttcacgacgacgggcaacctccggtgggatttggcgcaaaacaaccggtggccgaggtagctctcacccttgcgaagccgagggaggcgacggcactgaccggcgatggccggggcgacggcgcacggcggctggagcggcgccggcgacgacggcggggtggagcacgtggcggcggcgctacgaggcacgggagaccacgggagagggggcaaacgaaagaggaggactag

SEQ ID NO: 74286 - DNA, 240 bp, Oryza sativa
  Clone ID: PAT_MRT4530_74487C.1
gggcgcgtgggttttcccggtaatattggcccggacccggggggtcccccaaaaatccctataggggacctgattaaaaaccgtgtttaccttggaaaaggcggtattcaggggggaataattatcggtaaaaaattccccaaaaaaaaaagggggaaacaaaaaaagttaaaaaaaggggggcaaaaagaaaaataaaacttaaattaatggggccgaaataagggacccatttaaaaa

SEQ ID NO: 74287 - DNA, 384 bp, Oryza sativa
  Clone ID: PAT_MRT4530_74488C.1
atggagctccggtggattttggcttcggggagatggctgccgggcttcctctccttcttgcgaacccaacggcggcagcggcgaccaaaggcgacgacggacgacgacgaacagagcggctggagacacggcgacgacggcggcgctctggttcacgacgacgggcaacctccggtgggatttggcgcaaaacaaccggtggccgaggtagctctcacccttgcgaagccgagggaggcgacggctcaaggcggcactgaccagaggggcggcgcggcgcggatggagctcggccggcgacgacggcggggtggagcacgtggcggcggcgctacgaggcacgggagaccacgggagagggggcaaacgaaagaggaggactag

SEQ ID NO: 74288 - DNA, 480 bp, Oryza sativa
  Clone ID: PAT_MRT4530_74489C.1
ttttttttttttttttttttttttttttttttttttttttttgctcaacacattcatcactgcataattcatgaaaaggttcatacatcccaaatttcatacttttctccccatgctaaacaaactaccattttgcagttttcatacctgccaacattcagtttttggcacactcctttctagccagagcgaacaaacaagccacactacaaagcacaaacacatttttctcaacctcaaccttgctaatcctagcttttaaagcagccaacttagctagattatcctggactatctccctaactgctaccatctctttccttactgcttcaaaccctgtcctttcctcctccaaccgggccgtggaattttcaacctcctgctgaaaatgccgcttatccgacctaagagacatcacagtatctcgcaagacgattagaaactctctcaaaaaattgcttgagggcccgggggccaagg

SEQ ID NO: 74289 - DNA, 532 bp, Oryza sativa
  Clone ID: PAT_MRT4530_7448C.1
ccaggctacacggtcctattcttcgcggctgctctcatggcggtcctcttaaccacatacggcgcacaattgagcgagtgagagatgaggttgacggacaggcactgccagcggaaggtgcccgacagtccggtagacgcgtgccggtccgcgctcgaccgagccttcacccgtcgtgagacgttccagtcgatgttccgtcgcgcgggcgcgcttagtctgtagatgcaacgctgtcataagctgctggacgtgagccgtgagtgcctctgcaccatcatccgtcggatggtgaagagctactatgagagcatgcctatacccctggatcaaggctggtcgatgaagtcataggttactacggttgcgaggagtcgtccactgagcaggggtactacggcgaggggtcgtcggaggagggctactacggcgagcatcagcatcagccggagatgacccgcgtgaggctgaccagggcgaggcagtacgcagcgcagctgccgtcgatgtgccgggatgagccccatcagta

SEQ ID NO: 74290 - DNA, 1062 bp, Oryza sativa
  Clone ID: PAT_MRT4530_74490C.1
atgttcttcacgataatcttcccggactcgatgcctcagaccacagactcctcactgccttacactagccaaagtgggaagccgattaactatgctgcagggattatcccaaatggtggtggactagctccttcagtgatcggctatattgcccccaagacaactaatttactatatggacaaactcatgaaccgattccagttgaaacttgtaaaaggaaaagcactaagcaatcggatgtcaagccatcggctgctaaacctcctgccgcctcgaaaaaggtagcaaagaagcaaaagtttgctgccgatgatctacctcctttggatcgtgatgtagaggaggtcctggagaatgaagaaatagaggaggccattgataatgctgctgctggcatgagtgacaccagggccttatccgcaagccctacgggtcgagctgggacacctccagctggtacaccaagtcccaacaagacgccagatgctccaacaccggcccctaaaagtggtgaagaagaggaaaccaccagtggagccttggtccctcttgatgatgatctcaagaccaaactcatggatattgctcaacggctagggagttccttggattccttggttactggctgcgggtcaatcagggccaggtttgaagagatccaccaccagatcccagaagatgaagccgacatcatttccctggctcgacgggagacgacaactgaggggtggacgggcttcaccttgctcctgcgaacccaatggagtcgacggcgaccgaaggcgacgacggacgacgacgaacagtgcggctggagacacggcgacgacggcggcgctcgggttcacgacgacgggcaacctccggtgggatttggcgcaaaaaaaccggtggccgaggtagctctcacccttgcgaagccgagggaggcgacggctcaaggcggcactgaccaaaggggcggcgcggctcggctggagatggtggcggcggtggagagagaagacaagcgtggggagagcgattccggcgaccgcggaggacgggacttgaggggatag

SEQ ID NO: 74291 - DNA, 454 bp, Oryza sativa
  Clone ID: PAT_MRT4530_74491C.1
ttgtttgaccaaaccttcttgtaggaattgctctggcctttgtttcgatacgatccgatccgatccaaggggaggggaagcaatggcgacaaaaaggctcgtggtgacgctgcgggaggcgaatcttacggggaagaaggagcctgtgcggtccgacctcaacgtgccgctagagcgacgcactataagatcaccgataacaccacgtatacgcagcgtacgtgcccactggcaagttcctcctcgagaggggcgccaaggtcatgcttgccagccatctgggccgtgcgtaggatgtcaccccctattacaggttgaagcctattgtaccacgctggtctgagctactcggagtcgatgctgtgatggccaatgattgcattggctaggaagttgagaaattgattgctgttttgccggaaggtggtgttctacttctagagaatgttagatt

SEQ ID NO: 74292 - DNA, 2899 bp, Oryza sativa
  Clone ID: PAT_MRT4530_74492C.1
aaacctcccttcacaaaagaaccagagagaagaggcgggaagcgaagccgcagcccgccactcgcctccgccctccgcgcgcgcgaacccctccctcggcggcggcgacgaccaaggcggcggcggcggcagcggcgcaagaggacgcggtagcccgatggcgccgctcgtgccgtcctcgcagccatgggtggagaaataccggccgaggcaggtgaaggatgtcgcgcaccaggaggaggtggtccgggtgctcaccaccaccctccagaccgccgaccttccgcacatgctgttctacggcccgcctggcaccgggaagaccaccaccgcgcttgccattgcttaccagctctacggtccagagctctacaagtcaagagttctagaacttaatgctagtgatgatcgtggaattaatgtggtgaggactaagatcaaggactttgctgctgttgctgttggttctgcacgaaaaggcggttatccctgcccaccatacaagattattatactagatgaagcagattcgatgacagaagatgcccaggcattggctacactaagcaccatctctaatggtgacctccgccgtgctataacctatcttcagagcgctgctcgcttatttggatcttctatttcttctactgacttgattagtgtttcaggggctatccctgaagacgttgtcaagtcattgcttgcatcttgcaaatctgcaaaagccgaaaaagtgggaagaaattcgaaccgcggctgctcaacgcccttcctcactcgcttcgcacgtgcctccctcgccggcaacactccaagctcccccaccgccgccgccgccgccgccgccgcctcctccgccaccggcgccggcgacgatgcctcctcgcaaggccacctcctccgcaggtacgtgccccccctcctcgcctcgcacttccccctcgcggggacctcctcccgcgctgacgctggcggccaaaaccctacctcccctgtagatgctcgggccaagtggcggaagcggaagcgcaacgcgaacacctccgcggccgaccactccgacgactccgactccgcggtggctgcggcggcgaacgacgacaacgacgacgacgacgcggcgctccacgcggccaccgcggccgccaacgggggaggcggaaccctaggcgggggcgatgacgaccccgtggtggacctccgcgaggccgaggtgcaccccacggcgatcgagcgcgtctccgccttcccgcccgcgttccgccgcgtggtcaaccggctccacccctccgtgctcgccgtcatggcggcggagcgcgccgccgccgcggctggtgctggtgctggcggcggcggcgcggccgtccccgcgctcgagaacatctctcacgggcagctccaggtgctctcgtccgtgctccctgaccacccgtccttgtccaacgaccccgacaagccgtcctcctacgtctgcacccctcctctactcatggagtgccgcggcgtggccaagcagttcgatggcaaattgctcatggtacccaagcattcagattggttcttgccaatgacggtgcacaggttggagaggcaagtgctgccgcagttcttctcagggaagtccccggggcacacgccagagaaatacattatgttgaggaatagggtaattacaacgtatctggagcgtcctgcgaggaggcttgcattttctgagtgccaagggcttgtcacaagcacgcctgaatttgtccgggcagaggatattgcttctggggcatcactttcatcttctccagggatggaaaatggtgatgctggttttgatgagaagacattgttggagagattgtctgagagcttttgtagtttctgcgcacaacctttgcctagcttgcactacgagtcacaaaaggagttgaagaggctggagttgaagttgaagcaatttgcagacatcgagacctaccttttgagggacagtgagcagtccgagaggatgaggcaggggctgcaagctcagcgcatccggatgatgtcagggcttcggttagcttcacccagaggcaacactatggcctcaaatccattgagtcaagcgaacattcgaccgccaggaataccgggatcgatgccccaggccggcactccagctttctactccaataacatgcaggtgcacccacagatggctttcttgcagcagcagatgcagcaacagcaacaaaaacagcagcaacagcagcagatgcagctgcagcagcaacagcagcagatgcaactacagcagcaacagcagcgacaggccttcttgcagcagcaacagcagcagatgcaacagcagcagcagcagctgcagcaacagcagcagcggcagctgcagatgctctctttcgggggtcggttgcctctgtcagcgatgaacgctccctcaacctcggcagcgcccaatgtcatgttcgacaaccctgacatgcccggtccatcgaatcaaggttgagaccgccttctgggagcaattttagagtataggctgagtagagagatttccagacatcctagtttcttgatttgtagctctgattcgtgtgatagttaaccattgtaattcaattgcacaatcacaggtagagtgggggtattttagaaaaaaaacgttagtttctcctcgccctcaaccatctcattggtttccttgcttttcctattccagtgcctagcctaagtaaggttgcgtatagaaatgggggctcatcctgaatcgaacaactgtttctcctgactgctactgtagaagatacctgtgcaaaggttacattcttgtgtattctttagctggttactgtggtttatattttgaaacttttgatgatatgctagtaaaaaaaaaaaaaaa

SEQ ID NO: 74293 - DNA, 1506 bp, Oryza sativa
  Clone ID: PAT_MRT4530_74493C.1
agaggcggaacgcgaagccgcagcccaccactcgcctccgccctccgcgcgcgcgaacccctccctcggcggcggcgacgaccaaggcggcggcggcggcagcggcgcaagaggacgcggtagcccgatggcgccgctcgtgccgtcctcgcagccatgggtggagaaataccggccgaggcaggtgaaggatgtcgcgcaccaggaggaggtggtccgggtgctcaccaccaccctccagaccgccgaccttccgcacatgctgttctacggcccgcctggcaccgggaagaccaccaccgcgcttgccattgcttaccagctctacggtccagagctctacaagtcaagagttctagaacttaatgctagtgatgatcgtggaattaatgtggtgaggactaagatcaaggactttgctgctgttgctgttggttctgcacgaaaaggcggttatccctgcccaccatacaagattattatactagatgaagcagattcgatgacagaagatgcccagaatgctttaaggcgtactatggagacttactccaaagtgacaagattctttttcatatgcaattacatcagcaggataatagaaccacttgcatcaagatgtgcaaagtttagattcaagcctctttcagaagaagtaatgagcaatcgcattttgcatatatgcaatgaagaagggctcagtcttgatgctcaggcattggctacactaagcaccatctctaatggtgacctccgccgtgctataacctatcttcagagcgctgctcgcttatttggatcttctatttcttctactgacttgattagtgtttcaggggctatccctgaagacgttgtcaagtcattgcttgcatcttgcaaatctggtgaatttgatgtggcaaacaaggaagtcaataatattattgcagatggataccccgtttcacagttgatctcacagtttctagatgtgatagttaatgccgatgatattccagatgagcagaaggcaagaatatgtaaaaagcttggggaagcagataagtgcttggtcgatggagcggatgagtatttacagcttttggatgtggctagtgagactatccgtgctctttttgacatgccacaaacgctggtcttctaagagaacatggattggaaagatgacgcaggtggccatttctgcgagggatatcttctgtctcctttccaagtttaggttctgggggaagctcattttctcgacagactgttgtgccttttttatgtttgtgatggggattaaatagtgtgaactccacccttgtaaccaactgaattgtgcaccagtgtgtccatggaaagaatggttttcggcctgtcaaaaaaaaaaaaatgcatcattttcttgttctgcttatggtttgatggaagcttgcattggcatttcccggctcttaattccaatcagtttgatgtcctcttttgttaactattttacaacgggcatagtcctcttttgtg

SEQ ID NO: 74294 - DNA, 2766 bp, Oryza sativa
  Clone ID: PAT_MRT4530_74494C.1
caaaagccgaaaaagtgggaagaaattcgaaccgcggtgtcaacgcccttcctcactcgcttcgcacgtgcctccctcgccggcaacactccaagctcccccaccgccgccgccgtcgccgtcgccgcctcctccgccaccggcgccggcgacgatgcctcctcgcaaggccacctcctccgcaggtacgtgccccccctcctcgcctcgcacttccccctcgcggggacctcctcccgcgctgacgctggcggccaaaaccctacctcccctgtagatgctcgggccaagtggcggaagcggaagcgcaacgcgaacacctccgcggccgaccactccgacgactccgactccgcggtggctgcggcggcgaacgacgacaacgacgacgacgacgcggcgctccacgcgggcaccgcggccgtcaacgggggaggcggaaccctaggcgggggcgatgacgaccccgtggtggacctccgcgaggccgaggtgcaccccacggcgatcgagcgcgtctccgccttcccgcccgcgttccgccgcgtggtcaaccggctccacccctccgtgctcgccgtcatggcggcggagcgcgccgccgccgcggctggtgctggtgctggcggcggcggcgcggccgtccccgcgctcgagaacatctctcacgggcagctccaggtgctctcgtccgtgctccctgaccacccgtccttgtccaacgaccccgacaagccgtcctcctacgtctgcacccctcctctactcatggagtgccgcggcgtggccaagcagttcgatggcaaattgctcatggtacccaagcattcagattggttcttgccaatgacggtgcacaggttggagaggcaagtgctgccgcagttcttctcagggaagtccccggggcacacgccagagaaatacattatgttgaggaatagggtaattacaacgtatctggagcgtcctgcgaggaggcttgcattttctgagtgccaagggcttgtcacaagcacgcctgaattgtatgacctgagtagaattgttaggtttttggacgcttgggggattattaattaccttgcggctgggtctgttcaacggggcttgaggatggcagcaacactaatcagagaggagccaacaggggagctgcatctcatgtctgctccattgaaatcaattgatggtttaattttgtttgatcgaccaaaatgcagtgtccgggcagaggatattgcttctggggcatcactttcatcttctccagggatggaaaatggtgatgctggttttgatgagaagacattgttggagagattgtctgagagcttttgtagtttctgcgcacaacctttgcctagcttgcactacgagtcacaaaaggaggcagacattgctctttgctcggattgcttccacgatgcaagatttgttactgggcactcaagcttagattttcagagagtggatgggaagaaagatggactggacaatgatggggacagctggactgatcaggaaacatttctgttattggagggcatagacaaatacaaagaaaactggaatgctgttgcggagcatgttggaacaaagtcgaaaatacaatgtcttcaccattttcttcgtcttccagtagaagatggattgttagagaatattaaagtaccagaagcatccttttcatcgaaattttggttgatgcaaaatgcttctggctccgtttttaaattgccacaattgtttgccttaggaagcttgcctcaaagcggcgaagctggagaccttcctttcattaacactgctaatcctgtcatgtcactgatctctattatgtctctggccttactgttcagagatgatttgcagattgcatttttggcctcttcattaggaccaagagttgcggcatcctgtgcaagtgaagcattaattgttttgactggaggtgactccaggatcagttcaattggcaatgatgttatgggccatgctgctcgaccgaactgtggtgactaccttattcctaaaattaattcctcattggctgtctcttcagaaaatgttagacatgctgcaagatgtggcttgtcggcagcagcaactaagtgtaaactttttgcggatcaggaggagcgtgaaattcagagattaagtgctaccatcataaatcatcagttgaagaggctggagttgaagttgaagcaatttgcagacatcgagacctaccttttgagggacagtgagcagtccgagaggatgaggcaggggctgcaagctcagcgcatccggatgatgtcagggcttcggttagcttcacccagaggcaacactatggcctcaaatccattgagtcaagcgaacattcgaccgccaggaataccgggatcgatgccccaggccggcactccagctttctactccaataacatgcaggtgcacccacagatggctttcttgcagcagcagatgcagcaacagcaacaaaaacagcagcaacagcagcagatgcagctgcagcagcaacagcagcagatgcaactacagcagcaacagcagcgacaggccttcttgcagcagcaacagcagcagatgcaacagcagcagcagcagctgcagcaacagcagcagcggcagctgcagatgctctctttcgggggtcggttgcctctgtcagcgatgaacgctccctcaacctcggcagcgcccaatgtcatgttcgacaaccctgacatgcccggtccatcgaatcaaggttga

SEQ ID NO: 74295 - DNA, 389 bp, Oryza sativa
  Clone ID: PAT_MRT4530_74495C.1
aaaaaccaaaccggagatgataaggatcaaatgcaggtgacttgaggtcagccttgatcaatggtaaggatcgtgactatactcatggaggagcagaagtctagtgcgatcaggataccatatgagaagttactagagttatgattcttggaggtcaccttcggtcaacggtgggggtggggattagactaaaggaggagttgaagtccaaacgattaaagataacgggtgacgaagttggatacgagatgacacacggtagatagacaccgtgtaggagaaatcttcgtaacaggctttacgaggtgtgcgtgcaagcgtcaatgttcgcgaatgaaaactggaagaaaaatggagcggagttgctacaataatactcgcggtactgt

SEQ ID NO: 74296 - DNA, 564 bp, Oryza sativa
  Clone ID: PAT_MRT4530_74496C.1
atggcggcggtggccggtgccctgctggcgagcggatccgcgttggaggtggcgatggagtcagagtcgtgctcggtgtttcggcggccgtcgtcgaggtggcgacgaactcttcatcgtgctcggcgctacggcgggccctcgcctcgcttcgccgtgcccgtgttggcggtgccgtcggtgggtacgtcgcggttagcgtcgctgtgggtgccatctccctccgtcgcgcttgtgctggtggtggcgttggctggcgttggcgtgtgtactgtgctcgacggtgcggcggttgtcgcctcccgtgctcccgtcgccatcagtgcgctagccggcgctgcccctggtgcagattcttcctctgttggcggcagcagtcggctcgtcatcaacatcctccttcaagccgacgcctttgggattcttgtgactgggtgtttgatctgctcagagtcttgtggttccacgttgcaggtcaccctcttcttagccatctccgccctcatagcaagacagaagtcaattggcagcctcttaaaagcccctttgttgatggttggctag

SEQ ID NO: 74297 - DNA, 261 bp, Oryza sativa
  Clone ID: PAT_MRT4530_74497C.1
atgcgcctccatcgcctccccacgaccttgcctaccctcagcagcagaacgagcgtcggcggcctcccttcctttcgtgtgtggttgcagcagcctccccttcctctccaggtctcaaattgtgttccgtttcggggtatcaaattccaaggtacggttctgaatgtgaggttcgacatgctctcagagcactctgaggtagcaatcagccccctagctagtcgacgttttaccggcggtggcaccaccgatggctactag

SEQ ID NO: 74298 - DNA, 170 bp, Oryza sativa
  Clone ID: PAT_MRT4530_74498C.1
caagaagggcccccaagtgcattctaacaataacccaccagccacaatcaccctgaaatagcagcatcgtactccaacaaaccagaagaagaggagcccccggtggtgctcacagagtggcgcaaagtttctcctcttcaactgccacagttttaccgacttcgactcca

SEQ ID NO: 74299 - DNA, 1275 bp, Oryza sativa
  Clone ID: PAT_MRT4530_74499C.1
taccgctccccaatactggattcctctcgagacggcggatccgagcaatctctccggcggaggcggcggcggcggcggctgacgagggaagatgaatcctctgacgcaggtgaagaggacgcaggtaatcaaccagaaggaagcgcttctgggcatcggcgaggacgggtcgtggcacgccaagttcaaggactccgcctacgtcttcgtcggcggcatcccctacgacctcaccgagggcgacctcctcgccgtgttcgcgcagtacggcgaggtggtcgatgtgaacctcgtgcgcgacaagggcaccggaaaatccaagggatttgcgtttcttgcgtacgaggaccagaggagcacgattcttgctgttgataatttgaatggagctaaagttcttgggaggattgtaagagttgatcatgtgagcaaatacaagaaaaaggaggaggaggatgaggaggagctgcagaagaagagggaggcccgtggcgtgtgctacgcgttccagaaaggcgaatgcaaccgtggagcttcctgcagatattcccatgatgagcagaggaatgcaaacactggttggggttctaaggaggagagcaaagcaagatgggagcatgacagacaccatgagccaccgatgagccacaagaagttcccttcgagtgctggggaacaaaggttccctgacagagctaaagaggagaacaaatcaactggcagggaagggcagtcctcaagatcggaggcatacaaagaccgtgattccaggcttaggcatagtgatagaggttcaaaagatcatgacaggtataggcatgatagatcacctgagagatcaagaggtgataggcagagaaacaatgacagatatgcccaaggaagagatgaaaaatcagaaaggtacagatctgaagtgaaacatgatgaaggagaccagaagcgatcaaggcgggacactgattctagtggacattatgaaaggaggggtaacgaagattcagaaaggtacaggaaatcacggagataaaatttggatttgttgttgcttcagacattgttgttctgatctgttcgatgtttgttcttgtacgagatggataagatttttgtttgatccttgggtctgatattagtctaatagatgccatagattacatttgagatgattttgaacgcactggcccatagaccatagacgagtttgcaggatgttaactcaatacattaattaatcatttgtgatcaatgttaatacacttgtctgatgaatcc

SEQ ID NO: 74300 - DNA, 472 bp, Oryza sativa
  Clone ID: PAT_MRT4530_7449C.1
acggaatttgatcaatggaatcggacacttcagacagcggtctgaactgttcgatggctgtaatcaacaaggagatgaccagacgtggtgctcgggttgatggcggccgaagcgattggcgatccaattggtgggtcggacacttcgagcgggtggctcggactttctggtgagctactctcaacagggagacgtggggccccacgctcgggttgattgaagctggaggtgatcggcgttctcagtcggtgggtcgaacactctgggcggggtggcccgggcctttcgatgagctgcgttcaacagggagatggctagacatagcactcgggtcgtttggcggctaggaagacggcatgtgatttgtcggcttcggctcacgactagattgatgggtgatcaatcggaagtcggggcgggttgcgggtggagttgtactatgtgtaggactagagtatgagtcggactcaat

SEQ ID NO: 74301 - DNA, 1205 bp, Oryza sativa
  Clone ID: PAT_MRT4530_744C.1
atgagagaactatacaatactacacaagcaccaaaattcattcatcattaatggagcagctgactatccatccaagtaacaaggccttgttgacgctttcaatcatttacagctcaaagcactaccagcatcccgctcctgcttgccaggcgcaattctagtttgttttctttcttctttttgggaggagttcaaagttttcccataactaacatactaagtacagtagtatataataacatcatattatgtagtaactaactaggaggcctctagctagttgattgggtggtactgcgctgacacccgcttaggagggagcttccggaggatgaaaaggacaagagctgaaggcagtatctctgtcaacatatagtagaagaaatcaagaattggatggtccaaaacctccagagatacatcagaatcaaatgctgatatcgccaccactatgcaccttatcaggaaacaagcacagcagattgcagtcactgtcccaacctcataaagcttcttttttcgccccttagattcaatggggaaacgtctcagcaagaagaacagccttccaccatatactgaaaagccaagaagagccacaaaagagacaactactatgaagattttgctgaccagctcaaccaatgggttgtcgttgattccgaggtatacccaaatacaaacctgaattgtgtaaatgatggcattgacggctatgtatataatccttaacttatctgttgggaggctcctggcctgatggtatatttctgcccagaagagaacaagcagagtgtaggtggagaaaaacaacaagccggggaggtctagcagcaccaacttataaacttttgcggagagaaggaagacatggagatggaatccaaagacgagagcacggactccattgacaaggaagttcatgaggtgaaagaccttctgcgtggtccatccgaattcgggcactcggcgctggatcctgatcaattgaatcagcgcgacggcggagacgagggcgtatgcggcggagagggagaagaaggcgccgtcctgccatgccggcgactcgttgacttcctcccagaaaccccgcaacgccgccgcagaagaagctgccacgaccaccggctccctcatctctctctctcgccttccctccccttgactctttctttttttctttttctgtgtgcgcaaaagttgcg

SEQ ID NO: 74302 - DNA, 268 bp, Oryza sativa
  unsure (1)..(268): unsure at all n locations
  Clone ID: PAT_MRT4530_74500C.1
aatatnttggnnnantnaaagctgggaatcttcttgatcgggcacacacacacacacaattaaggtacatacatacatgcactggtgcaactgcaactgcagggttggtgcgtggctactacaagtgtacacatgggacgttggttggcaccatttcaaacgtgtcatggtgctcacttgcccgggaccaaaatgggggcttatgcccaaaccttttttggtaccggggtttgggaacatttgtctaaaaaggttttttttattgggg

SEQ ID NO: 74303 - DNA, 1720 bp, Oryza sativa
  Clone ID: PAT_MRT4530_74501C.1
gctcgtggggccccgcgctgctgcaaaaaaaaaaaaagaaacacaaaaaaaatgtcaatccaagctaatcccctcatcaaaaccctagccttgtcgcctcgtcggcggatggcgccgccggcgccggcgacggcgcggcgcccgatggcggccgtccgctgctccgcggcgaagaggagctacaacgtcacgctcctccccggtgacggcatcggcccggaggtggtcgccgtcgccaaggacgtcctctccctcgccggcgctctcgaaggcgtcgagttccgcttccaggagaagctgatgggcggcgcggcggtggatgcgtacggcgtgccgctcccggaggagacgctcgcggcggcgcaggcgtcggacgccgtcctcctcggcgccataggagggtataagtgggataacaatgagaagcacctcaagccagagactgggttgctccagatacgcgctgggcttggcgtctttgctaatctgaggccagctgcagtgttgcctcagttagtagatgcatctactttgaaaaaagaagtagctgaaggagtcgacatcatggttgttagagagcttacaggaggaatatacttcggccaacctaggggttttggaaagaacgacaaaggagaagacactggcttcaacactgaagtatattcagcttctgagattgatcgaatcacacgtgttgcatttgaggttgctcgcaagaggcgcgggaagctttgctcagtagacaaagcgaatgtgcttgaggcatctatgctttggagaaaacgggtgacttcattagcttctgaattccctgacattgagctgtcgcacatgtatgttgataatgcagcaatgcagcttattaggaatcctaagcagtttgacacaattgtcacaaacaatatttttggtgacatattgtctgatgaagcatcaatgcttactggaagcattggaatgctcccatctgccagtgttggtgaatcgggaccaggtctttttgagcctattcatggttctgcgcccgacattgctgggcaggataaggcaaacccattagctacaattcttagtgctgccatgctattgcggtatggccttggagaagaaaatgctgcaaagagagttgaagccgcagttacagagacactaaacaacgggttccgaactggggacatatattctcctggaacgaccttggtcggatgcaagcgaatgggagaggaagtcctgaagactgtagagtcgcagagcgcggttgctctaaactcgtagctctcagtatttcagctgtagccctgtgattgtgatggtcgaaagcacatcagagattgaggccgccaaagaatcacattgatgctggacttcctgatgttttttgcctgtccttgtgtcattctgtaacttagcgcatgagttgcctctttccccttttctcttgtaccttgaattttttctgtggtgatggttgacttaactgtctaggccaacaataataaaatggggttggttccatatacctagctgaacaagaggttggttgtgtaacgtactaacgttggttgagtatatatactacccccatctcctgttcatgttgctgtacttgttttcttactcaaaaccgtgcaggcacctgttcagctggccttctttcaaaaaaaaaaaaaaaaaaaaaaaaaaaaaaaaaacctcgtgccgattcctgcagcccggg

SEQ ID NO: 74304 - DNA, 1123 bp, Oryza sativa
  Clone ID: PAT_MRT4530_74502C.1
tcacaaaccgttcacaggagatccctcggcagtatttttgcccggttttactgacgtggcatccaggtcaacgccgacgacgggcgagggctgcgacgggcccgcgcggcagcggagcagcgccgggctgtaggcgaagcggaggcgggcatcgaagtagagcgtgggcgagtggacgcgggagagcggcgtggtggagactgtgtcgggccgcgggcggagtgcggcgggcgagagcggcgatgggcgggctccaccttctccagctttgccccgcctcctaatcatgaggactgggtgggcgcggactggccggccgcctctcacgccgacacccccacctctcgcgtcggcgcgcctcctctcctcctctcccgctgcctccgtcgcgctgaccgcctccgcttgccgctgcagctgcactcgccgacacccgccctcgcagccgcgctcgcctgtcgctcgccctcgcagccgctctcgctgacgctgccgctccgcctgcctccgcccgcgcccggagagaaaaagagaacaacagaaaaattgcttaattgttgccataaccctgaggaccctggcacataccatgctaacgagctcctccacttggctcatttagcatctgccgcaacattaagaggaagtgaggaacggcccaaacagagtgcaactttaagcagcaacatgaagttcagcgccattttcatgctgttcctcgccctcggaatcctcgccatcgcggtgcacggtggcaggacacacgccatcatcgagccggcgaagaaatcggctgctgctggcgtcgcgcagccgcagttcgacccgatcaccatctgcagcccgtccaacttctgcatcccggaggcgtggagctcctgctacaggtgcatcgtgaagcccgacgacaacccgcccttccgaaccatcgacgagtgcaatagcaactgcccggttcctccggccaacgcttaattagttacgtgttctgttgggtgaggatggtgtcttcttgatctttagcgataacgggggtgcacccatgtgatcctatacggctatttttagaagaaaagattgaataaagaaacactgttgcttttggaggaaaaaaaaaaaaaaa

SEQ ID NO: 74305 - DNA, 584 bp, Oryza sativa
  Clone ID: PAT_MRT4530_74503C.1
atgatagcagaaccctcaaacccaacccccccgaaatcgacttcgaccatcggaggacgccgccgccgccgcccccgccgcctccgaagaaacaacgatgggagaagccacctgcgggttggatgaagctaaacgtggatggatcttttgaggaaagagatggcaaaggtggtattggtgctgttcttatggacggtgctgggaaggttatctttgtagcttgtgggaagctagatagatgtggagaaccgctggaagcagagatattggcttgcagggaagggatttgtatggcgttacagtggacgctgctaccggtgttggttgaaaccgattgccatgaggcgatgaatctaatacgatccaagcagagagtgctctcggagatgggatttctagtcgaggaggtgcagagcctcgtgactggacgaagggatattaaactcacaaaagttcgttgtgatcagaacattgttagtcattttttagctaataaaggtataagcgagtctttaaccgctttctggccagataacaattgtaatttcatttcacatcttttagatgtggatgttccccatgag

SEQ ID NO: 74306 - DNA, 538 bp, Oryza sativa
  Clone ID: PAT_MRT4530_74504C.1
ggtgttttttttttttttttttttttttttttttttgttttttttttttttttttttttgcgggcttaagcacgatgcaagaaacgaggtatattttgttccttttcctcttcagcagcttacacaggtggcaccatctactgggatctgagattagaggggcggacagataccagtactcccttagattaccgacggggcgacaaaacagaccacaagatgggggtcaagtgcccttcagagcgggggcgccacctgggagctaagcgtcaggaggggacctcttacacttaacgcctgaggcagcaacgttcgaacactatcctggggcagcgaccaccaacggccactttggttgggccgacttgagaactttccctactacctggagccctcccttggtcactcgtgaccggtgccctcgcccttgtttgtcacctcggtcttgggcttggcatagtcgcctgaggtagccgggcctcctgcctgcttgttggtgtgggcgaccgttccttgtggggttctccgccttgggctt

SEQ ID NO: 74307 - DNA, 339 bp, Oryza sativa
  Clone ID: PAT_MRT4530_74505C.1
atggcagtttgtgatgacgatggcggatgctcttggtgttggtgtcctagggatggcggtgacttggcgaggtccggcgctggttctgaccatgaccagataaggacgacagcaacgaaggttcttgatgactgcatcatagggaaggttgctaccaagcaagcatcgacgcaaaggtctggttacggttatgtctcgattgcagtggagcgtcttcgacaagttcttgattgtagaggcagtgcatgtcatgctaaacggctccacgacgctctagaagcgacagtgatatcgatggtctacagaagatggtggtggcgcagcaaggacgcttcgtga

SEQ ID NO: 74308 - DNA, 634 bp, Oryza sativa
  Clone ID: PAT_MRT4530_74506C.1
acttttagattattttattgaaaacacaatttagagttccattctcttagaatgccaacaaagcagccaaagcaaaaagcacaaaagaaattcccatgactggaagcttcactgtgaaccacttccatttgagattgctaccaccctgcgttggagttgccattcgacgctgtctccacggacaactactagcgtgtgaacaggagcatcgcacaataaatctcgggtgcggaacgcttgttcaggagctggaccccatttgcttgggacctcgacgtaagttcgagccaaatccttctctgcttcacagatgcaatcattctcttgggaactttggaatgcgtcacaaccaaactcatcgaccagctgatagtaggtgcaagctatttccagacataactcggcttgaatagcatcgtactgatcgtagcacgagcaatacatgcactcataaaaatcgttgtcgcaagtaactttgctggtggcatcacaggctccatagcacagatcgtgttgttcgcagcagtgaccgaatgaaaagctaggtccagtaaaaggaattgactcaggaccacagccattgctgctgggtgggctattagggtcaggaaccaattgctgtccatcaggacaa

SEQ ID NO: 74309 - DNA, 798 bp, Oryza sativa
  Clone ID: PAT_MRT4530_74507C.1
atgaggcaggaatcccatgggcgtcaacacggggtcctcaatggtctagatggagagctgtaccgccttgacgccgagcggcatggtgacgtcggcgatgcgggtggcaggcagcgagcgttggcggctgacgggagaaggcggcaccaccggcagcaccactatcacctcgcggcgagcgggacggcgacggcgttcagggagtacaagatctaccgcgtccggccgaccgcgaccacccggcgagttcctcccccacgactggccggccgtgacctcccggcgagctcctccccggcgcccagccggccgcagcctcccagcgagctccttccgcacgtccgggcggccgcgaccttgcgacgagctcctcccccgcgtccgggcggcctcgacctcccggtgagctcctctcacgcgctcctccagtcgtggtatcccggcgagctcctccaccgcgttcgaccgaccgcgacctcccggcggtcgtggcgagctcctcccccgcgcccggccggccgcgacctctcggcgagctcctcccccaacctccggacgagctcctcccctgcgcccggttggccgcggcctcccggcgagctcctccgccatgccaacctagccgtggcctcccgccgagcttctcccccgtgcccggccagccgcggcctcccggcgagctcgtccccggctgccgccactcgagcagatggaaggtgtaatgctgtggctgtgagagaggaggagatgaaagagaggggaggggtgatagatgggccccatgtggatcccacctaa

SEQ ID NO: 74310 - DNA, 529 bp, Oryza sativa
  Clone ID: PAT_MRT4530_74508C.1
ttgatcactataagtatagaatttatcttcccttttccaatcctttgcgcatggaaacgcacaataccacggttcaacaagaaaccaatatcccgagtacatcaatagttcaatcatcaaatacaggaatttattcagaaaatgagatgatatgataacgcaaaccgatcaaatttcaaaccgcagataagatcaacttctccagattcatgtaggatgacccctccttctccaaagcagcgtgagccttggccttgagctcgtgaactttcttcgccctctcttctccttcgactcctccgtccatgagactgttcaaggccctcttcacctgctccgttccgacctctgccgtctcctcgccgcccccgccaccggcggttagcatgccgccggtgggcttcgtcacgccgatggacacgccgatcccaagcacgtccacgatcagcttctcgttcacgaactgctccgcggtgaacggccacgccgccatgggcacgcctgcggcgacgctctccagcgtcgagcc

SEQ ID NO: 74311 - DNA, 320 bp, Oryza sativa
  unsure (1)..(320): unsure at all n locations
  Clone ID: PAT_MRT4530_74509C.1
ggangntgnngnatgngcagttnctcgtttttttgtgtaananaggggagaggccggcgggatggggaggacgctggacgtnttgctggggcggacgacgaagcanacggcgaggctcaantcgatgctggggctngcggtnacgggctcgncgtgctgcgcgggcacaggcaggtncggtncgngcaggccggtcgacgtnnagcanctnctccngctcgnncaccccnaccnttaccttctccgcgccgagcaggtcatccgcgancagaacacgntcgacgncttnctcatgctcnagtnctactgcaatctcatca

SEQ ID NO: 74312 - DNA, 483 bp, Oryza sativa
  Clone ID: PAT_MRT4530_7450C.1
atggcgccgcccgtctccgacgagatggagctcgcgccctctgcagcagcggcgccgattcttctccacgtcgttgtgctccatcttgctactgctgctgctggcgttcccggctatcgggctgaacgagctgtgctacaaggagtcgccggagagcatgaggagcgtggcgggggcgcaggagcacgcggccgcgacgccttggcgtccgtcgcctacgaggccgaagggagacgggagaagatggagcggcgcgcggcggccggcgaggtagccagggagggaggaggcagggaggccggcaatggcggggctcgacggcgacgggcggaggaagaagcgcgcagcgggcggcggccagcaaccgtctccgccctcctcgccggccgccgcctttttgcctctccgtgcgcgctcgccggcgaggaaggatggccgggagggagaaagaaggaggcgccgtgccacgtcaccgccacatag

SEQ ID NO: 74313 - DNA, 2134 bp, Oryza sativa
  Clone ID: PAT_MRT4530_74510C.1
atggaggctgacggcggcgccgccggcgaggaggcggaggagaggaggaggaggagcgagctcgggtccctcgtggaagccatcaagtcctccgaggttgctcttaaatgctcagaattagatacaaccaattgcttggggccatttcttactcttggttcaaaggctggttcgtggtgtgtgaggcatctcctgtggtctgttgaatctattgatgaatctgaagatgcccaagaggaagaacactccagattatttcctgagataattgcactgaccttaaatatctcttccaagcacctccctgttgcatctaaatgcattgccgaagatactgtgcatgctgttggcgactttattttggagttactaaccctgactgaaagctcaatacttgacaagaaactcggaactacaggacatgttgctaaggctgcacctgtttttctagatgaaaccatcaaactgtgcagagtgtactccgaggctgcaaaatcagaccagtgcataatgagcatgcctaaagaagagacaactgaggaacacaaagagacagatcttactagcaacattgcccagattacagcatgcactattcagtccttgtgtaaaataggaacccatgcagcatccagtggtggaagccaggtgattttactgaatatatcatggaagggcataatttccttactgcagcttggtaaagggatggtagaagaaaaggtgaatctatttcttctgttaaagactctagcgtcaccagaggaagttcttgcacctctcagtgctctgaggaagcttgctcgtgcatcatgtaacatcttgagctatgcatcgtctgcaacaattgatcaaatttataccatgctgaatgatagctcttccaagtcatcgatcttgtacttagcactgttgatggaaggatttccttttgattcattatctcgtggtgtaaaggaacatgctgtgaagacactgttcacttcttttgctgggtatctacagaatcagaactacttcaagaatcatggagaaatcaacttgccaacttcttctagttcgggcataatagggtttcctgtacatgctctagcctctgctttccagagttgcgaaataaaggacgttaccattgatgaaaaaagtattgctactatgttcaagattgccacctctctcattaatctttatagaacttcacctgatagcagtaggaacctccttgtcaagcacatcagttccatattggttattattacgcacatgaggcatctttgtgcgttcagtgagttggagaagttaactttggagttgcacactctgttcatgtccagttttgataattcaaatacagcaatctctcagtgcaaaccatcaatggcttcatttatggcaattcttggtcacttgaacactactgaagacgatgcaaacccactttgttctgcaatgtgggatctgttccatttcttgctgagggagcggcattgggcactcattcaccttgcaatgggttcctttgggtactttgccgctcgcacttcttttgcacagctctggaaatttgttcctgtagatgctgccctttcctacacatgcacaggggtggacatagatgaggatgggtttatgtcagaattgaaagccttccttcagaaagaggtagccttgcgagatgacaaatggtctgaagagcaaatatgttcactagtttcagaggggagaatgctgaagaaactggttgaatcatgcttggaaattcctctagttccagagcctgagaaagtttcaattactaattatgtgaaaacaaagaaaaggaagatgccagatggaatttgtgaaggaatgcctgagaatgtttcagttactaatgatgtggaaacaaagaagaggaagatgccagatagaatttgtgaaggaatgatgcttgtacagaacggtctcaagatcatgcggagtgctctcagtgaaacagacttggcggagctgaaggacaggtttgctgtacacttgtcgcgccttgaggacgcagtttctcatcttgctagtttctctgataaaatctaagattctcgttgttaatgtacatccatcatgatttccaattcagtttcttcttagcgttgaagtg

SEQ ID NO: 74314 - DNA, 180 bp, Oryza sativa
  Clone ID: PAT_MRT4530_74511C.1
atgctgatgctgccccaccgaggggaggtcactgttgctcgttgtcgctcgtcatggtcgacagtgataactaggggagggaggagggcagatctagaggttcctgaactcggacaatctagatatggcatcggtgccaccgccatcgccaatgacgatgaatccgtctgcgggaactga

SEQ ID NO: 74315 - DNA, 2476 bp, Oryza sativa
  Clone ID: PAT_MRT4530_74512C.1
agaagatgagggcaaaggacaccgccaagcaaaaaggtcgagtgaggttctagcgcctatttggtgtagaagaagaacccttgtgcatctcacaacaataagaagaaggtcaaacccaaggctacaaccaattttaagaaaaaagacaaggaaaaagcaaagggcaactgctttgtgtgcggtaagcctgtgcattgggtcaagaattgtcctgatcacaaggacaaaaaagtctgcaaatatggttattagcgatggaggaggaacatcagggtacggtgactttttacctacagttctctttgttctcactcaccagattggtgggttcatactggtgcaaatattcatgtgtgtgcgaacattttcctattttcttcttatcaggtcggcagaggttcctccttgctgagggggaacggtttgcttgtagctgctcatggtgttggtacggtcaatctgaagtttacttcaggaaagaccgtgcaacatgtcacctcaataaaaaaagaatcttgttagcggctctttattgtgtagagatgattttagacttatgtttgaatttaacaaatgtgttgtatctaaatattggtaaaggttatgacagcggaggcttgctccacttttacttagatgatatgtgtaataaagatgtgaatcatgtaagtaatgatgatgagtctaatgagtggcattcgcgactttgtcatatgaattttggttgtacgacgcttagctaacatgagtttaatcttgaaattcactttggtcaaaagttctaagtgtcatacttgtgttcaagcgaaacaacctcgcaagcctcataaggcatcagaggtcagaaatttgacacctctagaacttgtttattccgatctatgcaaaatgaacagtgtgttgactaaagagggaaaaaatatttcatgacacttatagaggattgcactagattttgctatgtgtatttcatgaaaacaaagaataaagcattgcagtactttaagatctataaggttgaggtagaaaacctacttgaaaggaaaatcaaatggtcgaggtctaaacgaggcgaagagtattttcctaatgagtttatttcatcctgcgaagagtctggatttattcatgagaggacgcatacctattcaccctagtcaaacggggtagccaaaagaaagaaccacactctaaatgtgtttgtgaatgccatgttagacactgtagaactttcaacggaatggtggggtgaggcaatattgactgtttgtcatgtcctgaatagaattcctactaaaaataaacaagtaacaccattcgagaaacggaaaaagaagaagttaaatctctcatacttgcgcatatggagatgtttggctaagattagtgtgtctatagttaaaaagtgcaaacttggaccaaagactatagattgtgtgttccttggttatgccatccacaatgtgagatataaactcctaagagtaaattttggagtatctgacatgcgtgttggtacaataacacagtatagagaagttacattttttgagaatgaatttcctatgaaagatacacatagcacttctagtcaagagcctatttatcccctagtcttttgtgctgatagaacacaatgaatcgaacgcctgaggaaaatcctgaggaggacaatattgtagctactcgaaagagtaacagacaaaggactacaaagtcttttggtgatgactatattgtataccttgtggatgacactccaagaacaatagaagaggcatattcatctcctgacgctaactattggaaggaagctgtgtgcgatgagatggactctattatgtctaatggtacttgggaagtcgtcgagtgtctatatgggtgcaatcatgtaggatgcaagttggttttcaagaaaaagcttaggcctaatggtataattaaaaattacaaggcaagacttgtggctaagggttatacccaaaaggaaggcgaggattttttttacacttattcaccagttgctcgcttgaccacaattcgaatactacttgctctgggagcctctcatggtcttctcgttcaccggatggacgttaagataactttccatagtggagtgttggaggagaagatctatatggatcaaccagatcgggtatgtattaaaaggtcaagagggattgatgtgcaagctgctgaagtcttttcatggctacagagaagcgcctaagcagtggcatgagaagtttaacaaaactctgatatttgttggctttgttttgaacgaggctaacaaatgtgtatactactgatacggttggggagagacagtgatcttgtgtttatatgacgatgacatattgatctctaggaccagccttaatgtggttgaggaggtcaaggactttctgtccaaatgctttcagatgaaggatttgcgaatggctagtgttattcttaacattaaactaca

SEQ ID NO: 74316 - DNA, 462 bp, Oryza sativa
  Clone ID: PAT_MRT4530_74513C.1
cctttccccctcttctcgtgctcatcttcctctcctcgcgtgcttcctcctcctccttcctcggcgagcgtgttggttgatccgtgagagcggcgatggcggcgacggcggcgcaggcggtggcggtgaaggggagcgtggcggtgccgccgtgcgggagccgcggccggcggaggggcgccgtggcgtcggtgcgcatggcggcggcggcggcgacgtcggcgttgcggatcggcaggaggagccccttcctcggccggaggctggcggttgggccgaggagatccaggcccgtgccccggaatctcgtcgcgccggtgcagatgaatctcgcgtttgcgaaagccacgaagtggtgggagaagggattgcagcccaacatgcgggaggtcgagtccgcgcaagacctcgtcgactccttgaccaacgccggcgacaatctcgtcatcgtcgacttcttct

SEQ ID NO: 74317 - DNA, 204 bp, Oryza sativa
  Clone ID: PAT_MRT4530_74514C.1
atggtgaggttgctgaggtggggcaaccatgagcaccccaagttacggcagttctcaaacaacggaaagaccttcagaaccgggcaccttttaatcttcaggatccttaaactggagttgaagtccaccatggaagtgcaagagcacatacttgaggttgtgatggggttcaagaccttcaagctcctcacttgctatgtctag

SEQ ID NO: 74318 - DNA, 456 bp, Oryza sativa
  Clone ID: PAT_MRT4530_74515C.1
atgacgtcatgcccgtttcgccggaagcaacgagagctagctgctgcacctgcaccacacgccacgcacgcgctcaccacggcgcggccggcgtcgtcgtccacgaccaccgcgcccgtgaatgccatgctcgatatgtgtgctttccctgtgacatcaagaagcaacctgattagcaagcgaaccgactccgaagcatttcaacgaacacctcgtgtgcgagtaagaacagagctcatcctgtcgccgcggcagcagagaagcagtggaggccccaacagcggcgctctgcgacgtgccgacgcccaacggcggatcgggttttgtccaacgccgcgacgggcggcgatggcggcggcggcggcgcgcgcatccgccatcgcctatgacaatggaaagtacagcaaatgtcagaacgcgatgttcaggcattcaagacatcagagcatcccatag

SEQ ID NO: 74319 - DNA, 1092 bp, Oryza sativa
  Clone ID: PAT_MRT4530_74516C.1
atgggaatcgacgacgagatgagcctagcggatgacacacccaccgacatggacatcgacggcgtcgcagaagacgtcgtccgcaagacagttgacgctgacatccccgccatggagatcctcggagacaccgccggagaggtgaaggagaaggtcctatcaaccgagagcgagaaaccagctccccctctctctcggagggagcggatagccctcctccctcccaaccacccctaccactacacctgcggccttccaaacttcgtcttcttcgccatggccatggtttctttcctctacgcggtgatcgtcccatttctgctgtggcgtgccgccgccgacaagccaacatcgctcatctggacatggtcgattctcgcgtgctcgtacgggatattctggatcatctccctgtcagaggttctaggtgtaattgttgtcttcttccgcgtttcctatgtcgcctttgtggccgccgcctccacccagctggttggttccatcaccggcgtctcgatcgtgtacctcgacaccttctacgtcgccgggatggtcggctacgccgtcgcggagtaccggatgcgccgtggcatcgaggagtgtcccagtgctgttgctgcgatgcctccgttgatcagccaagagcaggagcgcaaccgcgaggtcaatgtgttctacgccgcgttcatgttcggcttggtgtctctggtcaccgtcgggcggatggcgtggctcgtcttcttctccaacggcggcggcggcggcggcggaaggatctcctccgtgctcgaggagctctcggtggagacatgcttcgtctccttccagtggactgcattcgtggcgctccctctgtcgctggtgtccttcaacgccttgttctgctgggtgcccatttgctatgtcgcatggtatgttctgggcgcgatacttggcgcgctcgtgggatcagtcgccattgaggtgctcttcttctggctcgctgctgtcgccatggctggattcttcggctactgtctcgctgtccacgcacgctgcaaaaggttattagccatatgcctagagaatgtaatagagttgctcatgtgttag

SEQ ID NO: 74320 - DNA, 2117 bp, Oryza sativa
  Clone ID: PAT_MRT4530_74517C.1
catcgatactcctgggcatgtcgactttactcttgaggttgagcgtgctctcagggtgttggatggagctatatgtctatttgacagtgttgctggggtagaaccacaatctgaaaccgtgtggcgccaagctgataaatatggggttccgagaatatgttttgtaaacaaaatggaccgccttggtgctaacttctttagaactagagacatgataatcgcaaatttaggtgcgaagcctttggtaatacagttgcccattggttcagaggacaatttccaaggagttatcgatctagtcaagatgaaggctattgtatggacaggagaggaacttggtgcaaaattttcttatcaggatatacctgctgatctccaagagatggctgatgactacaaagctcagatgatggaaactattgtagagttggatgatgatgttatggagacttatctagaaggtggcgaaatagacgaggaaactgtcaagagattgatccgaaagggaacaatatctgccagctttgttcctgttctatgtggttcggcctttaaaaacaagggtgtccaaccactgcttgatgctgttgttgattacttgccatcaccacttgacctaccaccaatgaagggcactgatccagaggaccctgaactgatccttgaaagaaagcctagtgatgatgagccattttctgggttagctttcaagatcatgactgacccatttgtgggatcattgacatttgttcgcatatactctgggaagctggttgctggttcatatgttctcaatgcaaacaaagataagaaggaaagaatcggaaggcttctagagatgcatgcgaacagtaaggaagatataacagttgctgtggcaggtgacatagtagctcttgctggtctcaaagatacaattactggtgaaactcttagtgacccagataagcctgttgtgcttgaacgcatggaatttcctgatcctgtcattaaagttgctattgaaccaaagaccaaagctgatgctgacaaaatggcaaccggactaatcaagcttgctcaagaagacccatcattccacttctctagagatgaggagaccaaccagactgttattgaaggaatgggagaattgcaccttgacatcattgttgacagattaaagagagaattcagggttgaagcaaatgttggagctccgcaagtcaactaccgtgaaagtatttccaagatttcagaagtacaatacgttcacaagaaacagtctggtggatctgggcaatttgcggacattattgtgcgattcgagcctttggaggctggaagtgggtatgaattcaagagtgaaataaagggaggggcagttccaaaagaatatgtaccaggcgtgatgaagggaattgaggaaagcttgcccaatggtgtccttgctggttaccctgttgtggacctccgagcggtgctggttgatggctcataccatgatgttgattcaagtgtcctggcattccaaattgcagccagaggtgcattccgtgaaggattgaggaaggctggtccaagactcctggaacctataatgaaagttgaggtgataacccctgaggagcatttgggtgatgttattggtgatttgaactccagaagaggacaggtcaatagcttcggggataaacctggtggcctgaaggttgtcgatgctttcgtgccacttgcggagatgttccagtacgtcagcacgctgagaggaatgaccaaggggcgcgcgtcttacacgatgcagctcgccaagttcgacgtcgtcccacagcacatccagaacgagctctctgcggcgaaacaggaggaagctagtactgcttaattttttttccagattttggtagatatactaaacggcgacaccggagcaggtggataataggacatccaagtgtatgtagctttgtagcgtcaagcccctcggggagatattgtttgccattgttttggacctgataatggccttgtcaagttcttttcttctttttgaagactgccttgttaaggttttcagaagagaaagcggtacctataaaatttttgtttccttgctctaaaaaaaaaaaaaaaaaaaa

SEQ ID NO: 74321 - DNA, 433 bp, Oryza sativa
  Clone ID: PAT_MRT4530_74518C.1
tatctacaccgttagaggagaggaactcttcacgccgtgtgttcctcggggtgtggtggtgtcggtgatatgggcccggggtaccaagcttagagggaagaggccgcccccagtgtccacgtggtgctcccccaagggggtcgagcccgtggataggtggcagccgtcccctctgagcccaagggggtcgggctgccccgacccctccccacaatcaccatgtggccgccacgtgtgtgaggtatgccccgtccatcgtgatgatgagaggctctgggcctctcatccaaactgtagccggtttggccgcaccagatgtgccctagattgtattcccggtagctctcgtggcatatgtggtaaccccttgagatataaaaggagctccaggcctactgaggatgggaggattctccccccagactgtggatga

SEQ ID NO: 74322 - DNA, 554 bp, Oryza sativa
  Clone ID: PAT_MRT4530_74519C.1
acaggggacatccctctcactcaccttttaatggaggaagacttgggggcatgcatgtaccgggaatacaatctagggcacatctggtgcggccaaaccggctacagtttggatgagaggcccagagcctctcatcatcacgatggacggggcatacctgccacacgccgccagacgtacgaccagggcgtgagcggcttgttgccgtcccatctgtcattcggcctatgaccgactggtcacagaccggtcgtaggcttgtcaggcacgcaacatgccgcattcaatgcagcgtggtgcgctcgctccgcctgcatcaaaggtggttaggtggacgctggatagcgttcacctaacctcacacacgtggcggccacatggtgattgtggggaggggtcggggcagcccgacccccttgggctcagaggggacggctgccacctatccacgggctcgacccccttgggggagcaccacgtggacactgggggcggcctcttccctctaagcttggtaccccgggcccatatcaccgacaccaccacaccccgag

SEQ ID NO: 74323 - DNA, 2304 bp, Oryza sativa
  Clone ID: PAT_MRT4530_7451C.1
tcagtagcaacatttttccaagctagcacctttggaggacaatcgtagtctgtaaaatggctgatagttcctccaagcagaccaataccatctgagcattgttccaacttgatgtaaatcaatcataaaagttgactgttcacttgtcatggatttgctgcccattgcacagaaaatcctatctgtcaatccaacaatggcagaatcagcaggaacaaagcttccaatatgagcaagaaaaaccaccaaagccacctgcttgatgtaaatgcttttccctgagtagttaggtccagttattatgttgattcgtcctgaactgcggattttagtgtcatttggaacgaaggtatcaacagtcatttccgcaaattcaaaatctggaagtcctatcaacaaggcatcacttatcttctcatcgaaaaaacacattaaatatcctatttggtgtacatagacgattagaggagcttttctgcattcaaatgagaaagggaaggaggcaatttcattggctgacacctgctccaaaaaatcaggcaattcttcatagaccatcctcagttcgtctaactcctcacataatccgtctttcaccagtgtgtcgtagcctttttctttaccccgttgcacatcaatcacaccaactaccagatctgatacataatccagctcttctgtaatggaagaattggcctttccaaccaagtcaatgttcatatgttgtaatttgattgccaaatgctctgatattcctacttcaaaaatcttgtttatatgcagaagagagcaaatgcacttcagaaatgcatgccagtcactgcttgtacagaatgaacttggagagttgaattttgcaaatctgcaatcatgattatagaaagtaacagtgacctcaagagatgttttcccataggagtgacgcactacaatcctacataaatagctttctaacttgtttccaaagtaaaaccacaaaaacatgctgatcagtacattagcacatttagtccgtataatatcattacggataaaaggataaaatgatatctgtgccacagaatcaatagcaatggatgctccaccttccatctgatcaagggtatcaagaagcctctcgttgtctaatatagcaagaagacctccagcagcacgaacttgaacgtcacttccaagatccatcatggaattaagaaaacagatcctttcttttacacttaacccttcgtccatagctgcgactttcaagtacattaatctgtgccaggcttgctcatagctgaaggttgagcttttcatgagcttcacagcaggggcctcatcattacaatcaagatcaatcaaaggaaaatcttcagttatgtcttcccagatttccaatacaaaaagctggtgcatacttgaatcatagtatgctattccaactctgcgtccttgcattacacaagccatatgaacctgggagtcgacctccctctcggacatctcctcctcctcttcctcgtccatttcgccggctcgatcgctcgcccggagttccaccgtcaacccccggcgagagcaccgacttcgcctccccctctcctctactcggcggctcctcgcctcctgctcctcctccgagaatgcggtacaaatagagcgcagatgcggaggctggaggaagctaggcagcgacggcgacggcgagcgcagccaaggacagctagcccagtcacactttgccctcacccacttgtgatcatctttaataaaattaatcactttcctttcagccagggcatattttataatggtcttcttgaactgatgcttagagctgaacttcattcctagctcaaaaacaggaacccctggctgcttctgaaaccttgggaacttgccatttcttctgacaagctcaccatcactgccaacctcatcatatgagtcttcatcatcactatctgcatatggggtgtcattgccatcttctggacctccagcagttctagctgactgacttttaaacccctcaaacacaacctcatctagctcatgaacctttccagctctcatcttcctcttcaactctttgtagtgtctttctatctccctagcctcttcatcatcctcagaagggcaatcatctcctcctttccctataaatgacaatcctcccgctgctgacaacgccctccccttctcttgtgtcgtggccggcgccgccggcagccgaacctctcgtggcccgtgggccgtggctccgtgctcgttcgccatccgctccgcccgcagcccgcccaccaatgctctgcccgccat

SEQ ID NO: 74324 - DNA, 1168 bp, Oryza sativa
  Clone ID: PAT_MRT4530_74520C.1
ttttttttttttttttttttaagcaaaggtgtaacgattctcggcaaaacaagcctggaggggcaagcagttcctaagcaccttgtgaggtgcgagatgtacagaagaatgggttagaaccacaaatggaagtgcccaacaaggcacatggttcaacaataaaagacaccatgtacaacatgacagccctattcctaaaaatggggtcgcacatagtatctaaccaaatggcctgttacattggggccaaggaactgacaaaaccgaaggttatattacatcacaacacagggcagcattggtagtacaggggggcgaggaccgtcccagcagcagcagcacacttcatgagatttggactttggtcgtgctgggggcaagtcggggtaaaacatgtttcatcttgatcaatcaaaacttcatgttgcttagcgccaagagaaaatgttaaggcactcaatatagtagggcttggaaacatcaccatccagtagcaactgggtcatgaaaatattggctcgtacggaaaaaaaagccatggatgtttcaatgcctctgaggcactagggcgcttctttgggtttacctcgagaaggtatgcaacaaactcgataaaaccttggtcagccatgggcaagcggtgccgcaaagatgtcttttttggaatcaagtactccagtctgttgctttcctgatttctttcgtacagcatgtggtttttggtgaaatatttgtatgtttcacgtccctgtgcaagcatagcttgttctatcgaaccaatgatgcccatcacacgtgcaagtaaagttgcaggagaatcattttggaaaagaacatttccagtgcaaagttcagctagtatacatccaagtgaccacatatctatctttttgtcataaggcaaacccaaaataacctcaggtgcacggtaagatcgtgattgtacgtatgcacatagatgatctgtctcgaaacagctactgccaaggtcaatgacctttacttcacatctgctgtagctctttaccaatatgttctccggcttcagatcacaatgtataagaccaagtccatgcaaaaactgcagtgcctccaaacactgaatagctattgactgcagtcttggcattgtgaaatagacctcgcctcctgattctctgttgaactc

SEQ ID NO: 74325 - DNA, 2372 bp, Oryza sativa
  Clone ID: PAT_MRT4530_74521C.1
gcacgaggcctcctggtatcttttatctcaaccctcctgtatgaagcttcggttgcgatccatggaccagcgcggcggcgccggcggcgccgccgagacccaccgcgtgcagctgccggacacggccacgctctccgacgtcaaggccttcctcgccaccatgctgtccgcggcgcagcccgtgcccgccgagtcggtgcgcctcaccctcaagggcattgaggagctcctcacccccgacccctccgctcgcctcccggccctcgggctcgcgtccggtgttctcctctacttcacgctctcccccctcccgtcgccctcgcctccgccgccgccgcagccacaggcccaacccctgccccgtaaccctaaccctgatgtcccctcgatcgcgggagctagctgacccgaccaaatctcctgtggagtctggtagctcctcgtcgatgccgcaagctttgtgcacgaatcctggcttacctgtcgcatccgatccgcatcatcctccaccggatgtggtgatggcggaggccttcgccgtgatcaagagcaagtcgagtctcgtcgtcggggctacgaagagagagatggagaatgtcggtggtgcggatggaaccgtcatctgtcgccttgtcgtggcgctgcatgcggccttgctcgatgccggcttcctctatgcaaacccggtggggtcttgccttcagctgccacagaattgggcgtcaggttcttttgtccccgtatcgatgaagtacaccctgccagagcttgtagaagcgttacctgcggttgaggaggggatggtggcagtgctgaactactccttgatggggaattttatgatggtgtatgggcatgtgcctggggcaacatcgggggtgcgaaggttgtgcttggagctgccggagcttgcgcctttgttgtacttggatagtgatgaggtgagcacagcagaggagagggaaattcatgagctgtggagggtcctgaaggatgagatgtgcttgcctctgatgatatcgttgtgtcaactgaacaatttgagcttgccaccgtgcttgatggcgctgccaggtgatgtcaaggcaaaggtcctggagtttgttcctggggtggatcttgcaagggttcaatgcacgtgcaaggaattgagggatcttgctgcagatgataatctttggaagaagaagtgtgagatggagttcaatactcaaggtgaatgtggttgtgtggtgtggaaatgcatttactctgaccaaaggaaggatatcgtactagctgataagtatacctgtggtaattatatgcagaagcccgtcacacaacctggtaggtggcttattatattagtctaccattccctactttgccagtacatcactattgggttgagtttgctgtggtatcatttggttgatttggttcaggatgctcctgcagcaggcattcactttgactgtattattccactgccaatcaatccttaccagcttcccccatctgctggtgcctgctgctcaacaactcaagcttcagcatcagcaaaagatggtggcaatatgtattcccctccctgcagtgctgctgcaagcagccaagggcattgtttcgcggtcggagctaaccagcttgcttcgcttgaccttgccatggacttcgacgagcctatcctttttcctgtgcataatgcaagtttgcaagaggggattcagttttacaatcctaccggcgatactcagctaagtagaaacatgagcattgacaagtgtttgaagggcagtaaaaggaagggctcaggcgagggcagttcatcgctacattcccaagaggaaaccggtgaaatgcctcagagagaactcagcatggagcatgccggagagaaggcgggtgatgctgacgctagcagggaggagtacgtgcatgtccgggcaaaacgcggccaggcgaccaacagccacagccttgcagaaagatttcgaagggagaagataaacgaaaggatgaagcttctgcaggacctcgtcccaggatgcaacaagattacagggaaggccatgatgctcgacgagatcataaactacgtccagtctctgcagcgacaggtggagttcctctcgatgaagctctcgacaatcagtcctgagttgaactctgacctcgacctgcaagatatcctttgttcacaagatgctcgctccgcatttctgggatgcagcccgcaattgagcaatgcccatcctaacctttacagggcggctcagcaatgcctctcacctcctggcttgtacgggagtgtgtgtgtcccaaatcccgcagatgttcatttggcaagggccggtcacttggcttcgtttcctcaggtctacatctaa

SEQ ID NO: 74326 - DNA, 469 bp, Oryza sativa
  Clone ID: PAT_MRT4530_74522C.1
gtatcttaattacttgttgcttaagatgaccgagtcatcatgtttgttgacaggaggagtatgctacaacaaaacccagaatctttgttgcaaacggcatgtgcctccattggcgacatgcacaagttctgtattgacagagccggggggggggtatactaccttgggttggacatgctagaaaataggacgaatgcttccttttttttaaccttacttcacgaacaggaggtttgagagtgaaaaacggttaacgcattaccaatagcttgggtgtaagcacggatatggataacttgagaacatagctcactcctagcagaacattgtctgaaggcctgcaacgaagcattttttggagtcattttataagaaaatcataaatactgaaaatgacatccggaacactcacaggcaacttgtttatgtacatgaacagtcttttgaggatctctcttgacactgaata

SEQ ID NO: 74327 - DNA, 204 bp, Oryza sativa
  Clone ID: PAT_MRT4530_74523C.1
gggaccccccacgcggacaccctttcctttacaccggggattaacacacggggaaattcccacggtgtatatgtggtttttcacgcccgtgcacccgggcccacaaaggggcgccccgcgcgagaaaaaaaacgcgcccacacaaccccacacaccacccacaaaaagagggtccccacacaccccgcggcaccaaatggggcg

SEQ ID NO: 74328 - DNA, 3407 bp, Oryza sativa
  Clone ID: PAT_MRT4530_74524C.1
ggggcggcgcacgctcggcagcgaagcgaacgctccatttctcgtgaggttcgaccgaccgaaagagggcctggcggcggctgggggcgaggggaggcgggcgcgcgcacgccgccgcctcggcctccccccgcccgcggcgctgccccccttcgcgcccccagccgcgctcgcgctggcgcggccgcgggtgggaggaggggggcgggaaacgccgactgccgggggggcgcgcggtggcggcgggcggcagcgtcggacgactctgccgcggccgcgggggctgccaggtggtgcctcctcctcgtcggccggaacagttactgcaactgagctccacagggcgacgtttctgccattgcttccagatctgggagagggtcgggtggcactgacgagagcttctggttatatatgtacgagttccttgtcgcacacaccagagactccgaggcttagtgtcatcatcaaacctccccagagagtcctggtcaatgcttggatcgcgaaggtttacaccgggaaggactgtgaatgacgaaaacttgtttgctaaatgcttccggttaacaatttcctagtaaaacgtgggcgtggcaaagtcctggacagtggccccaatgatcattttttcattttttgcattgtatatggtggtcctggtgttattgggatgccaacagatgcataccttttacgaatgaatatctttgtagatgttctggtggaacaaaggcatgctgctgagacgtacaaaagacctggtcttttaccttgaagacctgtgaatctggaaacatctttgagggttctattgccaaatggcatcaatgtttatgccaccactgcatcaaacgctgatgagagcagctggggaacatactgccctggggagtacccgagcccacctccggagtacgacacatgcctaggggacttgtacagcgttgcttggatggaagacagcgatgtccacaacctgagaactgaatcactcaagcagcagtacaatctcgtcaaggaaaggacatctgtgcagcacacatattactctgggtcacatgtgatggaatacggttctttagagctgaatgcccatcatgtgttcatgtacatgggttccaatccggctaacgacaatgctacatttgtggaagataactcgttgccatcgttctcaagggctgttaatcagcgggatgctgacctggtttacttctggcgaggaagtaccgcaaattgcctgagggttctccccgaaaaaaacgaagctcggaagcaattgcttgaaatgatggcacacagatctcatgttgacaagagtgttgagctgatcggaaatcttctcttttggctctgatgtaggcccaacaaggtttctaaaggctgttcgctgcaaactggtcgaacctcttagttgatgactggagttgtctcaagtctatggtacgcactttccgaagctacaatgcggctcgctagcgcagtatggaatgaagcatatgcgttcctttgcaaacatctgcaatgctggcatctctgctgaagcgatggcaaaggttgctgcgcaggcttgcaccagcattccctccaacccctggagttccacccataggggttttagtgcttaaatcataggtgaagaaaacttagcaaatattctcagctcctgcaatatacccaagttatctttttctcttgcccctgtagtttgatgatcgattgggggcagtagtgcttgaaccgtaggtgaagtctgaagaactgtgcattatttcagatgctccaccatcccaaatcatctaaattgttctcgttctctggtgtacataccatagcaggaaaattgatatggcaatattacctgccatcattgctgtacatacttatagcttgctatatgtagtttgtagctacatatataatatgataaatgcattgctgctattttacaaaaaaaaaaaaaaaaaaaatccgcagccgccgcagaacagaggcaatgttgccgctctgggaaagcagaaggccgtcgtggccggcaggcccgacgcgaagaaccggcgagcccttggcgagatcggcaacgtcatgaacgtccgcctaccggaaggcaagcctctgcagcaggcgccggccggccgcaccgccaactttggtgcccaactgctgaagaacgcgcaggcaaatgctgcggcaaacaagcagaatgcagttgcacctgctgccgtggcgaggcctgcgcagaggcaggccaggaaggcgcctgtcaagcccgcgcctcctccgcccgagcatgtcatcgagatcagctctgattctgaccagagcatgaggcagcagtcggagggcagcgccagctctgtccgcaagtgctcgaggaagaaggtcatcaacaccctcacctccgtgctcactgcacgatcaaaggttgcctgtggaatcactgacaaacctcgagaagtgattgaggacattgacaagctcgacggtgacaatgagctggctgtggtggactatattgaggatatctacaagttctacaaggtcgctgagaacgagtgccgcccgtgtgattacatcgacacccaggtggagatcaattccaagatgagggccatcctggcagactggataattgaagtgcatcacaagtttgagctcatgccagagaccctatacctctccatgtatgtcatcgaccggtacctctcgatgcagcaagtgcagcggagggagctgcagctggtaggtgtctctgccatgctgatagcttgcaagtacgaggagatttgggccccagaggtgaacgacttcatcttgatatcagatagtgcatacactagggaacagattcttgcaatggagaaggggattctgaataagcttcagtggaatctcaccgttcctacagcatatgtcttcattatgcgctatctgaaggcgggggcgtctgcagataacaaaagtgacaaggagatggagcacatggccttcttcttcgctgaattggcactgatgcagtacgggctggtggcatccctgccttccaaggttgctgcctctgctgtctatgcagccaggctcaccctgaagaagagccctctatggactgacactctcaagcaccacactggatttaccgagtcacagctattggactctgcaaagcttcttgttacctcgcactctactgcccctgagagcaagctgagggttgtgtacaagaagtattccagtgagcagcttggaggagtggcacttcgctcaccagcagtggaactctgcaaataaatggagattagctttgtctcgtatttcgtttgcttatttggtttagagtgcaatggaaggcgagtctgacattcattaggcgtttgcttgttttggagtcaagaaagtttggaatc

SEQ ID NO: 74329 - DNA, 327 bp, Oryza sativa
  Clone ID: PAT_MRT4530_74525C.1
atgccgacgttcccccaacaaaacacgaagaggaaagagaccgggagattacctctgcagcgccttcagctcatccccattggccaagaatcccatcaagaaccacccccaaacccgtcgtcagagctgcaaaagaaagggcagttcttgcccgtagcatcggggtgcgccttcgtcgcctgcgcctcgtacatcgggcgggttgatgccctccctgtcgccacaagctccgcccgtcctcgtcacatcatcgtctttgtggctgccagcgggaggatgaggagccccaagcccgatgttggagatttggcattgcaagacacgtga

SEQ ID NO: 74330 - DNA, 284 bp, Oryza sativa
  Clone ID: PAT_MRT4530_74526C.1
tcttgcacgcagagaagagaaaaaaaaaagggaaaaagaaaatgtaccaggcgatcccgtacaacgcgaaccgggcttggccggcggcgagccggccggcgacggcgccgccgccgctgccatcgatctgttgagaggatgaggaggtgaggagggcggtggcagagtgccccgtggtggaggtgggcatgtttgctatgtgcctgagccacgttgtgaagctgttgttgcaggggatgggcgaaacaattgttgtgcacgaggtcgccggtgaggccgagctc

SEQ ID NO: 74331 - DNA, 894 bp, Oryza sativa
  Clone ID: PAT_MRT4530_74527C.1
atggctaacaaatcatccctgctacagctgctgctcatcgcagcagttgcttcgcaattcgtcagttcacaagccggtagcattgctatctactggggccagaacaacggggagggcacactggcagacacctgcgccactggcaactacaagttcgtcaacatcgccttcctcgcggccttcggcaatggccagccaccagtcttcaacctggcaggccactgtgacccaaccaatggcggttgcgccagccagagctccgacatcaagtcgtgccagagccgcggagtcaagatcatgctctccataggcggaggggcaggaagctactacctttcatcatcagaggatgccaagaatgtcgcaacatacctgtggaacaacttcctgggaggccagtcatcttctcgccctctaggtgacgcggtccttgacggcattgacttcgacattgagggcggcaccaaccagcactgggatgatcttgccaggtacctgaaagggtacagtaactctggaaggagggtatacctgacggctgcgccgcagtgcccattccctgatgcctgcatcggtgatgctctaaacactggcctcttcgactatgtctgggtgcagttctacaacaaccctccctgccagtacagttcaggcagcacctctaatcttgctgatgcatggaagcagtggctttcagtcccagcaaagcagatttttcttggccttcctgcatctccccaggcggctgggagcggtttcatcccagcagatgatctcaagtcacaggtgcttccagtgatcaagagctcagggaaatacggaggcatcatgctgtggtccaagtactacgatgaccaagatgactatagctcttcagtgaagagcgatgtttaa

SEQ ID NO: 74332 - DNA, 420 bp, Oryza sativa
  Clone ID: PAT_MRT4530_74528C.1
catctgcctctctccgctagtccgcttgccaaactgtagcaagcaagcaagcagtgcgagacaacgtgcagctcccactcccagccaatggaatcgagggaaagtttggcacgcccgcctccgtaccaccactagctcccgcccaccgatcgtcggcggctgcggcggcgacgccaccatgctccagctgcggctccagcccccgcgcttcacgccgctcccccgccgcagggtcgctggcggggggcaccaccgtcgccgccgcgccgcggtacccccgccgccccttgccctccgcttccagtggcggatccccgacgtcgacgcagatgcggtgcaagagcgggtgcggtcgtggctgtcgcgggcgaggggcgccatcgccgacgcggcgaacgccgcgcgggagaaagggaggag

SEQ ID NO: 74333 - DNA, 1011 bp, Oryza sativa
  Clone ID: PAT_MRT4530_74529C.1
atggcaggcagagcaaggtgggtagcaaagtatacaaagggtcttgttgatgtgcttcatgagaacaatatttcacactaccgtacccagaatggatggagaaccgatgggtggaggaaaattgttagcgaattcaatgataggtacccagatgcaaaatttactaaagttcaaattcaggagcatgagacacaactgaagagagattatagattggtaaaattaattctccagcgggaaggtgttacttgggatcaaaatgcttccatgattagaacgacagatgaaatctgggatgagataattgaagagatgcccaaggcgcggaagtaccaatttaagagctttccgttacttcaatcacttgaggtgttatttgaaggtgacattcctgaaggggaacacaacttaatgccgagcaaacctcaacttgctggtaggaatgttgatgagggaggcaataacatgagcacagctccgagcatacctggaagaccttgtagcacagttattgccggcattgatgatggggagaacaacatcggcatacttcagagaactccagagttagggcaacaaggtctggatgatgttgatattctgcaaaatccaacagaagaggtactggaaagaccacagcacggtgccgacccaaaaccacaaagtgctgatgaaccggcgcactcaagctcttgcatagaacctcaaaaggacaagcgaaagaagcgtaaggtccctgacatccagcaaaccatggaggcttttctggagttcagaatgaagcaagctcgcttgaaggaacaagcgaagaaggagaagaaggatggtgagccgttctcgatctcgacgtgtatcaaggcactgcattcaatgaccgacgtatctgatcaggtcaagattctagcctctgatgttttcaaggatgcagcgaaccgagagatcttcctttcctacgatctcaggcttcgcacgctgtggatcaagagggaagtcaacaggttactcacttga

SEQ ID NO: 74334 - DNA, 579 bp, Oryza sativa
  Clone ID: PAT_MRT4530_7452C.1
atggcggcggcgacggaggagcagctgcgaatcacgggatccgtcgtccctggagtcggggaagtggaagaggtcgacgaggccacagaggggggacgacttgggcgaggcgacgacgacgagatcctgcggttcatggactctgtggacggctacctcctcctcatggattcactgtcctccgttctccgcccggggtggcttgatctggcaagtgcccgtcactcgatgggtacatcacgtgtttcgagtacactcttcgatcacaaagagcaatctgcagctagcaagctgcaagtggttgattctgcagactcgcagtcatcagagccaaacccacattttatcctgtcaaagtggtgcttgcaagaaaaatccaactccaatgacgctgtcggtgtgcgagatactactaagccaaaattaaggtaccgagggtcagcagcaacgccagaagatggcagccatgattcagatgcaactccggcagagtctgctactagtgtggacactagtagccatgttcagaaggcaagatcaaaagcactatcaacctttggagcactgcacttgaattaa

SEQ ID NO: 74335 - DNA, 1906 bp, Oryza sativa
  Clone ID: PAT_MRT4530_74530C.1
gcggctctccttctcttggtacactacaaaacgcgctccactggttcgtcctcctaccgccgcaaagaacgagctgttatccgggtacacgcacgaagcaatatctttttctttatgagtttgttgatgttgatagtcaaatattaaaatgtttaccttaggacaaaactagaacacaagtagttcgaaacagagggattacttgattttctgcaggtcactggctggaaactacactacctcatgggcactgtctttattacactatactgctatctaccaaagtggaactagctaaaagaattaggtgcaatccttgcttttaccaatgtgtgtcaatgtccatcattttaggtcattgattgtaatagctgattgccgacagaattgataatattaagtaatggttcaagttctcccattgcccaagatactagcatatcagcatcacaagtgacacagacagtaatacacagtaccagaaaagataagaacaaggttatatgtcatccattgtcaaggagaggaccgttcagaaggagtaccaagtccttttaggagacagtgacaccatcgagttctgcttgagctactgctgcaccgattgcatcgatcacctccatcttgcccttcgtcactgcttcatccataggggttttctcatggctgttcagtgcactgacactagccccagcgcatatcaacgctttaattacctcgatatgtccattgaggcatgcccaatggaggggtgtgttcttctctgagtttgtagcattaacattcgctccattttggatcaagtactgcaccacagcgagatgtccattggcagaggccatatgaagtgccgttcgtccttgcgaatccgcggagtctagggaaacaccggcggtgaacagcgcgacgacgtcctccaggtcatcgtacctagcggcgtcgatgagatcctgcgcctgctcggcggtcgccgccgccgccgttggttgctccgattccgcgcccatcgccgccgccgccgccgcctcagtcccagtagaaatctttcatggtcaggggcaagacgctttagctttagagggattgttttatgctttggtgccaaaagcaagctagtgcattcatcaacactaggcaaaaaatcaccatatagctgccaaaagttgtcttctacatcaaatgcatagagaagaaggcaagctaaccttagatcccaatctgtctcaggatctgttgattcaatgatgtcaaatatgggatggcctagtggaataatgtcggggaaaaacatccaagggcgtttttgagttatagtcagcatcagctccaatggaatctccataatcacaccatatttgattatttgcatagcattataaaaggcagcagaagatatgtaagcgtaaagtactctagctctgcggagtgggtcgacgtcccgggaggcatagacggccatcccatcggggccttccaagaactcaaccccgtacgcccgcatcatccgcgcgtaccctatccggtagaagtcggggtcggccggctccatctgcacacgacgacattgttcatcatgcatgcatgcgcgcgagcagaagagatgtgagcaacggaagcaactaggcgggaagagattgagcacctcgggcgggaaggggtcgtcctcctggggcggttcgaggagcctgagcgggggggcatcgtcgtcctcttcctcctcgccgacctcctccgccgccggtgggggtgccgcgggaggcgggtcccggaggcgagggcgtccggcgcggggaggccgcaagacgaggcggcgggcgcagggaacggcgcggcgaggcgggaaggtggaggccgggagggggagggggagcggcagcaggagaggggaagcggcgggagtcgccat

SEQ ID NO: 74336 - DNA, 877 bp, Oryza sativa
  Clone ID: PAT_MRT4530_74531C.1
atttgcatcttggaggaaggctcccattctcagtttcaaattgacagagcgagactgaacaatactcagtgcccatagaaatctttcatggtcaggggcaagacgctttagctttagagggattgttttatgccaatgtttttgccaaaaatcaattgctctcttctggttctttaacattttcgtggcaagatcttggtcttctagttccattagatcgtcctttggtgccaaaagcaagctagtgcattcatcaacactaggcaaaaaatcaccatatagctgccaaaagttgtcttctacatcaaatgcatagagaagaaggcaagctaaccttagatcccaatctgtctcaggatctgttgattcaatgatgtcaaatatgggatggcctagtggaataatgtcggggaaaaacatccaagggcgtttttgagttatagtcagcatcagctccaatggaatctccataatcactctagctctgcggagtgggtcgacgtcccgggaggcatagacggccatcccatcggggccttccaagaactcaaccccgtacgcccgcatcatccgcgcgtaccctatccggtagaagtcggggtcggccggctccatctcgggcgggaaggggtcgtcctcctggggcggttcgaggagcctgagcgggggggcatcgtcgtcctcttcctcctcgccgacctcctccgccgccggtgggggtgccgcgggaggcgggtcccggaggcgagggcgtccggcgcggggaggccgcaagacgaggcggcgggcgcaggggacggcgcggcgaggcgggaaggtgaaggccggaaaagaaagggggagcggcagcaggagaggggaagcggcgggagtcgcc

SEQ ID NO: 74337 - DNA, 168 bp, Oryza sativa
  Clone ID: PAT_MRT4530_74532C.1
gaatctactccaactttgttcagcctacgacactgttcaaaagcactttctctttggagaaccatgaaaggggcgtccccacacaccaagcttaaaggtaaactcgggcctttattacaaggcataaaacaccaatccgggtgcaacgtgagaaacgctgctcattta

SEQ ID NO: 74338 - DNA, 474 bp, Oryza sativa
  Clone ID: PAT_MRT4530_74533C.1
atgggccatttcctgggccggaagacttcgccctgcaggatgtgggcccaaggtggggcggatggaattgttgggcctagtcagcctcgtgatttgttaacatgggccggagaaaaggctggggcgaacgacgacgacggtgacgggttcaacgaggagaaggacgagcacctcaccatcgctgccccgcccccgtttccaccgtcctccgcgctgcccaccgacctcgatgacgtcctcttcttcctcctctctccagaaacccacgggtcacgggaagttatgcggccgacggcggtggcggcggcaggtaacaagttaacaagctcaattgaacagaccttctctatgaaggccgccgaaccaacatcaactgatccaacaggaactcctaagccttcatatatgcacacctgcagtgcaaatttccgtggaactacttgcaccgctcttcagcgacctactgcggcgtag

SEQ ID NO: 74339 - DNA, 731 bp, Oryza sativa
  unsure (1)..(731): unsure at all n locations
  Clone ID: PAT_MRT4530_74534C.1
actatttaccccacttgccgaaaagggggatttcctncaagccgtttaagttggttaacccnaggtttttcccagtcacgacnttttaaaacnncgccctntgancgcccntaatacgactcactntaggccgaattggttaccgcccccccctccggggccatccctcgctccccggggaaggggaagaactccggagggggaggaggaggaggagcaccgatgacgcgggggaagcagaagatcgatgcgcagcggcggaacgcggagaagaaccagaagtcgaaggggtcccagctcgaggcccgcgccgtcggcctcaaggtcatctgccccatctgcaaggttcaactggccaatgagaaacaattgattgatcactatggatcaaagcatcccaaggaaaaaccccctagcccatcagaataatttgtgttggccctgatgcagaaacataagttctgcttgctctgtccgcgagattgttcgatctgccccatacttggacctcaactgaagttttactctacaatgtatgcatttcctcttgtttctggctagagccgtcataagcttgtgctttctatgagaagtatatcttttgatatcataatgccgaatcccgaatgtatatcccaactgcatgtggtacattatcggataagagggtgttgaattgtcaataaagcttatgaaaagtttgacaaaaaaaaaaaaaaaaaaaaaaaaaa

SEQ ID NO: 74340 - DNA, 360 bp, Oryza sativa
  Clone ID: PAT_MRT4530_74535C.1
atggccaaaatcattgatctctcgatggaaaaagtttatctcttgcatgtagttatctgtcttttgcatggtgaatggtacagggaggatgcagagtttggtctgatcaggtttcaggatgacaacaaacccttggttctgtcagagagtaaaaattcagagcaagaaaacctgaaaaacacaaagtcattgagtcagctatccagtgcgatagcaaggtcaggcggggctagacagtggcaggggtgcgggatcttctatgcgaaggaggaggtggtgccaggaggtggtcacgcgtggtgtgccatgtgtggtgtttggatcggcgatctcgctacaacggtaatcgggcttacttag

SEQ ID NO: 74341 - DNA, 4479 bp, Oryza sativa
  Clone ID: PAT_MRT4530_74536C.1
atgttggatttgctgcttaaaaccctggaggatattgagaagatgcggactgaggcggaagaaagaaacagagcagatctgaatgagttcatggcggcggtggaagcgaggttgcctcaagtagagaaacgagttggggatttgcattcgtcgctgggggatttgagtgctaaggtggaacaactggagagcgccatgcttcgtcaggccaaggcggagaaggcggtgggagacatcaaggaggaaccaacagctgcatcgccatcaccaactccatcgtttatccatggtatgagagatcctatgttgaattctatttcgccttttgtggtagaatcagcaggagtaccagaagggggtagtggaagtactggaattattgttggaagtgttccacccatgacatgtcctcagttcaatggggataatccacagatgtggaaggctaattgtgaagtgtatttcaatgtttacggcattcctcctgggcagtgggttaaggtggctacgctgaattttgttggcaacgcagcattttggttgcaatctgtgcgaaaccagttgattggcattacttggtttgatttatgtgaaagagtctgtgctcgatttactcgagataggcatgaagctatggtgagacaatatatacacatcaggcaaaccaattcagtttcagaatatgtagagcgattcgactgtctaatgcatcggctgttggcatatgaccagactgtgcctgcattgtactttgtcacaaaatttgttgatggccttaaggatgaggtgaggagatctgttatgatgatgaggccccaagatatggatgtggcctgttctctggctttgttacaggaagaagctatggaaggaagtagacccacaccttataagaggactgaaggcagcaattatgtcaagacatccagcaagctcacagccccaactctgtctatgacaagagaaccaaaccaaatcaacactgaagaaaggagaactgctgattctaacagaccaaaggaagataggctggcagcattaaaggcgtataggaggtcgaaaggcttatgtttcacttgtggggagagatgggggagagaccataagtgtgcaactgcagtacaattgcatgttgttcaagagttgttggaagttttacagggggattcaggggaggactcacctactgaaagttcaccagaaagggaagatatcattgttatggccatatctcagcaagcgttaaatggaactgagtcacgcaactccatcagacttagggggtggatacaagggactgaactattgatgttaattgattcgggaagctcccactcttttattgatgagaaaattgggaaatctatgtctggggtaaaattgttgactaaacccttgaaagtccaaattgctgatggaggagagttagtgtgctctcaggtaattcctaactgtagttggtggacacaggggcacaactttagtaatgatttcaagcttatcccactgggaggttatgacataattcttggaatggattggttagagcagtatagccccatgaaaatttattgggttaacaaatgggtggagtttcagtaccaaaatcagtggctcagagtattgggaatcagcagtagcactactagctatgcagaaatatctgtggaacaattgatgagtttggccaagatgggctctattatgtacatggtgaaaatcactgaccaccaaaacacagaagagcagtcctatccagatagcattaagcagattctcttggaatatcatgatgtctttgatgaaccatctgaactaccaccagaaaggtactgtgatcatcagattcccttgatagaaggtgccaaaccagtaagtcttaggccctacaagtataaccccgaactcaaagatgaaattgaacgtcaggtgaaggagatgttagactcaggggtaattcaaccaagtcagagtgcttggtcttcccctgctcttttggtgaggaagaaggatggtacctggcgcctttgtgtagattacagacacctgaatgccttaactgtcaagagcaagtacccagtgcctataatagaagaacttcttgatgaattgtcagggtccaaatggttcactaaactggaccttcgagcaggatatcatcaaattaggatgaaacctggagaggaacataagactgcattccagacacacttaggtcattatgaatacaaggtcatgtcctttggattaattggggcacctgctagttttcaaggggccatgaatgacacattgtcttcagtgctcaggaagtgtgctttggtattttttgacgacatcctgatatacagtcctgaccttcagtcacactgccagcacttaacacaagttttacaactccttagaagagatcactggcaagtcaaaatcagtaagtgtagttttgctcagcaacaagtatcatatttgggacatgtaattggggttcatggtgtgtctacagaacctagaaaaattttggatgttcagaattgggcagtacccactactgtcaagaagctcaggggatttctggggctggctggttattaccggaagtttgttaaggattttggtttgatctgtaaacctcttactcagttgttaaggaagggagtccctttcaaatggactgctgcaacagaagttgcatttcagcagatcaagcaagctctcattactgctcctacggatgctagtgatggaggcataggggcagtgttatctcaagaaggtcatccaattgcttacttgagtaaagctctaggaccaagatctaaagggttgtcaacttatgagaaggagtgcatggcaatactcttggcagtagaacactggagatcttatctacagcaccaagaattcatgattctcactgatcaccacagtttgactcatctgtctgatcaacggcttcatacaccttggcagcaaaaggcatttactaagctcctggggctccagtacagaattgtctatagaaagggcagtgctaattcagctgctgatgccctgtctagaaaagaccttggtgacagtgctcagattctggctgtatcttcttgttctccctcttggctccaagaggtaatacagggctatgagcaggacaagttctcttcccagctcttagctgaattgtctttgaatccgaaggctagggagcattatactctgcagcaaggcctcattaggtacaagggtcgaatatgggtgggtaataacacagatctgcagctgaaattgatcaaggaattacatgataatcctgctgggggccactctggttttcctgtcacttataggaggattaaacatctgtttgcttggttgggaatgaagcagcaaattcagcaacaactgaagcaatgtcagatctgtcaacaggccaaacctgagagggttaaatacccaggtctattgcaacctcttcctgttccaaagggtgcttggcaagtgatcagcatggatttcatagaaggattacccacttctgacaagtataactgcattctagtggtggtagacaaattctctaaatatgcccatttcttaccattgacccatccatttactgcattctctgtggccactgtctttatgaagaatgtttacaagctccatggtatgcctcaagtcattatctctgacagagatagggtattcacaagtcaactctgggaacatttattcaccaagtctggtactaagcttcacatgagctcttcttaccaccctcaaacagacggtcaaactgagcgggtgaatcggtgcttggaaatttttctgaggtgctttatacatgtaactccaactaagtgggccaattggttatatctcgctgagttttggtacaacacttcctatcactcttctgtgcataaaacaccttttgaggtcatttataggtaccagccgactcactttggcatctctatgcatgactgtgaaataccagatttggatttgtggttgaaggatagggatctcatcaatcagctaattcaacaacatttacatcaagctgagcaacaaatgaaagcttatgccgacaagaatcgtactttcagggagttccaggagggagactgggtttacttgaaactccaaccatatgtgcagtcttcagtagcacgcagagcaaaccataaactatctttcaagtactttggaccttttcaagtgttgcagcgggtgggattagttgcttataaactggctttacctccctcttgccacattcacctagttatccatgtctctcagctcaaggttgctcgtggctataatcctcatgttctgtctaccgaaccatttcagtggaaccattggcagagtccgcagcagttcctagacaggcgcattactaagaaaggcactggcttgggggcaagccggtttccaaggaagggagaatgtcaggataagcaaggaagctga

SEQ ID NO: 74342 - DNA, 1818 bp, Oryza sativa
  Clone ID: PAT_MRT4530_74537C.1
atggcagacatgaagcaagaggaggatgagctagccgtggatcccggtgtcggtgctgtgtgcgatcctgtgacgaagctgcggttcgaagcgatcgtctgcctcctggataggattccgatcacgctgcagcagatcgacatgtttggccaggacgtggcgttccgcacgaagagaattggcaacatagaggcgttgctcgacttcctcaaaggaagcgcggccgcgacatggggagcgcgcgccggcgccggcgagccgatcgatgcgtcgtcgccggagcttcaccgtctggtggaggatgcagagacagcttaccgcgacgtccgcggcctccaacccagaatggtcgtgcaaatgccccgcgtgttccacaaggtgtgtctcccgaagctgcaccagctgctggtcatcgcgcgccgcctcctcgcccagaacgtggcgctccgccgacttctccttcagccagtgggctgtgacgtctctcccatggcgttggccgaggccgctgtaagttcggacgacttcgagcggcacggccgcaacaaggtcgtcatagacgagttcggctacgaggacctgctgcgccgccgccacaccggccacgagtcgcagaacgatgcggacgacgcagagcagcacggccgcgaggtcagagaaggcgagtacgaggacctgatcctgatgcgccaccgcgacaccagccacgagttgttgcaggatgatgcgcgccggcgccgcgcggatgcagaggcagagcagcaaggcggcgacggcgaggtcagagatgagtacgaggactacctgtgtcgccagctcggcgccgtctacagcgggcccgatcaaatctacgagcacgacatgcgaggtccggaaccagcacactcgccaaacacgcccgaccagatctacgtcccctgcgaaaggatgcttccctacccaagcaactgcgacaacgccgaggaccggattcatatggcatgtcttgctctcaagaacctggtaaaagacatggaaggaatctactctcctcgaggaaccttgtggcagtatctggaggacgtcatctctcttgcgcatgctctgtttctggagaacaccaagctccaccggttcactgatcaggcttcgcaccaggacttgccgttgcagccgccgcagggcttcccatttcaacagcagccgcagcacgatggctaccagcagccgggcgtcccgttccagcaaccgcagcaaggtggctactacggccacggccagggcatcatgtttcagcgaggtggctacctccaggatgtcccgttccagcactggcagtggcagcagggtggttacggacaaggcttcatgtttccgcaggctcagcatcaaggtggctacggccaaggtttcctgtccgagcagccgctgcccggtgaccccagcttcatgaacatgcaggctccttacgacggcgacgggggagtcctgttccagaagccgcagcactatcaccatgggcatgttccgagcgagaagggcgctattcaggccaaggggaagcagaagatgcgggaaccaaaaactgtcatgtgcccggactggtgcagaaccggacattgttcctctggtgacgggtgcgaatatgctcacagtcaagacgaactgcgggtaatcgacgcccgccccaagtacagaacagagccgtgccgttactggctagctgggaaagggtgctggtatggggacaaatgccggtacaagcagcaccgattagctcgggagccactgtatgtcgatccattcttgacaggtcatgaattgagaaataagacatag

SEQ ID NO: 74343 - DNA, 450 bp, Oryza sativa
  unsure (1)..(450): unsure at all n locations
  Clone ID: PAT_MRT4530_74538C.1
attagtacaagaaaattcgtttgctatttgtnaagtacaactgttaataagatgatccattgtactttacccttgantttgaccaatactgttattgccaaattgtggagttgagtaacagacttattcttctttctttagcaactgaatttnatgtgattgagttctttgggtcaagtgggtgatcaatggtcgatgtactgacataaaatgcatcaagccatcatcaacataaatgactgggagcttctgactgaaatttcaaatgctgattaggacttgagattttaagacttgttggacataattgaacttttacatgattgcctgttatatattgacctagttgatgtggtttttcatcgggnggcccatttgttatggtacagtagttaaatacctaatgcaaccaaaggtatttcaaggcatgnttgcatctattaacctgnc

SEQ ID NO: 74344 - DNA, 1905 bp, Oryza sativa
  Clone ID: PAT_MRT4530_7453C.1
ccccatcaagatctttataaacaaatcaattcaacagaaaaattagtggtagtgtacacaaattagtggtgtacaagataaggcaagcagcagcagaaaagtaacactacctatttcatctaacctcacttttccccatcaagatctttcttgcgggacctgaaacggaacccaccaggaggcgacggtgagaactccactgggagattcggtggttcaccctcaccagagagcatttcaagcacctcctcacttgatggacggcgacttggcgatctctggatgcacaagagtgcaacagtaatgcatcgcagcgcctggtcacggttaacatcccgcagcgcagggtctacaagatcaagcaagcggccaacacgggcaagatgtcttgcccatgaaataagacttgccttctcaaactctgacatgggtgaggccgtcacttggagtgggcggcgtccagaaataagaactaacaacaaaacgccaaagctgtaaatgtcacatttctctgatagaggtccaccaccaccatattcaggtgcaacatagcagactgtgccacgcatgcttggtgtgctgctcactgctccaccactcttgggcacgaattccccactagcccaatccctgctgctccttctcacaccgtcaatccaccaatcaatgctgccattgccattgctgctcctacgactccagcttttcatcattctccaccttgatcgtcccttctcctctaagtcacagtccctctcccaccactgcatgctagccattggaccaatctcactccttgacttagcaagtgctcgccttttttgcttcttggttagctcatcagcatactcctcacgccaccattctctcgccctgcgctttgttttctttctctctgttgaggtggcaggggtggttgcagatgctcctgcaatccaatcattcttcggccgctccttcttgatctccgacctaatccattccatcacatagtccttgacaccaccagaaccaccaccattgtcctgacgccaccaccagtcattcccagctcctgatgctgcagcacctccaccattgcagcttcggccattcaatccgctactgacactagtcttatcacatcctgaagtggatgctgcctctgcaggagaagccatggtaaacccctcatcatcttccggtgacttggcagcattgtcttccccattgacagcaacagcagtagcattttcatcagcaacagacatgtcatcatcacatccgccacaaggattgctactctcatttccattgccctcaattgcagcactctctaattcatccctctcctccgactttatctgcgcgaggccaaaatctgagaggcgagcacggagctcaccatccagcaacacattgctgggcttcacgtctccatggatcactggtggttgcgcgacggaatggaggtaatggagcgcggcggccacgtcacgcgccaccgcgagccgccgcggccactcggacaccagctcggggcacctcttcccgagcagcgcgtcctgcagcgacccgttcggcatgagctcgtacacgagcatcatccggcggcgccgcggctgcgcggagagcgagtaggcgaacggcaggaggatggacggcgagccgtggccgtggccgcagccaaggagatgggacgccagcgagagctcgttgtggaactcccgctccccctgcagcgatcccgcggcgtccatcaccttcacggccacggcctgccccgacctcggcagcgcgccgcggaacacggggccgaacccgccctgcccgagcttgctccccgccgcgaacccccccgtcgcgcgcctcagctgctggcacgacagcctccgcagcgcgggcgccggctgcgtcctcgccccc

SEQ ID NO: 74345 - DNA, 324 bp, Oryza sativa
  Clone ID: PAT_MRT4530_74540C.1
atggatccaccaccaccaggacgcggggaggacagatccgccaccgccgagccgtggggaggatggatctgccgccgccagtccattgggagcacggatctgccgccgccgagccgcggaggcacggatccaccgccgccgggctcctccaaccgcctccccactcccaggtctggaggctgcggatcagggcatggacttcagcgggcgatgtcacgaggagacggcgttccggagctggccttcctctcgctgttccaccacaagcacctcatcggcttcctcggctactgtgaggagaacgacaagcagctgctcatctag

SEQ ID NO: 74346 - DNA, 3066 bp, Oryza sativa
  Clone ID: PAT_MRT4530_74541C.1
atggaggacacggccaccggcgagctccagcgtggggcatggtcacatggacggcagaggatcctgcgtggtgatagagacggcgccggcgccgagcaccagtgtggggcatggacggcagaggatcctgcgtggtatcaggtcctgataccttaccagtatcaggcgatacttgcgaggtatcaggtgatacttgatacctataaggagcacatccctgtggaggaggtgttggatcacctaaaatgcacgcgcgagggtctcacctccgaggttgcccagcagaggatccactccttcggctacaacaagctcgaggagaagcaggaaagcaaactgctcaagttcctcggctttatgtggaacccgctttcctgggtcatggaggcggcagccatcatggctatcgccctcgcacacggaggaagagatgccaggggaaagagaatgcgcatagactaccacgacttcgttggaattgtactgctactctttatcaactctaccattagcttcatggaggaaaataacgctggcaatgctgccgctgcactgatggctcgcctggcaccaaaagctaaggttttacgtgatggaacctgggatgaattagatgcatccttgttggttccgggcgatataatcagcgtaaaactcggggacatcattcctgcagatgcacgccttctcgagggagatccgctcaagattgatcagtctgcacttacgggtgaatcgctacctgtaactaagcatcctggagatggaatttactctggttcaacctgtaagcaaggtgaaatagaagcagttgttattgccactggaattcatactttctttggaaaagcagcccatctcgttgaatcaactactcacgttggtcactttcaaaaggttctgacttcgattgggaacttctgtatttgttcaattgctgctggaatggttattgagttacttgtaatgtacgctgttcatgaaaggaaataccgccagattgttgataatcttcttgtgcttcttattggtgggattccaatcgccatgcctacagttctttctgttactatggccattggatcacacaaactggcacagcagggtgctattaccaagagaatgacagcaatagaggaaatggctggaatggatgtcctttgtagtgacaagactggaacattgacactcaacaaactgagtgttgacaaaaatttaattgaggttgtttttgaaaaaggcattgagaaggacgatgttgtattgatggctgcaagggcttcaagattggaaaatcaagatgctattgattttgctattgtttccatgttaccagatccaaaagaggcgcgagctggcattcaagaagttcatttccttccatttaacccaacagataaaaggacagctctcacatacttagatgctgagggtaaaatgcacagggttagcaaaggtgctcctgaacagatcttgaacttggcatcaaataaatgtgagattgaaagaaaggtccatcatgtaattggaaattttgctgagagagggcttcggtcgctcgctgttgcctatcaggaagtacctgaagggacaaaggaaagtccaggtggaccttggcaattcgttggtcttctcccactctttgatcctcctcgtcatgatagtgctgaaaccatacgcagagctcttgaccttggagttagtgtaaaaatgatcacaggtgatcagttggctattggtaaggagacaggccggaggttaggaatgggcacaaacatgtacccttcttcatctttgctgggtgacagaaaagatggtgatatcgctgtcctaccagtggacgagctgattgagcaagcagacggatttgctggagtattcccagagcacaaatatgaaattgtgcagaggctgcaagctagaaagcacatatgtgggatgactggagatggagttaatgatgcacctgcactgaagaaagcagacattgggattgctgtggctgatgcaacggatgctgctagaagtgcctctgacatagttctgacggaacctggattgagtgtcattatcagtgctgtgttgaccagccgggcaattttccaaagaatgaaaaattatacgatatacgctgtatctataactgtacgtattgtgcttggttttttgctcttggcatgcttttggaaatttgattttcctccatttttggttcttgtgatagctattcttaatgatggaaccataatgactatatccaaagataaggttaaaccatctccctatccagacagttggaagctaacagagatatttgcaactggagtgattattggggcttatctggctgtaaccactgtgttgttcttttgggcagcctacaagacacagttttttgtgcaccttttcaatgtagacactctgaacataaacaaggttgacaccacagacaatgaattggtggcaaggaacacagagaaattggcttctgcagtttaccttcaagtgagcaccattagtcaggctttgatatttgttacacgttccagaggttggtccttcttagagagacctggcctcctgcttatggctgcatttgtcatagctcagctgattgccactgtgttagctgccattgccacctgggaggttgctagcatcagaggtatcggttggcgctgggcaggggctatttgggtgtacaacattgttgtctaccttttgctagacccaatgaaattcgccgtgcgatatggccttagtgggaaagcctggaaccttgtcattgataacaaggtagcttttacaaaccggaaagatttcggaagggaagctcgcgtggttgcttgggcacacgagcagcgcacactacacgggctgcagtctgctgcaagccgggagaaagctgcatcaacggagctcaaccaaatggctgaagaggccagacggcgtgctgagattacaaggttgagggaattgcacactctgaaaggaaaggtggaatctgtggctaaactgaaaggaatcgacttggaggatgtcaacaatcaacactacactgtttaa

SEQ ID NO: 74347 - DNA, 462 bp, Oryza sativa
  Clone ID: PAT_MRT4530_74542C.1
atggctgtggaggagaggttgatgctagggaaaaatgatgaaattgataattgggcggcggtcgttaagcttctctcggatatggaatcggaacggcgcgggaaaaggagaggcaaccgtcgttggggcggtgtgggtcgcagaagcgagggctgggtggcgctgagggggcaaggggggaggcgaagagtggcgcaagaggaggaggcgaagcgggatgcagcgtggatgcggtgcggcgtggatgcggtgggggggttgggggggcggcggcgcgagatgcgggagaggggaggagcgatgcaggagaggggagtcgatgcgcgtgggccggtggagcagcgcgatgcgggagaggagaggaggggagcgatgcgcgagaggaggtggggctggcgagtagcgatgcgggagaggagaggagaggagcgatgcgggagaggaggtggggccggcgtgtag

SEQ ID NO: 74348 - DNA, 1484 bp, Oryza sativa
  Clone ID: PAT_MRT4530_74543C.1
gaaaaaaaaagagagaaaaaaaaagagagagagaagagaggaagagatggagatggccatcgacacgccatcgccgtcgccgtcggcctcgtcggcggcggcggggaggcagacgcgcgcggcggagtcggtgcggctggagcaccagctgctgcgcgtccccctcgaggccctcaagtccaccgtgcgcaccaaccaccgcctcgccgagaaggagatcgccgccgtcctctcctccgccgccgccgcgccgggaggaggaggaggaggcagcggtgacgccgccgccgtcgaccacctcacctccctcgtctcccgcctccacggcctcaagcgcaagatggaggagggagcgcgggcggaggagctgcaggtgcagaggtgccgggcgcggctcaaccgtctcgcatcggcgagctctggcgatgatgctgagtgggaggaattgcggctcaagcggatcctggttgattacatgctgcggatgtcatactacgacaccgccgcgaatctcgcggagacttccggcattcaggaccttgttgacgttgatgtttttctcgatgcaaaaagagtaattgattctcttcagaacaaggaaatcgctcctgctttagcttggtgtgcagaaaacaggtctcggttaaagaaatcaaagagtaagcttgagttttttctgaggcttcaagagtttgtggaacttgtcaaggccaagaacttcatgcacgctatagcatatgctcgaaaatacctttctccctggggggctacacacatgaaagaattgcagcgcgtcacagcaacattggtttttagaagcagtacaaactgtgctccttacaaggtcctgtttgagcaaaatcagtgggacagccttgtggaccagtttaagcaggaattctgcaaattgtatggcatgacattggagccgttgctgaacatctatatgcaagcagggctcacagctctgaagacaccattctgcttcgatggtaactgccccaaagaagaccccttatccctgcctggcttccggaaactagcagagccgcttccattctccaagcagcaccattcaaagcttgtctgctacataaccaaggagctcatggacactgagaacccaccgctcgttttcccgaatggctatgtttatagcaccaaggctcttgatgagatggccaagaagaatggaggcaaggttacatgccctcggacaggagacatctgcaactacaccgatctcgtcaaggcctacatatcatgatcacacaacgcgtgtggatctcatctgggaagacactgatttgcgcgggtgatctgcaccctgaatgcttgtacatagactgatcagaacattctctattctgttaagtttagtctgaattgtgatgcaaatgcaagaaccattgaaactacttcagtactgatttctgattacactttgaccttttgtgtcaaaacaaaaaaaaaaaaaaaaaaaa

SEQ ID NO: 74349 - DNA, 300 bp, Oryza sativa
  Clone ID: PAT_MRT4530_74544C.1
atgatggttgtgacggttggaatggtcggtaataccctccaacagtcattggggcttcatctcaaccgtccagccaaaacctggatccaacggaggcaagggatgttcggccgaaccaccaggttcggccgaacctggggccggcccaatacagccaaatttgagctggcggcctcctctgttgctcctgttcgtagacttgtgaattttggcccaattcatcatgtcaattctgagttcttggcccattcatacataagtctggttctcgacaccatccgattgatttatcgtctgtgt

SEQ ID NO: 74350 - DNA, 422 bp, Oryza sativa
  Clone ID: PAT_MRT4530_74545C.1
ggagaaaaaaagggggttttatttaaaagggtttgccaaatttttgggaaaaaaagggaagccaataaaaagggttttattaaaaaaaaccgaaaaggtttttttaaaaaagggagagaaacttataattgatcaagggtaaattaaaaaaaaagggttttttggaactagcttaaaaaaaaaaagagcttaaggggggccgttgccttccccaaaaccaaagccattttcaaagccaaagccaaagccggagccttcaacttgggcttcaacggcttacccaaaaacaaaaccaaaacccgataccaacgaaaaaacaaacggtttttttaaaaaaaaaaaaaatttaaatttttttttagggggaaaaaaaaaaaaggggttttcgaagggggggaaaaccaatgctaagggggaaaagg

SEQ ID NO: 74351 - DNA, 1014 bp, Oryza sativa
  Clone ID: PAT_MRT4530_74546C.1
tctgcgaggaggccaagctagtcgcgcgcaaattaatcgccgatcgatcctacgatgaagcggaagcggccggcggcgctgcgcggcggggaggaggcggcggcggcggcgctgaagcgtgggccgtggacgcccgaggaggacgaggtgctggcgcggttcgtggcgcgggaggggtgcgaccggtggcgcacgctgccgcggcgcgcgggcctgctgcgctgcggcaagagctgccgcctccggtggatgaactacctccgccccgacatcaagcgctgccccatcgccgacgacgaggaggacctcatcctccgcctccaccgcctcctcggcaaccggtggtcgctgatcgccgggaggttgccggggcgcacggacaacgagatcaagaactactggaactcgcatctcagcaagaagctcatcgcgcagggcatcgacccgcggacgcacaagccgctgacggccgccgccgatcactccaacgccgccgctgccgtcgccgccacttcttacaagaaggcggtgccggccaagccgccgaggacggcatcctcgccggccgctggcattgagtgcagcgacgatcgtgcccgaccggccgacggtggcggtgacttcgcagcgatggtgagcgccgccgatgccgagggattcgaaggaggatttggcgatcagttctgtgccgaggatgcagttcatggtggcttcgacatgggttccgcttccgccatggtgggtgacgacgacttctcctcgtttcttgattctctgatcaacgacgagcagttaggcgatctcttcgtcgtcgagggcaacgatcacgagcatggcaatggtgagattggtcatggagacgtcatggaatccaaacagtaatctttcgggagattgatcagggaataagttgaccatgagaaaacatgtaagaacagcttgtctgctgagtcatgaccggtgatgtgtatgtgatggaagaaaacgtatgtacgacttaatgcttgcacctat

SEQ ID NO: 74352 - DNA, 750 bp, Oryza sativa
  Clone ID: PAT_MRT4530_74547C.1
atgggatcggatcgcattggcagtagcctttgtttgaccggcggcttggctcctcgccgaggcgaggcggcggcggacgtggccgcgctccgcaccgcacgccggcgagcagaggtgggggaagacgtcggcgccgcgggggaagcaaccgctcctggagcacctcgagggaggaggggagctcgacggcctcgagctcgccggcggggtcggaggagagcggcgcctccgtactccggcggcggcgcggccgccttcgaggagagcggcgcctccgtcgcccccatcgccgttgacctcgcccccatcgtcaagtccctccgcggcctcgacgtcgactgccaggacctcccccgcgccgggctgcggggcgtcgacggggcgatgtggaagaggaggaggacggcgccgcagtttttctcttgcaatcttttctctcagtttgatgttcattccgagtgctctgatcatgaggtttcagttgaaactactaagagccagaagcatcatctcaagaagatcaagcataatgatgtgatggagcctggcatgagaattcaccttcctgtgtcagtggcagagggcgagattagagatgagattgagaaggcctgtcatccacaagagaccggcgcgggggtggtggccggggacctcgccctgcgagtgacccccatcccggcgcacaagatggctccgctccagggcctgcgcggcgaccgtaacggcgaggagggcgacgacggctag

SEQ ID NO: 74353 - DNA, 466 bp, Oryza sativa
  Clone ID: PAT_MRT4530_74548C.1
tgtgataaagacactaaaaagcacttgaaaaatatgataatgtgacatcttactgattactagtagtattttttgaaggttattcagcacttacgatgacctatttcaattcgtttaccaaaacaatgaggaaacatatcttttcatttttttccctttttttctattatgacatgtgctgtgatgcagctatttctgtcatcaccatgagttgaaataaatgctaaatgactagaaaaaagaatgggaactaaatgcttccatgtgaaactatttctgctaacatgctttgttgaagatttttgaattgtatactgggtaagtggtttttcttagacgtggtagtcacacggtaaaggtattggaagaaccatcatgactgatgccatcagagaggtatctatcgtatctataatttgttttgctcttggaacattattaaatgtcataggtgcacaagttgatg

SEQ ID NO: 74354 - DNA, 470 bp, Oryza sativa
  Clone ID: PAT_MRT4530_74549C.1
cgacggcgacggcgagtcgagtatgttgccgatgcggtagaggtcggaggtgcccgcggagatgaggaagagggacttggagagaagctcggttagctcgtgctcggtcacggtgccgttcagctcctccacggtgttggagaagtatcgcacttgtctcggcagtgatactgattctgcgtcgtcgctaggatggagagacggcgaagggcggcgacgcgtggtgcggtgcagacaaagcagaggtggctagcggtcggcgatgcccgaaagtgttcgacgcgtggttcccggtgtccagcggtgcggaggcatggcgcggcgcggcgtcgggtggtagcgagatcgatgcgatgcacgcggcacacgggagcagtgctgcaagggttgggaacgggatggatgcgttcctgatctgctgggctgggcctatgtcgaacaggtgtcgggcaatgaacagtggcggctag

SEQ ID NO: 74355 - DNA, 172 bp, Oryza sativa
  Clone ID: PAT_MRT4530_7454C.1
ggttgaaggtggagaggtcggtacaaagggacaaagtggcgacgcccgcgaggcaacaaccgagggaggcgcagccgtgagggccgcgtggccgttcggcatacgcagcggacaaatcgacaggtggtactatctgtctgcttatcgtgagtacggagtactgggcttctag

SEQ ID NO: 74356 - DNA, 419 bp, Oryza sativa
  Clone ID: PAT_MRT4530_74550C.1
ggctagggccccctcgagaacctcgccgaccatggagccgaccccgtcaacaacaacgcctgggcctacgccaccaacttcgtccccggcaagtgagcgccgccgccgccgtgctgccatggcgacgcatcgccttcagctaagctagctaggttgacgacgatgcgcgtttctgcaggagagtgtgcgtgcgtgtacgcggtgcagtagatgtacgtacgggtaccgcatatatgcacttattcacttggtcccagttcatggttgttctcttccatgttttgtattattacttcctctttcttttcctttttttacatctttctatattttatttatcttaattcctttatttatatcttctctatttcctttcgattttttttttccttactctggcatgattttcatctttttct

SEQ ID NO: 74357 - DNA, 2259 bp, Oryza sativa
  Clone ID: PAT_MRT4530_74551C.1
ggcacgagccggccgggaaacacacccgtcccttcttctccttcccctcgtctcgctcgtaatcggcacaggcgacctcgacacaccacttcaccctcgctcggtcggagcaatcttgcctgcgacgccgccgccgccctcgatctcggatcgtccgctacgcccctgcctccaaaccttgccgcggcgatcggagaggggaatacccaaaccctaacgttttcggcccctccccgccgtcagagctgcgccgtgcggttctgcttcttttctgggcctcgtcacctagggttccgagatgggcgatcataaggccgtcttcatctcccttcaggagctattccctcaggttgatcctcgcatactgaaggctgttgccattgagcaccacaatgatgttgattctgctgtagtcgcaatccttgatgaagtcatgccgtctgttacatctacaagtccacctacagtttcgtctgttcgtcaagaaattgcgccatgctgtattgcaacttcgtcagcttctgatggtacttctgaaacaggggattcctcttctgctgggcatggtaagcaggttgaagttgatgaaaatgtccactctacacaatgcaaatcttctatggagatcacaaatgataggcaaaggaatgtggtggatgaagtggaatcacattcatcatacccatggatgaatgaacaacttcacctgcctatccgcaatgtcccagaacctgttgatatttcttatgttggacatgacggacatttgttaagtgaatatctagatgcaatactcaatggagaaagtggaaattctagcacacaacccaatgttgcatatgtccacaagcaagattctgacaacccaatcccagctgatggttgtgttacaaaggataattcaatcactttacctcttgattatgtggacataaatgatgtgaattattccttgaagtcttctgctggtgtttccaacagtgaagattcatttggaacctgtggaacatatcagtttgcccatgtgctgaacattccgattccagacgctagaaaatcctctaaggggcttggcggagaacaggacaccaacagcatcggcaaagctgacttgctccctgatcttaatttgaatcaccttgctaccattgcttcaactcattctgttagtattgaatccctcgatgattccatttctgatgccaaaagcaataagaatgatctgttaccttctctagagttggtctctaagatgatacaggatgtagaagttctggaagaaaaggctgaagtggccaagcatgaatcatctattgctgggacaagcattctcaccaaagtggggaagctgaaggaaatgttaaatcatgcgaaggaagcaaatgatatgcatgcttgtgaggtttttggtgagaaatctattttaaccacagaggcacgggagctccaatcgcgacttcagaggctgtcagatgagaggaagaactatctagtggtaattgaggagatacgccaaacacttgagcacagattggttgctgcacaacaagaaatcgatgcggctgaggagaagaagattcaaaaggaagcttctgctcaggcactgcttgatgagcaggaaaaggagatgaacttagccgttgaagaatcaagaaagctgcagaaagaagctgaggagaatttaaagctgaaggcattcttggttgagcggggtcaaatcgttgatacattgcaaggtgagatgactgtgatctgtgaggatgtgtcccaactcaaacaaatagtggatgagcgcttatcgttctgcaagttacagcggtcaaaaatgtcgagcctctcctcttcgctgcaatcttcgcttcacaagagtgggagttctgctgatagggctattgaagcagttgagtctacagataaacatacagtagccgagggtgctaatgcagcggttggtgatgatccaaatggcagcaaaagaatcatccatgtgtggaatggcagtggcatggctgacaaagacaatggcacagggggggataccaacgaggatggctgggaattttgctgacctgaatggctttaaaagtgcagggttgtgtaaggatcgttgatatgtagcaaaccggacgtcataattatgcataagcggtctatttacccttgttttctcatttaggagaccaaataaaaattaattggtgaattgacgactagaacacatgatctcatggttcataacaaaaaaaaaaaaaaaaaaaa

SEQ ID NO: 74358 - DNA, 664 bp, Oryza sativa
  Clone ID: PAT_MRT4530_74552C.1
ccgggctgcaggaattcggcacgaggcccgacccaacccctcgccgccgcagcagagtcttccacacttcctctcctcccccatcttcttctgtgtgcaaaggccgcagccaaatctcacccttcatctcctcctcgctcttccctcgcggcaacgacgattgccagccatcccctatccatcgctgcatcggcgaaggctcttcgccgccgatgcagacacatgttcggagtggaggctccttctcaagaggatgaggtctcggcaacgagatcccatccaaggtggcggcgttcaagcgggtgaggcatcggcaacgagatcctgttccaagatgacggcgtccacggcgaatccccggccgttcaaggcggtgaggagcagcggcaacggcggagggtcgctgcgccgccggtggtgtctctcctccgtgcgggcacgcgcaggctgtgcttcggctcgtggctgggcttggtccctggccggctcgggctcgaagcccagcggttgtgccgcggcttggtagcctgggccggcccagtctgcggatctctatggcggcttcaacctcgctctcacccggcccaagaggaaaatcatctttgctattggtttgcccatttcatcctctgtgagagacccacctgtccctaataagataagt

SEQ ID NO: 74359 - DNA, 1620 bp, Oryza sativa
  Clone ID: PAT_MRT4530_74553C.1
atggcggaagaaagagaaagctttgagaaccagtgggcgccttccgatgtaacggaggagaatctgaaggagatggtggcgcatggcgttcttccggcgaaggagatcatcggatggcgtccagcatttggggaagcatttccaacctccgatacacacgagacggtgccccagccgaataagagcaaaccatgcgtagttggtggagccggatttcagttgaggggaactttgggacaaaaatacttctctatgctcttcaagacttcaaacaaaggatggcatgccaactggttttatgtacaaaacctcgagccagctcttcccgagtactcctgtctccctccagtatatcaagacacttggaattcactcccaatgggagacgaggccgcccaggtgcttactctaatggactgcatgctgaaactgaaagagcaagtcagttactctcatgcactaccagtggtgccgtacaacgctttcaaccctccttctccggaattcaccttgataaagtctgatcctccaactgttcaacgacgctcatcacgccaaccgactgaggttgttaaaactgttcgaacagccgtgcccacggtcatgggcggatgtgaggagcccccaactggaaaccagtcgggcacaactcagagcgaagatatcccgaaagcagaggcccaagccgatagccctcctaagaaggatgccaacgctgacccgggatccaagtctcctgttaaggttcaaggatcttctcgtccccgaccagagataataacagggattgtaatcaacaagcaaaaagaagacgaggaattgtgtatgctgaaaaaggctctcggccaagccactcgtcttgtaaatagaatccatctcaggaaagaggcgaagactgcaactcttgaaaaattagttccctatcttggaactctgaaagctaccagagatcagctgcacgaagccaaggagcttgccaagaagactgagcatgacctgagagaccggatcgccgagctccaagattccaactttgagctgagcggctcatcaaaagggaacgatatagcgcaagctgccaagatttccgagctggaaaggcgagttaaagctctggaaaaggacaaggccgaactgactaagcaaagggactgggcccaaaaagacgtcgaagatcgcaaaatcaaatcccaagctcaatttgacgtcttggtcagcaaaatcaagaagcttgagggagctagagatgaggttgccaacgccgccacactactcgtccaagccatgttcttcaataacaatggtccgagttcatttgatgctgacgagatcttcgacaagctgagaattgctccggatacatattttaagaatatcaaggaggctggaagtatgggagctggcctgtcgctggcgatgaccaagtccttgtacccgaagatagacattgaagctgttgacggctttgcagatgggacaagtgaagaagctgctcttgatctcatcagtgaagctcaaaatgctgccgacaagatagcggctgatgttgttgaaaggttccaggacactgacctcaggccgactggatcaactaactctgatgatgaaaaagctgactaa

SEQ ID NO: 74360 - DNA, 131 bp, Oryza sativa
  Clone ID: PAT_MRT4530_74554C.1
atctgcatccaggagttcctttaaattagagcgcttatcacggcggcggtgtatgtcttggatggaggacccaacggcagctttccggatctgcattgctctacgtctgatgacgggcatgtcattggaag

SEQ ID NO: 74361 - DNA, 893 bp, Oryza sativa
  Clone ID: PAT_MRT4530_74555C.1
atggcggaagaaagagaaagcttatagaaccagtgggcgccttccgatgtaacggaggagaacctgaaggagatggttgcgcacggcgttcttccggcgaaggagatcatcggatggcgtccagcattcggcgaagcatttccaacccccaatacacacgaggcggtggtattttctctcttcttttatggtggattttctcttccaacctcatgtttcttccggggcatcttggatttctatggcatcagcttacatcacctaaaccccaactccatagtccacatcgccaactttatccatgtttgcgaagcttttctggggattaggccgcattttgcgccttttcgccgcatgttcttctcaaaccccagccgaataagagcgaaccatgcgtagttgggggagctggatttcaattgaggggaactttgggaccaacatacttctctatgcccttcaagacctcaaacaagggatggcacgccaattggttttatgtacaaaaccccgaaccagctcttcccgagtactcctgcctccctccagtatatcaagatacttggaattcactcccaatgggagacgaggccgcccaagcgcttgctctaatggaccgcatgctgaagctgaaagagcaaggtctgcaaggagaacaaatcacccggcacttcatcaagacctggttaaccccaatcaaggagagatcacgcaccgcttatgaattcgatggcaagcatgatcccaaccgagaggacccagagtctcttgaattcaagattatgcaggagagaatgtataaaatattctctaatgccattgtggtcagttactctcatgcgctaccggtggtgccgtacaacgctttcaaccctcctcccccggtatgtatg

SEQ ID NO: 74362 - DNA, 357 bp, Oryza sativa
  Clone ID: PAT_MRT4530_74556C.1
atggcctctacggggagcaggacgctcgaatcaatatcgagcgacgccgggacaagcgccgagctgcccgcatggggaagaggcggacctgcacgctgtgcagcggaaggacgacgagtccctccactcaatggcgtgcggcataaccgcatgctagagaagattgtctccaaggagaccaagaccaccgccgagctcttccagctggcggacaaggtggctcggaaggaggaggcatgggcctggaattcccccggcaccggcgcggtggctgcggctacccccgagtctgtcccccgctctaagcggcgtgataggaggggcaaaaggaaattggcccgctccgatgacacctaa

SEQ ID NO: 74363 - DNA, 231 bp, Oryza sativa
  Clone ID: PAT_MRT4530_74557C.1
atggctgcgccaatccccactcttttcccccaaccccaagcaacgacggcggcgaatgcatctgaaggcccactcctctctcccccaagcgccaccaaggcaccaagctcgaacggcaggcaccatgtcctagcggagtcagaggcaggtggttttggacaaagacttgcagctgtaaccgggtttcctagtttaccctatgcttatgaagaggataactggatatcatag

SEQ ID NO: 74364 - DNA, 996 bp, Oryza sativa
  Clone ID: PAT_MRT4530_74558C.1
atgcgccgtctcctcacatcctacccgtatagtcgcccttcaccgccgcacccgcagccgtgccgtgacggatccgccgacgtcgtgcccgccgccgatcagcaatggaggtggagccgccgcgcctgcagcccgcattctcccatcgttgccgcgcccacaaccgtgccgagccggatccgccgacgtcgcgcccgccaccgctcggcggtagaggttgagccttcgcgcctcccgccgccaacgccgcacccgcagtcgcccgtcgccaccgtgcccgcagccgagccgtcgccgccgccgcttagcaagtcgctgccgccggccaactccggcaaagccgcacagccgcgtccgccgtcgccgtcggtcgccgtcgccgtcgtgggcttcgccaagggcggcgagaagtccgtgggggtcgctggggagtccattgcctctggttttgagggggagattatgatccaggaacggtgcactgtggaggccgccctcaaacccacgtggctccccccaaggggggtcgagcccggggtgaagcggcggctgccccatcctagcttggggtcggactgccacgaccccctccacccgcaccatgccgcatttaatgcggcgtgctgcgcatctgaccggtctgtgaccggtcgaatgaccgatgcgacggcgactgtgtaccctcgccttgtcagtgtgtcaggcggcgtgcggcgtgctccatcccgtcccatcataatgaggagcttcacagcctcttatcccggtcagagctggtccaaccactctgagctgacccggcctcaccgaaggtaccacggtagtgtcaacccctccgagtccctccagatccacgcgacgatcatagaggcggcgtggggtgacgatcgggtcaaggcgaatttcttccccaaggctctccagggccaagcgcggggatcgctcatgaacctgccacctgcctcggtctactcctgggagaactcttgcagttga

SEQ ID NO: 74365 - DNA, 242 bp, Oryza sativa
  Clone ID: PAT_MRT4530_74559C.1
ggattgcttacagaatcatgatgcttgtatcccatattccgcattaattctttgaaagcaaaatggattaaaaacaattggatgcccctcgatgcatttttctgtgaaaaatacacggcactgggttagcatatacactaatgggtccatgttttttagcgccatggctcaggcacaaagctaccccttgcacacagatcatgactttttactggaaaactcagcgcatctccagcacatat

SEQ ID NO: 74366 - DNA, 273 bp, Oryza sativa
  Clone ID: PAT_MRT4530_7455C.1
atggcactcatgctcgcggccgcggcgagggagtggacgccgtgcgcggcgatggtggcggcgcagtgcatctacgcggccatgacgctctgggccaaggccatgttcggccgtggcgtcagccccgtgatcttcgtcgtctaccgccaggccatcggcaccctcgtcctcgtccccatcaccctcctcgccaacagggcaaaagtgaaggagacgaggagccttgggacgacaggcttgttcttggtgtttgtgacggctttgctcgggcac

SEQ ID NO: 74367 - DNA, 939 bp, Oryza sativa
  Clone ID: PAT_MRT4530_74560C.1
ttatcacttctttctccggatcccctctcctctcctagcttcttcctctatctgtacattcgcaatatcccatcccatcggatcggattggatccacacaaaaatccccatcactgccggccgggccccaaacccaacgatccctccccgattccaatttcttccttcctgcaaatttaaaggatttctttcttcctttccttttcactgctcttttatttttttgagtgagttaacccccactgttgttattctaatggacgcagattctattttctttgtcttttaggagctccaatggacgccaatcctcctaccaccgccatgtatcctctccaccgctgcaaaaccatctacctggtcaggcatgcccagggtgttcacaatgtggaaggcgagaaggatcacagcgcctacatgtcgccccaactctttgacgcccaccttactccattgggctggaaccaagttgactgcctgcgtgagcacgtgaaaaaaagtggacttgcacaaaagattgagctggttattacttcccctctactgaggactatgcaaactgcagtcggggtctttgggggtgaaaactctgttgatggaatagagaatgatgaagatgtactttgggaaccaaatgtcagagaagcaaattcatctgtcgcagctaggggcatgaagttcattgactggttatggacaagggaagagaaagagatagctattgtaagccatagtggattcttatatcacaccttaagcatgtacagcagggagtgtcatccaaccataagagaagaagtgggcaagcactttgccaactgtgagctccggtcgatggtgttggtcgatacaagcatgcttgggtctgattcccccagttacaactaccctggaagtattccagctggacttgatcttcctagtgatgctgcaccttga

SEQ ID NO: 74368 - DNA, 168 bp, Oryza sativa
  Clone ID: PAT_MRT4530_74561C.1
atggctgcgtactggttcgagaccagcgagcgagtagaattatctctcgaacaccaatggaagtttgcggtgcgagagatggctacgtactggttcgagaaccagcgagcgagtagaattatcgaacaccaatggaagtttgcggtacgagagatggttacgtactag

SEQ ID NO: 74369 - DNA, 147 bp, Oryza sativa
  Clone ID: PAT_MRT4530_74562C.1
atgagcaggagaagcctcaagttccatgctgatgtcatgttcaagcgaaatgccaccaccaacccaaagtggccaatttttccttctcatccacatgagagagggaatatcaggtacatcggccacaacccacctgggcaggactag

SEQ ID NO: 74370 - DNA, 1404 bp, Oryza sativa
  Clone ID: PAT_MRT4530_74563C.1
cccgggccgcacgagctgaaagcctcaaagtagtaatggtccagctgctccagcactcgcatctgcacactgtattcgccgccgcgaccaccaccatcggagtcggacagtttccccgccgccgtgccaaattccccacctcccttgttcttcttcctcgctgcacctcctcctcctcctcctcctcctcaggagctccaatggacgccaatcctcctaccaccgccatgtatcctctccaccgctgcaaaaccatctacctggtcaggcatgcccagggtgttcacaatgtggaaggcgagaaggatcacagcgcctacatgtcgccccaactctttgacgcccaccttactccattgggctggaaccaagttgactgcctgcgtgagcacgtgaaaaaaagtggacttgcacaaaagattgagctggttattacttcccctctactgaggactatgcaaactgcagtcggggtctttgggggtgaaaactctgttgatggagtaagtgcaccaccattaatggtggaaaatgctggacatagtagccggccagctatttccagtttgaactgcccaccgtttcttgcatttgaggcctgcagggagcacttgggtgtgcatccctgtgataaaaggaggagcattacagaataccgcgctctctttcctgccattgatttttcgctgatagagaatgatgaagatgtactttgggaaccaaatgtcagagaagcaaattcatctgtcgcagctaggggcatgaagttcattgactggttatggacaagggaagagaaagagatagctattgtaagccatagtggattcttatatcacaccttaagcatgtacagcagggagtgtcatccaaccataagagaagaagtgggcaagcactttgccaactgtgagctccggtcgatggtgttggtcgatacaagcatgcttgggtctgattcccccagttacaactaccctggaagtattccagctggacttgatcttcctagtgatgctgcaccttgagcaaattcaagacctgtgttagagattgttaccgtgcattggtgccttgattatttttcccagcccattgacactattcaagctagcactggaagtcagaaacttgggtgaattcaaacagcatctacagatagaacttaccatttgttgcccaaaagtatgatcacgattttacaggatattttatgcttacaactttagagcatatcatgttttaaaattttacaagatactttatgtcgtatctcaacacgtactgaacttgactgtaataaacgtacgatttacatattttactcaaaaaaatagtgttgcttttgtttgcttacggcctgggagctcacgggacaaaaaaaactcgagggggggcccggta

SEQ ID NO: 74371 - DNA, 452 bp, Oryza sativa
  Clone ID: PAT_MRT4530_74564C.1
tatacatcattcttttcggatacttttgtgccactcattgtcagcaattctggagccatccaaggaagagttcctctcattccaccagaaacaagagtcgcttgtttcatcttcgacaaaccaaaatcagcaaccttgcatatgggacgagagggatccttaatattcaccaacaagttatcacatttcagatcaaagtggacaatgtccttggagtgcaagtattccattccaatggctgcatcctttgcaaccattatgcgcttgcgccaatcaagatatttgtttttgtgaaggaggactttcttgagggatccattgatcatgaattctgttacagtagctaatgttcccccaggtccattatttacaataccataaagtgctagaacatttggatggtgaagttttgagattatagcagcctctctccaaaattccggacgcgtggg

SEQ ID NO: 74372 - DNA, 767 bp, Oryza sativa
  Clone ID: PAT_MRT4530_74565C.1
gaaaaaagaggaaactaaccctaatctcgatctcgacggcgagggcggcgccggcgccggcgcctcgtcgggccgttctttgctgccgaaaggaagtggtaggttccgccgctcgtcggcccgttgttcgctgccgaaagggagtgataggttccgccgctcactatcgccggtgaactcgcggtcgctcctagaaggacgggatgtgcgggacgctgttttccccaacaaactcttcgataaagccttcggccagcctcttcctgccccacttgttggcgatgggaagatgcaaatggatgtggagggtgccccacttgttggcgatgggaagatgcatatggttgtggagagtaccccacttgttggcgatggcaagatgcatatggttgtggaggaggaaatgacaacagctctggctgttcatcagccttcaagtcagagaagtcagaggatcatagtgattgagatgatggcagatgttggctcaccttcctctcctggctccccctactcccctagttccccttcttctcatcgagacgctccctcggtccgcttctcctctcgaggcatccgtaaccataagatgcctcagtgtgatatagacagatcagacactgaagaagatctatattcatcgtgtgaggaggatccctacttcaatagccttgtggatgatttcatcggtgcagttaccagcaccgatctacttgcatcatcacctgaaattgactatatggcagctaatcaaagtcaatctcttt

SEQ ID NO: 74373 - DNA, 216 bp, Oryza sativa
  Clone ID: PAT_MRT4530_74566C.1
gggcaagggaacatctcttttctaactacctactggataccctgaagttgtggtctattgtgctttttcatacttcatgttattaggactaattaacagaccatatcatgtatttccaagtatccatcgtctggaccattactctaccaggattgctttctgctgaatcaagtttcttgctaatgctcgtcgaacccatgtgagcagtcttagagc

SEQ ID NO: 74374 - DNA, 1818 bp, Oryza sativa
  Clone ID: PAT_MRT4530_74567C.1
aataacctttagcttttcctgcctccctccttctttccctcctctcttctcttctcttctcttccatctcctaatcttcccctaacaagtcctagctaaattcagatccttagttgctggtttttcttgttccttttctgagctagatttcttgctgctgagttgaagttagtatcatgagtccaccgagtgtgatagggcaatttggggacacaacctacaccaaggtgtttgtaggagggctggcatgggagacccagaaggagaccatgaggaagtactttgagcagtttggggagatcctggaggcagttgttatcactgacaagaacactggcagatccaagggctatggatttgttaccttccgggacccggatgcggcgatgagggcttgcgttgatcccgcgccggtgatcgacgggagaagggctaactgtaatctggcttcccttggggttcagagatctaggcctccaaccccacagcatggaggggctaggagctttagggtgatgaagtcctttagccagcaggcagggatccaaggtggtctgggcgcagcttttccttctcacgccaccttcccccattatgctatcccacaaggcctcccttaccatgtctatgggtactctccctattctccagactacagttatcccacaaactactacaacatctacggaggagctcaatacccattttatggagcggcggcggcagcggcagcggcagcagctggcatggtgactggaagcagccccttttatccatatttccagtttgggcaatcaggaagcactacaaccaactatgcaagtggacaaggctacaacttgcaatacccacagatgtttcacttctcaactgtggcttctacagctgctgctgtaacaggttttgcacagcaatatggagggccattgtctcttgcagcgagtcctcaagcccaagcagtgtgtgtccccattaaacaggcatgactatggctctcacagctcctactttgccgactccaactcaggctgctcatccttaccggctcattccctcgcattttgctgtgtctgctgctccagagcaacccttggcctaaccatggtctcctttctcatcgtcactctcatttttatttcccacatgttgagtccatgcatccatctctaacaccagaaggcactattgttgacctcatgctcatcagctaaaagtgcacactccatatcccacatggtcatgtggtgattggagataagcttcagccccaggatgggctcaaagcttaatgcccccatggatggggctgtactaacagagaagcacaaaccaaccaatttaacaacagtccaaggaaggacttcatggattaatttcaaccctagcagagaaggctatgggcaaaagtaaccctaacaatcaagcattaacccagggagggttcatgctgatacaggccaattggacaaaagtgacatctaaacaactgatcgagcaagaatgccacttcaaaatttcgtcagtggaatctatattgtatttagcataggccatgtgcttctggatgaagcacaaaccatttagcagaccctaatcttctagtcttgctgttacctagaggaaatcaatttgacatgtaaccagtctttaacctcttcccatgcaaattagcccccagcaacttatctaacaccacgtgttaacttgtgtaaccaacttttaacctttagtaagcaactattaggtgctccaactaacattccttttttatcttccagtttatagcttgcatctaggtggttaaggctctaaggagag

SEQ ID NO: 74375 - DNA, 822 bp, Oryza sativa
  Clone ID: PAT_MRT4530_74568C.1
cggacgcgtgggcggacgcgtgggcgcgaggggagcggagaaagggggggaaaaaagatggaaactaaccctaatctcgatctcgacggcgagggcggcgccggcgccggcgcctcgtcgggccgttctttgctgccgaaaggaagtggtaggttccgccgctcgtcggcccgttgttcgctgccgagagggagtgataggttccgccgctcactatcgccggtgaactcgcggtcgctcctataaggacgggatgtgcgggacgctgttttccccaacaaactcttcgataaagccttcggccagcctcttccagcgcccgtaacgccgtctctggcacgcgtccccgcacgcgtccggcgccccaacctgccgaccccttccgagccacacggattgaatttcaatgccccacttgttggcgatgggaagatgcaaatggatgtggagggtgccccacttgttggcgatgggaagatgcatatggttgtggagagtaccccacttgttggcgatggcaagatgcatatggttgtggaggaggaaatgacaacagctctggctgttcatcagccttcaagtcagagaagtcagaggatcatagtgattgagatgatggcagatgttggctcaccttcctctcctggctccccctactcccctagttccccttcttctcatcgagacgctccctcggtccgcttctcctctcgaggcatccgtaaccataagatgcctcagtgtgatatagacagatcagacactgaagaagatctatattcatcgtgtgaggaggatccctacttcaatagccttggggat

SEQ ID NO: 74376 - DNA, 1851 bp, Oryza sativa
  Clone ID: PAT_MRT4530_74569C.1
atgggacggacggccacgatcggtcgagggccgatagggcggctggggacgggcggcaccgaggccagcccgggcatggcgcacgggaaggcaaccacggcggacgccattgacggtcggaggcggaggggatggggaagctcaccggcgttcgggacgaagggggctccggcagcgattgatgacaatcgggcagcgaccgaggtgcaggcaggctcggtgagcgcgacggcggcgattgcgcggcgcggcggcggctctagcggcggcggcgcgcggccggagatgggtggcggcggcggagctcggcgagcgcggcgccacggcggttgcggccgcgaggggagcggagaaagggggggaaaaaagatggaaactaaccctaatctcgatctcgacggcgagggcggcgccggcccctaatctcgatctcgacggcgagggcggcgccggcgccggcgcctcgtcgggccgttctttgctgccgaaaggaagtggtaggttccgccgctcgtcggcccgttgttcactgccgaaagggagtgataggttccgccgctcactatcgccggtgaattcgcggtcgctcctagaaggacgggatgtgcgggacgctgttttccccaacaaactcttcgataaagccttcggccagcctcttccagcgcccgtaacgccgtctctggtaccatcgcccgcttacatcgtgcgccccaacctgccgaccccgtccgagccacacggattgaatttcaatgccccacttgttggcgatgggaagatgcaaatggatgtggagggtgccccacttgttggcgatgggaagatgcatatggttgtggagagtaccccacttgttggcgatggcaagatgcatatggttgtggaggaggaaatgacaacagctctggctgttcatcagcccctctcgaggcatccgtaaccataagatgcctcagtgtgatatagacagatcagacactgaagaagatctatattcatcgtgtgaggaggatccctacttcaatagccttgtggatgatttcatcggtgcagttaccagcaccgatctacttgcatcatcacctgaaattgactatatggcagctaatcaaagtcaatctcttttctatgctgaaagtgcattaaaacattataacaacaatgatgagaacaagataaagtatgagttaatcagtgccattacaagcaatgcaattatagaccggagtggttatggtcatgtaaactttgttgcaaaaggggatctacctgattcagtggatgagttctttttcgcagaagtacgttgggacattgattcttatgtgccagtttgcatggtctccttagaagggaaggaaaaatctggtggttaccgtgacattgaagtcgactatccaagaggaggttttgtgggtgttcccgtcgataagaatcattgctatgcttgtggcgatggactcaagcatccagaggatggaacgttatatgagagtggtcatatcgcttccggcagttattatgactagcagttttattgaaattgcatttttagaactttatttagctagactagaagtgtgcaatcctttatatctatgctaaactaaattagtacggagtatactcaccattctactttgtatacatcttgtttgatttgggttgaactccgagttgtatgtgatacacccgaagacgttattatcgttgcaaatattgaaaaagtcatagaaaaaaaaaatccaaaaaaaaatgggctcgacgacggcgggatcggtggctcgctggcaagaaggcgaagacgacgaggagggctcctatggtttagatccgaggtcattgtga

SEQ ID NO: 74377 - DNA, 493 bp, Oryza sativa
  Clone ID: PAT_MRT4530_7456C.1
ggccgcgggttttttttttttttttttccgcatataatcatcttctattacatcactttttttttcttttctttatgagaattaataccagaacatgtattgtccatcagaccataactcactttcaaatatcaataatctgttacatatcataagacgacaattgtatcaaaagggataatactcgacaaggcttttacacttccataaaaattttcccgatctaagctcccattccacttgagctcccaactttcaacggtacttgatgaagccaatgtccttggcgttgctgcggaagcactgcctgcagcacatgagcccgtacttccggatcaagccatgcgggttgccgcaaacacggcaaaccctggatccggggccgtagttcttggggtgcgagttccacacgttggagtgtcccatggcggcggcggcggaggtcgtgagttgtaaaccctagaatgaacgaaatgagcgcgttcccggccgg

SEQ ID NO: 74378 - DNA, 1367 bp, Oryza sativa
  Clone ID: PAT_MRT4530_74570C.1
atgtggcccggctgcggcggccgcttctactgggcgcccgcgccgccgtcgccgtcggcggcgggcgcgaggggcgtcgtggtggtgttcgggtgggtgtggagcgacgaggcgcagctgcggccgttcgtcgagctctacgcgtcgctcgggtggcgctgcctcgtctgccaccccgacctcgtcgcgctgtatctgtctgagaaagctgcgtcgctggcatctggtgttatcagtgaattagtgaaggaattcaaagtaaagccattgccaactgtgtttgcttccttttctggtggttcaaagggatgcatgtacaaggttattcagttacttgatggaaactgtgaaggagatgcaaccatgaaggactataggttggtgagaaactgtatctgtgggcaaatctatgactctggcccagtagattttttcagtgatgtgggtacccagtttctccaaaatcctatgattggcaactcatctcgaccatccatgttactttcatggatgacaaaggcccttgcatctggaatggacacactattcccaagcagaattgaagctcagcgtgcagagtactggcacacactatattcatcagcagggctgggtcctgttcttatgctttgctctgaagatgatgatcttgctccatgtcatgttgtctgtggttttgccaggcgtctcattgaactgggtactgatgttaaagttatcaagtggagtgattcccctcatgttggccattacatgttgcatgaagcagaatacaggagtgctgtaaatgatactctgataaaagctcttgtcaccttttgccacagaagccagctgaatgccacaagtgatcaggaatacaagatagcacactccgtgtgcagtctgcacaacgtggctgctaattcaaatgagaggctgagaagggtagccaacggccccagtgaccacttcttcttgccaagttcaaaggaccataatgaatctagggatccggattctttgattgatgaacagaggcgacaactatcctatccacccagcatggagcctcaaggagtccttggccaaattctgtttgatgtttgtgttccgaagaacgttgaaggatgggacatcaaaccaacagtgtccccaaacggacggccaacattggcttctgcgcggcaactcggccctttcaatcccatcaagtattttcgacgctcaaggctataatttgtctgctgcaactgtgagttttgtgtacataacggaggcaagatgtctaatatgactctgagcaagctttctcctatgtaagtttccttgagattggctcacctgcgatttcttttaagcaccaaaaaaaaaaaaagggcgggcgc

SEQ ID NO: 74379 - DNA, 1371 bp, Oryza sativa
  Clone ID: PAT_MRT4530_74571C.1
gtattggctgtacgctgctgttatataccggtcattgcttgttacaaatgatgagatgcgggaccacttgtttcaactacttggcactagtttttttccaagatggaaggagaaccatcaggtcaggttaacattctcgggccgtggttggaattttcacctgccgcctccttattcaattgtcattcaggaaaatttcagggaaatcgtctcaagcacttgcaagggcagttgggtaagtgcgatgggttgcatctccattgacgggattggtgcatgggaatggcagccaaatttcgggccagaatctttcattgttcttgttgggaggaaggagacgaggcgcgcgaggcggcgagagggaggaggcattctagcatatacagatacagagccaggggaggtatggaggagggccttgcacgagcacgacgatgccaatagaagctgtggcggtcgcttctttaccgatggcgtcgcgcagcgccgccctgtgcttctcctccgccgccgctgcccggagccggagcaggagccggcacggcaggatggccgtcagctgcgacgccggggcctcagatctgctctattcctctctggctgccaagctgcttggccctcccaccagcttcgatgccggcaagctgacggtagagttcgcccacagccacgggaacagcagctccgggttccccagagcttacaccctcacccactgcgacttcaccgctaacctcaccctcgccgtctccgacaccatcgccgccgaccgccgcctcagggcggacgacgtcttcgccgagtggaagcagcagcaacagcaggagggcatggccctgcacgtgcactgcttcgtcagcggcgccaacctcctgcatggcctcgccgccggcttcaggtactacgtcttctccaaggagctgccgctggttctcaaggcagttgttcatggcgacgcattgctgttcgcggagcagccggagctgctggaggcgaaggtgtgggtgcacttccactccagctccaacgctaagtacaacaggctcgagtgctggggtcctctcagggaggctgcaaacgccgagacgacgcacaagaggcatgcgctggagcaactgcacaacgcaatcaccaaaggcacaagaaggcgtaggaggaagtggtctagcccggacgccatcttcagcgccctgctcgcccttctcctttgatgcatatcgggaaccccacacattgtcttttttttgctctgccttgtgcgcatcaattccaattctttcatccaccggacacttgacatgtatgtatagtatgtacccactccacgatcaacaaaatgagaaacgattgcctttccaagcattcctcctt

SEQ ID NO: 74380 - DNA, 420 bp, Oryza sativa
  Clone ID: PAT_MRT4530_74572C.1
tttcgtggcagactaaatacgaatgataatagggtcaggaaatgctgggcatctgatccgcattgcgcagattgcccagctattgaatcagcagaccacatcgttctacgctgcaagttggcatctgagatttggaagaaaatcaacctatttgatcaggccgcccatcgttctaatatactccagttcgttgaggagggactgttggttacaccggcgcatctaaaacctggatggcctatttgcttcgctgcttgttcacacaatttatggaaagcacgcaatcaaaaaacattcaaccaaagagagtatacagcggctgccgtgatgcaccaaatcagagaatgtctgcaaatgtgggagaaccgcgtcatgccacaatgccggactctaatgcgcagttgggctgccttgctagca

SEQ ID NO: 74381 - DNA, 513 bp, Oryza sativa
  Clone ID: PAT_MRT4530_74573C.1
atggagagccatctcaacgagcagcagatctccgatttccgagacgccttctcgctgttcgacaagaacaatgacggttgcataagtagggaggagctggccaccgtgctcacacgcctgggcatggcgccaagccaggaggatctgcaagacatgatcgtggccgtcgatgaggatggcaatggcacgatcgagttcgacgagttcctcgcaataatgaagaagaaactatatgagaatgacaagggtgatgatgaggaagaactgaggaaggctttcaggattttcgacaaggatgataatggattcatatcacgcaatgagttaagcatggtgatggctagtcttggagaggagatgacagaagatgagattgatgatatgatgaaggcagctgatagcaacaacgacgggcaagttgattacgaagagttcaagcgagtcatgatgagcacatggaatatcacagaaatattcaaacctcatgtaacaatctggcgttacaagccatga

SEQ ID NO: 74382 - DNA, 279 bp, Oryza sativa
  unsure (1)..(279): unsure at all n locations
  Clone ID: PAT_MRT4530_74574C.1
cacagtttttgaactgtangnttttatttggaaactttgngcttgncttaaagtgtgtttantcaaacctaggcgngaanancttgtaancaggngctaantgncatgccctntgtanagtgtncaacatagtaagctntggganctgntcttgtttccccggttnccgnaatgctggngtgtttcanctggtttnnaaaaaaaaaaaaaaaaaaaaaaaaaaaaaaaaaaaaaaaaaaaaaaaaaaaaaaaaaaaaaaaaaaaaaaaaaaaaaaaaaa

SEQ ID NO: 74383 - DNA, 903 bp, Oryza sativa
  Clone ID: PAT_MRT4530_74575C.1
atggagatcactgtgaaaatgtcggccaaggtgaagaggatcaggttcgccgattctcaaacagggtgcgagggtacaaccccaactaatttggggagtgaggttttgctcactctgtcactattggggcttttagtcagcactaatcctggtgtagaacattgcaaattggtggcatctcttttttctgtcggatttttgactatggatcctatggtcaagggacccaacctgacacgttgtagcgccgcgttggcgtcggaggcttgtcgtgcgttgtcaaagacgcaccacgaaaagttagaagaaattggattagatgccgtggcatgcatgaaacttgagagccttgagaagccagatctcatacagtggctaatggacaggacaggtccgaactctatgtgcattttgattgatgatgacaggaagatccagatcaccccccgcactgtccatcttgtcatggggaacccattgggcggcaaggatattgttatcccacctaacaaggtggtgcgaaacacccacgataggatcaccgaagaattggggattcaacggaatgctcagttatcttctaaaatgcttattgaagtgatcaagaacagggaggacgaccctactgcagtttgtttctttgtcatggttatcatgtccaagcttttactcccaacaactgacttctatatccccaagagcgacgtttgggttgccgccgatctggaccgggttgcttccatcgactggtcgaaggcagtgttccaagcactaagtcacagtctcagatgttggcgacaaaatccggggtcgtcaatagcatcttgtgtggtatgcttggtgttcatggaggtctacgacggtaaacgggagcccattgaggcactgcaaatacctgtatga

SEQ ID NO: 74384 - DNA, 1855 bp, Oryza sativa
  Clone ID: PAT_MRT4530_74576C.1
aaaatagcttgttgcattagtttctcgggggagggttttgttcaggaagacccttgactgtgcactggctccccgggctgcaggaattcggcacgacgtgccaatcttcctttcccacatcctcctccgccgccggctgcttcccaccggctcccgatctccgaggcaagcagcgccgcacccggccgctgccgccgccgccatggcgttcgagaagatcaaggtcgccaaccccatcgtcgagatggacggtgatgagatgaccaggatattctggcagtctatcaaggacaagcttatctttccatttttggatctggacattaagtactatgacttgggagttctccaccgtgatgcaactgatgacaaggtcaccgtggaggctgcagaggctactctcaagtacaatgtggctattaagtgtgcgacgattactccagatgaggctcgggttaaggagttcaacctaaagcaaatgtggaagagccccaatggcacaattaggaatattatcaatggcactgtattcagagagccaattatatgcaaaaatgtcccaaggcttgttccaggatggactaagcccatttgcattggaaggcatgcttttggtgatcagtaccgagcaactgatgcagttctgaaggggcctggcaagctcaagctggtttttgagggaaaggatgagcagattgatctggaggtgttcaacttcactggtgctggaggagttgctttgtctatgtacaacactgatgagtcaatccgagcttttgctgaagcttctatgacaactgcttatgagaagaaatggccgctttatcttagcaccaaaaacacaatcctgaagaaatatgatggaaggttcaaggatattttccaggaggtctatgaagctgggtggaaatccaagtttgaggctgccggaatatggtatgagcatcgtctcatcgatgacatggttgcttatgcacttaagagtgaagggggctatgtgtgggcttgcaagaattacgatggagatgtgcagagtgatttcttagctcaaggctttggttcattgggtttgatgacatcagtattggtgtgccctgatggaaaaacaattgaagctgaagctgcccatggcacggttacccgtcatttccgtgttcaccagaagggaggtgaaaccagcacaaacagcattgcttcaatctttgcttggaccagaggacttgcacacagggcaaagcttgacgacaatgctagacttcttgactttgcactaaaacttgaagctgcttgcgttggaaccgtggaatctgggaagatgaccaaagaccttgctcttcttattcacgggtcttcaaacgtcacaagaagccattacctgaacactgaagagttcattgatgcggttgctgcggagctccggtcaagactggcagccaactgagctttttacaagatactcttgccaacttcagtgcttcatttcccttcttttaaagtcattttggctgtatcaccattaccattcgagttctcattctggactgaatgaacatttacagcatcggtacaaattgttgtcgatccaagcagtccatagatgctgatatcacgtagacgggacctcccaaataaaggatatatagaacaatctgtcattgctgatagttgttttatccctatcagttagcgtccgactggaaaattatctatgttcctcatttggatggtttgataatttcttgattgataattcgtaccttggaatctgggctgaaggaagcatggtgcacaattcgaagtttaaaaaaaataacataaaaaactcgaagtaaggttttaactgtgaagcttctgt

SEQ ID NO: 74385 - DNA, 1665 bp, Oryza sativa
  Clone ID: PAT_MRT4530_74577C.1
atggccatccctcccctcgccgtcagcggggtcgccgtcgccaccctcgccgtcctcggcctcgccgtcttcgcctgccggcggtggcggcggggcgcgtcccccgcgcccccacctcccgcttcctcccaggatgatgatattaacatgcctctcatatctgacaatttggatgactattcagtctcgagcaatagtagtactgtcgatgaatcaggaattcggattgataggattatcacttcacctaagactcatggcattgttggaaaaggggcaacctatcccactgaatctcatgttattgaaggagaaactcatgtaattgatgttacaaacagtaaaacggaagagctctatttgggaaatacgcttaagcgtccagctgtggcaaatgggccaacacctgatgtgaagcacataagaagggattctggagagagtaatcacaatggcaccattcctgacattatagttggaagcaacctagctttggaggtcatagctggcccatctcatggaataaaccactatatgcagtcaggtaacaagtccatgctacccgtgactcttggaagggttcctccaagtcatttggtgttaaaggactcagaggtgtcaggaaagcatgcacagattgactggaatgcaaataaactcaaatgggaaattgtggatatgggtagtctaaatggaacatttttgaattcccggtcagttaatcatcctgatgttggatctaggcgttggggtgagcctgctgaacttgcagatggtgatattataacacttgggagttcatcaaaagtatctgtccaaattgagctacaaaaccaacaacctgtaggagttggtatagcatctgatccaatgacagcccgtcgaactgggaagaaacttcacatggaggatgtcagctgctgccagtatcctcttatcggtgtggaaaagtttgggctatttggcatattcgatggccatggaggggatggtgctgcaatagctgccagcaggattcttccacagaacattgcaaacattttgtctcaacaggaaacaaaagaaagagttctttcatgccatagtgcttcagatgttcttagacatgcctttgcattgactgaagctgcactccatcatcagtatgagggctgcacagcaactatccttctgatttggttcgaccagaacgaagattgcttcgcccaatgtgctaatcttggtgactcagcttgtattatgagtgtcaacggggaaataattacaatgaccgaggatcatcgagtagtcagtacaacagaacgagcccggatggcaaattcaggacaacccctgaaagacggtgaaagccgtatatgtggactaaatcttggcaggatgcttggggacaagtttttaaaggaacaagattcacggttcagctctgaaccatatgtgagccaggcagttcgcatgacaaaagcatgcttagcctctgcccttattgctagcgacgggctatgggatgttattagcgctaacagggcagcgcagcttgtccttgagttaatatcctttgtcaaagttgagccaggtgctccggtgttgcagaggatgaatgctacagttctccttgtctgcaaatacccagggagccccttgtgcggttatgcctgtaaattgtga

SEQ ID NO: 74386 - DNA, 1736 bp, Oryza sativa
  Clone ID: PAT_MRT4530_74578C.1
ctaaagccttgacacggccatgacatgcgccaccgggtgctcgccgcggcggccgccgaccgtcgtcgtcgtcgtcttcaccttcgtcttctgcgccggcacggccgccggcgccagcttcttggccgcctcccggagcaagttcttctcgaccttgccgttgccgttcctcgggatggcgtcgtagacgaccaccttcttgggcaccatgaaccgcgccatgtgcttgcggcagaacgcgacgacgtcgtcctcgcacaccccggccgccttgtccctcgccacgacgaacgcgcacggcgtctcgccccagtgcgggtgcggcatggcgaccaccgccgcgtcggcgacggcggggtgctggaacagcacctcctccacctccttgctgcagatgttctcgccgccgctgatgatcacgtccttggacctgtccttgatctcgatgtagccgtcggcgtgcacgacgccgacgtcgccggtcaggaaccactcgcccttgaaggcgtcgctgttcgcctccgggttgttgaggtagcccttcatgatgctgctgccgcggagcacgatctcgccgacggtcttgccgtcgcgcggcactctcgccatcgtcttggcgtccttgacgtcggcgtcggcgagggacaggacgctgacgccctgccgggacttgagccgcgcgcgctccggcagcggcaggcggtcccactgcgcgcgccactcgcacgccagcgccgggccggtggcctcggtgagcccgtacgcgtgcgtcacgcggaagccgatccgctcgacgcgctcgaggagggcggccggcggtggcgccccgccggtgagcacgtggaccggggccgcgagctgcttcgccgccgcctcgccgccctcgagcaggatgttgaacaccaccggcgcgcagcacaggtgggtgacgccgtggcgcgcgatggcgcggtagatgtccgcggcgcgcgcgtcgcggatgcagacgttgacgccgccgcgcgctgccatgccccaggtgaaggtccacccgttgcagtggaacatgggcagcgtccgcaggtacaccggctcgtcgccgacgacccacgacatgagcaagctcatggtgctcaggtacgcgccgcggtggctgtacaccacgcccttgggcgccgacgtggtgcccgacgtgtagttgagcgtgacggcgtcccactcgtcggcgaggctgggcagctcggcggcggggtgccacgggcgaccagcccctcgtactcgagctcgccgaggcggacgccggtgggcacgtcaatgtcgtcgatgacggcgacgagcgggacgtgcctcccctcgtcggcgacgatctggagcgcgtcgctggcgaggcgcacgtactggtagtcgacgaagaacaccttggcctcggagtgccgcaggatgcccgccaccgccctcgcgtcgagccgcgtgttgatggtgttgagcaccgccccggccatcggcaccgcgaagtgcatctcgtacattgccggcacgttcggcgccaaaaccgacacgacgtcgtggttgcggacgccgagggagaggagggaggaggcgaggcggcggcagcgggcgtaggtctggctccaggtgaagcggacgcggccgtagatgacggaggtgcggtcgccgtagacggcattggcgcgcggcaggaaccccacagggctcagtggcacgtagttcgccgggcgcttgggaagctgctccat

SEQ ID NO: 74387 - DNA, 620 bp, Oryza sativa
  Clone ID: PAT_MRT4530_74579C.1
ttcacgggcggcttgagcgcggcccgagaggggttggcgcggcccggccttgccatcgggctggccggcctgaggggcagcccaagggggctctcggggaggggaggaaagagggagccattgggccgggtccaccttgcgtggtcctgggtggacccgcttgtcggtggctcggctcaccgtgagcaaggtgcacacggggcgtgctagggtttgggaaggggaggcgcggtgcacgcacgtgctcacggtgggtgcggatgaggcgggcccacacgcagcctcacggctctcggtggagcgcgcgcgcgagcggggctgaggggagcggctgaccggggttgtcttgacccattcgcggccgaggtggcaccgacgtggccgctttgtggcagccacgcaggccggcgagaggtagacgaccatgtcggccggaacggatggcggacggcggctacgaacggcggggcgaaccacggcgatacaggagagagcgagcacaccgggtggttgtacgagacgaggggagacgagtcaacggatcagattcaccggagggagttcgtcggtggaggattgtggcgtcggccaccggcggcgagagaagaggggaacgacga

SEQ ID NO: 74388 - DNA, 2294 bp, Oryza sativa
  Clone ID: PAT_MRT4530_7457C.1
ccacatatcttagccacccagaaccggctatttgaaaggatgaaagcaaatgccgagaatgtgggtgctgctatggtcaatcatgcaaaacaaggacaatccaagctcgccaacgttcaatgcactcaccctccacatctcttctctgctactgatccactggctctgtggcagtgaatccaagcttgacctctgccgatgcaaaaatgtggagaaagcctcctatgcttcctattaccttcagggtgcagcctcagcttggtgggagtcatacaagactcttattcctcccgatgagcttatcggctgggttgttttcaaaggagggatttagatttgctcatatacatgccagtctcatggaaatgtagaagaaagagtttctcaacttgaagcatgggaatatgtcctttatggaatttctagattgcttgaactatctagggcactatgcaactttagagatgcccactaaagctaggaaatttgagctatgccgcgaccgacttaatctggaactcaagcatgctctctttgctcataaaatttctagcatgaagactctggctgacaaggctcttcgtgtggaagccagtgaaaaggaagttcttgaggatcgcaaatggaagtgggtagccagaaaagatgcaagtagcagcagctctacccgatgcgcctttctcagcccacgatggtccgctatgtggcttcgcagccaccgacgccacagtttgctgtttcccatcattcagctccgacaacagttcaattatattcctgtggtgcctcatcgcaaggaaatcagaatcgtgtagctaacataaatgctacaacgtactgcgggaaacttggtcattattccaataactatccatttccgaagaccgaacgattagtgccacgtcttcagggaacaaaaccgcagccacatggtcccgcacagggtcatggtgggcagcaaggtggacatattgcagccaagccatctcaacctattggatggggccgactcaatcatgtggccgttgaggagactacggacacatctgacatcgtgctgcgtacttttcatgtgcactctgctcctactcttgttcttttcaactctgggtcatcacattctttcatatctaccagattagtgaaccaacaaaatctgaaagtcaacctattaaagaatgccatgttagtacaatctcccgttgcaaccattaaaaccaatctagtatgtaatgatgttgaaattctaatagaggggtgaagttcaaagccaacctcattcagttaaactatcctagcttagatgtcatcttgggtatgaattggttgtccaaacaaggaaccatagattgtactaaaaatattatgtcattagtaaaaactgatggtcgacatatcacattcacatctgatcgtgctactacttctcagcagccatcacttcattctctatcaacatcgagctcaaatcagtacccatagtaaaagagtatccatgtgtgttccctgatgaactaccaggaatgccacttgaccgtgacatcgagtttgtgattgatttaattcctgggacagcacctatagctaaaagaccatactgtatatcctctaaagatttggtggaacttaaaaggcaaattaatgaacaattagcttaaggatttattcgtcctagctcctctctgtagggatgaacgttgttgttcgctccaaagaaagacggtaccatgcgaatgtgtgtggattattgtcctctaaatgaaatcactataaaaaaatcctcttccaagaatcgatgatcttttcgaccaattgaccggtgctcgtatcttctccgaaattgatctgtgattaggattttcaactgaaaatcgaaccggaggacattccaaaaactttgtttacctctcgctacggtttatttgagtataccgtaatttcctttggattgaccaatactcgtgctactttcatgaatatgatgaatacaattttcatggagcatcttgtcaaatttgggttggtattcatcgatgacatccttatttactctaaaaatgagtaagagcatgcccatcatctgcgtttggtgttagacaaactccgtgaacatcaactctatgcaaaatactccaaatgtgaattttcgttgaaagaagtttctttccttggccatgttctttccaaaggagggatcgcactcaaccgaggtaatgtactagagatcgtgcgggcgccctgatcaagcgacccttctctatataaaccgacctgccgtcttcacgtaacataca

SEQ ID NO: 74389 - DNA, 862 bp, Oryza sativa
  Clone ID: PAT_MRT4530_74580C.1
atggagtccatggaggagcgcttgatggacgacatgaaagctgttgcggccaaggtccacggcgtggacgacatcaccaagcacctcgcgtagatcaacctcaagttagcgcagtagggcgagcgctaggatcacgtgcagaccaaggttgattgctccatgacttccctcggccaagtgcagcaagagtagacgcaagtagctcgcgccttgaaggccgcagtggttgcgtctccaccatccccatccactccgcgtcagcaaactgatcttaccgactccagactcgacatcggcggcttcttcctcacagcctccaccacctctaccgtcgccgccacctcgtacaccccaacgtcaggtatctcatcatgatcctcaagggcatcaccactggactactaaaatggatttttcctatgtttgatggtaccggggttcgtatgtggattgataattgtaagacgtatttctccttctattaaattactgagggttttatggtctctgcggctgcactaaatttaattgggtaagctgctaattggtaccaggcgtggaaacttgaggtggggtggcatgacttgcctatataaaaatcaacaacctctggtgaatttgatgtgtatttgcgcagtgttaagatggatgaattgttgttgttgacccaaactggtactgtgaatgaataccgctctaaattcaatgagttggtctatcaaattcgactcgactgtatgatcccctgctttgtggtttagttctaattaatcactttattttgggtctgaaagatgaattgctttcgtttgtccaagctgatcagcctacttctttggttcaagcaagttttatccacgtc

SEQ ID NO: 74390 - DNA, 452 bp, Oryza sativa
  Clone ID: PAT_MRT4530_74581C.1
atgaacttgctagggacttcatacgtcgccagatcgagccactacaagctcgcgctcaccccgcgctacgacaagttcccgacccacttgtgtgacctcctgtcctcgaacaaggacgccgccatcaactatctaccgttgacggatgccatcggtcctctcatcgatcaccaagccacctcatctcttaaggaaaaggcggtgtccaagcaggctgatgtcgctgccgcttggagcagcagtggcacgaaaatctccaaacggaaatgggtagggatatctaaaccttcgcctagtgttgggacgctcgtacaaacgagaagctccgaggccaccctcggtgctcactactacaaaaaccgtttttgcaaacgggcggattgcattttcgtagtagtggctgctccctctacacgaaagagggacagacttttaaagcggctgaagcctga

SEQ ID NO: 74391 - DNA, 537 bp, Oryza sativa
  Clone ID: PAT_MRT4530_74582C.1
aatttggagggttaattctgtttatgcgctgtgctcttgatttggggacgttttctgtggcattcaatctgctcgtcgcggtaatccccattcagtagtgagcgttgggcgcgtggaatccattttttttttgggtaataatttccaagttgcacattaaaggggaggtaaatgccatgattttgttcgtacagttgccagagatctacccgggagaatttgtcagtttaatgaagctgtagtaaaaaatgacatgtgtcttatgtactgaaattggtgatttcaatacgaagatttgcaatgctcgaaactgttcttcatggaatcgcttttattccacttcatgtgtaaggactaaggatgcatgtcgctttggattaagtgtattcaaactgtttataaattgactattcacataggcaaatgtaccaacatttggatcgtgtattttgcatcagccttagcaactaaataaaaaactaaaattaaacaagaaaaaaacaaagggctaaaactaaacaaaaaaaaaaaaaaaaa

SEQ ID NO: 74392 - DNA, 613 bp, Oryza sativa
  unsure (1)..(613): unsure at all n locations
  Clone ID: PAT_MRT4530_74583C.1
gaaccgagccagccattgcacattgctggcatttttttgtataagaaggtgcctcattttaagaagaaattaagcaaaaccttacagtgcacaattaattggggaaaattgggcaaaaaccataattacaacaaactcaaccaacctaaactaccacaaccgtgggagtatgacctccaagctcaacactgaactccagatacggttagcaagctcaaagaacaaaaagaactccccacatgctggcaacaacgtggcatcatcatcatcatcacaccatcaccctcgtgatcgtgcgactgacttgctcaacaacttgcttgaaacacacccgaacaaaacatgattccagggtcagggttgaatcatcgctgccgaacttgcaccacgctcaactctganttctccanttggacattaccaacaccgcctgcaacaagcattgcttccaagnntcgttgcctactcatccaatgtntcnacccacanctccacttaccaaaancatccttgggttgcncttcnagnatgaccngaactgcnnancccatgaangatccccangatccgnattattctnnactggcaaaagtcnaggttcngatacttntta

SEQ ID NO: 74393 - DNA, 295 bp, Oryza sativa
  Clone ID: PAT_MRT4530_74584C.1
caaactcatgaatcatgtattatatagaaattaaaatgtcaatctagaaatattgtctaagcctacatcatatattcatgtttattacaataaactcatcccttctaaagatatcacttagaggctcctgcatatttttaggcatcgaattttttatccatacttgtcagttgtcaaaaaccgtgtttagaatttaaagagaagatcatacaaatttatactatattttgagacactatttgtggccttggagcaaacaaactttgtggccatcatgccatttagaatggactct

SEQ ID NO: 74394 - DNA, 401 bp, Oryza sativa
  Clone ID: PAT_MRT4530_74585C.1
tttgtgtttttttttttttttttttttttttttttttttttttttttttttttttttttttttttttttaaacccaacaagaaggggaaccctttaacttaaacaggaaaaagatgatcccggttccacatccgttacatcacgacagagaaaaaatagttttttagaagccccccaacaaaggattgggggtgggaaacacatgccttccacaaaggggaaatgaaataccacaaccaagggggtttttttagcgggggaccaactagaacatggagggggaacggcacaacacatgggggggccaaaaaattaaagcttggcctcaaaaacggggggggggggcatttgttccttgagacccttccttttggggatatcctgcaccaggggtgaagccc

SEQ ID NO: 74395 - DNA, 1069 bp, Oryza sativa
  unsure (1)..(1069): unsure at all n locations
  Clone ID: PAT_MRT4530_74586C.1
tggatccccgggctgcaggaatcggcacgaggaatcctcccacccagcggacgcgagacgcctctgctctgctctcttgcttggagttggagagatcgagagaaaggagaaggatacagcttttggaggaaaaacaacggatcgaaatccctcccattagggggctttgggattaaaatagcggtaacacacacacaaaagggatgctcagttggaataatagctggcattcaagttcaacagaaaantagaacaaatggagagggaaattgtggcctcatatgaacccaagaagaataacgaaatcaggatgtttgagagttcagacgagatggcaacagatctggctgagtatatttcacaagtttcagaaatttctattaaggaaagaggttactttgctattgccctgtctggagggcctcttatcagttttatgcggaaactttgtgaagcaccatacaacaaaaccctggattggtctaaatggtacatcttctgggctgatgaacgtgcggtggctaagaaccatgtggatagctactataaatcaacaaaagaagattttctctccaaggtgcctattcttaatggtcacgtctactccatcaatgacaatgtgacggtggaggatgcagcgacggactacgaattcgtcatccgtcagctggtcaagattcgcacagtcggagtttcagagagcaacgactgccccaagtttgatctgatcctccttagcatcggctctgatggtcatgtagcctcattgttccccaaccatcctgcacttgagctcaaggacgactgggtcacctacatcaccgactctccggtgccgccaccggagaggatcaccttcacccttcccgtgataaactcggcatcgaacatcgccgtagtggccaccggagaagacaaggcaaaggctgtgtattttgccatctctgacggtacagagggtcctgatgctccatcaattcctgcaagaatggttcagccaacggacgaactagcaatgttcatcagagcatatttggattggctgaactctggcgataactcagattaa

SEQ ID NO: 74396 - DNA, 225 bp, Oryza sativa
  Clone ID: PAT_MRT4530_74587C.1
atggctgtacggcgagaccaagatgaccatggtggagccaaggaggaagaggaagccattcacggcgtggcagcgacgctaggcaaaccaagtagctacgtgccgcggtgctgggtgccagcgagggctcatgttcggcacttcggcaccgtgcgcctcgccgacgcgcgtgtcgtcctcctgtctaggccggtctacgatgggatcgacagcgaccagatctaa

SEQ ID NO: 74397 - DNA, 275 bp, Oryza sativa
  Clone ID: PAT_MRT4530_74588C.1
tcgcttactcttacactatcattggcaggactcaagggcgggcaacatttgaatcatcggggggagccactaccacaacaggtgaccgactcgctaggaggcctgcactcactagaataagatatcgcgtgaacggaagatgggctccaactaccaggcggaagagaccgtgtaccaggagcggcacctcaagcacctccagtagggcaagggctacctaacgccctacctgggcactgcgcacacgacggccccacgcgctccacccttgatcg

SEQ ID NO: 74398 - DNA, 2947 bp, Oryza sativa
  unsure (1)..(2947): unsure at all n locations
  Clone ID: PAT_MRT4530_74589C.1
atggaggcggcggcgccagccatgctggcgccctcctccctggggcggcgccagccncgcaggcgccctcctcctgccacgtcgcttcgttttcagctcggattttcgaccgtgaattcttggtttatttcttgtggctcgcaagagcagaagattggtggtgctaagcactgtatcttgttcggtggaagcagttattgccttacactgaagagccttcgcggactccggttccggattgctctgcgaagccgagccctcacagatagagaagaaaccctcgcttcgcgtcctcggcggtgacggaggggagcacgggcgcctccccccacccgaccgcgccgctccggagctccacccggacggcaacgttggacacggcgtccagccgcgacgacgcgatggtgaagggcgcggccaggggcacgttgagcggccgcgcctcggcagccaccacgtcgacggagaaggcctccttgagggcatcgaacccgaacgtctccgccggctgcggcgcgggcggtgtcggcgacggcgacggcgagacggcgcggaggcgggtggcgccgccggcgggtggctgctgctgctgcctgcccaccgggagcacctgagccctggtgctaccgctcatgatgctcccatgattctgagacaacctgagaggcgagaaggacgaggaggtggagatggcggagtccatggccactgccactgccactgactggagcactgattttgccgactttccgccgccgacgactccgcatccgcttccgccgcagtccgccgcacccggtggggaatggcttcggcggtggagcggagggagcattcccggaggtcggggcgctcgaggtcgcgctcgccggcgagggaccggggctcgccgccgcgcaggagggagaggtcgccggctgcgaggagtcggtcgcctaggaggaggtctcctgttaagtctactagctcacatagggagaggtcgcctgttcggaggaatggctcacctaggaggtctcctgttaggagtattgggaggtcgccacaaagagatagggtgaaggagcaggtcaggtcaccgaaacagtcatggtcacggtctccgtcacctgccaggaaacgggagtcttggtcgccatcgccgcagagcaaacggctgagaagggctcagagtgagcgggaaggtgcagatgctactgagggtgaccgccggaagaccaccagggagcgtgatgagggaaaggatgtgtcaagggatagaaaggctgagagggaggagggctcttttaaggacaggaaactggattgcgatgatgatagggatcactcaagagatagaaggtctgatcggtcgggtgcttcaagggagacatggtcaagccgagattatgaagggcgtgattcaaggggtagaaggtctgatggggatgatcaaaaaggcatttgcagggagcaaagggcagatcatgatgatagaaaggattctgcaagagagagaagggcagaccgggatgagagcaatggtgaatcagggagatcatctaggcgtgggcgatcagtgtctccagaagagcataggcataggggtagacatgaatcccaatcccaccagtcaccgaggtcatctagaagtgcagcacgtggtgaggacttcatgccatatgacttctttgtgcagggacattctgattggaagaagtttaggccaggcttgccggaatatttgcctgaaatggaccgaatgtttgagggtgttgctgtggatggttccgcatcgtttgtggccactgccgaggagcctatagagtgtgatagctctgacgaagcggatggtgatgagcaagaggacgagctgacccctcttagtgttggcaacaaaaggacgagtccaagtaaaaagtccaagagtccagcagtgagggcaatggttagcaacatgagggagtacaatgaccttcaaaggagcaaaatcagcctaatgcaatccatgttgcaagttatgcaggatgtcgccgaagccaaacggaaagccgccgaagccgaaaggagagccgcggaagcccatatgatagccgccgaagctcaagccaacgctcatgagatgaagattaaaaaggatgcagggcagtcgttgtcgtcatcattctcgtcgcggtcgtcgttattctcgtcattctcgtcgtggtcgttgtcagcatcccacaatcgtcgtgctcgaagacagcgcatggatgaagacttaaacaagatgatgttggacttgttggacgatgatgacgaaggtttcttccacgttatgtttcagtatgccatccacattgacaagcatttgactagatcctatggcctaaaatctagtagcaaatccacctcggtagaagctcttgcgatgtttctttggatggttggcaccccacaatcagttaggcaagctgaggacagatttgagaggtccatggggacttctgtggtcaagcttgctgttgatgtcataaagcctgtggacccgcaattcagaacaatgcacccaagactgaggaaccgtaggttctatccctacttcaaggattgcataggggctatagatgggactcatgtcccttgcgtggtgccaaacaacaagttcatgcagtacttgtgccgcaagggcatgaccacacaaaatgtcatggctgcatgtgacttcgacatgaggtttacatttgtactatctggatgggcctggttcggaaagtattaccttgtggactccggctaccctaaccggccaggttaccttgcaccttacaagggaaccaaatatcatctacaggagtatcgagacagccctgaacctcaaggtaaggaagaaaaattcaactatgcacactcatctcttaggaatgtcattgaaagatcatttggagttttgaaaatgaagtggcgcatgttggaaaaaggtctctag

SEQ ID NO: 74399 - DNA, 242 bp, Oryza sativa
  Clone ID: PAT_MRT4530_7458C.1
ctgaagaaaaagggtgattcctattaggggaccgcttcacaaactgtccgtttgggcagacacgagttcaagaaaggggaacaaggactggcaccccggactctgacacgggatccctgacaaagaaaaggggacagttgtcggcttaacacgaaaggccccaggggtatccccccaagacaccggtcattagaccctaggagtgaccaaaggaggaccaattgcgcaaaaaccgctcaagg

SEQ ID NO: 74400 - DNA, 482 bp, Oryza sativa
  Clone ID: PAT_MRT4530_74590C.1
gccgtcccctctgcctcgctcgctcgcgcgcccgcctccgatccttccacttccacgcgaaatcatcagccaattgggaagaaggaatggcgagcactattaatgccagaacctggttggaaaaatgacttggtactttggtagcaagttgtctattcatcaataagagatggtagattccaaagcagagttgtcaaaagatttgtgatttggctagcttccctactcgctaaaaggagaactgaggaatcaactggggaagggaggaatgctagtaaccagatggtaactgccaatacctggttttcttataaaggtcaagaactgctggtgtgtgacgcgtgtcaccacacgttctctatcgcccctctctggaacggctccccgctgctacagcaagtcctgggaatagcagcatgaagaggacaatcactcgtgcctcacgtttaaattggcatgagcaggaccaatccaggcaccag

SEQ ID NO: 74401 - DNA, 1130 bp, Oryza sativa
  Clone ID: PAT_MRT4530_74591C.1
cggacgcgtgggcggacgcgtgggccaacgcgagctcgacgaagccaaggagaggaggagagagagagagggagagagggaggagtgagaccgacgcgaaggcctccgcccccccgaatccggccaccgccattccgctagatcgttggcgcctcagcttcccttcctcccgcggtttcttttgttggagggatttctcgaggcatgcagagccagatcgtgtgccatgggtgcaggaacattctgctctacccgagaggggcaccgagcgtttgctgcgcggtgtgccatgccgtgtccagcacagcaccgtctccaggaatggatatagctcatcttatatgtggtggatgccgaactttattgatgtatactcgcaatgcgacatctgttagatgttcgtgctgcgatacagtcaatcttgtcagaccagtgagtagtatagctcacttgaactgtgggccagtgccagacagtgttgatgtatccatacggagcaccttctgtcaagtgtgctatctgcaattttagtacaaatactgggatgattacaatgagacatttgccaccaaatgggaacttcatatactgccccatcaacctctgcttccaaccacttcaaattcacagaatgttactgttgttgttggaaaatcctatggacgggtagatgcaaagggggagttggtgggcgacgctgtcggtggggttacaactggtggtaaaaagtaacatattggcacacagtgcaccttgttttatgttccatatatggagttggaaatactttgtattatacacaaatgtttgtgatcaattgctggaaggaaccctgaagagcataggggcactcgcaatgtgcacaattacaatcaagctaaaaaaacaaactgcaggtgtgaatactgagatactgtagtttgttacccctgattcttttgtatgtaatatgagagctctgttggattttattgtgtgatcaaatcatctccagatggcactagctgccttctcaatgaataataacagattgcgttcaacatagcgcatgttttgtatacaacctgaatgagctgattttgtaaaatgcatggttttactactatttctggaactagactgagcatgcc

SEQ ID NO: 74402 - DNA, 1750 bp, Oryza sativa
  Clone ID: PAT_MRT4530_74592C.1
ggttctcttgggttttgtaaaggatgaaaccatgtttttggatttctttcaggctgcttacttatggtcttttataccatatttagtaatttatttatcgaacagaacaacaaggccagctgaaaatgcctcattattttatccgatctacagccctgcatccaaatatttcagggcctaacttgggacgtggcaacaataattagcctcttcaagggtcatataggattacgaagtttacaaccagtgctcctttgggtttccaactccaattgattattgttgaaggtaaataatgagacaattaaattgtatctatatgaacgtgtcaaccgttgtctgtgaagctcccaaagggctagggcattccttatttcaagccgttgttgtctaagtgaaggaaaccaccatggcctcgagcatttggtaaacttgtatacaggtccagaaacttcatagccaccgaacactggatcttcagacagtaaaagaggtgtgtccaggtcaacaaaactgaaacaaccaagaccagctgcaagatgaccagcaaagcccatagcgatcctagtctcatgaccatacccgcctatcatcagcgcaatgcgggcgcagcagtcgatatcgttcaattactgagtcaagggctccaagaatccctagctttgctagcttgatgttaataacatgagcaagatttccatccattattttctgagcatcaagcaaactacgacaactttcatcagctgcaacagcaactctgtatttctccttggcaacaatgctaacatcgcggagaccttcccagtcatctcgatgaattctgattcaatactggatatatcaagagcttccattgcttgagtcgattagctgtgtattagtctatcaagaccttcatttgcttgattagctgtgcatccaagatatgcaaccaatgaacaatctggctcgggccatgggcaagccgtatagccttcaaaacttctatatctgagtttaagttcttcccgactttgagcttcagagtctgaaatccctgtcctcgatattttgcggctaactgagcagcttcatttgttgtcactattgggtggctaaccgtgatatctgttgtgacactgtctgacgcccctccaaataatctccacaaagggatgcggatactgttagcaattgcatcaatcaaagccatctccactcctgctctagccgaggcgaagtcgtgtcccgggagggcactggcgacgtcctggagcacggcgccgaggggcgcggcgggcgcgccggccagagcgccgcacgcccgggtggccgcggcgagcgcgccgggctggtcctcggcggtgacggaggggagcacgggcgcctccccccacccgaccgcgccgctccggagctccacccggacggcaacgttggacacggcgtccagccgcgacgacgcgatggtgaagggcgcggccaggggcacgttgagcggccgcgcctcggccgccaccacgtcgacggagaaggcctccttgagggcatcgaacccgaacgtctccgccggctgcggcgcgggcggtgtcggcgacggcgacggcgagacggcgcggaggcgggtggcgccgccggcgggtggctgctgctgctgcctgcccaccgggagcacctgagccctggtgctaccgctcatgatgctcccatgattctgagacaacctgagaggcgagaaggacgaggaggtggagatggcggagtccat

SEQ ID NO: 74403 - DNA, 657 bp, Oryza sativa
  Clone ID: PAT_MRT4530_74593C.1
ataccatatttagtaatttatttatcgaacagaacaacaaggccagctgaaaatgcctcattattttatccatctacagactgatcaaatatttcaggcctaactggactggcaacaataattagcctcttcaaggtcatataggattacaagtttacaactgctcctttggtttcaactccaattgattattgttgaaggtaaataatgaacaattaattgttcattgaacgtgtcaccgttgtctgtgaagctcccaaagggctagggcattccttatttctgtaaaataaaatgatataccaatcagttatacatctttttagtcactgaggagaccatttgcattaaaataagaacaccattttatactggtcaatctgaataggtgcctctggttgttaccatgtttgataggtaaatttgattataatttggttccaaactgtttcgttcatgcttttgaaggaaaaactgttttcttcattttattacatttggatactagaaacaatgctattgcaggacatgaagatttaacttaaacagcaagagtgaaatgcttcttaccaagccgttgttgtctaagtgaaggaaaccaccatggcctcgagcatttgtaaacttgtatacaggtccagaaaccggacgcgtggg

SEQ ID NO: 74404 - DNA, 235 bp, Oryza sativa
  Clone ID: PAT_MRT4530_74594C.1
atcatcagcgggcacgatcggccgaggtcagcgacgaaaagcaggcgaggcgtcttcagctcagaagcactacacttctgaaaaaggggaataatagcaaggctgagtacaaccaccgtactcagcaagccacaccaatgatgcagacgtgcaaggggattcaagaatggctcctggctatttgcataaaggcggttgtaaaatattttattgagcaaacaataaaactgttgag

SEQ ID NO: 74405 - DNA, 447 bp, Oryza sativa
  Clone ID: PAT_MRT4530_74595C.1
atgaccacgaacaacaagcagccgatggtggttgtgttccatagagacgaagatggtggttgtgataacaggcagtttggactagtttcgattctcatcttctcctctcatgctgcgttggaaagagcggaggcggggccgggcaccacggcggtggccgcagaggtagaggcgggagtccggcggtcggcgacgggcgatgaggcggcggttgggggaggaggccggtggggcaaagcgggagaggaagcggttgggatgatgccgatggcgccgcggttgatgaggtcgacgacgggctctagcttccacaagtcctcgccgccccacttgtcggtggaagctcgccaagcatgcggttatggcacagtgccccggtgcggcgggcgtggcggagcggtggatggcgccgtcctcgatgtggcactagtctgggcttgcctctga

SEQ ID NO: 74406 - DNA, 2619 bp, Oryza sativa
  Clone ID: PAT_MRT4530_74596C.1
ctaaaccgtgtatactgccgggcttgggggacgctgtcgcggtgcaggttggccatcatcgtgtcctgccaacggcggagcaacagcaaccggccgccacatcggcggcggcgcgccacctccgccgtgttgatgcggcgctgggtgcttcggcgacggcgggatgtacggcgacggcctcaccagcgcaccaccgtcatccgtgctgacgctgctccgccacgccgacgcacgaagatgtggatgggaggagtaggcttctccttgtgtagttgacgagttgtcgaggtttcgagcattatacactagcaatcggcctctgccatgttccttcaggcattcttgaaaaatattcaggcgatcaatctttcgagttttcatgaagcaaaacatactcccggctactattgccaaacttaatggtatccttttcaaagagttcataataacggctgggctcaatacgattctcattaatgaaagttccattggtactaccaagatccatcagataaggcctcacttgctttgacatcatgccatctggctgctccttctctacaagtctatattgaagaactgcatgttgcttactgcaggagggatgatctgtggggatgtctgcaactttccgttcccttccaaaaaggtagctgctcatccggtgaacatataatggttcttcgagtggttcaccacccttgaagacgtagagtctccatctaatatctgacttgcgagcctctggaggttctgaatgcaacagatttacacctgcaactctgttagtctcctcagcaagctttccagacaattcaaatgatggtttttgcttttcttttgcttccagagcttctgcagtagcattcatcttcaccaaagaatcaggatcaacactccgtgacgctgcatctgttacagagcttgtatcctcaccatgtgctgcacttctagatgacctcggtgactggcgggattcacgtctacccctatgcctatgctcttctggagacactgatcgcccacgcctagatgatctccctgattcaccattgctctcatcccggtctgcccttctctctcttgcagaatcccttctatcatcatgatctgccctttgctccctggaattgacttttcgatcatccccatcagaccttctaccccttgaatcacgcctttcatcatctcggcttgaccatgtctcccttgaagcacccgaccgatcagaccttctatctcttgagtgatccctatcatcatcatgatccagtttcctgtccttaaaagagcccctactatcctccctctcagtctttctatcccttgacacatcctttccctcatcacgctccctgtacctccccgagtcccgctcttccctgctggtggtcttccgacggtcaccctcagtagcatctgcaccttcccgctcactctgagcccttctcaatcgtttgctccgtggtgagggcgaccgagactcccgtttcctggcaggtgacggagaccgtgaccgtgactgagcttgtttcggcgacctgacctgctccttcaccctatctctctgtggcgacctcccaatactcctaacaggagacctcctaggtgagccattcctccgaacaggcgacctctccctatgtgagctagtagtcttaacaggagacctcctcctaggcgagcgactcctcggagccggtgacctctccctccgagcaggcgggctccgcctgcgcggcggcgagccacggtccctcgccggcgagcgcgacctcgagcgccccgacctccgcgaatgctccctccgctccaccgccgaagccattccccacccctcctcttctgcttccggcttgccgctcgccgcgacgacgacgacgaccgtggatgcggcgccggcgctggcctcgacgtccttgctggccggcgtcgtcgtcgtcgacgacgactcgtcggaggacgaggtgccgtcgacgtacatcccgatggcggccttcctgaccgtacatggaaggccgtgaagatcgagagggcaacggccatgaaccaccagctccaccgctgctttgtatccacgagcaccggcaccaattgcgggtcccacgccagccgccgggtctgctcctccgcctgccggcacgcgtcgttgtcgggcatcaggaactggatcagcaggaggtccagcgactgcgccgtccctccctgttgccagcggcagcttcctcctccctttaccttgctgcaatcgcccggcaccggcggcgggggtgagcaggcagcaaccacccgccggcgctacccgcctccgcgccgtctcgccgtcaccgacaccgcccgcgccggcggaggcgttcgggtccgatgccctcaaggagactttctccgttgacgtggtggcggccgaggcgcggccgctgaacgtgcccctggccgcgcccttcaccatcgcgtcgtcgcggctggacgccgtgtccaacgttgccgtccgggtggagctccggagcggcgcggtcgggtggggggaggcgcccgtgctcccctccgtcaccgccgaggaccagcccggcgcgctcgccgcggacacccgggcgtgcggcgctctggccggcgcgcccg

SEQ ID NO: 74407 - DNA, 1032 bp, Oryza sativa
  Clone ID: PAT_MRT4530_74597C.1
taaaaaggagtaacaaatatgcaatttcgtttttctgagatggagattgctacacatcactttgcaacaagaattggccaaggtggttctgctactttttacaagtcgaggttgccatcaggaaacatgaaaatgcgcatcctaatcgatatgacgacaagccggaaatgcatcgtttgattcatctctgctcaatgcttgaacacaaaaatatagttaaggtcctgggatattgcgatgaaaacaggggactgttgttggtcgaagaatatatggccaatggaaacttaagcaacttcatctatggcacgtatgcaggggagcagcttgactggtcctcccggttccaaataattcaagggataactctgggaattatttaccttcacacacactctgggaaacctactatagtccatctggacctgaaaccagacaacatcctcctggattcagacatgaaccctaagattggtgattttggactagctaaagtgctagaagatgatgagattaatgcaagcgttcgtggaacattgtaagatatgggctatatgcctccagaatatattgttgaaggtgttatctcggtaaagaatgatgtctacggttttggcgtaacactgcttgagaccattagcggaatgagcaagtctggacgagatactcgtcatcaagcttcgattgagtgggtaagtaacacagcatggggaaaacggaactctggagtaatgaacaagttattcgatccctcactgtgtgacaactctcaactgaaagagataaagagatgcattgagattggactgctctgcacccagaagaaactcacggaccggccaaccatgccagatgttcttcaaatgctacagggcacgaagaaggttccaacccccaagcaaccaggctacatcaaacgagtacgggaagcagaacgttataaacaagtgtaggcagaacgtctgtaagatggcacaacaagattggaagaaatagaccaaccaaagaggggcgaatggttatagtcctcaa

SEQ ID NO: 74408 - DNA, 831 bp, Oryza sativa
  Clone ID: PAT_MRT4530_74598C.1
cttccaccgacaagtggggcggcgaggacttgtggaagctagagcccgtcgtcgacctcatcaaccgcggcgccatcggcatcatcccaaccgcttcctctcccgctttgccccaccggcctcctcccccaaccgccgcctcatcgcccgtcgccgaccgccggactcccgcctctacctctgcggccaccgccgtggtgcccggccccgcctccgcctgcgtgcccaatgccgcggcgcccacccgcgtagggccgcttcactagcggcggcgacgcagacgccattcgcgtccgagagaagagaagagaagagagaggagtaatggagaggagggggtactaccatcgaagagtgttcacagtcatcgtccttatctacatcaggcaagctgacaatcatctcaccatcaccgacgaccaccttccctgtcctcacttggccatgaggaagggacaaaggacttatcccataaccactacccaacaccaccgctactcgccgccaccacaaagggaggtggcagtggaggcggttgttgcaggtcggcctagcgctccagttatgtgcaacgaaggtgcgatggcagtgagggcgcacgatgtcagtgttcagaacaccaacgggcaccaccggtgccatcaccactatcgcaccggcaaaccattatcagacgccgctggcaccgcttggccgtccgctactggtcattgtcgccaccaccatcagcatcaccactgccgtgtcactctccagatacaacggcacgacggccatcaagccgccaagaaccaagccaccaccccaccgcgcgcaagcagggcccgtagt

SEQ ID NO: 74409 - DNA, 731 bp, Oryza sativa
  Clone ID: PAT_MRT4530_74599C.1
atgacggtgatggcggcgggtgtaggcgagggcggcggcctgcgtcgacggcgacggcggcagcccgcggcgaaggcgacgacggcgcaagatggtttgatctcgatcttggttacaatcgcttgtgtagaactctttgaaatagaagggcagagcaaggatgcctccatccaccgcagcggtacttccagaaaatcgtggaccagcggttggcttcaagctgtccttccactttgcctccacacttgcacgtccaccttcaactccaagaaggcctccacaattgacaaggaattggtggaagcagagttggtttgtttctgctcatcatcatttcaggtggtcaacaatagaaccgaggtaccccgcctcggattcgccgggaacgggggtgccaactccggcgccgtcatttggtgcagccgatcttcgggaacgcgaccgcgtcaaactcggaacaccgtcgcgctctggacgccgctgcttcgcctttgctcgtcgcccagcttccccggttcgtgacaagcgtcgatgacgaccgtagcagccgcgccgtcgccgaaccagtacaccgtcgccaagacttcgccgagccgcatttgctgcttggtgagcctcctagtagtcctttttgttttgggagcttgagctgaatcgccgctgttcgccgctggtgatactgtgaagctcgcggctgtgctgctgctctgttctgtccagagcaagggcat

SEQ ID NO: 74410 - DNA, 424 bp, Oryza sativa
  unsure (1)..(424): unsure at all n locations
  Clone ID: PAT_MRT4530_7459C.1
ttntttgttttttttttttttttttttttgtttttggggttttttttttttttttttggggtttttcctttttttttgggggcgtaaacagaacaagaaataaaaaaacggccccccaaaatgtaaaaaacccgcggcattccgtagcaaattacctgggtccccgaacagggacaatttttctgtaaagcggaaactttacggggccccaaaccagcaacgaaatgtagagttgaaaaaggcccctcatgggtagcagcaaaattaacgccgaaacctaattgatttggtgcatcaaccaaaatttgcccaacaacttaatatttctcaacaggggtaaggaaccgctcaagggggtgcagttcccatgaaagaatcttctttcccgggccccaaaggggtgcaaccatacccaatggattcc

SEQ ID NO: 74411 - DNA, 624 bp, Oryza sativa
  Clone ID: PAT_MRT4530_745C.1
atgaagcagctagcagaccaccacgccagcctcgccaggggaactcgttgccagtgccacgccggaagtcggcgcacctcctccggctcgccctcctccttcatcgtcgttggccggcccctgccttggcggcatcgatctggaggagtctgccgccccgacgacctcccaggctacggggccaccgcctggccggcggtcggcgtcgccttcccggctcctgatctgactgccgccgccggggggatggggctcaacccctccggccagccggccccgaggccccctgttggcgccggccagcctccgccgcacgacctcctcccgccgaggccatcggcttatcgggcttgcgtcacctaccgcctcgtcgacttctacgcatctccgacatcggcaccaattctgcttcgacttcatcattcagtcccgcgcatcttcggcttgatcacccgttcagtgctgagaggcgccctccttagcatggctacatcaccggtggacttgtcgccgctgcatcgacatcgagctgcacctgtgtcgcctcttcggccgctcaaggtcttcttcctctacttcgagcttcgctgccgcatctccaagttaccattgtcgccgctctag

SEQ ID NO: 74412 - DNA, 200 bp, Oryza sativa
  Clone ID: PAT_MRT4530_74600C.1
gacgaaggcgacggtggcaaaatcggcgacggcgacggcggcggcggcggcgatggcgaaggggagggacgcgcggtgggagtagatactgtagtcgtgcgtgctccggaccagcagcaggtagcggcgcggggaaggaagctactggtgggggacaacccagatccctcgcccgcgactcttctactcgcgctcgcacg

SEQ ID NO: 74413 - DNA, 475 bp, Oryza sativa
  Clone ID: PAT_MRT4530_74601C.1
aaaataaccctcctaaaggaataagcttgcggccgctctgactttttatttttttttgaaaaaaccttggagagactggtaaaagttgctatagtgtgtactccaatataaacctttacactgtactttcaacctccaaaacaaatacaccccactacacccatttacaagattctagctaaatggaccattgtactttatatgaaaaatgaggaaggagcttactcgcagtacatggcaaacatggtcactactcactattgagtaaataaaactcgacgactatttgattaactgatttagatgtcggagggtgagctgccgaccaaccatagggcagctttgcgctcactcaattcctaaatcactcacctcgtaacatcttgtgtcgctagcggtttaggttctctagatgggggaacactgcaatccactcaatccgaagatttcgcctgaaaggacatattacctatag

SEQ ID NO: 74414 - DNA, 1110 bp, Oryza sativa
  Clone ID: PAT_MRT4530_74602C.1
gtttatcggcatagatttaaagataatgacatgtcaagacctgacaaggaaaataaaagggattcaaaagcacaggctggtgatctgatggatgatggtggaatgtagctcggtcgccggcgacgtacggacggcggcggcggccgtgatttcatgtgcggtggtggcaaggtggcgagcccgccgggaccacgactgccgcggctcgccggcgccggcggcgaggaagaagaggaggaggcggcggctggaatgctgtcgaggcatggacaggcgagggagatgtctgtgatggtgtccgcgctggcgagggtggtcgccggcggcggcggcggcgaggcggaggagtggtggccgccggcgtacggcgcggcgccgctgccaccgtctacttcccctgcatctcacgagcacgcagcagccatggcggcagggcagtacgcgccggcgacgtcgtcggcgatggcgtcaccgcgcgagcaggcctcctcgccgtcgtccggcgacgccgccggcggcggcggcggcggcggcaggaagcggtaccgcggcgtgcggcagcggccgtgggggaagtgggcggcggagatccgcgacccggtgaaggcggcgcgcgtgtggctcggcaccttcgacaccgccgaggccgccgcgcgcgcctacgacgacgccgccctccgcttccgcggctgccgcgccaagctcaacttccccgaggacgccgcgctcctgccgcctccgcctccgcctcctgcgccggcgccggcgccgccgcagtcgcaggggatggtcggcgtcggcgaggagtactccgagtacgccaggttcttgcagggcgccggcgagccgccgcatttcctcgagcagataatggaggactcgcctcggccatcgacggcggccggcgcgtcgtcgtcgtcgtcggggcagtcgtcgtttccgttgttctacagcttcgctggacatgagcttggcggcaacgaagcgaaccttgcccgcccgccggagagcggcggcgctggtggtgacggtgggaggggctcctcgccgccggtgacttggccgggctatgggtggggtgcgccgccgccgtgggacccatcgagatag

SEQ ID NO: 74415 - DNA, 780 bp, Oryza sativa
  Clone ID: PAT_MRT4530_74603C.1
aacaacttcaccttccactatgccttgtatgtccttatgaattggctacccacctattttgaattaggccttcagcttagccttcaggatatgggatcgtcaaagatgcttccctatttcaacatgtttatattttctaatatcggtggagtggttgctgatcatttgattacaagaaggatcttatctattacaaagacgaggaaactcctgaacaccattggtttcgttgtttcagctgttgcacttatggctcttcctttattcagggactccctcagggactgtgctttgttcatcgatatcgctcggttttctggccctaggaagagcaggcttcgccgtgaatcacatggacgttgctccaaaatttgctggtatagtgatgggggtttcaaatacagctgggacattggctgggatagttggtgttggcctaacgggaagtattctggagggggcaaaggcttctaacatggatctgacaaactcagaaacctggaaaacagtcttctttgttccagggtacctctgtattttcagttccatcatttttttgattttctccactggcgaaaagatttttgaatagaggatgactattcttttacttttaatttacggtgaggctggatagcaatacgggattcttacatgtatctgtttgtcatttgttatattttggagttaagattgtatcccatacatccttaaaaaacagtgcagaaaggattgcacattttttgtagtaaatttatcatttctgtagtcgcgcgtcta

SEQ ID NO: 74416 - DNA, 262 bp, Oryza sativa
  Clone ID: PAT_MRT4530_74604C.1
cgccgattccgtcaccaccgtcggagatcagctgaggacgcgtgagcttggcgcggtgggaagtgtgtggaggccatcggcactgttcatgtcggtcctacggtggacatcatgcagggcaccaggccggcgatgtacaagctagcagctgcgtaacagggtgctgttcagggtgtacacagaggaaggactcaaggtgcatataatgatggcggtgcacgcctgcaaaacgaacgtggtggacgccgttaccatcataatg

SEQ ID NO: 74417 - DNA, 1515 bp, Oryza sativa
  Clone ID: PAT_MRT4530_74605C.1
atggcggccgcggcggcgctggagctccggctgctcgcgccgctcgccgcgccggccgtggtggtgtacatgctgatcatcgtgatgtcctccgccacccagatcttctgcggtcagctcggcaacgtccagctcgccgcctcctccctcggcaacaatggcatccaggtcttcgcctacggcctcatgctcgggatgggcagcgcggtggagacgctgtgcgggcaggcgtacggcgccgggaggcacgagatgctcggggtgtacctgcagcggtcggcggtgctgctgacggcggccggcgtcccgctggcggcgctgtacgcgtgctcggagcgcgtcctcctcctgctcggccagtcgccggagatctcccgcgccgccgccgggttcgcccgcggcctcatcccgcagatcttcgcctacgccgccaacttccccatccagaagttcctccaggcgcagagcatcgtggcgcccagcgccgccgtgctggcggcgagcttcgcgctccacctgccgctcagctgggcggcggtgcgggtgctcggcctgggcctcccgggggccgccctggcgctcagcgccacgtggtgggtgctcgtcgcggggcagttcgcgtacatcgtgcggagcccccggtgcgccgcgacgtggacgggcttcacctgggcggcgttccacgacctcgccgcgttcgccaggctctccgccgcgtcggcggtgatgctggcgctcgaggtctggtacttccaggtgctcatcctcctcgccggcatgctccccgacccacagatcgccctcgacgcactcaccgtctgcacgtcgatacagtcatgggtgttcatgatctcagtgggcttcaatgctgctgccagcgtgagggttgggaatgagctcggcgccggcaaccccaggtcggcggcgttctcgacatggatggtcaccgcgctctcggcgatcatagccgccattgccggcgtcgtggtcatcctgctcagggacaagctgagctacatcttcacccagggcgaggccgtctcgcgcgccgtctccgacctctgcccactgcttgttggcaccatcgtgctctgcgggatccagcccgtgttgtcaggtgtggctgttggctgtggatggcaagcattggtagcatacattaacattggatgctactacttgatcggcctacccctcggcgtgcttctgggattcaaatttgactatggaattaaggtgctattaattctcgacataccgcaatttgacacacattcagttgacttttcagttgtagagtcaactggaaaagggattgtggggaggcatgattggagggacgctcatccaaacacttattttaatatggatcacattcagaacagattggaacaaggaggtaccgtaacagcatttccctgcagagctgttgagaacacaaattcttcaaagggcaggaggcaacaatcgaaaagacaagcgacaataaaccttgtctcctcttttgatccttga

SEQ ID NO: 74418 - DNA, 423 bp, Oryza sativa
  Clone ID: PAT_MRT4530_74606C.1
atgtcgagcggtgccgtgaggcgaacctcccaatcgcgcatgcgagatctcaccatctcgtcgccgtatcagcccgacgaaccgcgcctttgtccctacgcctgctacgtcatcggggcggggatccgcatccgcatccgctgcgcggcgcagagcagcgaacgctcgcgcaccgaccgtcggatagccgcccgcgtgtgcatcgagattcgggctgaggcgctggttcgcggtggatcaggatttggtggggcccggccggccgaggcgcgggggcgtggggcccacctgtccgtgtccggaggcgcgaggcccgcacgtctgcccgggagctgccacgtaggagagagaaagtctgacgtggctcgggcctcatttgcggggaagccctcgtcagtcgtcaaaattgctcgttgtttgtaa

SEQ ID NO: 74419 - DNA, 510 bp, Oryza sativa
  Clone ID: PAT_MRT4530_74607C.1
tgtcggcgtcggggtcatcctgctcagggacaagctgagctacattttcacccagggcgaggccgtctcgcgcgccgtctccgacctctgcccactgcttgttggcaccatcgtgctctgcgggatccagcccgtgttgtcagagttgcagttgactcttgggggcaatttggcttttgggaacgaattatatgcaacatctcagtaacattgctgtcatttcactgttgctgaatttgtttactgatcatgaaggtgtggctgttggctgtggatggcaagcattggtagcatacattaacattggatgctactacttgatcggcctacccctcggcgtgcttctgggattcaaatttgactatggaattaaggtgctattaattctcgacataccgcagtttgacacacattcagttgacttttcagttgtagagtcaactggaaaaggttaaacgtttgcaagtttgaaaatggatattctgcatgcacggattggtgggaggcatg

SEQ ID NO: 74420 - DNA, 263 bp, Oryza sativa
  Clone ID: PAT_MRT4530_74608C.1
atgacggacgtggagctgagagtggaggccctcagcctgagcgacgtctccgccatcccgccggagtacgtccgcctggaggaggagcgcacagacctcggcgactccctggaggccgccccgggtggcgcacgggacaaccgccggggggtcgaggccgccgacagtgacagcgggccgatcgcagaagttgtgcgcgttcccacagtcgtccgcggggccgcacccctggaggcgccaccgacaccggagcccatgcccag

SEQ ID NO: 74421 - DNA, 323 bp, Oryza sativa
  unsure (1)..(323): unsure at all n locations
  Clone ID: PAT_MRT4530_74609C.1
tatgggagattcaggatggagctagtagctgagatggatgagttattgattgaattgaatcgttttgatttggttctggaatgagatctgcgatctgcgatgcgatgcnacctgcntttgagagattgaattgattattaagttgttactgacttcttttcttgctgctgttgaaacgaggaggaggagagagatggatgatgatgatgatnatgggaggaggatcgnacgnacgatgtgattnattattgctatcatcatctgatgagattatgaatatgagcaatggaaatattatttatttaaaaaaaaaananananaa

SEQ ID NO: 74422 - DNA, 351 bp, Oryza sativa
  Clone ID: PAT_MRT4530_7460C.1
atgttctcatcttttttacttaataagtacatttcagtacacacatggtcaaggcaggaatttgaaaaagccgtcaacatacttcaaatcattgaccacaccatacagcaaacattgggtaaacatgggaataaaaagaacaggggatagcaacttggaatgttctagcattactttgggggcgtccctttacgaaacaggggagggggcaccagctgttgatctcggccatgcccactcaacatggttagatagcgccagaccacgctgaccacaacatggcggctcctgagaagggaccaactgtcaagagcgggttataaaggctccagaggccctcatgattggccc

SEQ ID NO: 74423 - DNA, 736 bp, Oryza sativa
  unsure (1)..(736): unsure at all n locations
  Clone ID: PAT_MRT4530_74610C.1
ttgtgttgtattatatgtttgttcggtagcagcacagcgaactgtcatcttcatgtgctgagcatgcgggtacaccgtacacatngttacgggccaacatacggtggcatgcagtgcgtggcacccttaacggaaaacgtngcacattattagtactacatgtacatgcgcacgtgcgctcacgctggtatacaaaaataaaacanctnaaaagacagaggggcgggcggaagccacccgcccgggtccagttcnccctgggttgggcccccgggggaaagaaagccggctcgggcagggcaggggccgggcgggcagccaggacttgggggagaagatggcgagctcctgccccctcccgaacttgaccatgcagcgcctacctccctcgcataaagcccgaacagccgttggtgccaagccaccggtttcccgccccgggccaattccccagcaaacaaaccagacacagaacagcaaattcgacccaaacccaacccggccgccgttccattggcgccagtccgctcacgtttggaaccaaacaccacgcgaacccctcgtcgaacggcgcgccccgaataaccgggaagctttgccgggaccaaccaccattttgccccgcgcccgggagcctccgccgtagaaacccccaagccgcccccctcgcctggtttaaaccacctgcaaggcttcgccgcttcccgctttgttggggttaacaccggccgcgtgc

SEQ ID NO: 74424 - DNA, 647 bp, Oryza sativa
  Clone ID: PAT_MRT4530_74611C.1
cccgggctgaggaattcggacgaggctcaatctctctctctctctctctctctcgtgaggaagagcaacggccgatcggagagaagagggaatcgagggagcgtccgatccttctcctctcaaaggtacgcgagtttccgatctcgccatccctctctccagtctctcgctctgccgctcttctgttcttgttacggttgcgattaataattaattcgttcggatttggtataggtacgatttagtttttccttttttttttccgttcaagaatctactactaggtgcagtttatggtggattggttgattcaggaggcagttttggatggataatgttcatgtggaaattttccgcgttttggttcgtgtcgaaggtggggtgtgtttcggttggagttggagaggtactgagtctgagtgggacggaatggtaccagatgcgagataagctgatgcgatttgattgattgtttgcttatgttcatgatgctactacatttctttgcttgcttgcttgtactgtatacggagacagtacgacatattgtttgggtgattagatatatgtcgattgattggtagaagtactccaggtcttagtactttgtacgggtgatagtgtctcgtgtttttcttcttccttaa

SEQ ID NO: 74425 - DNA, 319 bp, Oryza sativa
  unsure (1)..(319): unsure at all n locations
  Clone ID: PAT_MRT4530_74612C.1
gcctccccgcttttcccctttttatttcatattctttttctggttcttgttcctttcctcccccggcttgacggtggtggtgccgccggatgggccttggcacggccgtcaatcggcgaggcgtggttgagcgacggcgagacgcagccaggacggcatgcggtgcggcaccggacggcatgcacagcggtcatgtcgatgtagcggaccaaaatgacggcttgtgctgctgctcantggttctttcgttttttttcctccttttcttctttcttctaacttctgctcgttttcttccttctctcttgctaacgctcca

SEQ ID NO: 74426 - DNA, 309 bp, Oryza sativa
  Clone ID: PAT_MRT4530_74613C.1
atgcagccacgtacaagacgacgccgctccgccgctgatgtctcggtcttcgtcggcctccgccttccggaccgcattgaacgccgcacatgggcgtggtggtactactcccggctggctcaaatgaggatgtcgatggggtcaacaaacgacgaggcacatcgagctgagatcgaagtactcctggttgacatcgatgatgatgacctcgccatcgtctgggatggcgagcatagagcaggcaatgaaacacatcagcctgccttctccatgcttgagctctactgcccgctggactaccactgctga

SEQ ID NO: 74427 - DNA, 2302 bp, Oryza sativa
  Clone ID: PAT_MRT4530_74614C.1
ttttttttttttttttttttaataaacaaggaatatataaaactttcatcgatgcctattgctacaaaacaaatgtttccattccaagtaaacattctcacacaaagattacctattacactcaggggctgcctctcgctaaagaaattcaagaactattcttttaacaacatatgtatgcttctactttctatcctgaaaatgatttctcattgatcaacttgaaaaatatgtttcctagtgagtcatgtgtcaactatatgagcacctccacatcatcctcggcgctttcttccaaaaggagatcatctctttgctcagccttcttccttctctcattcttcttcctggtctcctcacctatagcattggcgatggcgatgggtagccaaaatccaggcctttcgaggaactgagctcggtgaagaatcatcgcatcacgccgtgtcacatcaatgccatcgaaagtccacaccgcaactgtggcatttcctttcaggcccaaggaataccagcctaaccccgaaatagcaatatccatactgttcacatcccaactgacccccgacacatcaatctgtctttccgtccagtgacctaattcggcaactcgctctggcctgatcggtggctgaagtctgatgccaaaatgtttgtcccgcagttcttcagcattttcagtcttccccagatggagggacacactaggagatgcccaaacagttatgtagatagtttggactgaagcttttaacacatcaagtcgtgttaaacctccaatatgtacagattgtcctgccttcaccctgaagcaccttggccggagttctttccgaatttcaaccatcttgcgttcctcactgtttaatctcattgacattatatatggatgcaataagccaggagtgtcatacattttagcctttgctggcaaaacacctgttattctcaagattcctaatgtagttcctggcacagcagcctcagtcaaccttgtgattttgacaccttgtttctttgcaaatgcattaattagagtggatttcccagcattctgtgcaccaatcacccaaacattgctacggggcccagctagttccttgacatatgagatcaagtttctgacagacaaatccttatgaacactgatcaagaaaacagcatccagctttggtgctccgaaagccttagctcggcctctcacccacttctccagcctcactcccatttgctgccatggcagcaaatccaccttcgttccaacaagaacaagccttggcgtttcactcaacttagaagttccccgcccctcgagcgccttgaacagcgacttggcagccctctttgggaatgagccgtcaaagtccgcgcaatccgctaccatgacgataaccggtgtgccagctgaacgtttcatcagacgggacgatatgaaccgatcgaaatcgaagtccgggatcaaattctcagccttgtcattcttcacatgcccataattcctcagtgagtggcaccgggcacagaccacggcggcgtcctcctcggcctcggccttcttggcttcccgtgcccggcgtttcctctcggacttggacagcttctccttcttccatctctcgagtgtctcctcagtgatctttccatacccaactcccggtggggtgaaaccatccagttctttcctccatttctcctcctcgtcttccatctcctcatcccaatccgagtcccagtcgctcgagaagccatcgatcttggcatctatgtcagccttcatctccgccccatcctctccattctcatcctcttcttcaagaaattcatccaaatcgctgtccagaccgtccaattcggcggcaagatcagattccgacggcgcaccgtcctcctcgtcgtctccaagaaatccatcaggctcggcggcaagaggaggcgacccgtcttcccccatctcgtcgtcggagaggcgggaggggttcttgaagaagccgggcaggttggggtcggcgtcctgcatgaacacgccgcagccggggcagacggggcggccgacggcggcgtcctcgtcatccctgccctcgctgatgaccgggctcggcggcggcggcggcgacctgccgcgcttgccggccgtggacacggcggagacgggggagaaggagaggctgcggctctgaggcggcgggcagaggaagaaggggaggacgcggaatggcggggccgcgccgacggcgaggcgggaggggaggcgagctgctgctgccgccgcgacggtagcggggaggaggaggggtttagccat

SEQ ID NO: 74428 - DNA, 339 bp, Oryza sativa
  Clone ID: PAT_MRT4530_74615C.1
aaaaaaattagcaaccagggggtgcaacccttacctttttttttaaaaaaaaaacttaaggggcccaaccaaaaaatttttacagtaattaggaggcctttgacggggacccttgacacaaaaaaaaaaaattagggtttggcgggggaacttccaccggttccatggacttttttagacgaaaacgaagagaaaatttccaaacccctttttcttttgggcccctaaaagctgggaaaattggggacggcttttggccccttggaaacggttttttttggaagtttcccggggaggacaaggcggacggaggttttgattttcctggaggggaggggg

SEQ ID NO: 74429 - DNA, 1934 bp, Oryza sativa
  Clone ID: PAT_MRT4530_74616C.1
atgcagtgcgacggcggcgcctacatgcggtgtgccgacgcccaccgttgtaaatccgctccaattgactctaccaacccacccgtgctctctcctgccgtgctcgtcgacagcaatcagaactcggaagccgaccgggaagtcgccgcgccgccatcgtgctcgccgccggtcgccgtctcggaggaggtaaagatcccgccgccgccctccctcccctccgcgtggtcggcgccgtgctccactaccccggccggcgcagatgatattgtgcacttcttctctccatatggaacagtagttgaccatcagatcactcagaaggatgaaaataaactttctgaaggatcaggcttctggtgtgccaagacaaggcatgattctctagcgcaggtgctaaaggaaggtggtgttctgcttattacgtatgatctggtgaggttgtataatgaagaactaaacggcatgagcagtaaaagctcaaagatgagaagagcttgtccttcatgggactatgtgattcttgatgagggtcacgtgctgaagaacccaaatacgaaaaatgctgctgcgctgaaaagcttatctcgtgggcaaacagttgtcctcacaggaacaccggagttccgcaaaatggtgcgaccttattttcttaggcgcaccaaggaaagtattgaaagccttttacctaataaagctgatcttgtcatctggctgaagctaacgccatatcaggtttgtattgctgtagaagctggcgatgatgtagaatttgtgccagtagaaattgggggcaccacccgccagtctcgcgctggcgcgctgccgcgtgcggggagagggaaaaaaatcggcgactcgcccagtcctccaccaccctcgccgaacgcctgcacttcagcctcggaccccgactccgctcgcctctgcctcggcccccgcctccgcgggttcgcgtcgtccttcgcctgccacttccccgcacaagcccgatcgcagctcttctcccgcatgggctccgccacgtctttcgttccggcgtcgtcaccgcgccgccggccgaggacgaggacttcgccacagctgctgacctccagttcgagccgccgctcaaggtagtgaagtaccccgacccaatcctacgggctcgcaacaagcgcatcaataccttcgatgacaacctccgcagcctcactgatgagatgttcgacgttatgtacaagactgatggaattggtctctctgcaccacaagttggggtgaatgtacagcttatggtatttaatccagctggtgtgaagggagaaggagaggagattgtccttgtcaacccggttgtatacaaaatgtcgaagagattgttagtgtatgaggaaggctgcttatcattccctgggatatatgccaatgtggtgagaccagacaatgtcaaaattgatgctcaggatgttacaggggcaaagattaaagttaaattgtcaggtctgtctgcaagagttttccaacatgaatttgatcatttacaggggattcttttctttgacaggatgtctcttgatgttcttgagagcgtgcgtgagggactgaaggacctagagaagaaatatgaggaaagtacagggctagtaagccctgaaagtattgagaactacaaaggaagaaaggatctcattagtttctcaagatgaatagctttcggttctggcagtttttcaaaacatcctgctgagcttcacattgaagattgtgtattagaacagttgccagtatcacatattcttctgtcattctactttttgccagtcttgctgtatctagttttgtgcaacaccagtgatattacaaccagaaattatgctagtgatgaatgagctgtatttcctaagaaggaatatgtgaacaatattagtgtttgcaaaaaaatgattttttag

SEQ ID NO: 74430 - DNA, 924 bp, Oryza sativa
  Clone ID: PAT_MRT4530_74617C.1
atggccgcgcgccttcacctccgcctcggcccccgcctccgcgggttcgcgtcctccttcgcccccctcctcgccgcgcaccccagagcgctgcccctctcccgcatgggctcggtggcgcctctcgcggcggcacgcgcccgccgcggcttcggttccgccgtcgccaccgcgccgccggccgaggacgaggacttcgccacagctgctgacctccagttcgagccgccgctcaaggtcgtgaagtaccccgacccaatcctacgggctcgcaacaagcgcatcaacaccttcgatgacaacctccgcagcctcactgatgagatgttcgacgttatgtacaacgcttcagattcaatatgtgttactttgttaaataaccaaattaagaaaggcttgctatctactattgctcgagaagatattcctccaattgaaccattggtttcttgctacaggactgatggaattggtctctctgcaccacaagttggggtgaatgtacagcttatggtatttaatccagctggtgtgaagggagaaggagaggagattgtccttgtcaacccggttgtatacaaaatgtcgaagagattgttagtgtatgaggaaggctgcttatcattccctgggatatatgccaatgtggtgagaccagacaatgtcaaaattgatgctcaggatgttacaggggcaaagattaaagttaaattgtcaggtctgtctgcaagagttttccaacatgaatttgatcatttacaggggattcttttctttgacaggatgtctcttgatgttcttgagagcgtgcgtgagggactgaaggacctagagaagaaatatgaggaaagtacagggctagtaagccctgaaagtattgagaactacaaaggaagaaaggatctcattagtttctcaagatga

SEQ ID NO: 74431 - DNA, 681 bp, Oryza sativa
  Clone ID: PAT_MRT4530_74618C.1
atggacaaagtcctccatatcgacatcaaatatcgtacccaaatccagaggcccggccaccagctccaaatctgctccagacaaagagaaatgtgggagcggaggggcaggccacacgcgcgggaggcggggagaggaaggatttggatctccgcgaacggggaggaggcagcaacaatggtggacgcctggtcggagaagatgcagggaagcggaggagcaggccacgcgcgcgggaggcggggagaggaaggatttgggaggaagccgagcacgggaagaagaagagaaaaaacatttgggctggccagatactcatacccgcccacggctagcgtcatcagtggacggcgcagcagcactccaacatccagcgccacgcactaccactcctcctccgctcccaccatcgcctccgtggaggcgggccctcttggacgccttccagaagcttctggagcccacgccactgatctgatcggagcagcgctgctgtcgcgtgccattgccgatgaggcgaaagcgaagggtaatgtggccttctctgcaaaatggagcatagactgcagcaaagcaaggccaagtagtgccacgaccacgacgggcagtgaggatggagctacaacaggcaagccgcggactcacatggctgcgatgggcggcgatgccgtggcgaagtag

SEQ ID NO: 74432 - DNA, 459 bp, Oryza sativa
  Clone ID: PAT_MRT4530_74619C.1
ttttggtttaagatgcacggacccggacctgtggactttttcgaccctgcgacgcgagtagtgaaagaccacaatcgacacgacgccctcaaggacggctactccgacgaactaaccccgctcggagcatgcctccggcgagcctccgtcctggacctagcttttgtcggcggcggcaccagcaagggctggcggcctaggaggggagagggggcgattcatacggttaaggactccactcgacgatgacctgagcggcgcctcaaagagagtccgttgtgccggcagtgaggtctgtacctgggggacgggtaaggcatgcacgtctgatgcgaccatgaggtgctcaggatgcgctggtggctgcatgataagcaccagtcagcggctgggtgcttgcatgacacctgagatgcagaaggctcgcaatgagcggactgcgactgatgagagcaacct

SEQ ID NO: 74433 - DNA, 299 bp, Oryza sativa
  Clone ID: PAT_MRT4530_7461C.1
ctggtagcgcaaccaatctcacttaccaggccattagtacgttcaggcgaatgtgcagcaactacagctgcaacaggtccggtgtttgtctactttgattcagactcaagctcaagctcaagcctttgctggccttaaacttgccatcccataatgtggtatcctatccctaactactacattgctccgaggaaacattcccaccgttgggtggtgtcttggttactgaattggtaattattataatgggttcaaatgttaaaaataaagtccatgccatcatccatgcgtgtacagtt

SEQ ID NO: 74434 - DNA, 219 bp, Oryza sativa
  Clone ID: PAT_MRT4530_74620C.1
tcaaagctggcctccaaatctatagctctccttctccttcttcttcttcttcttcttcatggagtctgcagctggctgtcgaggccgatggagttgtgctgcctcgacgggccggacggagggatgggccctctcggcaagaacccgaggaaatggttggaagctcccctctccaatggcctggccttgaaggtctgcatgcccctcgaagccttgcat

SEQ ID NO: 74435 - DNA, 162 bp, Oryza sativa
  Clone ID: PAT_MRT4530_74621C.1
atggcgtcgtacgtcgatcgtcgcaagaacaagaaagcaagtgcaatgtggtgtggtgagaaagtggatgcagacacggagagcgcgacaaggttcaaaaacgatgaaagaaaggataatacatttatctccacaaagattcgtgatggagagaccaagtaa

SEQ ID NO: 74436 - DNA, 889 bp, Oryza sativa
  Clone ID: PAT_MRT4530_74622C.1
gcaaagtatgtgtgtgattacattcttgaaggccaacttgatggtccagctcaacaaaagagaagttccttaagatatgctgtctctccaggatttgaccctgatattgacttggagagagtaggcgttgtgaatcaaacaacaatgcttaaaggagaaactaaagaaattggaatactcattgagcagacaatgatgagtaagtatggtcttgatcagaacaacaagcaagaacatttcgtcagagtcggcaccatttgcaatgctactcaggaaaggcaggatgcgatgtacaaattggtagagaaggaagttgacctcatacttgtcgtcggaggatggaactccagtaacacctcccatttgcaagaaattggagaactcagtggcattccttcctactgggtcgatggtgagcagaggattgggccagggaacaagatcagctacaaacaaaagaatggtgaacttgttgagaaagacaaatggttaccccatggagcaatcacaattggagtcacctctggagcctctactccagacaaggtcgttgaggatgtgctgcagaaggtgtttgagataaagcgtcaggagcttggtgaagcgacagagcaatagatgagatcatgagacacctgttgctggcgcacagagatgagcaagcacaaggagacatgagatgctagtatggtcagataaagatacagaagaaataagatcggctgattgagaatttgagacttgagttcatagcatgaactatttgtgcatatttggtgatctgggaaggcatactgataactttgagttgcacccttgcagggcgaatgtaaaatactactccctccctcttataatatactacctccgtcccaaaaaaaaaaaaaaa

SEQ ID NO: 74437 - DNA, 1287 bp, Oryza sativa
  Clone ID: PAT_MRT4530_74623C.1
atggccggcgaccactcttctccatttccgccgccgtcgtcgactcgtcgtcgccggccgcaagagagagatgaagagaggggagaaggagaaagaggaagcagaagaggagggggaagacacctacacggctacacgactacacctactgaagaagaacaggagcgagaaaaatcaccaatggctcatgcaagaagcacaggatctctgccggtggcaaatgttcaggcactcgcagagacctgcaacgatccagatcagcagatacctgagaggtacatcagagcagacgccaacgccgacgaggtcatcagcggcgacgactgcacggccgcaattcctaccgtcgatctcagcaagttgctcgatccattgtcgtcagacgaggagactgaaaagctggggtctgcctgtcagcaatggggattctttcagctgatcaaccatggcgtgtcagaggatgtgatccgcgacgcgaggaaagacatagccgagttcttcaggctgccaatggagaccaagaaggcgtactcgcagctgcccagtggcatcgagggatatggccaggcgttcgtggtgtcgcacgagcagaagctggactgggctgacatgttctacctcgttctccgccccggcgagtccaggaacatggccctctggcctgctcatcctccatccttcaggaattcgatagatcggtactcgtcggagacggcgagggtggcgagatgcctgttggagttcatggcgaaggacatgggcgtgaggccggggtcgctgctggagaggttccaggaccagccgcagggcatcaggatgaacgactacccgccgtgccgggaggccggcaaggtggtcggcctgtcgccgcacaccgacgccgcctgcctgacgctgctcctgcaggtgaacgacgtgccgggcctgcagatcaggagccccggcggcaggtggctcgccgtcggcgcccctccggacgacggcgcgttcatcgtcaacgtcggcgacatactcgagatcatgagcaacggcaagtaccggagcgtggagcacagggcggtggtgcggccggacagggagcgcgtgtcggcggcggtgttccaccagccgtgccaggacgcggtggtcgggcctctgccggagctggtcggggaaggcggcggcgataacgcgcggtacacgtcgatgggctacctggatttcatgaagcgttactactcggcaaagctcgacggaaggaatcacctcgacggcttgaggattaaactgtcatcttcgaagggttag

SEQ ID NO: 74438 - DNA, 166 bp, Oryza sativa
  unsure (1)..(166): unsure at all n locations
  Clone ID: PAT_MRT4530_74624C.1
gtcgtcgcccgtcgacgtgcgcgcggacgcttcctgggcgcgctgtgggggctgtcgccgaagtgatggtggtggcggcagaggaggcgagccacaacncngcngnctgacggagaggctttcgtggaggcnctcaactactacngcctgttcgactgcctggagt

SEQ ID NO: 74439 - DNA, 265 bp, Oryza sativa
  unsure (1)..(265): unsure at all n locations
  Clone ID: PAT_MRT4530_74625C.1
ttttttttttttttttatgcaattttttantgctattattaaggggtttttttgtacatccatacataacatttataggaggaaaaaattttggacatgccaaatttggaccaaaaaaaacaattttctttttattgagaaaacttttaaaaattactggaaacaaaaaaaaaaacattgttaatgacgccccccaggtgtaaacaacctttttattaaaagaaaaataagtgaggaacttaatcccctctcaagatattggggg

SEQ ID NO: 74440 - DNA, 417 bp, Oryza sativa
  Clone ID: PAT_MRT4530_74626C.1
atggaattggagtcggagcagcacgggatcagggcgccgtgctgcggcgaggtgttcggctgcaggcattgccacaacgaggccaagaattcgctcgagatccatctcaatgaccgtcacgagatcccccgccacgaaatcaagaaggtctcaaagaaccacttcgcttgcccggtgtgctcacggtcggcctgcgacatgtcggacgcgtggaagaagctcgacgaggaggtggccgcgacgccgatgccggagttctaccagaagaagatgatatggatcctctgcaacgactgcggcgcgacgtcgaacgtgaacttccacgtcctggcgcagaagtgccccggatgcagctcctacaacacccgggagaccagaggctgcggccgccctgcagccgcgcgctccacggtttga

SEQ ID NO: 74441 - DNA, 491 bp, Oryza sativa
  Clone ID: PAT_MRT4530_74627C.1
tgtggagatcggtgaccttttctgtgaacctttcccaggaacctcgtggttaatgccttcggatttccctctaaactatggtgaatttactcagagtagcccagagagctatggaaacatgctgcagaataaggttgtcggtgacaatacagatcagtctctggctggttctaggcctccctacgtgttcctctaccttgatggtaactatgaattccatgacaagcttttcttctgcgaagacgaccaacagttcctgcaagatgtgccgtggttgatcatgagaaccgacatgtactttataccatcactatttcttattccaagttaccaagatgagctcagcaggctatttcctgagaaagatgctgtttttcatcacttggcacgctatcttttccatccgacgaatagcatatggtattcagttaaagggtactacaggtcctaccttgccaaagctaataaaactgtgggaattcagatcagga

SEQ ID NO: 74442 - DNA, 1352 bp, Oryza sativa
  Clone ID: PAT_MRT4530_74628C.1
cccgccgttgccaaccacccccttcccctcccccctcgccctcgccgccggcggccgtctcgtcgtcggtgagacctagagagccaaacagcgcgttggttgttgagctcggagagggagagagagagagagagaggatggaattggagtcggagcagcacggctgcgagcattacacgaggggatgcaggatcagggcgccgtgctgcggcgaggtgttcggctgcaggcattgccacaacgaggccaagaattcgctcgagatccatctcaatgaccgtcacgagatcccccgccacgaaatcaagaaggttatctgctctctctgcgacaaagaacaggatgtacaacagtactgttctggttgtggggcatgcatggggaaatacttctgcgaaaaatgcaacttctttgatgatgatgtctcaaagaaccagtatcactgcgatggatgcggcatatgcagaactggtggtgtggataagttctttcactgcgacaaatgcgggtgttgctacagtaatgtcttgagggattctcatcactgtgtagaaggagcaatgcatcacaactgtcctgtctgcttcgagtacctatttgactcgacgaaggacatcagcgtcttgcactgcgggcacacgatccatctggaatgcctgaacgtgatgagagcgcatcatcacttcgcttgcccggtgtgctcacggtcggcctgcgacatgtcggacgcgtggaagaagctcgacgaggaggtggccgcgacgccgatgccggagttctaccagaagaagatgatatggatcctctgcaacgactgcggcgcgacgtcgaacgtgaacttccacgtcctggcgcagaagtgccccggatgcagctcctacaacacccgggagaccagaggctgcggccgccctgcagccgcgcgctccacggtttgatttcagcagcaggagcagcagcagcagagacgagttggcatccatctcacaaactaaggatgaaatcgagagcgacaaacaagatgcagagacggcttcctctgaacttagccgtcgagcaaaagctgcaaaatcgatcggcgtcgagtttggtagacacactttgcgccaagaggagtatggtgattttggcgcagtatgcagcgagttgaatagcccatatatgttgtgttttctctctctctcttttttgtgaggatatatgttatgttttgaaactccaactattattattactaaatgatactcctaataaaagagagacaaaaaaaaaaaaaaaaaaaaaaaaaaaaaaaacaaaaaacaaaaaaaaaaaagaaaaaaaaaaaaaaaaaaaaaaaaacctcgaggggg

SEQ ID NO: 74443 - DNA, 239 bp, Oryza sativa
  Clone ID: PAT_MRT4530_74629C.1
tcgtttagatcaaaaaggtcagtgaataaatgggggaaatcatgatgatggaagagtgattagaaaatccacaggctataagatcaatctgctacagactcttcgaaaagatgaggcaaactatgctatctgccgaagcacatacaacgtattcaactacaatggagtaaactagagactggtcacaacgagatagatatggtagagcgtaaaccgactagtcgagggtgcacctaaaa

SEQ ID NO: 74444 - DNA, 1537 bp, Oryza sativa
  Clone ID: PAT_MRT4530_7462C.1
gcacgaggccgcctctccccccctaaaaatcccaaatcacccgtcaccggcggccacgaccgcacccggcgagcaaggtgtacatgttccggccattgatcttggctgcgtgaaactgagatgctcagcacgagcacaccagccgctggccgccgggcgatatgcaggatctgggatgggaggcacaagctccggcagcgcccggtgttggatccaaccaaacagcgggcgaagcgccgccgaagctgtcatggctgaaaccaagataatccatgcaaccaagcaagcagaagttgccgtgacgaaattcatcgaatcagacatcagaaatgagcaaacatcacaacgcaatattgccggtaacagtgttaaaacgtcatcctccaacaccatcgaagctcccgggcatgtggttgtcactaattcgtccgatgctggacaggacactatggttaacaataatgttgccggtaactatgttttactgccattatccaacagaactgaagctcccaggcatgtgattgtcaccatttcgctcgatgctggccagaacacagtggttgacgacaatggtgttagacagggattaacagacgaggaatccgatactaaaacgaagctgttggaaagaggtgttctgactgctgcctctgctactgcagcaatgctctctcctttcctgagaggagtgttcaatcaccaccaagaagatccgccactggccaaggtggttgtccttcttgccctagttccacaggtgattcagatggcctccttggttcttcccgacgtatctgtgtgttgtgtctcgccggacgaggcggctctgagcatcctgcattcgcttaagctctccgaggagagcttcaagagggtcttggagggcagcggcggtgaagatttcttggaaaccttggcgccgtcggcgaaggcggtcaaggtggcgctccacgtgctctgccggctttgcccttggagccgaaaccgcgtcaaggcggtcgacgtcggcgccgtgtcggcgctcgtgcacctcctcctcaacgagggctgcggcggcgacaggcgcgcctgcgagctcgccgtcatggctatcgaccacatctgcggttgcgcggaggggcacttggcactggtggcgcacccgacggggctcgcggcggtggcgtgcgcggcgacgcggctgtccaccgcgggcaccgagagcgctatgcgcgcgctgcacgtcgtggcgacgcacacggcgacgtcggcggtgctgcaggagatgctggccgtcggcgtgggggcgaggctgttcttcctggtgcaagtcggcgcctccggcaagcggacgagggcgaggtggaccacgagacggtccaggagctgccgtcgccggccgcaccatccttcggccgcgcgcgccgccgtgggtgccctagcgctggtatccccatgccctgcgagtgtgagagcagagagcgaggaaggaaggagagaaacagagaaagaaaaagggaaaagagatagggtgaggtggacacctgacatgtag

SEQ ID NO: 74445 - DNA, 360 bp, Oryza sativa
  Clone ID: PAT_MRT4530_74630C.1
atggagaaaagaatgcatttctatggattagagtacagcagagaacgctatagagatcacaggagttgacgacgacagcaacatgatgcaaacaattacccgctagcatatatataggccgacgagacgacgcaccgatggatcagggtatcctccctgactggtcctgcggaaacaggcccggggatgaacgggaacgcccaactttgggagcccacgttgtccctggatgaacctttcgacggggtacttctgctgcgcctgctggtacgggacccgtttgaccccttttcacttggggcgcttgctcatggcggcgccgtcgcccggggttttcaacctgggggaaaaaccaggggt

SEQ ID NO: 74446 - DNA, 165 bp, Oryza sativa
  Clone ID: PAT_MRT4530_74631C.1
ctgcaggaattcggcacgaggccaagcttttgttgggcagatattcgtagatcagtatcttctgttcctcatgaacacagcaaccgagcaacctaacaaggtttttgtgctgaagttttgctacaagctggatctcattcttgaactccactagaccttgtcttg

SEQ ID NO: 74447 - DNA, 264 bp, Oryza sativa
  unsure (1)..(264): unsure at all n locations
  Clone ID: PAT_MRT4530_74632C.1
aaaggattcagcccgccgcccgttgggaagggnnnttcgagggggncggccgcggcgcgtcggccgggccggcttggccgtggcacgggnccttgggggcttgnncccctaacgtgggtcggggannacngcgggcgcaggcnncgctatgctagcttngnttctaacttanaggcgttcagtcataatccggcacacggtagctttcgcgccactggcttttnaaccaagcgcgatgaccaattgtttgaatcaacggttact

SEQ ID NO: 74448 - DNA, 426 bp, Oryza sativa
  Clone ID: PAT_MRT4530_74633C.1
gtcgcagcatttcaagctctcctaacctcagataaatgatagccattagaaccctagaaggatcattatcattatcctgaaataattccggtgaaattcctgtgttcccaaatagcagagcaagatttaatttcttgttaattattttttagaaggaaaggagcattgcgagtttttggcgccaagaagcaagaaaggtcatggacagcagcaagcagcagctcgccgtttggccggtgtccgccgccaagaagtacgccggcttcgacggcaaggcggcggcgagggagcggtcgggcctcgcgaacgcgtcgttccgggtgtactacagcctccgcgccggcgccgtgccgttcctgtgggagtcgtcgccgggaacgcccaaggcgggccccgtctcgtcgccggcgagggagtcatcattcg

SEQ ID NO: 74449 - DNA, 363 bp, Oryza sativa
  Clone ID: PAT_MRT4530_74634C.1
atggtgaataaaatagttccaaagttagcaccattggggatgacgggggtggggacggtgcaccaggggtctcttagagtcgactgcaggcagcaagttggcacgggacggggtaaccacggggcaaaagttcaccgcgtggtgatcagggctgttgaaaatatagcgccgtcgtggttgacgggggcagggacggtgaaattttatcaccacggtgacggggacgcggagatgacccccgacggtgaattaactgttgccatctctaatataaaggcagtggtgcatttctcctttggagccataaagagaaaaatatttgattgtgtgaaacggcacaaatggcatctctcctatatataa

SEQ ID NO: 74450 - DNA, 238 bp, Oryza sativa
  Clone ID: PAT_MRT4530_74635C.1
gtgtggttaagaagggcgggcgctctaatcaaagtaccgaggaaggcgagagaagaagtcgccgtatgcacaggacacaccacaacacttagaccttaagagcactggtaagaccaggcacatggcacaagaagcgacatggattgtcataaggggctagaaagcgctgtgtgagatcgaaagggaaagaggcacacacacggacacagagatcctggaaattgtgcctggacgagcc

SEQ ID NO: 74451 - DNA, 159 bp, Oryza sativa
  Clone ID: PAT_MRT4530_74636C.1
aataattatttttttatcattcttattactgattggaaccatcatatttaacaatccattcaaggaatcgaaaaaaaaacgaatgtcggaacattgtccattttgttttctttaccggcgctaaattagtccccggatacctcagctcacgatcattac

SEQ ID NO: 74452 - DNA, 3880 bp, Oryza sativa
  Clone ID: PAT_MRT4530_74637C.1
ttttttttttttttttttttattcttaatttctggtttggtagagttgtatttatactgtgaaacagatggaatcaagtacaaacgagtaggaggtgataggagacgtctagtgctatctctgtaacacaactattcagtactatctctgtaacacgactattcagtagcatcttgatgagtaatacaatcctgctgtttagtactttaacacttctgcttcttctgtaaagatgaagcataagtaggcccatatgacagaactgcctcaactggttgccactcattctccgttcaataggaaatgtcatcactcatccctaaatattcataaatattcttatggatggatacaaaagctaatagagtaatagccaccattttctttcctatttttctttttatttccctatatggatagagcgcatgcgcaagatggatcataactttttttcttgtattcagcagtgtagcaatgctagtcaataaagctaatttcacctttgaacgggaatggggaagcaatgaagtacagaattacaggagaaggtggcagctgaggagagaatcaggagctgtcacaactcacaaagctatatacaagttcagaagctgaacgagaagagagcatatgcttccctcctacaggaagcattatgacttgttggtgctgttttacaaatctgggtgattatcggaagatcgtcatgcggtagcagctgcagcttcttctgcgacttgggatccctgttgcagagtgcagatgaggttgcgatccccgtacacattgtccacgcgacatgttgttggccagaacttggcgccccgaagccacgctgcagggaacgcagcatactccctggagtacggcttagtccatgagtcgctcatcagaagttggggcgggtgaggagcactcttgaggacgttgttgttcacatctgctttgccactttctatctctgcaatttcttccctgattgagattagagcatcacagaacctatctagttcggccttgctttcactttcagttggttcaatcataagtgtgcctggaacaggccatgacatagtaggtgcatggaatccatagtccatcaaacgctttgcaacatcctctggctctataccagcagtcgtcttaaatcctcttaaatcaataatgaactcatgggcaacagttccattgactccacggaaaagaactgggtagtgtttctccagacgctttgtcatgtagtttgcattcaagattgcaatctttgaagcatcagtgagacccttagaacccatcatggctatgtatgtgtaggaaattggtagaatcaacgctgatccccatggggcagcagaaatggtaccaagagggtcggttttctcagggagagggaagccaccggtggtgatcactggatgagatggtaaaaatggtgctaagtgcttcttaacaccaataggacccattccaggaccacccccaccatgtggaatgcagaatgtcttgtgaaggttaaggtggcaaacatctgctccaataaagccagggcttgtcaatccgacctgagcattcatgttagctccatccatgtagacctgcccaccgttctcatgaattatcatgcatatctcatcaatgccttcttcatagactccatgggtcgaaggataggtaaccataagagcagccaagttgtccttgtttgcttcagcagctttcctcaactcctcgatgttaatgttacctttggaatcagttccaacagcaacgatcttcattccacacatagcagcacttgcaggatttgtaccatgggctgacacaggaatgatacagacgtcccggtggtagtctcctcttgccctgtggtaagcacggataaccatcaatccggcatactcccctgatgcaccagcatttggttgcaaagagaaagaatcaaagccagtgatcttgcacagcagatcgcccaagtcatcaaacatttcatgatatcctgcggcttgttcagtaggtgcaaatgggtgcatgtttgcaaagctggggtaggtgacgggcatcatctccactgtagcatttagtttcatagtgcaagaaccaagagggatcatactgtggcacagtgaaagatccttggattgcaacttgtgcaggtatcggagaagctcgtgctctgtatggtacatgttaaagatcgggtgtgttaagtaggggctcttgcgcacaaggctactcggaattgagcttgacacctctgatgcgagggattcagcagtgaagttcactggcttgccaccattgaacaccttgaacagcttgtcgacatcctccaaggttgtggtctcatcaaaggccacggttatcgtggttgcatcaacaacacgaaggttcatctcgttcttgcaggcctcctgggcaatcgcattcgcatcagcgaccttgaccttgacagtgtcaaagaacggcagttcctgcacagtcactgttccgagcttcttcagtccatgggcaaaggtaccagccaggccgtgtacacggtcggcaattgcctttagcccctcgggaccatggtagacagcatacatcgctgccatgttggcgagcaaggcctgggcagtgcagatgttgctggtggccttgtcgcggcggatgtgctgctcccgggtctgcatcgccatccggagcgcgggcttgccgctggaatcgacgctcacgccgatgatacggccgggcatgaggcgcttgtactcctgggaagtggcgaggaacgcggcgtgcgggcctccgtaccccatgggcacgccgaaccgctgcgcggagccgacggcgatgtcggcgccgatctcaccgggcgggcgcagcgaggtgagcgcgagcaggtcggtggccatgaccaccttgacgccgtgcgcgtgcgcgtccttgacgaactccgcgtagtccagcacctccccctccgtgccggggtactgcacgagcactccgcacacatcaccgctgctgtagtcgaagtccttggcgtccgcgacgatgacgttgaggtcgaacccagcggcgcgcgtctggcagacgtcgatggtctgcgggtggcagttggaggcgatgaggaaggtcttcttcttggatttcaggatgccgttgcacatggccatggcctcggcggcggcggtggcctcgtcaagcagcgaggccgttggacatggggaggccggtgaggtcggtggccatggtctggtagttgagcagcgactcgaggcggccctgcgcgatctccgcctggtacggcgtgtactgcgtgtaccacgcggggttctccatgaggttgcgcagtatcaccgcggggacgtgggtgttgtagtaccccatcccgatgaaggacttgtaggccttgttcatggccgccaggcgctgcatgtggtcaatcatctgggactcggtaaacccggcgtcgaacttcccggagaagtgcatcgtcggcgcgcggatggcggccgggacggtggcgtcgatgagcgcgtcgagggtgttgaacccgcactccgacgccatcgccgcctgctccgccggcgtggccgagttgtgcctccgcgggaacgtgtcgctcggctgcagcgccgacgccgacacgggccgccgccccgtggtgtactggtggggcgccgggcgcggggcgcgcgggcgcgaccccgccccgggcgccttggccagggtcgagatgccgcgggacggggccggggacgtggtggacgccgccgccgcgaggaggcggcgcagcagggcgcggttggcgaggcggcgtgcgcgctccatcctgagattggaggacgagggtttaggtgagggcctcctccaccctcgtgccgaattcctgcagcccggg

SEQ ID NO: 74453 - DNA, 413 bp, Oryza sativa
  Clone ID: PAT_MRT4530_74638C.1
ggaaacaaaaaaccttgctgatcaattaattcaaattccagtttccacttggaacaaaaaaacaagcagagggtagtccatgaaagtccaaatgcgattggaatccgcaaaccaatgagcagggcccttgatgaatcctgatgctttgaaccccgagaagaaagaaaaaagaaagaaaaaagaaaaatcctttccttgtcaaactttttaatgaaaaaggaactgtgaggcctgggcaacggggtcttcaagccaccggcaaggctcgtccatgaggtcggggctgaccctgaccatgaggacccaaaactccttttcgttgagggcgccgtccccgtcaaagtccccctcggcgagcttcccccggagggcgtggtgggacctcccgccgaggccgaccagcggcgccttgc

SEQ ID NO: 74454 - DNA, 449 bp, Oryza sativa
  Clone ID: PAT_MRT4530_74639C.1
gacacggaaggcaactgtcaaccaatgaatgcaatacccagctgagcatgggggaaattattgatctattccactgatgaaaacccacggacttatactgcaatattaaaacacacatacagatgtactcggtcttcttgaacttaactgttccaccttcgagtatcattgctcaagacacctatgatcaagtgtatgatactggtcacgcaggacgccaataatattgtatgggaaatcatgaacttgatctttatacttttcgcatagcacggacagcttatgagcgctaacaaatacaatgtgaatgacagttaacaaattggaccagcccccattaacatccgcagaccacataacaacgattgccagtacaaagtgctcaaaagtttctttcccaacacacatcctgaataaaactcttgaacttatttacttgggtaccaact

SEQ ID NO: 74455 - DNA, 158 bp, Oryza sativa
  Clone ID: PAT_MRT4530_7463C.1
ccgtccacgcgtccggtgacgcgtggcttagattgctgccatattggttctcggacgatggagtggggccaattctgcaacttaaactccttgagcatgaaacatcttatgccaacttcgtactccttatcactatggctgacacaacggagcgagct

SEQ ID NO: 74456 - DNA, 794 bp, Oryza sativa
  unsure (1)..(794): unsure at all n locations
  Clone ID: PAT_MRT4530_74640C.1
ccggccgggacggcggctcgccgccgatgtcccgaacacttcactagtccaaccaaccgccgcacgccgccccctgatcccctcgtggcctcgttgccgtcgtgcgcggtgcgccacctccacggcgccgctcgccgtcgtcccctcccttcttcccgtcctactctctcggtgtgcgcgctctccgcctccgccttccaagcgggagcaaagctggaaggatggaagagggggaggccaagaagacaggcctggagggcactgggctgtcgctcccgggcagctcacacggcaatctacggagcgccggcagcgaccagcagctgaagcagatgctggactccctcaaatcgtccaaatcacccgctgttatcaactatggtgcctcatggtgccgtgtttgcagtcagattcttccacccttctgcaggttcagcaatgaattcaagaatcttaccttcatttatgctgatattgacgaatgcccagaaacaacacaaaacatccgatacaccccaaccctccatttctaccgggatggagagaaggtcgatgagatgcttggtacaggagaagagaggctgcatgaccggttatggttgcattcttgatagggatttgccgggctgttggtctcatgcacaatattntctctctctcttttatcctactttcgtgctntgttgtcaacctctgagccaattcaagtttatgntggtgtttgtaatggtgatcatggtcatctttagtgacatacaccattatatatcagaattggtggtaccggtttttct

SEQ ID NO: 74457 - DNA, 395 bp, Oryza sativa
  Clone ID: PAT_MRT4530_74641C.1
atggattccgccgccaccgtcgccgccgcccgcctcctcggccctccggtgatccgagccgcgcggccgccgcacgatgccgccgacgccgcctcccaccccttcctccagctactcgacgccaacttcaacccccctcctcctggtcctcccgctgccttcggatcgaagacgaaggcgacgccgcggaaggcccgcaccgagaacgactccgccacctacgccaactctggcaacccctgcctcgacctcttcttccaggtcgtccccgacacgcccgccgaccgcgtccgcggcctcgtcgccgccgcgtgggcgcacgacccgctcaccgcgctcaagctcgtctgcaacctccgcggcgtgcgcggcaccggcaagtccaacaaggaggg

SEQ ID NO: 74458 - DNA, 2411 bp, Oryza sativa
  unsure (1)..(2411): unsure at all n locations
  Clone ID: PAT_MRT4530_74642C.1
gcctttgcggaggcgagaggcggaacacgaggaggccaccagaaaattcctccctcccccagggaggcgaggcgaagcggagctctcctcccaaattccccaaccctccaccgcctccaccgccaccgccatgcgcatccgccgctacgccgcgcgcctcctcgcctcctccaccgccaccgccccctcctccctcccgccgccccccgccgcctccgcggcctggtgccacgccgccgcggacgattgcgccatctgcgacctcacccgctccgcctccccgcaggtggtggcgccggacgcaatcaagcagaaggggcacattgccggccgggcgctggaacccgagctcaggagcgatccgcgcgtcggactagccgaacgaactcctgttccggaagatcaagggcgcgatatagatgacggtcctcccgcgaaaagatctctcacgtttactgatgctgcggcgaggctagaaggttcgggaaatgttggtgctggagttgctactgaaccagcagctagactaggagcccccgttgctaatggagctgttagtgggcaggaggatagagcagcaacttgtcttgcggatgaatctgctgcggagctgattgctaccggggtaacttctctcgttaccggagcaaccgctgaaccagaggttttaaaaggggcttcatttgctaatacaaatgttaccgagccaagagtttcggagagagttcctcttgtgcgtgaagctgcaactgagccagaagctgaagtctctatgcgagaagttacagaaggagctctccctgatggtgaaggtgctgcaaagttggaaattacaggggggctttctcgagaatctgctgacaaaatggaagttacaaagggaatttctcttgttactgaagcttctgctgattcagaacttgcacagagagttcctactgaaccaggagttgaactctctctgccggaagttacagagagagttcctgttgtgactgaagatttcactgagctaggagatacattcagtggcctacatattacagggttcgcttccctggataatgaaggttccgtggaacaagaagtcacaggaagtggttctcttgtaaatgaagctacagagatggaagttaaggaaggaacctgtatcttcaccagagttgccacagagctgggagatactggtagagtttctgcttgtagtggagatggtgacattgctttagatgagccacgacctcctgattgtgtttcggaggttgccaatgtgaatgttggaaatgcaggagaggctgttgcgagcaaagtgcagccttttagagacaatgcagaaagtgttggtggttctattaattcaacaggcaatggccatgttagctccaaaagtccaactgcagatgaagcagcaccacctggtggatgtactgatacacccagtgtttcatgtttatcagacattgtggctagaagcatcggtaagtcagggagaacagatatcatatgttatgttaggcgcaggggtaaaaggaagctggaaatggtggaggtaaaggaagaaaatgttgaaatggatgacagtgctatctgtgatcaatatgatgataaagtggcatcagaaagaactggtccttgcgagagtgtgacgtcaactgctgtatctgtagagattaaaattgctgacataaagagagagcttgaagataattcaactgctagcaagggtaaaaagaagagggccaaaaggtttcaatgtgaaatagattattgccgcatgacattcaagaaccgagctgagctttctgttcataaaaagaacacatgcacggtcaagtcatgcggcagacatttcagatcccacaagtatctgaggcgccaccagagcattcacaatgatgatatgccatacaagtgtccatgggagggttgcagtatggctttcaagtggtcatgggatcggggtgagcatttccaagtccatgctggcaaaagaccttataaatgcacaacacctgggtgcagcaagatatacaagtttgtttcggacttcacccggcataagaggaggtgcaaacctcagaggtaaaagcttgtgtgatactacagatttaggataggagtaaaaatcttgtacttgctactgtagatgttttttttatttatttgctggatgatcggtgttgttctagcgacctatagccggattgcttgttactttgttgagaaaattttacaatctgtagttcggcaaattttnaatgcgtgtttctcnaatatcgttntacattntaaaaatgctgcttcataatatccgagatgtttttccggtgcngtntntntntaaaaaaaaaaaaaaaaaaaaaaaaaaaaaaaaaaaaaaaaaaaaaaaaaaaaaaaaaaaaaaaaaaaaa

SEQ ID NO: 74459 - DNA, 255 bp, Oryza sativa
  Clone ID: PAT_MRT4530_74643C.1
atgccggcggctcctccccacgtcggcaggagcaacatcaccttgcgggaggcaacgaggggacgacgagcgccggcggtggctgatgtggatccagccgtcgaggtttgccggcgttgtgaggatggggacatgcgcgaggagaagctccaccgcggagaggaagagcttgccggcagtgcggaggagaagcttgtcggcatgggggttgctatgtggagggagaaggcgtggcagccaaggaattgtggatga

SEQ ID NO: 74460 - DNA, 465 bp, Oryza sativa
  unsure (1)..(465): unsure at all n locations
  Clone ID: PAT_MRT4530_74644C.1
aacatatgagcacagggctgttaactctgacgctaaccacagctgntttaagcatttgcccagattgactccatctcatacgcgtgacgatggaagtcattgcaaacttctacagacctgataagaccttgcttgacaacctcataaaagggggggcgataacgacagatgttctattacctctgtccctcttttaagctccctctactaacaaatggacccagattattgaacctatgcgatggcctggttagtgaactggtacccaccacctgctggtcttggaagcaattgtgtcgcagctgaatatcagaaggctgcaatgctcattgttgctgtgaaaatttgacatgcggtcaccggctttacgaggaacaactatgccgccgccttatctgatcttagacctggggagcatctgcctaacggtcgcagatggctctactcctacactggagacggcct

SEQ ID NO: 74461 - DNA, 345 bp, Oryza sativa
  Clone ID: PAT_MRT4530_74645C.1
ggggtgtggggtttttttaaattttttttttttttttttttttttttttggaattggaaaggtgtttgaggaacatccatcatacatccatacagggaaagggaaagcaaccactggatataaggatatattcctttaactaacaacccaaccgggggggtcccaaaagcacaccgggggggttccaggtcaccccttgggggtcaaaagagctagggcaacagcacaagggaaacgggctaaattactaaatagatagaatatacgaatacgcaccccaaaatgggctccaggtctcccggcttctttccccttctacaggccaggccaaaccaggccatttca

SEQ ID NO: 74462 - DNA, 329 bp, Oryza sativa
  Clone ID: PAT_MRT4530_74646C.1
ctttttctacccgctccgatggccaccggcggcgagccgcaggtcgtgcggcagctgcggagggcggcgagaagcgggcggcgctgctgagggagatcacggatgaaggcgggttcgcgttcgtggcgtccgcggtgaaagcggccgccgacgtgggacctccgcgcggcggaggccgttcggaatatggcgtgggtgcagttcctcccgtgcccgccgatcgaggtcagtcacacagtttaggacgtctacttcctggcatggctcaacgtggacgacctcctggttcacatcgagttcctgctccgttccaagttggtgccctgtct

SEQ ID NO: 74463 - DNA, 1548 bp, Oryza sativa
  unsure (1)..(1548): unsure at all n locations
  Clone ID: PAT_MRT4530_74647C.1
ggctgcaggattcggcacgaggcaaaaagcggaacgggctaaagccggccgggaacgggcgccgaggtcagacttccacccagacttccagactccagaggcgagggcttcccaatgggcaacatcgcgagcagcggcggcgctagcccacgtccgccgccgccgcatctcgaagcctatagacacggggtgccgcccccgtactaccacagctaccctcgtccgccccccggcgccgccgcgccgccgccggtgccggtgcctgcgcacgtggagcggcacagggccgtggcggtcagcgtcggcgtcaacgtcaagggggacaccctgcggctggtgcccgacgacgacgacgacgatggccgcagcctactcctcgccttctccttcgacgccgatggccccggaagcataactgtctgcttctttgcacaagaagataagtgtgccttgaagaccgcaaaggaaaatttgcttcaacctgtgaccgtgccttttaaggaaggtcgaggtcaggagttcaagcaaccaagtgggtcgggaatcgatgtctctcgttttgaggaatctgagctaactaatgttggggaaggtggtgtattccctgtagcattcaaagtacaaatggatgtgtcaggcaaccaagaatcagaaggggcacatgagaccgaacaatcgaaatatcttgttaaatatgctatatttgtgaagaaagacaatgctgaatatggagttcatgttgtgcagcagatcctttgggtaaatggaatcagatatgtcttgcaggaaatatatggtattgggaacacagctgataagaatgctcatgaggatgattccgggaaagaatgtgtggtttgcctttctgaaccaagagatactgctgttcttccatgcaggcatatgtgcctgtgcagggagtgtgctcaagttttaaaatatcagaccaacaaatgcccaatatgcaggcaacctgttgagggccttcgcgagatagaggttgataacaaaccgattccccaacaaggatctcagcagttaacagcacctcaataaagtctcatctgattgcaagcaaactacctgtacatgtgtcatgtgtatataaaaggtctgtgctttcgggaaggggaaatcggaagttacctggtagcaacaaagctgtttctgatattttgttaaaggatgaacctactgggatttaattgtctacgtttggaccgccaaactcgacttattacttggaaaagacactattttagattgtatggttcaagccttttgcaggggacaatcgttttcttgttctaatttagttactcatccatcactttgatgtgtttaagaccaaaaaaaaaaaaaattctagtggatgcccttattgttctgtgatgtcaccaattggaagtttttcctcctactggcatgtccctgggaagacaagccaggcaacattttggtgctacttttaccatgctttagatcttactattacaagattatgtagatcgacnatcctttttgggttaaaaaaaaaaaaaaaaaaaa

SEQ ID NO: 74464 - DNA, 291 bp, Oryza sativa
  Clone ID: PAT_MRT4530_74648C.1
atggtgacacagacatttatactggttcaggccctcaatgcgagatacaggataggtttccctggctgctatccctttccatgtattacaaataaccgcatgggcctaggcaacttggcctaccccctgcgctgtagccgaaggcctcctataggacacccgggtagcatgtcccccacaagctgtctagaagaagccgccaccctccacaggccgcagttgcctcagctcccttcatgcgccgtgcaggagttttacaagagagcagcagccgccgagggacgacggtga

SEQ ID NO: 74465 - DNA, 504 bp, Oryza sativa
  Clone ID: PAT_MRT4530_74649C.1
atggcggcacagtatgaggtgagtgacgcattaggcgcgctcggcgtcgccgccatctccacggccaccactttggccaccgcagcgttccagccgccgccggcgccgggcggcctccgcaccaccaccacctacaaccacctcgccgtcgccgggctcgcagggaccttccttggcggggtggtcctggtcggcgcttcagtctgggtgtccgacaacccagctgcccgccgtggcaccggcaagaagctcctctacgccgccgtcccgatgctcctcgccgcggtcgttctatcggtggcggcgctgctctggtggggaagctctcccccccgggtgaattttcaaaaaaattatgagttcatatctcccaatttgaagtatggtgattcaaaggggagctatgcagtactagtttttggcttaattacatttagggaagagtggatttggagtactccatgcatatcggcgccgctcgccgtcgccgccgacgctgaatag

SEQ ID NO: 74466 - DNA, 136 bp, Oryza sativa
  Clone ID: PAT_MRT4530_7464C.1
agtaggtcccgtgagtaccctcaaacccccattatctcaccccgtggtgtcctgtctccccctgccaaccgcgtgtgatcagttgttgccccccccagtgattgtttacctgtctggaaaaaaagtagctgtgttt

SEQ ID NO: 74467 - DNA, 509 bp, Oryza sativa
  Clone ID: PAT_MRT4530_74650C.1
tcgattgcttcttgtcatctgcatcaattgttctcttatgtcttttgctagtatcctaagtcatttgctagtatatcaatgtcatctacaaatcaatttcctatgtttcctatcaagtccatcaaagtccatcggttcgtcgaagtcatgcttgtcaatcattatcactatctcgctcgctccatgtcgaagttagccttctatcatcaccagaagctccacgtcggagctgatctttgtcatatcaccagctccccatcggagttgacatcatcatcaatcattgaagggccgaagaacagtttgtgaaggtccttcatctcgtcatcatcaccgtctctgaatcagtgaagagccaaagaacagtttgtgaaggcttttggtactaagggctgaagaacagtttgtgaaggctcgaggtctacttcattgaggataggatggtttctcttttttaattcattcaagagcaatgcttcgacacatcttaaacatggactttgatttat

SEQ ID NO: 74468 - DNA, 1545 bp, Oryza sativa
  Clone ID: PAT_MRT4530_74651C.1
gatccccgggctgcaggctctcttgccgttgctgttcgatactgttgttgtcctctcgtggccattattagatggcctcctgctgctgaaatgtgagtgagagctttgctttgcttgcttgctggctggctggctggctagctgggggttggcttcccctcatcctcgtgcatcatccactgtgctcggctcagctgtctgccctgttcttgctttggtggttggacggttagcatcttcctcctcaagctgagatccttcttgacgccattggaggggtcgctgtcgcctgcgtccttgagcctccctgcttttctttttctctctctctctcctcggcgagggagacgacgacgacggtggcggcggcgatgctgagcttcaagcagagccacgaggggttcggccatgtcgccgccgctggagctggaccgcagcagcagcagcagccgtggtgggcggggtcgcagctgctgtacggggaggcgtcgccggaggaggcggcgctgcgcgacggcggccagttccaggtcgtgcccggaggccgcgccgcgctggatccggcggcgccggagccggagaagacggcggtgccggcgatgcccaagagaggaggaggaggaggggctcctgaggtgctgaaattctcggtgttttcaggtaatttggagccgggagatacaggagagaagaacagagagcactctgccactattgcaatgcaatcgccgttgccagaatacaacggccatttcgagcttggtcttggtcaatccatggtctctcccaattatccttgtattgaccaatgctatggtcttatgaccacctacgcgatgaaatcaatgagtggcgggcgaatgctactgccgctgaacgcgccagccgatgcgccgatctatgtcaacgcgaagcagtacgaaggcatcctccgccgtcgccgtgcccgcgccaaggcccagagggagaacaggctggtcaaaggcaggaagccctacctccacgagtcgcgccaccgccacgccatgcgccgggccagaggctccggcggccgcttcctcaacaccaagaaagaagccaccgccgccggatgcggcggcagcagcaagacgcccctcgcgtccctcgtcagccccgccgacgtagcccatcgtccaggctccggcggccgcgcgtccagcctctccggctccgacgtgtcgtcgccgggaggcgtcatgtacgaccaccaccgccacgacgacgccgacgcggcggaccactacaacagcatcgaccaccacctccgcacgccgttcttcaccccgctcccgatcatcatggacagcggcggcggcggcggcgaccacgcctcacactccgccgccgccgtcgccgcccccttcaggtgggcgacggcggccggcgacggctgctgcgagctcctcaaggcgtgacagccttgaggcggggatctccaggcgtgcccagagctgctgctgatcgatcaccatcagctttggctggctgtaggcaaatcattcttggctctttacttgcattggg

SEQ ID NO: 74469 - DNA, 205 bp, Oryza sativa
  Clone ID: PAT_MRT4530_74652C.1
atgagtaccaactttacattatgttcttgttatactgaatatacggctagattatctgggagatgctttggtgctggtatagtgtttacttatgcaattactctatgtcatgacgatgatattagaatagtatctggtagtttagacgtgttttctagattacgagatatcattatttgaggttatattaatatacttcccgcgg

SEQ ID NO: 74470 - DNA, 465 bp, Oryza sativa
  Clone ID: PAT_MRT4530_74653C.1
atgcttcattggcggctagagatatcagcaaagtacggtggacaaggctcttgcggaaaagatggtcatggtctcatggagaagatgtgcctcgagctggatgtgtatacggtatacatacaatatggtagggcagataggatgcatgaggctgagaacctattgcatatcatgattgagaatggtgtcagaccaaacaatgtaaggtgcactacgttgatcagcatccgttgcaatgaaggtggcatggtcgaggcaagaaggctgtttcaagagatggcaggaaatggagcaaaatcaagtctggtaacctacaatgttatgattgatggtacatcaagaaggggagcacatgcgaggctgaaaggttcagaaaggagatggagaagatcttatgcagcggtagttcattggcagtgtgtcagtgggaagatggatgtgccactggggctttttgaactttga

SEQ ID NO: 74471 - DNA, 333 bp, Oryza sativa
  Clone ID: PAT_MRT4530_74654C.1
cagcggaagtaattaagcgctaagaaggcgaggaacccgcgtgatgtagtgcgcatcgatgtagaggaagtagtcgatcacaccggctcgaccttctccccctcgtgcgttgtcctcgccgtgctcccacgccgattagcaccgcaaagcagcggggcctctaccggtatccacaaaggaacaccacgcgcccatatgagtcctactcggatccctatccgatgttcatatacactcggttgcaacctgaaaactccttttcggtccacgtgtcaacagcggaccctagcagaacgtattgacccaccgagcatacataaagatcatatcggt

SEQ ID NO: 74472 - DNA, 300 bp, Oryza sativa
  Clone ID: PAT_MRT4530_74655C.1
gggccgaagctgaagccgagtcatgaagagtcaaagctgggattcagcctgccagagcagagggcgaagctcgagtcgaagcgaccacaactcaacttctaccaggccagctgtcacttcattggcaacgaccactgtggcattgactgcttcgacgccacaagtttcggctgcaacaacttcatcgctattgccaatcaatgcctcaagtctctccatactccaaatcactatcgcgcaatcgaccatggcaacatgcacaacttcaatcgaccacatcttccgcattttcacttctga

SEQ ID NO: 74473 - DNA, 470 bp, Oryza sativa
  Clone ID: PAT_MRT4530_74656C.1
tcaaggaagcttgcccgagatatgggacggttggtctgaatctgatgttgttctggcttccactgcttctgagaccacggttattgcttgattgtgtcatactttgccccactggatattatattgtgccaaaatgaatgtttgatgaaagtatatccaagattgctattcatgggtgccaacagaagacacatgctgacatgcatatagtagtatggtaagagattatggataaaagaattccgtattgatggaattgtatccattgtacttggatagattagtgagaacctttgagaagtaaatgtagtggatggcttgcaccagaaaatgctcttgggttgccatttataatgaggagcaacggaatatctttcaagaggctctaattatgcaacatcttgtttacaggtgttccaaaatgcatacctgactcatcgtgttcctggaactaaaaaaaaaaaaaaaaa

SEQ ID NO: 74474 - DNA, 1507 bp, Oryza sativa
  Clone ID: PAT_MRT4530_74657C.1
taaacagatatttcccttcccgttccggccggcctcgccgcaccgcctcttctcccccctcaccgccggcctccgcgccgcctcgctgccgccgcccccgcgtctcctccctcccggccgactagccggcggccatccccgcttcctacctacgcgttgcataccccgatacccgccatcccccaagaagaggcttccatctgatttctgattcgatctgaccccccgtgtggggcggggctggagttgatggagaaggggaagtcggtggtcgcagagctcgcggcgtcgctgagagatgtcgaggtcacgccgcgccggaagccagcgagttcgttaccggcagcttcgttctggtgcaaatcctcaattttgaaaattatgtcgggcaagtacaagattgtagatgacagttggtttctcttgaacatagaatggaaccccatatccatttatttcgattcatgggagatcctagatatatctggctctgatgtatctgatattggtctggctactgtggcaaatatttctaataatctgtgggctatcgatattagtcgctgtgaaagaataactgctgcagctgtttctgaggttatatgccattgcccatccttggagatattgagatgcggaggctgtccaggaagtgaatccaccgcgcgcagatctgtgtatctcttgaaacccaaattgaatactcttgaagaggactcgtgggaagaacttgatacggtagaaattggcgggggtgcagagtccttaagatggctagtttggccaaagatagatgataactcaaaggaaattatatctatggaatgccctcgtattactgtcaacccacagccatcaccttttgaccttcgtggacacaaggtcccagctgaagctctggcaagtgtaccactggatcactccataatcgcagatattgaccccaaaacatgggctgttgctgccgcccctcgaagacccaccgttccaaccaacccaaatgcgccccctgaaataccaatcgccgagaagttcaggctagcctatgtggagagagaagcaaggttggccccaaagagagccaagagagaacgacagcaacgccgtcgcgccgaaagggagtacctgatgaacgacatcaatgccaaatctgtagcgcttgcagcccaagtgagcaaatacctgcgcaagagctagtggcaagccttagttgtgtactcttggttgttgtatgcatcacaattgtctgaatacaagaaaaaaaatcgtgggtttgtgacaaaaaagaataggattgttgcatcccagtgtttcagggtcacgcttggcgtctggagttctggacacagttttgtcatagtagcttatatagcagtgtgcatactttgtactactgatctttcatgtgtggaatcatgtcaacattgaacaaaagcctacaggcaatcaggcattctgtgccttatcaatgatcacctgtcctttaccatcaaaataaaaaaacacc

SEQ ID NO: 74475 - DNA, 354 bp, Oryza sativa
  Clone ID: PAT_MRT4530_74658C.1
ttttttttttttttttaaggcgaattagaaagatcgatcacagcaaaatgggtatacacagaaggccatcataaactgttgctaacgcaacgggggatgcgcaagaatcagtagttctcaacacagaagaagcacaccagtccagcagtagcgcatgaggtgctggatgcatcaactgctcatggcagatgtagccttgcgagcacgttcggttcctgccaaggaaatcctacatatttagctagacacaggtagttaatggcaactagagttctgtccgaatcagccgtgtgcttcggcgtggaatgaatcttgcatgatcgctgagccgcccaaaaattgcatccccgaact

SEQ ID NO: 74476 - DNA, 868 bp, Oryza sativa
  Clone ID: PAT_MRT4530_74659C.1
tatttttgaaaaggaaaaagggatttattgcgtcagcggctagggtttgcggtggaccgggcgcacggcggcggcacacggaaacgaacggccgagattgatccatccaaaacggacggccgagattggtccacggccggctcacggcggacggtcccgatgacgtcagcggtgacgtcatcaccggcggcggctcgggcggctcgggcgcgcatgctcgccggcgaacgacggcgctgcagcgcgaacggaggacaccagcacgaagcgggcgacgcggcgaactcaccggtgaccaaagcaacggcggaggagcagcggacggcgacggcgacgaggttgaaacggcggagaccttcggctcgacgacggcgacggtgctccggcggtcttcagcgacggcgacggcgacaacaggagcgacggcggcgcacggctcgagcggcggcgacgacggcggcgctaggttacacgacgctagggcgctacggacgacgagaggcgaaggcgagagtggcgacgggggctaggaggcggcggcgaaggaccacggcgaccggcgacgcgaaggaaacctcggggttcggaggaaagagaccgatccgattcgacctcgaatccacgaacttccaaaacgattaagccgatgattccaaaagagaaaaggtggaggagatcccggagattgtttcccctcaaaagatttcaccggagaaggaaaggagcggtgcgccccacctgtcagcgaccgaacgcgcgcgcgcggcggctgcggtctgggccgacttgggccggggagggagaaaagggttttgggccgactttcggcccaaagccaaaagaggattttaaaaaacctttttcaatt

SEQ ID NO: 74477 - DNA, 464 bp, Oryza sativa
  Clone ID: PAT_MRT4530_7465C.1
atggtattgacaagatcgtagtcaacttgatccgactagatcctcggcgacttggctccgataagctctggcttcgtaggctgtggtggatgtgttggctctgagattcgatgccttaggtcctcccggggggtcccttttataccataggtcaactggtctccaagtaggactcggagacatcagacccatattgccgcatagcgtatatccaagggtagagggtatgccttatccgtaaccctgacagtagcccccgacttctgcttaaatgaactcatgtaaccgatcgcgacttctgatgttggagttgttgtcgttctcgactggtcgttctcggtgtaagaaccgtagagacaaggaatagtcgacaacaccatgcgaagttcaacggttatgagtgaatttaaattgaagttccaaaactgccgcgcgtaacggacccagaaatttccggcggccat

SEQ ID NO: 74478 - DNA, 641 bp, Oryza sativa
  Clone ID: PAT_MRT4530_74660C.1
tgctccggcggtctacagcaacggcggaggagcggacgaggacggcgacgcaacggcgaccacgatggcgaccttcccgagcgacgatgatgactggagcgacggcggcgcacggctgaagtggcggcgaagacggcggcgcgaagcggcacggcgctagagcgctaccggcgacgagaggcgaaggcgagagtggcgacgggtagcggcgacaccggggatccttttaaaggggttggagagcggcggcgaaggcccacgacgaccggcgacgcgaaggaaacctcggggttcagaggaaagagaccgatccgattcgacctcgaatccacgaacttccaaaacgatttagccgatgattccaaaagagaaaaggtagaggagatcccgaagattgtttcccctcaattgatttcaccggaaacggaaagacgtggccgaatttggaaggagacggcggcgccgctcggctagggtttcgggcggcggcggcgcgacgaagacgacgactccgacaggcgggccccacctggcagcgagcgagggcacgcgcgcggctgcggcggactgggccgacttgggccgaggagagagagaagggttttgggccgactttcggcccaaagccaaaagagactttt

SEQ ID NO: 74479 - DNA, 189 bp, Oryza sativa
  Clone ID: PAT_MRT4530_74661C.1
aggcagaggatgttacagcttagtctagatcaatatttattgcatcacatagacgaactgttagtatccccaaaagcgttatttcaagtttacaacacgcttgacatacttacatagaggtcaacatttctaatctatcgccatgctgcctagatgaggggatccaggatgctagcccatgtcgctgtg

SEQ ID NO: 74480 - DNA, 134 bp, Oryza sativa
  Clone ID: PAT_MRT4530_74662C.1
gcacgaggggcgaagccagagaagaggagttgctgaaggaacctcgcggtgctagttcaaggtttcaaagagttctttcagaggagaaatgtttttattttagggggtgatatgcaaatccctgagcatccatt

SEQ ID NO: 74481 - DNA, 516 bp, Oryza sativa
  Clone ID: PAT_MRT4530_74663C.1
tcgttgttatttcatctatttcctatttaagttatttgtaaataatattcgttttcaaacactcgtttattaaatttttatcccggtttttcattaatcttgtgttgtttttatagtttttatttttatgacgaatttagttgttgataaattgtatacatgaactcatattttgatttttctaatttcgaaattttttatttattattctaattttaattaatctcgtattttgtactatgattgactattcttttcatattatactttttttatttttaaatttcagttatttctaaattggattcaagctttaactctgatttttatttacataatttcagaatttaattttaatttttagtctaaattttaattattctttagttgtgttctatatggagtcatattttaatattacttatttatcattcagaattgattaatttccggatttaatggattatttattttgaattttattaatacttatttaaatattccaactgttgattt

SEQ ID NO: 74482 - DNA, 1356 bp, Oryza sativa
  Clone ID: PAT_MRT4530_74664C.1
tccccgggctgaggtcgctcctcgccgccactcacctctcaccaacaatcgcgacgacgaaaagaaaaaaaaaaaagaatctcgtctcacccccaatggcgcagatcatcgacgggaaggcggtcgccgccgacatccgccgcgaggtcgccgccgacgtcgccgccctctcctccgcccacaacctcgtgcccgggctggcggtggtgatcgtggggagcaggaaggactcgcagacgtacgtgcagatgaagcgcaaggcgtgcgccgaggtcggcatccgctccgtcgacgtcgacctcgccgaggacatctccgaggcggcgctcgtcgccgaggtccaccgcctcaacgccgacccagccgtccatggcatacttgtccagcttccattgccaaagcatattaatgaggaaaagatattgaacgagatcagcttagagaaagatgttgatgggttccatcctctgaatattggcaagcttgcaatgaaaggcagagacccactgttcctaccatgcacgccgaagggatgcatggagctcctaacacggagcggagttaccatcaatgggaagcgagcggtcgtggttggccgcagcaacattgtcgggctacctgtatccctgcttcttctgaaggcggatgcgaccgtatccattgttcactcccggaccccaaaccctgaaagtattgtccgtgaagcagacattgtcattgcagcggctggccaggctatgatgatcaaaggagactggatcaaaccaggcgctgctgtcatcgacgttgggacgaactccatcagtgacccaaccaggaaatcggggtacagactcgtcggcgatgtggatttcgcagaggtgagcaaggttgctggtcacctgactccagtcccaggtggcgttggccccatgacggtggcgatgttgctgaagaacacggtggatggagcgaaacgtggtatagttcagtaaagtttccatcttgtatgctgtaactgcaaggatgatgttgtaattgagtgcatttctggacaaattcgttctcatttttgttgtgtgacggttatttcgagaataataagaataagtttgtctgtcatcaaaaaaaaaaaaaaaaaaaaaaaaaaaaaaaaaaaaaaaaaaaaaaaaaaaagtcgcctccgggcctagctcaaaaaggtctagcgcgccaaggagttccagcccaccgtggtatgaagaagccctgcccggcgtaacccacagccatttattcccttcgtttttgttgcttgtcaggtgattgatgaattgcttgcttgccatggctgttttatgtgtcctccaatgttcgtgaagacttttctgtgtgatg

SEQ ID NO: 74483 - DNA, 271 bp, Oryza sativa
  Clone ID: PAT_MRT4530_74665C.1
gggggaaaaaaaaaaacaccattccattctatggggggacccaggagtttttggggaatttacaacaagcgacaagtttttatttagtaaaagccgcggggcccagttttgattttactatgatttgggaatcatataatgttttcaggggggtcttaatcttatcaacaatgttacccccaaaggcgagtttccggttgacagaaaacaccaaaaactggcatttccccttcactggtatttacctagatgccggttttccaacccaaaa

SEQ ID NO: 74484 - DNA, 136 bp, Oryza sativa
  Clone ID: PAT_MRT4530_74666C.1
agcctctccagtctccaccaattttggtatccgacctgaaggccctgaaggtttgtgcgacagatcgcgcaaggcagcacgacggggcgggagggcgaccctccggtcgagggcaaatgggcaggcacaggggtag

SEQ ID NO: 74485 - DNA, 479 bp, Oryza sativa
  Clone ID: PAT_MRT4530_74667C.1
cttcattgcacaagtttgatgttgggcagaaagacgactgacgtaaggggttctcttgagcatcctgatttcggatcctacactctgaaacttgctgttcctgacttcaaatgatctcagcattaacacttgctggcagttagatcatttcagggccccaatgcatttttcagtatgaatgggaaccaatatcccatatctggcttcccagaaattttgtgctcaactgtcaatattaaattattctttgtccaagggattattgtttgttgtaatgaaatgccaagggtgactggttgaaagttgaaacatttgtaaacccaaataatagggacttgagattttagatgttgggtggtggggatatagagcctggaagagtggagttgtgctttgtatggcttagcatatttaactaaatcaatttcttttctatcacatggcagtatagcatattttctcaaaaaaaaaaaaaaaaa

SEQ ID NO: 74486 - DNA, 1245 bp, Oryza sativa
  Clone ID: PAT_MRT4530_74668C.1
ttttttttttttttttttactgcaataattttctactatattttattctaatcgaagaacatgtctatatctcacatcaaaggtcttatttagatgcaacatactaattccacaacaccttatcgaagcctaccatactgcatcacatatatcagcaaccataccgtatatacacatcataaccttaccaaatcaggtcacatgcagagtcatcttcacatcataagttcaatactaaccaaaattacacaataccaagtttccaatgatgctatgcataacaataaagctgctaacgatagtaattacggataattggaccctcaggccccgccaacttcttccacacaggcggacacagcatggaaggcacggacacgggttccacagcccgatcgcttcttacgcttgcctgaaatcatcgtccacattggctccggagcaagcacctggacctcacagctactggcctcctccttgacccgaccgccacagctctcaccttcctccttcacccgtggaagaagggtcggcttagctgtcccaattggcaaggtgattggcctcacagctgcttcaggcggtgaaatagttggcttgggtagctccggcggcagcgagtagcagcggacggaggcgaagttggtggcggcgctggaaccgcggaggcggacgctggcggcgtcgtatgcggcggcggcctcctcagcggtgtcgaaggtgccgagccacaggcggcggcggaggtgagggtcgcggatctccgccgcgaacctcccccacggccgctgccgcacgccgcggaaccgcgcggtcggcctcgcctcccccgcccccgcctccatcacgcggcgcttcacgcccccaccaccaccaccaccaccacccaccttacccctccgccgcggccgaggctgcgccaccgcaaccgcctcgtcctcgctggaggacgagtcggtggcgtcggcgtcgcgcacgaggatacgcaccacgcgtccccgcggcgccgcccccgccgccagctcgtgcaggctagggtttgtacccatgcctcgggaaacccacctcaatccatacagggtgttcgatcgatgtggctacgcgtagcctccgcgccccgccatgggagcgtggggggtggaaggcgaggtgggggggctagggtttagggttagggtttggttccgatcgatgcggcggcgtgcggcggggtggggttgcaatggaagcgcactagtttagagc

SEQ ID NO: 74487 - DNA, 284 bp, Oryza sativa
  Clone ID: PAT_MRT4530_74669C.1
aaacttgcatgacatttttattcaaatttgtatccccccgatgtttcaacttgtcacacacggtttctcagttgaaacacgggtgattggaaaaagggggttgccactgggctgcactggtgccttacaaactcaccggatgggctaagcatttgttgctgcaacatgaaatgcggctgcagctgatattgcctgtaaacttgagtaacagcatcaaactgcgcaaaggccctgcttgcagcaatagcagggggagcaaagaaaaaaatgatcttcattggggt

SEQ ID NO: 74488 - DNA, 712 bp, Oryza sativa
  Clone ID: PAT_MRT4530_7466C.1
tctcttctcttctgttaaaccccctccgccgccgtcgctgccgccgccgccgccgccggagcccgagacgatgtcgcgcctcggccgctacggcccaccggcggtccgcgactcctactccctcctcgtcctcaacgtctccttccgcacgacggccgacgacctcctcgcgctcttcgaccgctgcggcgaggtcctcgacatccgcatcccccgcgaccgcaggactggggattcgagagggttcgcgttcgtgaggtacaagtacgaggacgaggcgcagaaggccgtcgataagctcgacgggaggacggtggatgggagggatatcatggtgcagttcgccaagtacggcccaaatgctgaaagaattcataaggggaggattgtagaagagatttcgaagccaagaggccgatccagaagtcctagtccaaaacggaggtatcgtgctgactaccgagacaggggctaccgtgatgactatcgggacagacactatcgtgatgactatcaggacagggagtataggagaagccgaagcatagagaggtatgaacgtgagaggtatcaagaaaaaggctatcgtcgcaggagccggagcattagccctgattatgacaggaggcatcgcaagaatgggtatgcctgtggagatgctctccctgtttcgtttttgtcatacttgactgcatccatgttcaaactataa

SEQ ID NO: 74489 - DNA, 106 bp, Oryza sativa
  Clone ID: PAT_MRT4530_74670C.1
gggtacctgatggcacatatatcagatgtctacgatgagcctgatctgcagtcgcctgctcagttgaagaatctaaaagctgtcagacttagaagcctcgtgggaa

SEQ ID NO: 74490 - DNA, 1391 bp, Oryza sativa
  Clone ID: PAT_MRT4530_74671C.1
gcacgaggagctctcagggcgtgaatgataaaccctagcctccgatccgaggctccgagctcgcttcccctctctctgcgaccaggaggtgaggctgcttagtgcggggcatcatgcctgctggtgacaacccacactcgatctcagagaaaaaggcagcactgagagaatcgcctaaagaacctaagaatgtcggtaatcagcagcccaggacttctccttttcctaaggataaagctgctgggacagttggcatcaagcggccgcaacctaatggtcccttgaacccaactaacccagggacaaatggccatcttgtatatgtgcgcaggaggcttgaaactgatcatagcaaagttagctcttatgctagtgcagatagtatcagttctctaagctcaaagaaaactgttgtagacagacctcaggaacaaggtttgaagcatcagaacagttcgcttcaaactccgttagctcctgctgcagctgctgccacctcccctgtttctccatctggaggttcgccgcctcaaaattctctcagaaagcaatctctaggaaaggtggttgttcagccaagtattatagtgactgctagtcctccacctcgcaatgtggtgtctactacttcagttcctcagaattctatagcagctaagttggcatgttctagtgttgccgctgctagtcctccacctcgcaatctggtgtctaccactccagttcctcgtaattctataacagctaatttggcatcttctagtgtcgcggctgctagtcctccacctcgcaatctggtgtctactactccagttcctcataattctatagcagctaatttggcatcttccagtgttgcggctgctagtcctccacctcgcaatctagtgtctactactccagttcctcgaaatcctatagcagccaatgtggcatcttctagtgttgcggctgctagtccacctcgcaatctggcgtctactactaaagtttctcagaattctatagcagctaatttggcatcttctagtgtttcggctactagtacagcatctcgtggtgctgctccagcatgttatccggttgatccacaaagatcaagcaatcaagattggaaagagaggtttattaggctgcaggctttcttgagaaataacgagcaatcaggacaggaagaatatatccacatgcttcggtctttgtcatctgttggccgaagcaagcttgccattgagctggagaacagagcagtcaagctcttgattgaagaagggaaagagctgcagaagatgaaagttctgaatgtactgaacaagctttcacctactgatgctctaccattaccaactcagcctgcttctgttaggcatctggcatttccaccccgctga

SEQ ID NO: 74491 - DNA, 3885 bp, Oryza sativa
  Clone ID: PAT_MRT4530_74672C.1
atggcgtcttcttcctccaacccatctgctctcaatgggcagacagtttctgagaagctcaccaagagcaacttcgtgctgtggaaggcgcaagttcttgccgcgctgcgcggcgcacagatggccggcttcctcgacgggagcaatcaggcaccggctgcaacgatcatcgtcaccaaggacgatggcaagaccaccgagaaggtggcaaatccggcgctggtgcaatggaaggcgcaggaacagcaggttctcagctacctgctgtcgtctctgtcgcgtgaggtgctcactcaggtggcaacactcacaacggcggcagatgtttgggaggcaattgagagcctcttcgcatctcaatctcgcgcccgcatcctcaacactcgcatggcgctctccaccaccgtgaaaggaaaccggagcatggcggagtatgtcggtaagatgaaatctcttgcggatgacatggcttctgcaggaaaactagttgatgatgaggagctcatctcctacattcttgccgagctggatttcgactacaactcggtggtctcgtcagtcacgggacgcaccggtccaatctctgtgagcgatgtctatgcgctcctggttggctttgagtcgcggctggaacttctccagaacgcggccaatccttctgccaacaccgcgtcgcgaggagggcgaggcggacgcggtcgtgatggcagagggcgcggcggcggcaaccctggacgtggcggcggcttcgggcgcggtcgtaatgacggcaagcccaagccgacgtgccaactctgcgacaagatcggccacatcgtcgccaagtgctggaagaggtttgatccctctttcaccggtgaagagaagaacgccaacactgctgcagtgaactcctacggcatcgacacgaactggtacatcgacagcggcgccaccgaccacatcactggagagatggagaagctcatggtgaaggacaaatacaccggcaatgatcaagtccacaatgctagtggcgcaggtatgaatatcgatcatgttggtcatactgcaattcgtacccctactcgtgatctaacgttgaaaaacgtcctccatgttcctgacgcatgcaaaagccttgtttctgcccatcgctttactcgtgacaataaaacatttgttgaacttcatcctttcttctttttggttaaggatcaggtaacgaggatgccactccttcgaggcaggtgtagatccggcctctatcctctgccaacagacaagctccaaaccatctccaacaagcaggcttttggtgttgtcaagccctctcttttccggtggcacagtagattagggcacccttctttttctgttgtcaatcgcgtcattagccaaaataatcttccagttgttagggattctagtcaagagtttgtgtgtgatgcttgccagaaaggcaagagccatcagctaccctaccctaagtccagtagtgtttctattgaacctttgcaacttgtgttttctgatgtatggggtcctgctataaactctgttggcaataaagtttattatgttagtttcatcgatgactttagcaaattcacttggatctatctccttaaacacaaatctgaggtttttgccaagtttcaggatttccaaaaccttgttgaacgcttgacgaatagaaaaatcaaagctgtgcagacagattggggcggggaataccaacgtcttaattccttctttcagcgcattgggattgaacactacgttgcctgtccctatgcgcatcagcagaacggttctgccgagcgcaaacaccgtcacatcgttgaggtcgggctctcgttgttagctcatgcctccatgcctctcaaattctgggatgaggccttcaccaccgctgcttacctcataaacaggaccccaaccaaagtgataaactttgagacccctctacaacgtctgtttaacctgcccccagattattctctgcttcgcaccttcggctgtgcctgctggccgaatctgcgtccctacaacgcccgcaaattagctttccgttctaaacagtgtgcttttctgggttatagcacgcttcacaaaggttttaagtgcctagacatctctacagggcgtgtgtatatttcccgtgatgttgtctttgacgagcaaatctatccctttgaaaaacttcatcccaacgccggtgctcgcctccgggctgagatcaatctcctcccggtgcatcttcttccgctgcttgatcacgggggtgtacagatgcatgatcaaccgctgattgatgattctaatcctgctaatccaattattgagaatagtgcaggcagcagtgcaggcaatggagcaaaatcaggggcgcagcacgggcatgatttcatgcagagttccggcgggcaacctaccggcggccatcatgactctctgacgcacagtaccatccatggcacggataaccaggcggaccaggagaactcggcgtcatctcgatctgcagaaccggtcacgccgcgacacgcagcgagtccctcggccgcgccaaccgcgtcgccacacgcggcagccgcgccaatcgcgtcgtcacacgcggcagcctcgtctccgtcgggagacattgtgggaccgggttcacatgggccatcgcaggaggatcaagacacgtctgcatcagctcctgcttcttccacatctaatgatgatgatagtgctcagtttgccgctcagccgactcgaccagtgaccagagcacagcgtggtatccacaaaccaaagaagtacacagatggcacagtaaggtatgcaggactcacacatacaggagaactaggtaatctccaagaggctttaagtaatactaattggaagtcagctatggatagcgagtttgctgctttagtgagaaataaaacatggcacctagttccaccaaagcagggggtgaatgtaatagattgtaagtgggtctataagattaaaagaaaggcagatggaactatagatagatataaagctaggttagtagcaaagggctttaaacaacgttatggtattgattatgaggataccttcagtcctgtagttaaggctgctactattagacttgttctgtcactggctgtgtcacagggatggagtcttcgacagcttgatgtacagaatgccttcttgcatggctatcttgaagaagatgtgtacatgaggcagccaccaggatacgaggagaaaaagatgccatactatctctttgctagctcttctggtcaagcagttacagttttactcaaggaacttgagaaagattttgctctgaaagatcttggggatctgcactactttctgggaattgaagtaaagaaaactgagaaaggtctgctgttgacacaggaaagtgctttctctgatgcagactgggcaggatgtctagatgacaggagatctactggaggttttgcagtatttctgggatcaaatttgatatcctggagtgccaggaagcaagctactgtatcacgctctagtactgaagccgaatataaagccttggctaatgcaactgctgaagtaatgtgggttcgtaaattgctagaagagattggtttgttgcatccaggaccttctcaattatggtgtgataatattggagctacctatttgtcagcaaatcctatgtttcatgctagaacaaaacacatagaagtggattaccattttgtcagagaacaggtggcgcagaaaatgttggaaattcggtttgttccgtcacaagatcaaattgctgatggatttacaaagcctcttcctgtgagacaattacaattgttctgtaacaatctcaatcttggagaattgagattgagggggagtgttagatga

SEQ ID NO: 74492 - DNA, 249 bp, Oryza sativa
  Clone ID: PAT_MRT4530_74673C.1
cacgagggaaagaaaaggagagaacttaattgacattagtgataattttaatcttgatctccgatgagtgaacatgaggagaattaacctgtggcagccaaaatttttggaggaaggatgcatattaatagtcatcatccagcacatactcaaaacttttatgttccctgatattatatcatttatggaaatgttcatagttagtattctattggattttctaccatgcaatttaaatgccatgtcatg

SEQ ID NO: 74493 - DNA, 4314 bp, Oryza sativa
  Clone ID: PAT_MRT4530_74674C.1
atggcgtcttcttcctccaacccatctgctctcaatgggcagacagtttctgagaagctcaccaagagcaacttcgtgctgtggaaggcgcaagttcttgccgcgctgcgcggcgcacagatggccggcttcctcgacgggagcaatcaggcaccggctgcaacgatcatcatcaccaaggacgatggcaagaccaccgagaaggtggcaaatccggcgctggtgcaatggaaggcgcaggaacagcaggttctcagctacctgctgtcgtctctgtcgcgtgagatggaggcaattgagagcctcttcgcatctcaatctcgcgcccgcatcctcaacactcgcatggcgctctccaccaccgtgaaaggaaaccggagcatggcggagtatgtcggaaaaccagttgatgatgaggagctcatctcctacattcttgccgggctggatttcgactacaactcggtggtctcgtcagtcacgggacgcaccggtccaatctctgtgagcgatgtctatgcgctcctggttggctttgagtcgcggctggaacttctccagaacgcggccaatccttctgccaacaccgcgtcgcgaggaggacgaggcggaggcggtcgtgatggcagagggcgcggcggcggcaaccctggacgtggcggcagcttcgggcgcggtcgtaatgacggcaagcccaagccgacgtgccaactctgcggcaagatcggccacatcgtcgccaagtgctggaagaggtttgatccctctttcaccggtgaagagaagaacgccaacactgctgcagtgaactcctacggcatcgacacgaactggtacatcgacagcggcgccaccgaccacatcactggagagatggagaagctcatggtgaaggacaaatacaccggcaatgatcaagtccacaatgctagtggcgcaggtatgaatatcgatcatgttggtcatactgcaattcgtacccctactcgtgatctaacgttgaaaaacgtcctccatgttcctgatgcatgcaaaagccttgtttctgcccatcgctttactcgtgacaataaaacatttgttgaacttcatcctttcttctttttggttaaggatcaggtaacgaggatgccactccttcgaggcaggtgtagatccggcctctatcctctgccaacagacaagctccaaaccatctccaacaagcaggcttttggtgttgtcaagccctctcttttccggtggcacagtagattagggcacccttctttttctgttgtcaatcgcgtcattagccaaaataatctcccagttgttagggattctagtcaagagtttgtgtgtgatgcttgccagaaaggcaagagccatcagctaccctaccctaagtccagtagtgtttctattgaacctttgcaacttgtgttttccgatgtatggggtcctgctataaactctgttggcaataaagtttattatgttagtttcatcgatgactttagcaaattcacttggatctatctccttaaacacaaatctgaggtttttgccaagtttcaggattttcaaaaccttgttgaacgcttgacgaatagaaaaatcaaagctgtgcagacggattggggcggggaataccaacgtcttaattccttctttcagcgcattgggattgaacactacgttgcctgtccctatgcgcatcagcagaacggttctgccgagcgcaaacaccgtcacatcgttgaggtcgggctctcgttgttagctcatgcctccatgcctctcaaattctgggatgaggccttcaccaccgctgcttacctcataaacaggaccccaaccaaagtgataaactttgagacccctctacaacgtctgtttaacctgcccccagattattctctgcttcgcaccttcggctgtgcctgctggccgaatctgcgtccctacaacgcccgcaaattagctttccgttctaaacagtgtgcttttctgggttatagcacgcttcacaaaggttttaagtgcctagacatctctacagggcgtgtgtatatttcccgtgatgttgtctttgacgagcaaatctatccctttgaaaaacttcatcccaacgccggtgctcgcctccgggctgagatcaatctcctcccggcgcatcttcttccgctgcttgatcacgggggtgtacagatgcatgatcaaccgctgattgatgattctaatcctgctaatccaattattgagaatagtgcaggcagcagtgcaggcaatggagcaaaatcaggggcgcagcacgggcatgatttcatgcagagttccggcgggcaacctaccggcggccatcatgactctctgacgcacagtaccatgcatggcacggagaaccaggcggaccaggagaactcggcgtcatctcgatctgcagaaccggtcacgccgcgacacgcagcgagtccctcggccgcgccacacgcggcaaccgcgccaatcgcgtcgtcacacgcggcagcctcgtctctgtcgggagacattgtgggaccgggttcacgtgggccatcgcaggaggatcaagacacgtcgcaggaggatcaagacacgtctgcatcagctcctgcttcttccacatcgcatgatgatgatagtgctcagtttgccgctcagccgactcgaccagtgaccagagcacagcgtggtatccacaaaccaaagaagtacacagatggcacagtaaggtatgcaggactcacacatacaggagaaccaggtaatctccaagaggctttaagtaatactaattggaagtcagctatggatagcgagtttgctgctttagtgagaaataaaacctggcacctagttccaccaaagcagggggtgaatgtaatagattgtaagtgggtctataagattaaaagaaaggcagatggaactatagatagatataaagctaggttagtagcaaagggttttaaacaacgttatggtattgcttatgaggataccttcagtcctgtagttaaggctgctactattagacttgttctgtcactggctgtgtcacagggatggagtcttcgacagcttgatgtacagaatgccttcttgcatggctatcttgaagaagatgtgtacatgaggcagccaccaagatacgaggagaaaaagatgccacactatctctgtaagttggataaggctctgtatggcttaaaacaggcacctagagcttggtactccaggttgagtaaaaggctacaagaacttggttttgtttcatctaaggctgatacatctttgttcttctataataagaagggacttgttatgtttctgcttgtatatgttgatgatattatagttgctagctcttctggtcaagcagttacagttttactcaaggaacttgagaaagattttgctctgaaagatcttggggatctgcactactttctgggaattgaagtaaagaaaactgagaaaggtctgctgttgacacaggaaaggtatgcaggtgatattattaagagaactggaatgagtaattgtaagcctgtgagtactcctctctgtgtgtctgaaaaactgtggttaaatgatggtgaatttttgggtgcaaatgatgccagtcagtacaggagtatcgttggggctctacagtacttaactcttacaagaccagacatatctttctcagttaataaagtgtgtcagttcttacagaatcctactattgtacattgggcagcagtaaagagaatacttagatatctgcaaggtactcttggtctaggattaaagattgacaaatccttttcttatattgttagtgctttctctgatgcagactgggcaggatgtctagatgacaggagatctactggaggttttgcagtatttctgggatcaaatttgatatcctggagtgccaggaagcaagcttctgtatcacgctctagtactgaagccgaatataaagccttggctaatgcaactgctgaggtaatgtgggttcgtaaattgctagaagagattggtttgttgcatccaggaccttctcaattatggtgtgataatattggagctacctatttgtcagcaaatcctgtgtttcatgctagaacaaaacacatagaagtggattaccattttgtcagagaacaggtggcgcagaaaatgttggaaattcggtttgttccgtcacaagatcaaattgctgatggatttacaaagcctcttcctgtgagacaattacaattgttctgtaacaatctcaatcttggagagttgagattgagggggagtgttagatga

SEQ ID NO: 74494 - DNA, 336 bp, Oryza sativa
  Clone ID: PAT_MRT4530_74675C.1
ctagacatctctacagggcgtgtgtatatttcccgtgatgttgtctttgacgagcaaatctatccctttgaaaaacttcatcccaacgccggtgctcgcctccgggctgagatcaatctcctcccggcgcatcttcttccgctgcttgatcacgggggtgtacagatgcatgatcaaccgctgattgatgattctaatccaggagaactcggcgtcatctcgatctgcagaaccggtcacgccgcgacacgcagcgagtccctcggccgcgccacacgcggcaaccgcgccaatcgcgtcgtcacacgcggcagcctcgtctctgtcgggagacat

SEQ ID NO: 74495 - DNA, 4065 bp, Oryza sativa
  Clone ID: PAT_MRT4530_74676C.1
atggacaccgtcgagaagatcgtcgaggacttcgcctccgacatcgccatgggccccttctcctccggcacgcgcctccgggacatgatacgggcgatacgcgcgtgcaagacggcggcggaggagcgggcggtggtgcggcgggagtgcgcggagatacgagaggccatcggcgagaaccagcaggagatccggcaccggaacatggccaagctcatgttcatccatatgctcggataccccacccacttcggccagatggagtgcctcaagctcatcgccgccgcgggatacccggagaagcggatcggctacctcggcctcatgctgctcctcgacgagcggcaggaggtgctcatgctcgtcaccaactccctcaaacaagatctcaatcactcgaaccagttcatcgtggggcttgcattgtgtgcgcttgggaatatctgctccgctgaaatggcacgggatctgtcgcctgaagtggagaggctgatgcgtagcagggacgttaacacaaagaaaaaggctgctttgtgtgctataaggattgtgagaaaagtcccagacttggcagaaaacttcatgggtcttgcttcatcgttattgaaggagaaacatcatgggattctgatatctgcagttcaactatgcacggaactgtgtaaagccagcaaagatgcactagagtacctgagaaagaactgcgttgaaggattggtgcgcatactgagagatgtctccaatagttcttatgctcctgagtatgacgttgctggcatatcagaccctttcttgcatattcgagttcttaaactgatgcgcattttgggtcaaggagatgcagactgcagtgaatatatgaatgatattcttgctcaggttgcaacgaaaaatgagtcaaataagaatgctgctaatgccattctgtatgaatgtgttcagactataatgggtattgaagctactagtggtttacgtgtgcttgcgatcaatattttgggtagattcttgtcgaatcgtgataataatataagatacgttgctctgaacatgcttatgagggccattactgtagatacacaggcagtacagagacacaggacgacaatattggagtgtgtaaaggatgcagatgcttctattcgcaagagggcccttgaacttgtttttttgttagtcaacgatacaaatgtaaagcctttgactaaagagcttgtcgactacttagattcagctgatccggatttcaaagaagatctcactgccaagatatgctcaatagttgaaaagttttctcaagagaagttatggtaccttgatcagatgttcaaggttttatccttggctggaaatcatgtgaaggatgatgtgtggcatgccctcgttgttgtaataagcaatgcatcagaacttcaaggatattcagtgaggttattatacatggctctacaagcatttgtcgatcagggaagtttagtaagagtggctgtttggtgcatcggtgaatatggtgaaatgctagttaacaatgttggcatgctgcaaggggaggaacctattacgattattattgccatttttttttctgcaatcatttatttagctgttcttggtagttggttttgtacatatttcgggcacttagttgaagacaactggaggataaagcaaatagtttcccagaataaaaagaatattgtgcttgaactacagcaaagatcaattgaattcagttccatcatacaaagacatcagtctatcaggccatctttgcttgagcgtatgcctgcattggatgaagctagttatttgctgaggagggctagtgctacacaagcaactcttgcagctgataagcctaccccagcagtcactcccggaggccttaagcttccaaatggtgtagcaaaacctgccaccagtcctttagttgatttgcttgacttaagttctgatgatgtgccagccattaccactgcttctaccactacagcacctaacgacttcctacaagaccttctgggtattggtgggataagttcatcacctgcagctgcaccttcatccgcaagcacagatattcttattgatcttctatctatcggatcatctccatcacagaatggcccgccagcagcagactctactcctgcccaagccatcactgaattgttcaagattaatgtacctgatactaaacctgtttctaccatctctcaagtcggtgcgattgtacctgaagctacggatgttctcagtagtttgtcatcaagtacatctgtttctgcctttgccaaaatgtctgacacttccattgcagggaccaaatccgctcctgcagtacctcaagatatggatttgcttgatggtctgccatcaaatacatctgtttctggacctgttaatcactcatcaataacagctttccagagtgcaaccttgaagatcaacttcaatttcaaaaagcagcctgagaaaccacacgagactaccgtccatgctacttttacaaatttgacatccagttcttatacggattttgtttttcaggcagctgttccaaagtttatccaattgcgactggatccagctagtggcaacattgttccagctagtggcaatggttcagttactcaagggttcagtgtcaccaataaccaacatgggcagaaaccacttgcaatgcgtatccggatgtcatacaaagtgaatggtgaggacagactggaacaaggccaagaaaatttcttggacgccgttttgaatcttactcatgctgcagtacgtgacgaaattctacggcttgtgttcgtgtccgaaacagccttacgattatattgtcgtcgtggtagaaggaaacacacccacgatacgttacgtgcatcagtggcaatggttgtcgacgacggcgagcaacgagcgtgcgccgccgccgccggcgacggcgatggcggcggagacgaccatctcagcgggctacccgacgatgtcctgctcgacatactggagaaggtggtgatggacggcgacgcccacgccgccgcgaggacctgcatcctctcgcggtggtggcgtcacctgccatggcacgacatcaccaccgtctccctcgacgtcgacgacttcatcccggacaaggagaacgcgtgccgccccgtgctccaggtgcaccaccggcgcgccaccgacaacctcgccgccgcgctggcgagcttcctcgccgcgccgccgagcaagcgcgccatcgacaagctccacctcaagctcgtcctcacgacggacgacgaccgcgtccaccgcgtcggcgcgctcgtcggcgacgcgttcgacaccggcagggtcaaggccggcgccgtcgagctcgagatcctcgccgagagcgcctgcgcgttcgtcgacgacgacgacgaggagcagaagcggctcatgctcgggaatggccgccgcttcacgcggctccggcgagcctgccctggcgcgttccggtcgctggcgaggctcaccgtgcacaacctctggttcgacggcggcgacacggcggccacgatcacccacctcctccatggctgccccgccctcgagtacctcgacatgttctactgcggcttcgtgccgttctccgtgatgacgatcgacgcgccgccggagtcgcggctggcgacgctggtgttcgaccagtgccacgccgccggcgtcgagcttgtcaatgcgcccaagctactacgggtggctcgacggcgagccggcggtctcgtacggcggaacaccgtcgctcaaagtaagctaatcccagaaaaccctggtcaattagagcggctttgcatcaagtccttcggcacaaagacggacaaccacgtgtgctctgccgagtggcgcaagagatggccctcgccgccggcgcggcagccatcgccggggttcaagcaccaccacctcgccgagctccgcatccgccacgccttcggcgtcgccgtcgacctgccgttcgcgaggatggcgatggaggtggccgtcaacctggagctcctcgccatgggcgtcgagtcgctggagtgcgacggctag

SEQ ID NO: 74496 - DNA, 447 bp, Oryza sativa
  Clone ID: PAT_MRT4530_74677C.1
tcaggtgtaatccgtaccatccacccatctccgacgcatgatttcaccctctccacgcgcggtctccgcgcaaagaatacgcctcatcaccctcttaacacgcgactcgctcctcctcgcgtcgtcgtcccattccgccgccgccgccgtgcactccaccgcctccgctgcgcactgaaccgaggcgaggtcttcccaaccaccgccggagccgtggtcttccccatccgccgcggccggccgcagcaggagccgacgtcgtccccatccgccgccgccgccgccgcaatgcaccgctaccctcgaggtcgtcgctttcttccgccgccacgcactgaaccggaggcgaggtcttccccagccccccatggagccgaggtcttccccatccgccgccgccgccgccgcgcactccaccacgatttctccgcccatccgctgctccat

SEQ ID NO: 74497 - DNA, 314 bp, Oryza sativa
  Clone ID: PAT_MRT4530_74678C.1
cattgataactgaaacttttattgcatgtcctttttgttcatcagatattcatactgaaattcaacggcacacgtttatttatgatctaaaactaaagggtccctctccctgtgtttttcccctttgacaaaagctagctcaaaaaaaaaatggctgtggggctacaatgattaatctaaaccaaataaccttgctccaagatttcccgagaaaaacctgactccgcaccttgaggcctacaaatttgcctattgcttgaactgttaagatatgcagtaattattttcatcaagagttacattgtaaaactgtt

SEQ ID NO: 74498 - DNA, 1222 bp, Oryza sativa
  Clone ID: PAT_MRT4530_74679C.1
accaatcgaagacatcacgcgaggagagaaaaaactagccgttgcgctactcctccgccatggacgcgacggcgccgctgctcagccccgcctccgacgaccgcttctgggaccgcctccgcacccgcgtcgacaccatcctcgaggaccgccgcctcgtcgctccccccgccgccacgtgcggggtggaatccgagcgggggaagcggctcagggaggactcgctgatgctggtgcgtggcctcgactccgtcgccgcctcgctggcgcagctctccgacaccctcaccgccgcgcagaagggagtgaatgcgctcgccacgtgctcttcccaggcgagggaatgcgagagaggtgatgaggaggaggagccgaaagccaagcggcgctgcagcttggctgagacggtgagcttcgacggcgagactccggtcgccggagcagattcaggtgaaggttcagagaaagaagaattagctgcggatgcgaaactgcgtcaggagaacggcggcattcaggccacttcggaggtcgccaagagcaccaatctgaagcgtgccagaaatctggcggtctcgatggccggaagagcggctgctctggcgagggagctgaagaacatcaaatcggagctgcacttcatgcaggagagatgcggtttgcttgaggaggagaacaagaggctcagagaggggtatgacaatggagttccccctgaagaagatgacctggtgaggctgcaattggaggctctgctcgcggaaaaatctcgactggcgcaggagaacgccaacctgtccagggaaaaccagagcctgattcagctggtggagtatcatcagctgacctcccaggacctcgctgaatcttacgaggacgtaatggaggggatgcggctggacttctcgtcgccgctaggcaagatcgacagcgatgaagaaggcgagcgtgagaaccgaagagttgctgtcactccatctgataagttggaagccttggagtcatctgatgagtagataaatctgaggagaataagctgggtcttctccagtggtggatttactgatgagtaacagtatgatcttctatttctgctgttgtatgatgcttcaatttggccactctcggtggccatatttatgtgatcaattccacttcgtaatgttgacaataacaaatgtgtgttctgaatcttaaccacaaataaaattttagtctttgg

SEQ ID NO: 74499 - DNA, 327 bp, Oryza sativa
  Clone ID: PAT_MRT4530_7467C.1
atgggggaggaggtggaggaggtgcgcgaatttggccagacgggtcggaggcggataagggatcgatggaaaagagggcgacggcatgccgggtcaagcacggtcatctccttcgacgtgttcgagaaggctaaagtcgccgtgcttcgtacagccgcggccgctgaggcggtaaacacgcctgtgttttatcccctgccgctgcaccgtgtcaccgcgcaccacaccaccgacaaggggctgcgtcgcgtcggtgcccgcccgtgcaccgcggccgctgcggcaaccgacggtccagccgtccaggcagaaggcagggcggcgtga

SEQ ID NO: 74500 - DNA, 249 bp, Oryza sativa
  Clone ID: PAT_MRT4530_74680C.1
atggcgtgtggtgcactggtagagatcgatgatggacggaccgactggtggccagccaggcagacccagtcgctgctgcttgtccgcctagtagctggcgccgtcgtccaacaggacggcgccagcctctctggcaccgtccccctgctgacgtggcggggcgatgctgaggtggctagggggagaatggaggcggcggcgccagccatgctggcaccctcctccctggggcggcgccagcatggctag

SEQ ID NO: 74501 - DNA, 2400 bp, Oryza sativa
  Clone ID: PAT_MRT4530_74681C.1
atgggccactccaacgtgtggaactcccaccccaagaactacgggcccggctcccgcgtctgccgggtctgcgggaaccctcatgggctgatcaggaagtatgggctcatgtgctgcaggcagtgcttccgcagcaacgccaaggatattggcttcatcaaggcagcggcgtgctccggctccctcgctggcgtcggcgcacaggcgacgatggacctcagcttgaggggagaagctgaggcggcgcccgtgtaccgccctaattcgaagcatttcacaattgagattcatcatggtggatttttctgtggaatgggagtcaatcgcagttatgtggatggaaaagttagctggtttgactatgttaattctcgggagtggggtagttctcttcacttgttagatttggttgctatgctgggttatgcagcagggccaagattggaagtgtattggttgttgcttggaaagagattggctgatggcttgagaattgtggacaatgaagtggagattaatgtaatgaattcagtgtgcaacagagttaagaactttgtcctctatttagaccatagtgaccatgtttcaggcagtaatcatgaagatatcgtactgagcctaatctctcagttgccgaaagtaatgagccctgttagaggttgtcagcagaaggaacatgggaaccaagggggtagtaatgtaggagaaccagtgtgtgtggttgtagatgaagaagctgaagaaattgaagatcatggtgattatgacagcaatgatagtgaggctgatgatttagactttgtggacattgactatgagttgcaagatgatgatgatgacttatttgaagataatgtggatggtgatgtgctggaccagggattggcacctaagaagttcaatcacaagaaggttgcaggtagcaagctcaaggggaaggaagtacttagagaggaaggatcagatgaggagtcaagtgatgaagagatcttggagctgccagacaatacagatgagatcaatttgaggttcaaatcatttaacccagaagatatgaataaccctgtttttaaagttggaatggtgttcccttctcttgagttgcttagaaaagcaatcactgagtacagcttgaagaacagggtggacatcaagatgccaagaaatgatataacaaggatcaaagctcactgtgcagaaggatgcccttggaacatggcagattgcaagatgactctacctagctttgcaaaaactgttcagaaagagtggaatttgacaccttcaaggagcaaactggcaagggctaggaggttggcacttaaagagatatatggagatgaggttgcacaatacaacatgctgtgggactatgggcatgaattgaggaggcctatcatttgcttggatgggtgccatatcaagaccaaatttggtggacagttgttgacagcagttggcattgaccccaataactgcatatttccaatagcaatggctgttgtggaagtggaatcgttgaccacatggtcctggttcttgcaaactttaaaggatgaccttggcattgtgaacacttacattgtagatgttatgaccaagcactgtgattgtaggaggtggtcttcactgttggctgaggtgcatgacaatatgttggatcacatgctgttggagacgccatggctgctcgccgcctccagcctcaacctcgccgactccggccgcaaccaacccgtctccgaccgctacctcctcgttccgcacttcgccgccgcacaccgtcccctcgtcgcctcacccgcttcagccactaaccctaggactattttgttggcatacaaggctattgaacgttttgagtatgaaagcatagcatttgatgtggtcttcttgcatgaaacagagttcattgggttggtcatcactgggaacaagaggatgttccccatggatgagcactttgagcagcagcagaagaagccgaagaagaaaacccgaacttctcgctcggtatcaagtagttcaaccattactgactatgagactagctctgaacttgtcaatcctagctgttcctccgggagcagcgtcggagaggattcaattgctgcaactgatggatctgtagtgctgaaacaaagtgacaattcaagaggccataagcagtgctccaaggatacacaaagcctctatgctaagaggagaagggaaaggattaatgagagactgagaatacttcagcagcttgttcccaatggcactaaagttgacatcagcacaatgctggaggaagcagttcagtatgtcaagtttttgcagttgcaaataaaggcgaaaaaaacgccaccctccccccatctggccgcgctgccgccgttgcccctccgccagatctag

SEQ ID NO: 74502 - DNA, 267 bp, Oryza sativa
  Clone ID: PAT_MRT4530_74682C.1
atggtccaattacgcgcagccgtgctaggaaaatacaacaagaggtgtacgcccgagcacatcatcactacaccaagaaggatgggttacgttgaggacgacaagggttacgccgaggaggaatcaacccatgcccaaccagcagctttttacgccaacaagaagatggtttacgctgccaaggctcaacttccaaggcttgtgcgacccagccagtcaagagacagggtgcatggcatacatggttggaaagagggacaagtctag

SEQ ID NO: 74503 - DNA, 1136 bp, Oryza sativa
  Clone ID: PAT_MRT4530_74683C.1
gtggatcccccgcctgccggggtcggcacgaggcccgcatcgtctcctcctcctccacttgttgttcaattccccccccccctctctctctctctctctctccgtcgcagatctcggcaagggggcaacaaggtaggaggcggcgatgggttcggcgagccgcgcggtgtcgtgcctgtgctgcccgtgcaagtgcctggcgtgcggcctcttcagctgcctctgcagcatcctcatctccctcctcgtcaccctcggcgtcctcgccctcatcttctacctcatcttccgcccccacatgatcgccgccaccgtcgactccgccgccctcacccagttcaccctctccaccaactccgccctcgcctacagcctcaccgtcgacctcaccgtccgcaaccccaacaagcgcgtcggcctctactacgacaacgtcgagtccctcgccctcttcgacggccagcgcttcggctacgcccccctcgactccttctaccagtccaccgaggcatccaccaagctctcccccgccttcaagggccagcagccgctccaaggcgacatcaccgccgccaacttcaggtcgcagcagaccgccggcaagttcgacatcgaggtcaagctcaacgccaagctcagggtcaaggtctgggccttcaaggttcccggacccaaggccaagatcagctgccccatcaccgtcccagcgtccgcccccaacgcccccgcattccagcgcaccgactgcaaagtctggttctgatttcgatggttggttccgcttcgcatttggggattactattagccagcactgcttccagtatggacggatggattcttttgtttctttcgatttgttgatgagggattagctcgccggatgttgctgtacatcgctgtggtttaggtggttacatatcttctagcccttgtagctagcgcttgtcatgcacatattatcgatccatgtcttgttcttcttagttttttcccctttcttttgggtacggcttacttactgctgttcagatcatatatgactgtatgttggttgatacattcagagattttattcaggatcacctattacttctatgagtaaaaaaaaaaaaaaaaaaaaaaaaagggggggggg

SEQ ID NO: 74504 - DNA, 638 bp, Oryza sativa
  Clone ID: PAT_MRT4530_74684C.1
cccggattcgcacgcaaaggcgcgcccgcgccgctccccgcctcacccccaccgcctgattccatcccttcccggcggcgcctccgctcggagccccaccggccgccgccggccactgcccccgagctcgtccggacttcggacgcgggatctccccgtcgtctcccgcgatttggtgccatctgatggaattagaggcgtgaaactgtatatttcttgttgagtctgaagataaggaggatctgatgggctctgttgtaagttctgcaaacattaatgcccgatctatggaccggcatgaaaaatctggatttggttctaataagagggtcaagatctccacatatgagtgcgattcgtttcagaggataattccaactcttcccgatgaactctcgtttcaaattctagccaggttaccacggttgtattacctaaagttgaagttggtcagccaagcttggaaggcggcaatcaccagcagtgagctttcccagctgagaagagagcttggcttaactgaagagtggttgtatgtactgaccaaacttgagccaaacaaactcgattgttatgctcttgatccattgttccgcaaatggcaaaggttgccaccgatgccatcttttgtcagtgag

SEQ ID NO: 74505 - DNA, 280 bp, Oryza sativa
  unsure (1)..(280): unsure at all n locations
  Clone ID: PAT_MRT4530_74685C.1
caagaacaagattcttttggtaatggctttctaaaatgcattagaatcgctgtactaggaatctctcttttcagtttcttggtaagattgaatccttgctacggacgtatgcatgcatggagaaaggaaggctttttttggatccttgtttttgccttccatagagcttctcccatggttgaccacccagtagtaggttaactgttgccgccatgtaaatctactgtacttcggttattcttcaatgccctgcctttaatgtcaaaaaaaaanaaaaaaa

SEQ ID NO: 74506 - DNA, 330 bp, Oryza sativa
  Clone ID: PAT_MRT4530_74686C.1
atggcccaagggaattgctccgcgtcacgtgtggcattttctacgcacgacgccgaaccactcggtctgattgcatggatggtctttgaagtgaaccgagccgtcaaggttcctagttatggttttttccggtttaaccggtccggtccgttttttgcactatgcgccaaagcgcgtactgggacaacgagcacggcaaagccggtgatggcttcgcatccctatgctaagatgataagacgatggtacatttgtgcacaagaatttgaaagcaatgtattcattcaaattcgaaaaaagcctagtgtattttcaaaagaaattcagtga

SEQ ID NO: 74507 - DNA, 1018 bp, Oryza sativa
  Clone ID: PAT_MRT4530_74687C.1
tgacttgccttgctcgagatcttgggcttgatcctcgaaattctcgcactgcgggtcttcgggctccgaaagctgatagataagattgggtcaagactgccaggctggaaaggacatttttttacctctgcgggacgtcaaacactagttacctctattttaagtgctacgccgacacatcatcttacggtctttcaagcacccaaataggtacttaaaagaattgaccgtttcagaagatcgtttatgtggaaaggcaaatatcccgatcactaaaatcctagcgacagtttgatcaactggcaaacagtttgtaaacccaagaaattgggtggggctggcctcccaaacctggatagattctcaagagctcttcaactccgctggctctaattcaagtggaaggaggagaacaaaccttgggtaggcattaatctactctgtgacgatttgaacaaaagactttttcaagcagcaacaacaatatcagtgggcaacggtgctaaaactagtttctggcatgataattggatccaaaatcgatgtttaaaagatattgtgcccaactgtttcagtctggtaaatagaaagcaaagaaccatgcaagttgagatgagagacaacaaatggcttacctcttttagacaattcacctatgtggaggaattgcatgacttggtgcagcttggaggtttgctccaactggtctcgctttcttaagatccggatgacatttcctgggattggactgaacctggttcctacacaaccaagagcgtatctctttcaattttaaggttccttcgctaggaatgattttgtatctctatggagggccctggttgaaccaaaaatgaaattctttggattgttaattctttataaaaaaaaacccttattgcccagaatttgctccggagacactaatcatgcaattggatatgttgtctctgtaccgcttttgaagatacatcatctgttcagtgaatgtgtctttgtcagacaagtttggagccta

SEQ ID NO: 74508 - DNA, 334 bp, Oryza sativa
  Clone ID: PAT_MRT4530_74688C.1
aactgcatgtacaaattgagacaggccgcatactaaatgaacaggtcttaccaatgcgccctttctaacagaggtgcagaactgaatgtctaatgggacacgccctcaatcggaactttaaatacgatcaaagatggagggtacaaggcatggggaccacttcaatagtcagggacctaatgccggctccttgaaattactactctacatctctcatctcgaccctcgatttaacatggaaagaggtaaatgggctgctccctttaaggttccatatgagtgatttacaggacgcaaaccccacaaaactgggctagggaaatgggatacgtat

SEQ ID NO: 74509 - DNA, 280 bp, Oryza sativa
  Clone ID: PAT_MRT4530_74689C.1
accctcagcgccctgctgctcccttctgggctcgccttgaccggctttcggtcgaatcgagtggacaccattggttttttcctttagtccgacacgtgggtaaagcggacaactcctgacgctctgccctgcggtctgccatgctcctctatcgtggcgtccatgccgacctggagaacgcgaagtcatacttcgcttcctgcgggaaaggggcacgcgttaacaattccagaaaccgtacctgcacgaaaatgaactcggaaaccatgggctgcctaac

SEQ ID NO: 74510 - DNA, 256 bp, Oryza sativa
  Clone ID: PAT_MRT4530_7468C.1
gcccctcttcgcctgcaactcgagaggcgataatatccgcgcgacggcgactacacagacgacagcggtggtggctcatgacgacaacctcaacaacggcgaccttgacgatgacccggggcgtgaaggcggaggccgcgcggccccgaatccatgccgccggccaaatccgcgcgaggtcgtgcggctggccaaatccggcaggggtggataccgcgcagaggaggccggggcggcgtcggacagagaagactag

SEQ ID NO: 74511 - DNA, 576 bp, Oryza sativa
  Clone ID: PAT_MRT4530_74690C.1
atgtgaccatggctactattgatataaccattgtttatatcataacttaactgggagacattaagatcaagttatgaaatccaattcagccactagcagcagtgctgacgtcaaacggtcaccaaatatgcatacgagatatgttttgggtccatgagtacttaatggaaagctctcggagtcttctttccaacggttccaacttcatctcgaaattccatctcggttgaccgcaatcacataaacaaaatcgcgtgtcggctagaccgtgtaattacttgtcttcgagaaccccaatttaccatttgtagtcaattcctatttgtaatatcatattgtttttatcttatttttacttgtttcttctatttgcttgtaggaataaggataatttgcaccagaaagatcaataacctatgcagaggtgtatcgatcgctaaggtacaacacaacactgtctcgtacggttgtagtcgcatcatcaacgtttctctcaaatcgtagttatcatcaacttaccgaaagatcgggcaaactagaactgtgagcatatcaacttccgccggccgcgcccgg

SEQ ID NO: 74512 - DNA, 840 bp, Oryza sativa
  Clone ID: PAT_MRT4530_74691C.1
atggaggggtcgccccgacgccggaagctgcggcggctgtctccgggggcggcgccgcagcagccgaagccgagcctgaactccctcccgtcggagatcctcgagaacatcgtcggccgcctccccgtccgccaggccgtccgcacgtcggctctctcccgcgactggcgccgccgctgggagtcctccccggggatccgcttcgggtggggcagcggcgaggcgggcgccgccgccgccgtcggccaaatcctcgcgcggtacgcgtgccccgtccgccatttccgccacgggtggatcgagagcggtggctccgcccgcgcggacgagtggttcgtcgtcctcgccgggaggggcgtcgagcacctcgccctaatcttctcggaggccgacaacttcctcttccacacgcttcacgccgccatcttctcgtgccgcgagctcaccaagctggagctcgggagctgccgcctcccggccgcgccctcggacttctcagggttcccaaatctcaccgtgttaaccctcaccatggtcgcttttccaccccatggggagaggactttggaggcgatgatctcctcggctccgttgcttcagtcgctggagcttaagaatgttagtatggaaggcggcgagtgggatgagtgggtgattcgggcaccaaatctcaaggatttgattattcagttagagttcgattttctatgggagatcgagcagcttccttccatccagacggcgactatcagtgttgataatgaatctaccgatcgtgattttgttcagctactgacatgttttgctcgaccttcatataccggtaaattggtttgctga

SEQ ID NO: 74513 - DNA, 379 bp, Oryza sativa
  Clone ID: PAT_MRT4530_74692C.1
tgtaaccggccacgcgtccgccactatctacctctgtagcgtggcgcctggcaagcataacatggatatggcgtgtgatgactagcaagacaagaagggacacttgggcgattgacgagccctataagatggaaggcttctgatacctgccttagctctgggatggaatgtctctgataccggccttcccagcgggaggaagtacctctatgaactccggcgggagggggaggaaggacacgcagacagtgtcatccggcagaccctcggtggcacgcgggagttcccatcgcgcagacgctgctgacctaggggttcgccatgagctcgggggtgctcgatctggggaccggctaatagctggcacggatgggctccg

SEQ ID NO: 74514 - DNA, 254 bp, Oryza sativa
  Clone ID: PAT_MRT4530_74693C.1
attcttatctttttctgttttttttgttttttgttttagaaaaacataacatagccggggttgacagcattatgttaaacaaaacttttttctgacaggaacctaaccacacaccaagttttttggtgcttactttttaatcactgtttggaagcagctttattttgatcataccctctcccaaagatcaaattttattaaacattttttgggggcataggcattatgactatttagttttaaacatcccggtt

SEQ ID NO: 74515 - DNA, 1160 bp, Oryza sativa
  unsure (1)..(1160): unsure at all n locations
  Clone ID: PAT_MRT4530_74694C.1
caacaaccttctcattccaaccaaccttgagcctacctactggttttccctagatttacaagataataaagatgggaaaaagaaaaagaaatagtgggagtccttgcatgaaagagacagacatcctactaccaaattacagagtacacgacataagaaaagggagtacagaaactcaccccacacaaacacccatcgacaccaaacaagaattggcaggcaatagtgggttttcggatgggatgacatcttcagaaaggatcagggtttctgttcatttttttttcttttcacagatcacattgctcctgcaaccaccgaaatcgggttctttcaatcagcgaaaatgagtgttgcttcaagggtgcaaccctcatgcgatcgcaacgaacgagaggagcacggtgcagaaggtggctagcccggctcttaggtgcaatcccgctgccgcggtgtccatgctgcttgtgcctgttggccctagcccgcccagcccggtgccggtagtagtccctgttcccatgccggtgccggtggttgtgcccataccagttccaggtgtgaaggttcctggggtcattgttccagttgtgcctcccatggtcggagtggttgatgttccagcaccacttgcactagcagggaaggagcagccagaaacacttgggtcgctggtggtgagggtggcggtgccggtgaagtcgcaggtggcgcccatggccctgttcctctggaagtagctgttggcggcccaggagcagtgcgccaccacggtgttggggttgaagcactgcccctgctcgtggatggagttgcagtccgcgcccgcgccgcacgcgtagtcgatggtcttctgcagcgccgcctgtggctgatccgacctgcacacgcaccaatctgaagcgacgagactggacgacatgagaagcaccagcgccgccaccaccaccgcctccattatgaaagctaccaccaccaccaagcaagcagcaagaacagagagattcttggaggcctggacgagtagaagagatggagacgagctagtagaggagagtgagtgagtgagagagagagagagtgtgtggtggcctctggacaagagtggcagtggcagcagcagcagcagagggagtgagagagagcagtgtgtgtgttcn

SEQ ID NO: 74516 - DNA, 644 bp, Oryza sativa
  Clone ID: PAT_MRT4530_74695C.1
actagtggatcccccgggctgcaggcagcaacaggcacgactgaactgaacatgattatgcaaaacccaaggttttgggttcaagcatggtataaagcgatgaaaatttagtatcatagttgctgcagtagttagtgaaggaatatctattttagaaaataaaatagctactagaaagatattttatctacaacatggtcgatttgtcgaagcaagagataagaggagttgatcaagaaggcacacttctattccataatgagtcagtgttgcaggacaaaatgcatgcagctctgataagcataccacatcaattgagatctgtgaatgttcttccttatgatttatgacaaattgtttgaaagctagagctttaaattgtgacctctggttttctgccctggggtttggaagctgtggtggttcagatacttggtgcttatattttggatagatatggttttgtcctttggttgatgctaagatgaaaagatggtgctggatggaagctggagtttccagcagtagaactttttacttttccttgtgtagatttatctttcagtttgttcttcgtttgtgtaagactctgtttcagtttgggctttctttaaaagccaggtaatgcaatggcctgttctgtg

SEQ ID NO: 74517 - DNA, 2682 bp, Oryza sativa
  Clone ID: PAT_MRT4530_74696C.1
atggcctcgccggcagcggcggcccccgcggcgctgctcgtccttctcgccgcggccctcgcggcgaccggcgtcgtcgccgacggctccgaccaccgctacaaggccaacgagctcgtcccgctctacgccaacaaggtcggccccttccacaaccccagtgagacgtatcggtactttgacctgcctttctgctctccagagaaagtgaaggagaagagcgaggcactcggtgaggtcctcaatggggaccggttggttgatgcaccttacaagcttgatttccgtgtggattatgactccaagccggtttgctcgaagaagctcaccaaggaggaggtggccaagtttcggaatgcggtagcaaaggactactacttccagatgtactacgatgacctcccactgtggggattcattggtaaggtggagaagggaggcaagacagatccgaaagagtggaagtattacctgtacaggcacatcatctttgacatcctctacaacaatgaccgggttattgagatcaatgtgcacactgaccagagtgcactagttgacctgactgaggacaaggaagctgatgttcaattcctttactcagtcaagtggaaggagacacccacaccatttgagaagaggatggagaagtattccagttcctccaacctcccacaccatttggaggtccattggttctctatcataaactcttgtgttacagtcctccttttgactggattcttggcgaccatcctcatgcgagtactgaagaacgattttgtcaagtatgcccatgatgaggaagcagctgatgaccaagaagagtctggatggaagtatatccatggggatgtcttccggttccccaagaacaacacaacctttatattccttcttgcacttgttggagtattctacccgtacaatcgtggtgctctttttactgcattggttgtcatctatgctctcacttcaggaattgctgggtatattgcaacctctttctactgtcagctagagggaacaaactgggtgaggaacttgctgttgacaggatgcctgttctgtggacccctattcctgactttctgcttcctaaacactgttgctattgcttatagtgcaacagcagctttgcccttcggcactatctgtgtcattgtgctcatctggaccttagttacatttccccttctagttttgggaggcattgctggtaaaaacagcaagactgaattccaagctccctgccgtaccaccaaatatcctagggagattcctccacttccgtggtaccggcaaacaatcccgcagatggctatggctgggtttttacctttcagtgccatctatattgagctctactacatctttgctagtgtttggggccacaggatttacacaatttacagcattctcttcatagtcttcatcatcctccttattgttactgccttcattactgttgcactgacgtactttcagcttgctgctgaagaccatgaatggtggtggaggtcattcctatgtggaggatcaactggattttttgtctatgggtattgtctgtactactattatgcacgatcagatatgtctggatttatgcagacatcattcttcttcggctacatggcttgcatctgctatgctttcttcctgatgctgggcatgatcgtccgtccaagagagggggacactctgcctccagccatgagcgacggcggcgcaggcgccaagggcgcgggcttcggcatgccgcgcgtcggcatgggcacggcggtgcaggggccgaggccggagcccatccggcgcgccgtgctcaaggccatcgaggccgggtaccgccactttgacaccgcggcgcactacgagaccgaggcgcccatcggcgaggccgccgccgaggccgtgcggtccggggccattgcctcccgcgctgacctttttatcacgtccaagctttggtgcagcgacgcgcaccgcgacagggtgctccccgcgctcaggcagacgctatggaaccttcagatggagtacgtggacttgtacctggtgcactggcctgtgtccatgaagccgggccggtacaaggcccccttcaccgccgacgacttcgtgccgttcgacatgcgggccgtctgggaggccatggaggagtgccaccgcctgggcctcgccaaggccatcggcgtctgcaacttctcctgcaaaaagctcgacaccctgctctccttcgccaccatccctcccgccgtcaaccaggtggaggtgaacccggtgtggcagcagaggaagctgagggagctgtgcagggagaagggcgtccagatctgcgcctactcgccgctgggcgccagcggcacgcactggggcagcgactccgtcatggcctccgccgtgctccgcgacatcgcccaatccaagggcaagaccgtagcccaggcacgtcacgtgtgcctgaggtgggtgtacgagcaaggggactgcctgatcgtgaagagcttcgacgaggcgcggatgcgggagaacctggacatcgtcggatgggagctgacggaggaggagaggcagaggatcgccggcatcccgcagcggaagatcaaccgtgccctccgcttcgtctccgaccacgggccctacaagtcgctcgacgacctctgggacggcgagatatga

SEQ ID NO: 74518 - DNA, 317 bp, Oryza sativa
  Clone ID: PAT_MRT4530_74697C.1
tttttgattttctggggaaggattcaatccagtatgtgaacacagtcgaggttgagcctcttgtttacaaggccattggacagttccaggcgggaaaatccaaaacagatgatctttttgatgagttagacacaagtaaactgaatgctcatttgaaggaacttgtgcctggtctcacagctaaagtattccgtacatataatgcttccatcactttggatgaaatgctgagtcaagaaaccaaagatggcgatgttactcaaaaaatagtagtttatcagaaagcaaataaggaggttgccatactttgtaatcac

SEQ ID NO: 74519 - DNA, 643 bp, Oryza sativa
  unsure (1)..(643): unsure at all n locations
  Clone ID: PAT_MRT4530_74698C.1
cggacgcgtgggggaaccttcagatggagtacgtggacttgtacctggtgcactggcctgtgtccatgaagccgggccggtacaaggcccccttcaccgccgacgacttcgtgccgttcgacatgcgggccgtctgggaggccatggaggagtgccaccgcctgggcctcgccaaggccatcggcgtctgcaacttctcctgcaaaaagctcgacaccctgctctccttcgccaccatccctcccgccgtcaaccaggttggtttgcacaattcacaatgctgcaacaaccaaaaatgttataacctttttttaatggttgatttgcttattgtgttgggtttgcgttgcgtttggtttgtcacggtacgtacgtacgtgcaggtggaggtgaacccggtgtggcagcagaggaagctgaaggagctgtgcaaggagaagggcgtccagatctgcgcctactcgccgctgggcgccagcggcacgcactggggcagcgactccgtcatggcctccgccgtgctccgcgacatcgcccaatccaagggcaagaccgtagcccangtgtgcctgaggtgggtgtacgagcaaagggactggctgatcgtgaagagcttctacgaggcgcggatgcgggagaacct

SEQ ID NO: 74520 - DNA, 3388 bp, Oryza sativa
  Clone ID: PAT_MRT4530_74699C.1
cttcagggatgagcaacttgatgataagttgataacagccttaagatggcattgtcccaacaacaaccttctcattccaaccaaccttgagcctacctactggttttccctagatttacaagataataaagatgggaaaaagaaaaagaaatagtgggagtccttgcatgaaagagacagacatcctactaccaaattacagagtacacgacataagaaaagggagtacagaaactcaccccacacaaacacccatcgacaccaaacaagaattggcaggcaatagtgggttttcggatgggatgacatcttcagaaaggatcagggtttctgttcatttttttttcttttcacagatcacattgctcctgcaaccaccgaaatcgggttctttcaatcagcgaaaatgagtgttgcttcaagggtgcaaccctcatgcgatcgcaacgaacgagaggagcacggtgcagaaggtggctagcccggctcttaggtgcaatcccgctgccgcggtgtccatgctgcttgtgcctgttggccctagcccgcccagcccggtgccggtagtagtccctgttctttttttttgagccattatcttttttttttttgagtttcttgatgatatgttgttcgcagtattagacaaaattatcctaattctcaaatttgaaaaaaaagaatggttcagtatttcaatatttgacaatacataaccagcggtgggtacacgtataaatagacaagccgctctagaggcatcatctctacacttcagttattctgctataggaaataggacatgacatgatcttccagagatgctcaggtaggtcatgcatcaacaacgtgaaaatgtctagacatcacagggagaattacatgaccaaagaaaagacgatttatcacagcagtcgcacaaaaggagaacaaatttataggttcattacctgttcctatgaataatggcctaacctgaaacatggcaatctctagctgctcctgttgtgcgagagctaaccttttctatactgggacttcttagtggcaccaaaaaggagtacaactccgctggctctccagcctttgacaacagtattactcacacttgatggattggtatatgtgacggacaaagcaacaatgcggcacgggaaccgttccatgcccggtgccggtaggttgtgcccaataccagttccaggtgtggaaggttcctggggtcattgttccagttgtgcctcccatggtcggagtggttgatgttccagcaccacttgcactagcagggaaggagcagccagaaacacttgggtcgctggtggtgagggtggcggtgccggtgaagtcgcaggtggcgcccatggccctgttcctctggaagtagctgttggcggcccaggagcagtgcgccaccacggtgttggggttgaagcactgcccctgctcgtggatggagttgcagtccgcgcccgcgccgcacgcgtagtcgatggtcttctgcagcgccgcctgtggctgatccgacctgcacacgcaccaatctgaagcgacgagactggacgacatgagaagcaccagcgccgccaccaccaccgcctccattatgaaagctaccaccaccaccaagcaagcagcaagaacagagagattcttggaggcctggacgagtagaagagatggagacgagctagtagaggagagtgagtgagtgagagaaagagagagagtgtggagagagcggcataagaacagtaaatccggcagcaccaaacactagcaaagatgtagtagagctcaatatagatggcactgaaaggtaaaaacccagccatagacatctgcgggattgtttgccggtaccacggaagtggaggaatctccctaggatatttggtggtacggcagggagcttggaattcagtcttgctgtttttaccagcaatgcctcccaaaactagaaggggaaatgtaactaaggtccagatgtatagtgccgaagggcaaagctgctgttgcactataagcaatagcaacagtgtttaggaagcagaaagtcaggaataggggtccacagaacaggcatcctgtcaacagcaagttcctcacccagtttgttccctctagctgacagtagaaagaggttgcaatatacccagcaattcctgaagtgagagcatagatgacaaccaatgcagtaaaaagagcaccacgattgtacgggtagaatactccaacaagtgcaagaaggaatataaaggttgtgagggcaaacagttgagttccggtgccgagagcagccgaaaaaaaggacttgttcttggggaaccggaagacatccccatggatatacttccatccagactcttcttggtcatcagctgcttcctcatcatgggcatacttgacaaaatcgttcttcagtactcgcatgaggatggtcgccaagaatccagtcaaaaggaggactgtaacacaagagtttatgatagagaaccaatggacctccaaatggtgtgggaggttggaggaactggaatacttctccatcctcttctcaaatggtgtgggtgtctccttccacttgactgagtaaaggaattgaacatcagcttccttgtcctcagtcaggtcaactagtgcactctggtcagtgtgcacattgatctcaataacccggtcattgttgtagaggatgtcaaagatgatgtgcctgtacaggtaatacttccactctttcggatctgtcttgcctcccttctccaccttaccaatgaatccccacagtgggaggtcatcgtagtacatctggaagtagtagtcctttgctaccgcattccgaaacttggccacctcctccttggtgagcttcttcgagcaaaccggcttggagtcataatccacacggaaatcaagcttgtaaggtgcatcaaccaaccggtccccattgaggacctcaccgagtgcctcgctcttctccttcactttctctggagagcagaaaggcaggtcaaagtaccgatacgtctcactggggttgtggaaggggccgaccttgttggcgtagagcgggacgagctcgttggccttgtagcggtggtcggagccgtcggcgacgacgccggtcgccgcgagggccgcggcgagaaggacgagcagcgccgcgggggccgccgctgccggcgaggccatcgctctcgtcggggcgggggcgggggcgcgcgcgttgacgaggagagagagcgcgcgcgcgagggtttgggggtggtgggatgcacgcgcggagatctgagccggagtggccgctttgcttgctccttaatagagaccgcccgcgtacgagacgagacgaggcggaggggagatctggagaggatggtggcgtttc

SEQ ID NO: 74521 - DNA, 6084 bp, Oryza sativa
  Clone ID: PAT_MRT4530_7469C.1
atggccgagcaaggaaaagcgcacgacctctctccgagtgtgagcggcgacgacggggagccgaatccacgccgtcgagctcgtactcccccacctcctccgcgccaaagccctaagcagggggaggcgcttgagagggtcgacaaatccgtggcatcaccagtcgcgggtgatgcaggagaacggcgagatggggagcgtcgcctcctcgtctacggcgacggcagcacgcctcagggtgcgcttcaggctgctggcgcgctcctacgacacccgcctgtcgtccatgacccggagtctccagcccaacgatggctggaagacgtggccaacttggtcatgacggcacagcagcgcctgggtgctggtggacggtccgccaccaccaagacctccggcgccgctaccaccggctccgtgtcgtcaaggcggagggcgcggcgagcggcggctgctgcgcgccattcggccgccactccctcgtcgacacctccaactcgggaggatcagcatggagagccggatgcccgcatcgacatcgagcgccggcgtaataaccggcgtactccccgcgcaacggagggcgcctcttcgtccagagtgtcacctcgacatggacgtgaggatcagccctccgtgcccccggccggtggtgttggctgtagagcctttgtggcgagtcttcggaatgtccgttggcccccaaggttccggcccaccatcaccgagaagtacgatgggagcgtcaaccccaccgagtttctccaggtctatacgaccgggatcgaggccgctgggggtgacgacagggtcatggcgaacttctttcccatggccctaaaaggacaggcgcggggttggctaatgaacctgccacccgcgtcggtccactcctgggaagatttgtgccaacagttcaccatgaacttccaaggcacatatccgcgcccaggcgaagaagcggacttgcatgcagtacagcgaggcgatgatgagtcgcttcgctcgtacattcagcggttttgccaagtccgcaatactataccatgcatccctgcacacgcggtgatctacgcgttcagggggggcgtgcggcacaaccgcatgctcgaaaagatcgcttccaaagagccccagactaccgcggagctttttcagctcgcggaccgagtggctcgtaaggaggaagcgtggacatggaactcctccggttccggagtggcagcttcggccgcccccggatccgccgctcagacagggcggcgtgacaggaggaggaagaagaggtcggaccgttccggcgacgagggtcatgtcctcgccgtcgagggcgctccgcgggccactcgaaaggggaggcctgcgagcgacaaaaagaaagaggctggtactcccagcagggagcgccccgccggcaggtggtgctccgtccacaacacctccctccacgatctcgcggactgtcgtgcagtcaaaaacctggctgagcgaacgaggaagtgggaggaggacaggaggcaggaacgccgtgagggcaagtccccggcggttccttccggcaaacggcgaagtgaggccaagcagaaggcccccgctgttgacatcgatgatggtgatgatgacctaggtttccaagaacctggggccaccattgccaccgtcgatggaggagcgtgtgctcacgtctctcgccggagcttcaaggctatgaagcgagagcttctggccatggcccctactcatgaggcgatgcgtcgggcgcggtggtcggaggttgctctcactttcgaccagaccgaccacccaccgtgcattgcccggggagggcaggttgcgatggtggtttcccccaccatctgcaacgtgaagttgggacgtgtcctcatagatggaggagcggccctcaacatcctttcccccgcggcctttgatgctatcaaggccccggggatggtgctccagccgtctcaaccgatcatcggtgtgacgccggggcacacgtggccattaggtcacatcgacctaccggtcaccttcggtggacccgccaacttccgcacggagcgggtgagcttcgatgtggcggacctcagtctgccctacaacgcggtcctagggaggcccgcgttggtgaagttcatggcggcggtccactacgcctacctccagatgaagatgccgggccccggtggccccatctctgtccatggcgatcttaaagtcgcgctcgcttgcatggagcagcgcgccgaccgcctcgctgctgcgtccaagcccgagggtggtgacgagaggcttggcacctccgcccccaccgccccgaggcagcggattgccacatgcgacgaggtcccggaagacgcgctcgtctccttcctgcgggcaaacgctgatgtcttcgcatggagaccagcggacatgcccggggtccccagggaggtgattgagcaccgtctcgccgtgcggccgggcgcaaggccggtccggcagaaagtgcggcggcaggccccggaacgtcaagccttcatccgcgaggaggtggctagacttttggaggccgggttcatccgtgaagtcatccatccggagtggctggcgaacccggtggtcgttcccaaggcgaacggcaagcttcggatgtgcatcgactacaccgaccttaacaaggcatgtcctaaggatccttaccccctgcctcgcatagatcagatcgtcgactccactgcggggtgcgaccttttgtgttttctagatgcatactctggttaccatcagattcgcatggctagggaggatgaggaaaaaactgcgttcattacccccgtaggaacctattgttatacatcaatgcccttcgggttaaagaatgcaggtcctacttttcaacgtactactcgaatttctttgggtagccaaataggacgtaatgttgaggcttatgtcgatgacttggttgtaaaaacgcgcaaccaagaaactttactttcagatctagcggaaacttttgagaacctccgctccgcccgcataaagctgaaccccgataagtgtgtgtttggtgtacctgcgggcaagcttctcgggttcttggtctctgcccgaggcattgaggccaaccccgagaagattcgagctatcgagcggatgcgcccccccagcaaacttagggatgtgcaatgcgtcaccggttgcatggccgccctaagtcgtttcatatcaaggctgggagagaaggcgctacccttgtttaagctcctcaagcgctcggggccgttcacttggacggaggaagctgaacatgcccttactcagttaaaggcatatctcagctctcccccggttctagtcgccccggagccaaatgagcccctgctactttacttagcggcgaccccccaagtagttagtgcagcgttggttgtggagcgcgatgaagacaatcctcattccgcgcacccccactctgtgccgacttggcccgggagcaagcagggaggagaggcccccgagtcgaacggtggcctaaggcccctgacgaccggagtcggccctctgcccgcttgtcagacggtgctgggtgcccccgaccctcaggaaggccccgaggccactgcgggaaggccgcacttatcgccctttggccccgaggctaaccctgtgctgactcgacccgggagagagcagggagaagaggcccccgagccgaaaggaggcctgaggcccctgacgaccggagctggccctttgcccgcttgtccgatgacgccaggagcccccgacccccaggacggccccgaggccactgtgggaaggccgctcctgtcatcctccgaccccgaggtcatcggcacagaagacgagtgcgccccgaggggccacttggacgaagaacgccccgggggtacggcccctagcgaagaggatcggccccgccgaaaggtgcagcggcctgtctactttgttagtgaggccctccgggacgccaagacccgatacccacaggcccagaagatgctttacgctattctgatggcctcgaggaaactgcgccattatttccaggcgcatcgggtcactgtggttacgtcttaccccctcggtcaaatcttgcataatcgagagggtacaggacgggtggtaaaatgggcaatcgagctttctgagttcgatctgcactttgaaccacgccacgctatcaagagccaggccctcgccgattttgtggcagagtggaccccggctccagagaccgtctcaattcccgaggccagcacggacccctcacagctgcctcaaaccgcccactgggtgatgcagttcgacggttctctgtctctccagggcgccggtgcaggggtcacgttgacctctccgaacggagacgtcctcagatacttggtccgtctcgactttcgagcgactaacaatatggcagagtacgagggactccttgccggactcagagtggcagctggactggggatccgccgcctcttggtattaggcgactcccagctagtcgttaaccaggtctgtaaggagtaccggtgctctgacccacagatggacgcctacgtacgccaagtgcggcgtatggagcgccatttcgatgggatagaacttcggcatgtacccagaagggataacatagttgccgatgaactctcaaggctcgcgtcctcgcgagcccagaccccaccgggcgcctttgaagaaaggcttacccagccgtcggcgcgacccgatcccttaggggagacggatgcgcctgaccggcccccgaggcccgtcggagtccaggcctcgggacccgaagggagtgctccaagctcccttagattgattgcttggatctctgagatccaaacatacctcacagataagactctacctgaggaccgcgaagggagtgaacgcgtacaacgcatttccaaacgctatgtgctggtagaagggaccctctatcggcgcgcggctaacggaatcctcctgaagtgcattcctcaggaacaaggcgttgagcttcttgctgacatccatgagggcgagtgcggagcccattccgcctcgcgtaccctggttggcaaggcctttcgtcaaggattttattggccgacagctctcaatgatgcagtcgatctggtccggcgatgcagagcgtgtcagttccacgccaagcaaatccatcagccggcccaggccctgcagatcataccactgtcatggccatttgctgtctgggggcttgatatcctgggaccgttcaaacgggccccgggcgggtttgagtatctgtatgttgcgatcgacaagttcactaagtggcccgaggcttatccggttgtcaagatcgataagcactctgctcttaaattcattaagggcatcacggcccgttttggagtgcctaaccgtattattacggataatggcacccaattcactagtgaactcttcggcgactactgcgaagacatgggcatcaagctctgcttcgcctcacctgcccaccccagaagcaatggccaagtggagcgcgccaatgcagaaatcctcaaaggccttaaaaccaagaccttcaatattctcaagaagcacggcgattcatggatcgaggagttgccagcggtgctctgggcgaaccgaaccacaccaagccgagcgaccggggaaacgcctttcttcctcgtctacggcgcagaagcggttctcccatccgagctcaccctgaggtctcctcgggccaccatgtactgcgaggctgatcaagatcagcttcgtagagatgacctcgactacttggaagagcgaaggcggcgcgcggccctccgagccgcgcgctaccagcagagcctgcggcgctaccatcagcgccacgtccgggcccgatcactctgcgtcgacgacctcgtcctacgccgcgtccaaacgcgtgctggattgagcaagctctcaccaatgtgggagggtccgtatcgagtgatcggtgtcccccggccgggctcggtacggctggccacgggcgacggcacggagctgccaaacccgtggaacatcgaacaccttcgtcgcttctacccctga

SEQ ID NO: 74522 - DNA, 795 bp, Oryza sativa
  Clone ID: PAT_MRT4530_746C.1
atgaagcagctagcagaccaccatgccagcctcgccaggggaacccgttgccagtgccacgccggaagtcggcgctcctccggctcaccctccccctccatcgtcgtcagccggcccctgccttggcggcggcgatctggaggagtccgccgccctgacgacctccctgtcagccttccgcgaccaccgcccgtccgccggctcctccgcctaggctgccaccgcttgtcgtcgtctctccggctggggaccaccgccgcccggggggatctgtctctgccactgccagggggacagccgcctcttctcgacgcgtcaggccgccagccaccgatgctccgccgttgccgtcggggctacggggccgccgcctggccggcggtcggcgtcgccttcccggctcccgatctgaccgccgccgccggggggatggagctcgacccctccggccagccggccctgaggccccctgttggcgccggccagcctccgccgcacgacctcctcccgccgaggccatcggcttgtcggcgacccggacaacgcggcgtcctaccgctcctcggctcctgtcccctttgtctctctcgttgtggtaatgggagatgggagatgattggttggctggttgacttgcccgtgtggactgtgcttcgccgctttcatcgtcttcatcgccgttcgcgcatcgacaacctcgtcatccgcactggtcatcgtcagccgcttagggtcttcttcctctacttcgagcatcgccgccgcgtctccaagctgccactgtcgccgctctag

SEQ ID NO: 74523 - DNA, 2464 bp, Oryza sativa
  Clone ID: PAT_MRT4530_74700C.1
atggctacaaaactccgtcaaccgtcaactgatgcagaaaaaacagaggttggagaaatagacacaagggctccttttgaatccgtcaaagctgcagtaagcttatttggggaagttcgattttcatctgacaaatcagctgcaaggaagccaaagcctcctcaggcagaggtagtgaactttgtcccgaaacaaggaacgggaacaacacaagatgacgtaccgaacgtggatggatcacatcctaacataaggaggcgaatccctgaatcatctttttttagctcaactcagacactcaaatctgagttggactctgacatcagtgtcccagtaagactggacccagttagcaatcttaggctcttaagggtgttagctaaggagacagaactgcacttggcccagaaagagttaaataaatacaaggatcagctcaacaatgctgagacaaccagagtgcaagcgttatctgagctggagaaagctaagaaaactgttgaggacctgaccaataagctggatgctatcaacaagtccaaagagctggctattcaagcaacagaggatgcaaaaactcgaacaaagcagcttgaaggtggagactcgcttgaggctgttggaaaagatggccctttaaagcaggaattggatgttgcaagggaacagtatgttgttgctttggcagatcttgatgcagcaaaacaggagcttagaaagctcaagaaggattttgaagcttcattggatatgaggttggctgcagcacagcaggaagaggaatcattgcacttagctgaaacaaacaagcaaaaggctgatcagcttcgcaaggagattgctacaattcaagagtctcttacgcatgtgaaggcagccactgaacaagcacatgaagaagaggctcaaatccttgctgagaaagatgttactaggaaaacatacaaacaagctttggaagaagccgagaagaaattatcctctttgaaaaaggattttgatcctgctgtttataaaagcctcaaagaaaagctagatgagaccaatttggagatttcatctatgcagaaaaagattgaagatgctcgagctcaagatttggagtctattgctactgtcagcacagagttggatgatgctaaggaaatgttacagaaagtggcagaggaggaaagttctcttcggagtttagtagaatcacttaaacaagagttagaagctgttaaggaggagcatgatcaattgaaacagaaggatacagaaactgaatccatagttggagacctacatgtgaagcttcagaaatgcaaatctgagcttgaggcagccgtagctgctgaatcaaaagcaacgtcagcttctgatgacttgatgttggccctccaacagttgtcttccgagtcaaaaaatgccctgcaggaagctgaagtaatgcaaaagagtgctgcagatttaagggatgaagctgaagctgcacgagtagcattagcagaagctgaacaaaagttgcaatctgctttaaaagaagcagaagaggcaaaatcagctgaagcaaaggcccttgatcagatcaagcaactatcagaaagagcaagcgctgctcgggcctcaacatctgaatcaggtgcgaagataacaatatcaaaagaagagtttgaatctcttagccgaaaggtggaggagtcagagaaattgagtgagatgaaagttgctgccgctatggctcaagtggaggctgtcagagccagtgagaatgaggcgattaagaaattggaggcggctcggaaagagatggaagacatggaattggcaacagaggaagcactaaagagggcagagatggctgaagcagcaaagagagctgtagaaggtgagctcagaggtggcgcgagaaggagcagaagaaagctgctgaagctcagcctgctccagaagcgcaagcacatggaactgcatcttcccctgtacagaaagcttctgctggaaaagccaatgagaagaatgatggacctcacaagaacagcagaacactattgaaaaagagctttatgctaccaaatattacaagcatgttccataagaagaagaatcatgccgacggcagttctccttcacatcttcctggggacaaatctgtataatctatctgaagctcacgtctgaatgatgtgattccaaacttggaatcatggctttatgtatgatattatatttgtagttgcttgtaatatataatgttatcctggtctatatctatgacttgcctgttcctgactatttgggctcctgtgataagtttttttcttttttgtacctctgaaattcgctgtggttatattgatctgagcagtttgtctgccctcaacagaaataaccacgttttattcatctcgggcttgtcctcccgctctctcgctccgcgggccggttaaattctggattattgaattgtgatttatagacc

SEQ ID NO: 74524 - DNA, 1796 bp, Oryza sativa
  Clone ID: PAT_MRT4530_74701C.1
gcacgagggagagagagaactagtcctctctctctctctctcacccaatccatccatggagctgtagcctgcaagcttccacagagaagagaacacttgggaggaggaggaggatcgagctgtagatctttctctccgttgtactcttctccttggcttggcttccggaccaaactaatcacggggggctttcgcttcgttagcaacgctggcgaagcttcttccggggttctagaaccttctagaaggagtgtggggttatggggaggcagcggtggtggctgctgctggcggtggcggcggcggcggcggtcgtcgtcggtgccggggcgcaggagacgtgctcggacatggtgccggcggcgccgcggcgcggggcgtggatgtcgctggccagcttcggcggcggcggcggcgacgggcggacgctgagcacggcggcgttccaggccgccgtggcgagcatcgagcggcggcgcgcgccgggcggggcgctgctgtacgtgccgcccggggtgtggctcacgggccccttcaacctcacctcccacatgacgctcttcctcgcgcgcggcgccgtcatccgcgccacccaggatacgtcaagctggccgctgatcgaaccattgccgtcatatgggagagggcgtgagcttcccggtggaagatacatgagtttgatccatggcaatggccttcaggatgttgtcattacaggcgataatggaactatcgatggccaaggcagtgcgtggtgggacatgtggaagaagggcacactacccttcactaggcctcacttactcgagctgatgaactcttctgatgttgtcgtctccaatgtggtcttccaggattcgccgttttggaacatccatcctgtttactgcagcaatgtggtgataagaaatgtgaccgtactagctccacatgactcacccaacactgatggaattgatccagattccagcagcaacgtctgcatcgaggactgctacatctcgacaggagatgatctgatcgccatcaagagtggctgggacgagtacggcatggcctacgggcgccccagctcgcacatcaccatccgccggatcaccggctcctcccccttcgccggcttcgctgtcgggagcgagacgtccggcggcgtggagcacgtcctcgcggagcacctcaacttcttcagctcggggttcggcatccacatcaagaccaacaccggcaggggagggttcatccggaacgtcaccgtctccgacgtgacgctggactccgtccgctacggcctgaggatcgccggcgatgtcggcgggcaccccgacgaccgctacgaccggaacgcgctccccgtcgtggacggcctgacgatcaagaacgtccagggccagaacatcagggaggcagggtcattcaaggggatcgcgacgtcggccttctccaggatctgcctgtccaacgtgaagctcaacggcggcgcggcggtccggccgtggaagtgcgaggccgtcagcggggcggcgctcgacgtgcagccgtcgccgtgcacggagctgaccagcacgtccgggatgagcttctgtacaaattcgctgtgaactgaaactgtcaagcgtgcatgttcaggggccaagttgttctataattatcaaggcggtttttttctatcgatgaggcaatgagcgtgttatgttggtaacgcccatcaaagatatgctaaacatttaatcattcgtcagagtatatgagtaattctccggaaaaaaaaaaaaaaaaaaaaaaaaaaaaaaaaaaaa

SEQ ID NO: 74525 - DNA, 174 bp, Oryza sativa
  Clone ID: PAT_MRT4530_74702C.1
atgctcaattttaggccgatttattccaactcagttgcggcaattttattcaaattaactattaataatgctccaattctaaagcttaattaataggtgatcaccacctttagatcgaacttctggccgacgaccaacgttagcccggtgaactgcgcgaagcccacagcttcc

SEQ ID NO: 74526 - DNA, 309 bp, Oryza sativa
  Clone ID: PAT_MRT4530_74703C.1
atggaagacaacatggaggggaacgacgatggtggtttcttgggcatggaggcaagcggctgtggtctcaagggtggaggaggacagcgatgggccgcctccccggaagctggagccgaggtggactctgtaccttccctggtggaggtggaagtcgatcggtgcgggccacccggacgtcgaggtggacggcggtggtggctcctctgccctagccgtgcagggaggagaggaaagccggcgatggtgcaccttcgcctgcaaatggttgtggagaacgtcaaagaacaaccgaacccaagaggatga

SEQ ID NO: 74527 - DNA, 227 bp, Oryza sativa
  Clone ID: PAT_MRT4530_74704C.1
ggcttgctcgctcaaaagagcgaggacacttgggtccattgttacaaaggaacaattggttacacgaaatcatcagcaccttgaaccaccaaggttagctacaggaggtgaaggttgtgggaaaacttcagatttcagatccctatctatacacattttgaacaagggttagagattttagaccatgggtcatccttttttttcatgtcctgggcttgcagcccgtg

SEQ ID NO: 74528 - DNA, 2351 bp, Oryza sativa
  Clone ID: PAT_MRT4530_74705C.1
atgatggtgaagaaaaaaacctcttggagccagattgtgaaaaatggcaggccagcaaacacgtctgttaccacaagaaacctccgaccacaagatcttggggctgtgatatttggctgcacaaacaataccatcgcagagtgtcactcacggcaacttttcggcttgccaagaacacatctctcctatgtacaaaatatcaaggaaggcctacctctgttcctgttcaattacgatgaccgcaaactatatggtatttatgaagctgcgagcaatggcaagttctgtcctgaatcaaatgcatggttacaagatggcaagggaaagaccagctatcctgctcaggttgccatgcggatcaaagtgtggtgtgttccactagcagaaagtcagtttagaggtgctattctagccaactactaccagaggatgcctggcgctcctggccagaagcttcattttttccagtttgaattggatcatgcacaaacacgtgctttgatggatatgtttaccccttcaccttctaccaacaatggctggtcgcctcctgttgcacaacctgctgatgagcatgtgagatcgtcatgggcaccagtgtatgcggggaataatggtctcaaatctgagaagattgtaaagtcatatgcggatgtggtaaacaataacaaatttgagcaagttagaacaggagatgtggtccatgtggatgcagagcatgctagctcaggtaatgaacatgtcaatggttttgatgatctggattgtggagacacaaccccagagagtgaggagtatgcactatcgggtaaggaggttgaagtgcaacaacaacagcagcagcagcaacaagaacagtctggtcagcaggataagcttagctttaaaggggtactagaaaagctcaagatgttgtctgtccagcagaggaagtctactttttatgccaatgctactgaaactgaaagtattgatgcgtatagctgtaaggatgtacaagatgatttgccagaaaacttagattctgaagtagatcagttctcctgggggcattctaagttgctgatgcactcattggactcagagtcctgtacagaagtcaagttggtagatatagtcaaagagttatatgagcggatagcgatcatggagaagaagcaggcttggtccaataaagaactcaaatacttacaaggtgtgaacgagaggttactaaaaagagttgtggagctcaagggcacggtgaagacattgaattcaaagatagatcctttaacccttgatgattcccttagccagtttgttgaacaatgtttgggttcagaagatgtcatttatctagttggtggttttgatggcttctcacatttgccatcactagactctttttccccttcattggacgtactaacacctctcaaatcaatggctgttggaaagtcatatgcctcaactgttgcattagatggcaagatatttgttcttggtggtggtgatggagtctgctggtttgatacagtcgactgttatgaccgaagacgtgatgattggaccacatgcccatcatttactcatgataaagggagccttgctgcagttagcttcaatggaaaaatctatgcatatggtggtggagatggaaatgagtgtttctctgacgttgaagtatttgatcctgcttatggaaagtggattaaaaatcagtctatgctggataagcgctttgctctagcaggcgtggaacttaacggtgcaatttatgcagttggaggcttcaacggtgttcaatatcttagctctgctgagagacttgatcctcgggagcctagctggaaaagactcccaaagttgagtacaggaaaaggttgtcatacactggcagtgcttgatgacaagatattctcaattggcggttatgacgctgaggctaaaacaatggtggctactgtcgagttgtatgagccaaggatgccatcatgggtgatggctgaacccatgaactacaacagaggatatcattcttcagctgtacttggtggctcgatcttcgcttttggtggggtgaaaggtgaaggagatgcaatcttggatgtggtggaacgctacaaggaagggtgtggttgggtgactaccgagtcgagttcagttttttcctacctgtttgaggattttactgaagcagatgtgggtctggctgggttcaccattccagcaatcacaaaccacatttaaaacaaacagatagttcaagaacttagaaggctcttcttttggctgaatttagtgctgtagacatacataagctcttactcatcttttgcataaactagaaaaccattcaatgttgagct

SEQ ID NO: 74529 - DNA, 790 bp, Oryza sativa
  unsure (1)..(790): unsure at all n locations
  Clone ID: PAT_MRT4530_74706C.1
ctgagacctgatgatttgttatctcgtcgcgtcgcgtcgcgtcgtgtccagggcgaatcctcctctcctcgcgagtcgcgacacgcggagctttggcacctgcagcgatggcgaccgaccaccgccgcttccccgtcttcctcgccgcggcgctgctcaccctcctcctcctcccggcctccgccgcggccaccgacgtcgagtactgcaggcaggggcgggattatcctgtgaaggtgagcggagtggagatcgtccctgaccccgtcgtcagcgggcagccggccaccttcaagatctccgcatccacggataaaagcatcactaaggggaagctcgtgatagatgtcaagtacttctttttccatgtccattcagaaagtcacaacctttgtgaggagacctcttgcccagtaactggtgaattcgtgcttgcgcacgaacagactttaccatcaatcaccccaccaggttcttacactctcaccatgaggctactagatgacggcaacaaggaactgacctgcatctcgtttgggttcagcatcgggttcatttcacctcttgctctcatctaaattcagctggagtcacagcaatgttcttgcagaactcccatagtcctaccacaacatgttccactaaagccggtttaatctccctgagttgaacatcttactacttctggtgttatgcaataactatagtcaattgccgcttatgttcagtatactggattgggacaattgcccctgtaaaaaaaaaaaaaaannnnnnnnnnnnnnnnnnn

SEQ ID NO: 74530 - DNA, 2343 bp, Oryza sativa
  Clone ID: PAT_MRT4530_74707C.1
atgccgaaatctaaatcattcgtcccagtggctggtcatgctaattacctgcataaagggtcttccctctccgcgaagcatgcctctaatgtactgcggtcaacggatggcaccttctcgttcggcttctacaacctttcatccactgtgttcaccttgtcaatctggttcaccaattcagctgacaagaccatcgcctggagcgcaaatcaagaccgccctgtgcatgagagcgggtcgaaagtcatgctgaacaaggatggaagcatggttctcacagactatgatggcacggttgtctggcaaatcagtagctctgcagaagctgtccgtgccgagctcatggactctgggaaccttgtggtgaaggatcaaggtggaagcatcctatggcaaagctttgatcatccaaccaacactctgctcccgatgcagcctgttacagccaccgcaaagctggtatcaactgatccctcacacccaacaagttactacactttacggtttgatgatcggtacgttttatcacttgcttatgatggaccagacatctttaacctctactggcctaaccctgaccagagtagctggacaaactataggatctcttacaaccgtagcaggagtggtgttcttgataagctggggaaatttatggcgagcgataacacaactttctatgcctcagattggggtttggagattaagaggagactcacgttggactatgatggaaatcttcggctttacagcctgaatgagtcagatgggagctggtacaattcttggatggctttctcccaaccctgtgaaatacacggcctttgtggttggaacgggatatgtgcatacacaccaaagattggctgctcttgccctcctggttatgtggtcagtgatcctggtgattggagcagaggatgcaagccagcattcaacctcacttgcagcaatgatggccagaaaatgagctttgtgcgcattcctcagactgacttctggggctttgatatgaactatgtcatgtcaacatccctgcacgcttgtagagcaatgtgtttggcgagttgctcctgtgtagcattcgtgtacaaagtgtaccctaatggctgcttcttgaagtctgatctcttcaatggcaagacagtttcaggataccctggtgcagcatatatcaaggttcctcagagctttctgtcccggtcacaagcacatgtttctgaacttgccaatcgccatgtttgcaatgcatcaaaaacacaaacgttcaattacgctacacagagcaacaaaggaacgggcatgatgtggtactactactactgtttcctggctgcattctttcttgtggagctctgcttcattgcttttggctggtggttcatggcaaaaacacactcagcacgatcagcgatatgggctgcggaggaaggctacagggttgtaacagatcatttccgtaggtttacctacaaagaattgcggagggctactaggaatttcaaagatgagcttggccgtgggcgatatggctctgtgtacaaggggattctagatgacaatcgcatagttgccatcaagaagctcaaagatgtgaagcaaggtgaggccgagtttcagacagaggtaagtgtgattggaagcatctaccatatgaatctggtgagagtaatgggtgtatgttcagagggaagtcaccggctgttggtctatgagtatgtagagaacggttcattggccatgttcttgtttggtagcaagggactgttacagtggcagcataggtacaagattgcagttggtgtggccaaagggctagcttaccttcaccatgagtgtatggattggatcatccattgtgacgtaaagcctgagaacatacttctcgaccaggatttcgagcccaaaatcagcgatttcgggttcgcgaagctgctacagagaaaccagactgatcccaacatgtcaaagatccgaggaactaggggttacatcgctccggaatgggtttctggtgttcccataactgaaaaggttgatgtgtacagttacggagtggtgcttctggagttagtcatggggcttcgaatgtctgagctaccagcaaatggcagtgcagatgaaggtgctgcattgaggcagttagtgtggacagtaacagagaagattaaaaccggtgaccaaacattgatcgatggtgttgttgatcctagattgaatggcaactttgtgcgctccgaggtgctactggtgctggagtttgctgttctgtgcctggagaaagaaaggaaccaaagaccaaacatgaatcatgtggtgcagaagttcctttcgtatgaatga

SEQ ID NO: 74531 - DNA, 250 bp, Oryza sativa
  Clone ID: PAT_MRT4530_74708C.1
cttcctttttttttttttttacaattagcaaaacatcgatactcccactggtggggacttacaaaacgtgcagacgtacaacctatccaaacaaatgaaacttgtttgatgatgcacttatgcgagaaactaaacggttagatcctaatcggaaacaatgcgatcattgacaaactgaagccgctgaaattatcttaatagtcgggggtggggaactgctcgtggatgtggaaaatgaaaaagacctttt

SEQ ID NO: 74532 - DNA, 443 bp, Oryza sativa
  unsure (1)..(443): unsure at all n locations
  Clone ID: PAT_MRT4530_74709C.1
ccgatangcaaggcccaatcaccagctgccactctcaagaacctgactttggatcgctatcccttttgcttcttattagtgctcagggaaagaaagctatagcagtagctaaataagccagagagaggctaagagagagagagaggtgaggggagagaagaaatcctcgcagaattcgagcaagaaccgagggagatcgatcgcctcttgtcctcgttccgaggcagagatcgacctgaagtgagctgagctgcggcaaggaggaggaggaggaggaggagaaaggagattggagatgatgatgagggatgtgtgcatggaggtgctgcctccgatggaccactacgcgtagagggggaactgtctcatggcgcgcaagtggtcgccagaggagaacaagcagttcgtgcgagcgctcgccgggctggacctgcattgcccgg

SEQ ID NO: 74533 - DNA, 382 bp, Oryza sativa
  Clone ID: PAT_MRT4530_7470C.1
atggatgccactctcggcgcctccactacccatggctacctcctcctcctcccggccaactccaccaccttcttctccccgctcctcgctgccctcctcgccgtcacctcgctgctctggctcgtcccgggcggccccgcgtgggcgctctcccgctgccgccggcccccgcccggcgcgccgggcgcgctcgccgcgctcgccggccccgccgcgcaccgtgcgctcgcggacatgtcgaggtccgtgcctggcggcgccgccctggcgttcttctccgtcggcctcacgcgtttcgtcgtggccagccgccccgacacggcgcgggagctcctgtccagcgccgcgttcgccgaccgccccgtgaaggacgcggcgcggg

SEQ ID NO: 74534 - DNA, 341 bp, Oryza sativa
  Clone ID: PAT_MRT4530_74710C.1
catctacacccctctctttttttttttagctagaacactaatactaccatggtagagattatacccatgcagtactgttcatcacaatttaacaacttaacttacacttttacctatacatccagatccatgcatgcacgtaacaattaccacaactctcacacttagtattaatctcatcacattcatatctatctctctccttcccccaattcattaacatcttatacatacatactccacctaaaaaaaaaagaagaactcagatgagactcattccaaatccccaaccttaaactttcaaaatccacaaaccaacaagctgatttagatctcccata

SEQ ID NO: 74535 - DNA, 737 bp, Oryza sativa
  Clone ID: PAT_MRT4530_74711C.1
atggggctatcgcaattgataaggtcagccaggagggaggtagttgttgtgacaatgttgatgttgtcatggctaagtagggagaacagggaggaggcgaggccaagggggacgaagttcgaggcaccgacgataatatggagccgccacccccattcgcctgctctcccgaaccaccgcagcctcctgccgctcgccgctcctcaagctgcaacgaggaccaacgcctacgccacctcctcgagctatagctgcggccggcatcgacgccggtgcctcctcctcttttccccaaccaacgccggtgtagcaccggtccgcgtccttttccctcaacctgggatcctagatctgttgcgcggccgtcccctcgtcaagtcagatggcccgaacctccgccgtggctcctcctcaagccggatgccatggatctaccgcgaccggccccctcatcaagcaacccaaccgagatccgccatggtcgcctcctggccatgcaaggctggtggagcctcggtggtagccgagcattcttagccgtgcagcagagggtggtgccaaagcctgagctctgggatgatgcagtgatttgggaaaaacaagcagtttgctcctggaagcatacttctgtaggttcaagcatatctatacttagtagggctgaacttgttcacaaattcaaagatatgatcaacgtgaggcttatgggagcttccccaatggataaatttaggtaa

SEQ ID NO: 74536 - DNA, 650 bp, Oryza sativa
  Clone ID: PAT_MRT4530_74712C.1
atggttttcaaggagaccaaggtgatggctctcaaggagttcagggcattggctcttaaggagttcaaggtgatggttctcagggatttcaaggtgctacagtttaacaacttccaggatcaggacgactatgccatacatcatgttttgatcaatcaatttgggatattagtcaatactttgtcaaacatggtgaagtcaatggttgatggttcaatagctgaatatcagactacgggaccagtttatcttcaaggaggtactttcccaaattatcggcccttaatcactgataatcaacaagccgttcaatcagttcctcctaacgcaccatcgactcagccgacggcaccagtatcggctcctgcacccgctgcaccttcgtcggctccaggtcaattaatcaatccttggttgttggtgagagaacaaccacagcatagtgggcagaatgtgaatcggctaactccagcagcagccgattcagcaaacaccgccaaggctgcaggttgtgcagctggttcaacaaacacccccaatccaacaggttgtgcagccaattcagcagacgccaccaagacaataggttttgcagccgattcagcaaacgccattaaggcaacaggttattcagcctattcaacaacaag

SEQ ID NO: 74537 - DNA, 5099 bp, Oryza sativa
  Clone ID: PAT_MRT4530_74713C.1
atggagtcagagacagaaggtcagcaatttgatgatatggatgcaatgctacgaaatggacttggatttaatgatttcaatgctgtagaaggtgatggggatgtgggtgaacatagtgaagatgctgaaaaattctataagttagctgctgatgctagccaagatttatatccagggagcaagatgtcaaaacttcagtttatcataaaacttctccataaacggttacataggctttttatgtcagaaaagacagcctcagatatgcgttggcatgctgagggcaggacaaaagatggcttattacgacatcccgcagattctcctgcttggaagaatctggatcagcaatgcccgatatttggtgctgagagtcgtaatattagactcacgttagcgatagatggcttcaatccttttggaaatatgagtgttagtcacagtacatggcctgttgttttaattccatacaatcccccaccatggttgtgcatgaaacaacacaattttatattgtctttgcttattcccgggccaacacaaccaggaaatgatatggatgtgtattttgaacctttggtagatgagcttttggatcttttcgaacaaggtgtaaagacatatgatgtctcacgtgatgagtggttccaactacgagctgctattctttacaccattactgatctcccaaggcttggatatgtgtcaggccatcctacttcaggaaaatttgcttgtcagcattgccacttaaatacttgttctctatatctgaaaaagggtatgaaaacctgttatctgggacatcgtaggtttttgccacaaaatcacagtttccgatttgatgaaaaatcatttgatggaactaaagagcttagagatgctccagttcaaccttctggacatgatattttgaaagagacagagaatctgaatgttgtttttgggaaagctgagaagaagaagcgtaaacgtaaggatgatgataataatgatggtggtagcacagttatatggaaaaagagaagttgctttttcagattgccgtattgggaacatcttttagttagacacaatctagatataatgcatattgagaaaaatgtttgtgacaacatagtaaatactttgttgaatgttgaccgcaagtccaaggataatctcaattctcgtttggatcttcaaagtttagggataaaacaagatatgcacccagttatgcaggggacaaaagttttcttgcctccaacagccttctctttgagtgctcatgagaagaaactgttctatcaagttctaaaggatgttaaatttcctgatggttatgcatccaacatatcaaataagtatctgctccctttggccattaggagaattttgcctgagaatgtatgtgtaccactaattcgcctaagtaacttcttccagaaaatgttttctcccgtgattcgtatcagtgagatggaggagttggagtatgaaattgctgaaacaatttgtcaacttgagaaaatcttccctctgtcgttctttgatataatgcttcatttaccaatccatcttgcacatgaagcaaggttggctggcccagtacaataccgaaacatgtttcccatagagagaaagcatcgtgagtatattttatcaactggaattcaaagaacaagagatattgaacgtgtgcatcatgagacatttcatgattggtttaggacacatgttcaggatgtaatggccaaaggagaaaacccatcaaaagaaattcagattttggcgaaaggccctgatatgcatgttataacatacaacagctatcttataaatggatataacttccgcacaaaatcttgtgatgaagggaaatcaactcaaagtagtgggctagttgtttttgctgagacttcaagtttctctagtgtgaaagacataaatcctgtcattggcaaagtgccatactatggcaacatcactgacataattgagttaaattatagtgggagaggtcaggtagttctattcaagtgtgattggattaagctgtctcgtggcaaaggtgttaagaaagataaatatggggttacacttgtgaattttaaccacttgtctaataataccaatagtttggccgatgaaccttttatcctagcatcacaagctacacaggtgtattatgttcgagatcctatagatcaagattggtatgctgttcgcgaatcaaaatcaagggacttctatgacatgggtattcttgaatgtgaaagtgagaaggatgtatatcagcaaaaagaccaagttgatgtgatgaacaatagtgtcaacattgatgttgattgtggcaatgattatctcactagaaatgatataaatggaacaactattgatttggctgctgtctctcaacgggggaataatggcaaaagaaaaaaaagaaacaatgaagtccttgtgcaacacctaccacacctagcagggaagttcaaaatgaatgcccaaaagacaagacaaattacttcaaatatgccaagcaaatctgttgattttcaatgccatgatgcctacttcagtgaggaagatgtacaagaccaatcatatgaagaaaatgatctaagagaattgagcgaagcggatgatatggatcaatcctttgaagctaacatggattcatatgatggaaaaaatgtaaaactgaaagttgactacaatgagcattttcaaccagttggtccctatgcatcaaagttagcaaatgtgattggcaatcttgccaaaggtaaattcctatcacttgcttatgaagattggactgatgtgcctaacaaggatgatgtctgggataacgtgaaggcccgcagcaatcgtggaaaagcaaatcgtgcaaaaatggttgcagtacacaccattggaactaggagcttagcaaatgttcgtcatgatatggagaaaaaaaaaggtcgaaaagttagtcgagcagaagttttcaaagttgcatacactcgtaaagatggtagaccacaaccagctcatgaagtaacaattatacaaccaagaattgttgaagcattgcaactaaatcagaagaggcctgctatgaaggtacaaccaagaattgctagagaattgcagcttaatctgaacaaacatgctaggaaggtacaaccaagaattgttgaagaatctcagcttaatcataacagacatgatgggatggtgcaaccaggagttgccagagaatcgcaagttaatcaaaatatgcatgttacgaagggggtacagaagcatatggccaggtacaataacaacaagcctactgaaattgaaggggccaatgtgggaacaactaaacatgctaatgtcaaaagggcagcattagcttgtgaaaatgtggttggaagggatgtctttcttaagagaattgtccgtccatataaccgtgttgcaagagctactattcaaagtcaagaccccttagaaatggtcggaggaacaatgctgggaagggagtgctacaaagtagtgatagacagtcttatatgtggagatgctgaattgttccggccgcacagaaatttgaactatattagagacgctattggtcattgcattgcatggccatcccaactagttgaagaagtgtcacctcagtgcaatggggaagtgacaaaaacaggcacttgggatcgttgtttgccgtacgctgagttctcatacaacaacagttatcaggccagcattcagatgtcgccgaatgaggcaatgttcggtagaaagtgccgcactcccttgtgctggactgaggtgggcgaagcgctggtattcggtcctgacatgctcaaggcagcagaagaacaagttaagctgatccgagaacgtttaaagacagcgcagaaccgtcagaagaattacgctgacaatcggaggcgtgaccttgagttcgaaaaaggagatcatgtgtacctgcgggtatcacctctccgtggtatgaggaggtttgggatgtccggcaagttagcaccccgctacatcggcccctacctcataaccgccagacgtggcgaagtggcttatcagcttgagttacctgaaggtctcgcagatgtgcacaacgtgttccacgtatcccagttaaagaaatgtcttcgagttccagaagaacaagttcccctgggtaatatcgagctggaaaagaatctgacctacaaggaaaggccgatcaaggttcttgaagaggcagaacgtcagacccgaaggaagactatcaagttctacaaggccactccccaccggggccagctaccacttttccctctcggccgccgcgccaagccgtccgctcggccgctgccaccacgcgcggccacatctcccgcgcgagcaccacccccgcgccactgccatttcgccaccacgactgtcagcacctccggcctccatctcggccgaacgaatcgccaccgcgaccaccgccgtcttcgtcttgctcgagaccacaaccacactgcgagcgccggcccgcacgggcgccgcctccgggaccacccaacgcctccacctcggcctcctctgcccggcgctgccccggcacctcctcgctgcgccggccttttctccccatccacccaatgcctgccggcggaagtggagctgctgcctcaggcggtagccgagtggtggagcgaagacgacggctgcatctggctcacgccgccgccgcctactgccattgctcttgcttccaccatcgagctcgcctacgccgaggccaaggggcgcgtctaccgcggccaccgcgtctggcagatcagcttcggctcaggcttcaagtgcaacagcaccgtctggcgcgcactccgcgacgtgccgcccgtgtccgccttcgtcacggcggcgtggcccatggccttgctcggcggctcgttcgccgccggcgttgcccgacgctgtcgccgtccgccacgctgcctccccatccacccgacgccgccgggccgccttcaggctgccaccgtcgcctcggcccgagccactgcggccggggtatttacgttcgaccgcgtcaaaaaaacggcctccgtcgacacgtcagcatggcagacggcgcg

SEQ ID NO: 74538 - DNA, 498 bp, Oryza sativa
  Clone ID: PAT_MRT4530_74714C.1
gtttccttcctctcgccagtgccaccacagctcaagcgtgatccagcgtcgggccgcgcgtgcgagcgagcgagcgtgcgagatgtcggccgccggggaggaggacaagaagccggcggggggagagggcggcggcgcccacatcaacctcaaggtcaagggacaggtctgcctctcttcttgctctcaaactcgtagccttattatccagtagtacataggagtaagtttgttccatagtggatgtatggattgtagaattgagatttgagggttaggttcgattggtaagcccgcaagcgatatagtggcggttgttatgttcggcgatggattcggattgctttgcggagctattagcgtggctgcgaccaagcacttggttcgatggtttgactttgcttgattcgtccagatagggaacgctttggtttatgttgtgctgatgcttgtgtgaagttcaatttatgcatgaatcgatcttttgttaggttgctg

SEQ ID NO: 74539 - DNA, 354 bp, Oryza sativa
  Clone ID: PAT_MRT4530_74715C.1
atggagaaagcggagcaatggcagtaccatgatttatttgaaacaaagtttgtggttaaggatagagcatgtcgtactataatcgatagtgagagttgtaataactttgtgagttcagatttggttgagaaacttgagttgcttacacaaccgcatcctcatctatattacatcaaatggttcaactcttgtgataatcttcaaaggatgaagaatggaatcgatgagatttttagagataccaggaaagatgctattgtgatgtcttcaactaagtctgaattacaaaacgaacgtattgctgtgcctattgttttggatactaatgttttgcaggcatttgagaacaactaa

SEQ ID NO: 74540 - DNA, 466 bp, Oryza sativa
  Clone ID: PAT_MRT4530_74716C.1
ttttttttttttttttttttttttttttttttttaaaaacgccaaagttaacagctccataggcttgccaatgaacaatctttcccaaatttaatgagcacaactacgagaacagggtattagtagcagcatttagcagcctaattaaacagcaacagtgccacatgatacattcatcaggatccaccacacaatcactgtcaaaaatgctaaactagactaataaactaatcaatgatgagtaataaaatgaaaaacaattaaagatactgggatcaatccttgttgaaagatcaattctttcgagccaactgatccatcattcattcggcttcagccgcagcagccgcgccgccatggccgccgccctccaccggaggcggcagggcgtcaaccaccaggccgcgcaggccggccttgagcggacgccgccgataccaaacccaataagcggggccgccggcct

SEQ ID NO: 74541 - DNA, 1701 bp, Oryza sativa
  Clone ID: PAT_MRT4530_74717C.1
tagtctccgctcctactctgctgctccaccacgacaaaagccatgcctatgctgctgctgccgctctcctcctcttccgccattgccgccacctgagctgagctcttgtactcgctacgctactcaagatggctttcgccacgctctttgactccctctactgccccgaggagcacctcgacctcttccatgacaccgccgccgacgacgacctccacctcgaccttcacctgcaccaacccccaccgccgccgccgctcctcgacgacgacctgcctgcgctgttccacgcgctcagggggaaggaggacccgctgcgccccgccgccgacgacgacggctacggcggggtgtctgcccgggaggcggcggtcgggtgggcgctgcgcgccgtcgcgaggctcggcttctccgcgctcacggccgcgctcgccgtcgcctacctcgaccgctgcttcctcggcggcgcgctccgcctcggcgaccgcccctggatggcgcgcctcgccgccgtcgcctgcgtcgcgctcgccgccaaggtggaggagacgcgcgtgcccgtgctcctcgacctccagctctgcgccgccgaacgcgccgaccccaacgaggcctacgtgttcgaggacaagacggtgcgccgcatggagctgctggtgctctcggcgctcggatggcggatgcaccccgtgacgcccctctcctacctccaacccctcctcggcaccgcccacgccgcgcgccttcaccactgcgacaccgcattgctcgcgctgatgcccgattggaggtggcctcgccaccgcccttcggcgtgggccgccgcggcgttgctcgcgacggccggatggtgcggcggcggcggcggcgacgacgccgagctcctagccctcatcgatgcccccaaggatgagatggcagagtgcgccaagatcatctccgaggaggcggcggcggcggcggcggggggcattgtgatcggcggcgaaaataagcgcaagggcgcggcggggctgtactcggcgccggcgagcccgagcggcgtgatcggcgcgtcggcctgcttcagctgcgacagctcgtccagcagcgtcgactcgctgttcgccgccttggagccacccggccggccgatcaagcgcggcgccgccgccgccaccaccgcggatccgcttcccgccgacgaggagagccgcgacgcctggccgccgtacgccgcatgaggctgctctggtcggtatcgggaaggggagaagctaaagcaagccactaattaagcttaggaggaggagggttcagtccaagaaaaagatgttccattaacgcaatgcaagaatgcaggtgcgaaggggtaggttcattcatgtagccattgatggtctcttggagctcagctcagcctcaacctcaacccaccatagccatggatggaggtgaggaagaagctgttttgtcctgtctgctcactctgctggtaccaccactgttagaaccatgcttcacactctctctcttgtttctctctctagagagaagagagagagtataaaggagtaggagtatgaggagtggcaacaatggcaatggcatcaaatgctgcaattgcccacttcccatgagcagctagagctacaacagcagacctgaggctattgtgctcacctcttcttcttccaccattaatgaaaatgcattactact

SEQ ID NO: 74542 - DNA, 416 bp, Oryza sativa
  Clone ID: PAT_MRT4530_74718C.1
ccaacaaaaatcagccagagttccctcccgggcattttttaaaccaaatgcaacacacattaatcggaacagcttaatacaaggcatgtgcgcttttttgtacataacaaattaaagattttttttttaaacatggaccccatgtgtcaacccaaaacagtttaagttgggagcccaaattggccaacagggtatgtgcactcatggctatacttacctatttatcgcacttcataaagaactcacctacaaatgcgaatcaaacccgatgttttttggcggcatgttcccaagcacaatgaacagtttgcaagcctgttggcccccttggtaggagatacccattttgtgttcgcccccacaaaggatccccctagaagatggttttgttcaagactttggctttcaatttcctg

SEQ ID NO: 74543 - DNA, 418 bp, Oryza sativa
  Clone ID: PAT_MRT4530_74719C.1
tttcttttgtttttttccctccttttttttttttttttttttggtggtttttttttttaaaaaaaaaggggccccctgacccttcattcaaacgaaaaaaaaagggggggcttttgggacacccaagaaaaggccctccggccgcccacaaaaaagggaaccctaaccccggggggggccctaaataaaccccaaccccccccttaaaaaagtttattggggtggcctgggcccccccccccaaaagaagccggggtttcccccccctgggggggaggggccataagtttaaaaaactttccgggttccccaggaaaattttaaactctccccctccgggaaggagggccccgtggggcggctttgccaaccacgggggggggaaggactcttctctaaaacagagggcccctttttt

SEQ ID NO: 74544 - DNA, 198 bp, Oryza sativa
  Clone ID: PAT_MRT4530_7471C.1
atgtcggagactcaagtggtcaagtcgaggcagtgtgcgttccaggtcagacctggcatggatagggagacgaggggagatctgcaaggaagggaaggaaagctgcgccgctgccgggcgccaccaccactgtcgcccttccacctccagtcggatctggtagggtggaagggagggaggggaagggacctgccttag

SEQ ID NO: 74545 - DNA, 974 bp, Oryza sativa
  Clone ID: PAT_MRT4530_74720C.1
cttctgtaagaatgcaatggacaatacatttgttatactgttcatacttggaaagaatgaaccgaatcatccaatacacctctcaccctttctatctgctaattgaattacttctagtttatcgtacactctttggggagattatctttgaacctcttggtgtcagtgcagtaatcgtagatcttgtagttggcatccacctcctgtagttgctgtttccgtgtcacgtccagctcctggttgaaccaatttccggagctctggccgcagagtggggagctctgttgtggggggcaagcgatagccctgtagttccggaagtatgctgtgaatggcgcctgcgaccagtcagtcttcacccgccctcccattgttgcccagtcatcggcattccagatgctgccatataccctcattggctgataggttgggtacgggacactgtacatcaaattgttcttgatctgccggatcagcttgtcatcaacaaggattaggatatttctttggttccagatgatggtgtaggtatggaagtctgcagtgggatcaaaccagagcttgtaccgcttctctctgccacctttccctctggcatacaggttagtgtgcagggtgtacggctcgccagtggagttccccaagaactcaaggtcaatctcgtcgtggaattgccataggccctctgttatcatataaagagtagtcacggttccagctgagtctccagcaacgagcttgatgtccatgtcgatcctactgaagaggtatgtgctcttcgaccggaatgcggaggtcgtccagcggtcaagagtcagtgagatagtctgtttgccggagttgtcatagaacacctttgagtttccccacagtatgtcgaggtcattggtgaggtcgccagtgaccatggagattgctaggatgaggtagaaagcccacagggaggctaggaggtgagccctagcctgccccat

SEQ ID NO: 74546 - DNA, 206 bp, Oryza sativa
  Clone ID: PAT_MRT4530_74721C.1
aaatatatatattcttagctttcatggggtttatttacatatgccttacccaacaacataaaatcttatcattataccactcttacatcaagtcagtgagagaaaaaaaaaacaaaaccaatttctatcccggtccccaaattaaaagacccccaaaaaactgtcacacaccaaaaaaggaaggacacatcatctaatcagacacc

SEQ ID NO: 74547 - DNA, 135 bp, Oryza sativa
  Clone ID: PAT_MRT4530_74722C.1
cgtccgattccggcgccccgcgccgtcctctgcctcatcgctcgctcggttcgctcgtcgccctcgcacaccacacgcaggcgcggcgacacccaacacgcagagaggccagcccctctgcacgggggggggggg

SEQ ID NO: 74548 - DNA, 1446 bp, Oryza sativa
  Clone ID: PAT_MRT4530_74723C.1
ctagttagccaaagactccacgactctctcatatagcccacgatcacaactaagggctttaggcaaaacaccaagtgcctctagcctctccttgttcatgtgagggatcttgtacttattccctccgttagctctcatgacctcaatgtagcagccttgtagtgtaaggaataccctattaagagtattaggattgtagtcacggtattccttgtgaacattctcgattagctcatccatgtttctagatatcctattatgtgttaaggacttcctagtaaaaggccaaatgcctatctttccatcaaaagtgcaattaccctcatcaccataccttggtttcgcaactgctgataagaacattactttatcaatggcgttcttgttgtgcactgtgaaatatggctccttttcacccggatacaggtagaaagtcttctccttctttgatgcattgaaccatttctcatctatgtggataatattttccatttcaataaactttgggttgtttggcaatgtatgcggatccaacatagaaacacaccactgcagcctttcctttttatttgcttccttcaaataaggctttagcgagtttgagtgacgccgtatcagtccttctttgaaccacctatgtaatgtgcttttggaaacaccaagggcttgtgctagtgaccggatagtgctcctttgatgcaatggaatagctgcaataactgataagtctatttcgaccttcttgcgtcgagagtttccatgcttccttgaatcaacattcactgttattccctgttcatggcaaatctttgctctcttccaaatacgttggactgtacggatgctaacatggaactcttgagcaattgccacattatcatttgcatgttcttcttgatcgtcatctgagtcgggcaactcctctacatcaaagacaacattgacaacttcggcgtacactccgtactctcgaagatcatcctccaaggcttccaactcaaattgcaatgcgtcatgatcatcttgttgcatttgttcttcttctatagcctccatgttgagatcaaaaggatgcaagttgagatcaagaaaaccttcatgttcctggccatcaactccaagaaggttatctccaaggataacagcagctcttccatcttcttccatatcagcttctccattgagatcaggtaaagcccctccatctccttcctcttccggtagtaaatttagatctctgatcatttgaattggatgtgagtggtgttcagttggatatgtaggttgatgaaatggaatgaaatggatggccctttcaggatttgtagcatatgaagaggcactcttgggcgccagaactagcaaatgaagaggcagtcctgggcggcaaagattacttaatggttgattcaaatttttgaatatgttaatgatgccttttcccat

SEQ ID NO: 74549 - DNA, 309 bp, Oryza sativa
  Clone ID: PAT_MRT4530_74724C.1
cacgaggagaagggttatagaggctgatcgaccatcgatcgacgtcgcggcgagcggctagtgggcgttgtcgtcgtcggcggcggcgaggtggtggtggtggtagctacgtaggttgtggacatcgatctagaggtagaggcagggagggggaggaatgggacggctgtcgtcgtgcggcggcgtgcaggcgaagctgaggaaggggctttggtctcccgaggaagacgataagctgtacaatcacatcatccgacatggcgtcggctgctggagctccgtccccaagctcgcagggttgcagcgatg

SEQ ID NO: 74550 - DNA, 159 bp, Oryza sativa
  Clone ID: PAT_MRT4530_74725C.1
ccacctcctatgagctcgcttttgagaaagaaagctgaagaatcttggtcggttggcccggccagccagccagccgcctcgcggtcgcggagatgatgaaggagtcgtacatggaggtgctcccgccggcttctgtttcaccttttcgtccgccaccct

SEQ ID NO: 74551 - DNA, 2043 bp, Oryza sativa
  Clone ID: PAT_MRT4530_74726C.1
ctagttagccaaagactccacgactctctcatatagcccacgatcacaactaagggctttaggcaaaacgccaagtgcctctagcctctccttgttcatgtgagggatcttgtacttattcccttcgttagctctcatgacctcaatgtagcagccttgtagtgtaaggaataccctattaagagtattaggattgtagtcaaggtattccttgtgaacattctcgattacctcatccatgtttctagatatcctattatgtgttaaggactgaagtgaagcaaagaatccaagatctagacaattcatatccggggaatttggaggttgattcacgaggcgaatatcaagtccggcttgcgctactgccacaccaaactgtgcatcatcgatagggagatgagttctagcattatcctgctgaatccatatggtttttcttgcatcttctcgaggccaacatgctctaatagctgggaggactttagagatcatgaatgatcttatggtgtctctatcaacctttattggcttggttactagtgttcccctttctctattacgacttctccttcgggctggttccttcctagtaaaaggccaaatgcctatctttccatcaaaagtgcaattaccctcatcatcataccttggtttcgcaactgctgataagaacattactttatcaatggcgttcttgttgtgcactgtgaaatatggctcctcttcacccggatacaggtagaaagtcttctccttctttgatgcattgaaccatttctcatctatgtggataatattttccatttcaataaacttggggttgtttggcaatgtgtgcggatccagcatagaaacacaccaccgcagcctttcctttttatttgcttccttcaaataaggctttagcgagtttgagtgacgccgtatcagcccttctttgaaccacctatgtaatgtgcttttgggaacaccaagggcttgtgctagtgaccggatagtgctcctttgatgcactggaatagctgcaataactgacaagtctatttcgaccttcttgcgcccagagtttccatgcttccttgaatcaacattcactgctattccctgttcatggcaaatctttgctctcttccaaatacgttggactgtacggatgctaacatggaactcttgagcaactaaacgtgtggtgtgtttttctaattttccatctttacttttctgaagcaacaattgataaatgcctcgcctttgtatgtttgtcaaatcttttgacttacttgccacattttcatttgcatgttcttcttgatcgtcatctgagtcgggcaactcctctacatcaaagacaacattgacagcttcggcgtacactccgtactctcgaagatcatcctccaaggcttccagctcaaattgcaatgcgtcatggtcatcttgctgcatttcttcttcttctgtagcctccatgttgagatcaaaaggatgcaagttgagatcaagaaaacctccatgttcctggccatcaactccaagaaggttatctccaaggataacagcagctcttccatcttcttccatatcagcttctccattgagatcaggtaaagcccctccatctccttcctctcccgcctcttcctgtagctctctgagctctctgatcatttggattggatgtgtgtagtgtttggttggatatgtaggttgatgaaatggaatgaaatggatggctctttcatgacctctagcatatgaagaggcactcttgggcgccagaactagcaaatgaagaggcactccggcgacgcggcggcggcaacacgggaaaagggaagggcggtggcagcccagcgtggtcgcggcacccaacaaacaggcacgggacgggcagcgggaagggcggtggcggcacgtggttgtagacgaagccgaggaagacggcgtcgacgtctcccccagcctcagccaccggggaaggagctgggcgcgggtggcagccgtcgagggcgtcgcggcttcggtctcgagcgccgtcat

SEQ ID NO: 74552 - DNA, 1672 bp, Oryza sativa
  Clone ID: PAT_MRT4530_74727C.1
atggcggcggctgcggcggagggcgcggcggcgaaggcgctgcgggcggtgctggggcgcgcggcgaaggcggcggagcggtcggggcgcgcggcggaggcggtgcgggtggtggcggtggggaagacgaagccggtgtcgatggtgcgggagctctacgacgccggccaccgctgcttcggcgagaactacgtccaggagttcgtcaccaaggcgccgcagcttccagaagatatccggtggcatttcatcggccacctgcagagtaacaaggtgaaatcactgttagctgctgttccaaatcttcacatggttgagggtgtagataatgtaaagattgctaaccaccttgatcgtgctgttagtagcttgggaagggatcctttgaaagttttggtacaagtaaacactagtggagaagaatcaaaatctggtattgatccctccagatgcgtcgagcttgccaagcatgtgaagttagcatgcccacacctaatattttcaggtctcatgacaataggaatgaaagactactcctcaacaccagaaaattttaaggcactggtaaattgtaaacttgaagtttgtaaggccattgatatgccggcagaacagtttgaactctccatgggaatgtctggtgactttgagcaagcggttgcttcttcaatggcaggttcggaggatttgagcggtttgacagcttcccttggagagttacacgttgaatcatcagctctgaaggacagtgaaatttctcatcctggcaatgcgtttgatgatgatgctatcgctgatgatgatgtatgggatgatgtttcggattctcctggtcatggatccacattagacagagagtgggctcacaggcagaaccagtttcataagatgggatacagggatggtatagctgaaggacagaaggacattgcccaagagggcttcaatgttgggtttgggcaatctgtgcatgttggctataagtggggacttgttcgtgggattaccagtgcattagctagtctcccagacaacttgaaggaaaagatgttccccaatgtccagtgcagaggacaactccaagatctgaataattctagtgcaagaactttcatgcagaagacgcacttcagatgtttcatgagagcattcttcggagtagccattcatcagaggaaccagatgcaacattcaagagagctacagattccagtaggttgcaaagcctctcataaggatcttgtgatattgttgcatgaatgcccagatgtgaaagttagtgaagaaacctgagagggaggttcataaacaagttggcggaattgtgagcactaccagaccctatgtctggcctagttgctacttgcgtcgaatttcagtttgctgaacatcgaggaagatggtgattcaggggtcttgttggagatggaagcgattcaattccttgatctcacaaccatgatttgctgtttcgaacacaaaaggcttaattaagcctcaaagaccaagaaattattaagaatgtaattgtaaatcttgtaactaaggtttcattgatcatataagcctttccttttcctgctagatataaccggttttgtatctctaactcgcagtatgcacacacacatttcactagaactttggcagatgctaagatgataacttcctg

SEQ ID NO: 74553 - DNA, 466 bp, Oryza sativa
  Clone ID: PAT_MRT4530_74728C.1
ctagaaaacgttttattgcaggtttatttttttaaaaaaaatggaccaaattatatacaaagctcattttataccactaggcactagcgtacaaggatcatcgcaaaaacaagaggcaatgatcacataacccgtactcaatccatcccataaagtacatagctagaagttgatattttttttacaagacggaggatgtacgttgcatgagggatgtgactgagtctcccatagctggttattttgtgggccgagccagattccccaaagagaaggcccggatcgtttcttggctggcccttggggcccaagaacagcctggtaatgtaacaagacgtttgctctaaccacaccatgtccacgggaaaagcacatcgatatgtacagcatgtacagttaatatgaggaactttcaccagcgttgctgtatatatggtcccaattctgagactgagcttgaaatcat

SEQ ID NO: 74554 - DNA, 575 bp, Oryza sativa
  Clone ID: PAT_MRT4530_74729C.1
atgtggcccttcatgaccaggattgatgccaagaattccggatttctaccccaagaaccccaaaggctccaaacatgctcctcggcttgcgccccttgactgcttgatttcaaccatcactgctgttcttttcccagacacatttccttcaaacgtctgcgccgttcaatgccaccaggattgccaggcctgtgtccaaagctgcatcctcgactagagttttactgtatgaggaggagctttgcgaagcggtggcacagaataagcttctttgaagctgcaatgacctttaggcacaaccagcaatatgttattgcttccatctcataatgtacatgattatctatgtcaattccctagcatgagttttgtttggttaggcagttttagactagtatttttttgaagaacgttttagactagtcattagcatgttatatagtaagaagaatctagtttggtttattccctggtctgtatatagtaaatgtactggtaaactatttatagctaataatttgcttgcagaaatgatgtttattttttgcctatgttctaaaaaaaaaaaaaaaaaa

SEQ ID NO: 74555 - DNA, 225 bp, Oryza sativa
  Clone ID: PAT_MRT4530_7472C.1
atggcgatgtgggccccgcgcgcgctcatcacggtggttggtggtggctcctccggcccggcgaccggcgacccccgcgcgcacgtggagactcctcgcggcgctggaacgccgcatccggctgacgtggcggtgcggggcgggaggacgtcacgtcacgcctttggcgcggggccccacgtggctgacctgttccgatgcggcgaaacgcagcagcagatttaa

SEQ ID NO: 74556 - DNA, 596 bp, Oryza sativa
  Clone ID: PAT_MRT4530_74730C.1
cccacgcgtccgggtttatctacacgcgaggtctggcaagccatctcttgatatatttcttgctgagatgaggaggttcgaggtattgccattaattgattgggatttcaagctccgtctgctgtagcagcagataaaaaatgctggaacgtgactttgctcctcctactcgctcctgtgtactgccgccgggctgctgcatcctagttctgtgtccgccgcggagtcgaggtcccctttcgccgccatcgacgctgccgctgcccacaccgacctgttgtcctgccggcgccggccccatccgccgcggtcggcaccgagggcggccccttgcaccggtgccgtcaccaccatcaccgaggtgcactccaccgctggggagccgatggccttcccattcggcgccgacgaagccgagggggtgcctagcccgcggcactgaccgcggcgaacttccaccgatgccacaggagccctgccaagcatttgccatctctcaggggttcttggctaccactttgccactatataagtttcaagtttcaaaaagcttctcgacgatattattggcgaggtaataatatgctgctcatgct

SEQ ID NO: 74557 - DNA, 619 bp, Oryza sativa
  Clone ID: PAT_MRT4530_74731C.1
ctaaaaacatcctactccatagcatccgcccgagaatggcaaaatacagagtcccagtatagtcctttaaaacttttttgggcaaccataaggcagcctcaacagtttgtataaaactaccaactaccaaaaccgacgacccggtcaacaaaagtcaaaagataaacaccctgggagtctgggactaaggagtctatgacctgaaactccccccagtagggggtaaactaaaaacagagagagacccccggaccatgcaacaaaaggctgtcgtcaaatgaaaaacatgttgcccaccaaatcctcgggcagcgccggaaagctcctgaagtcgaaagccccggccccggaggaggatgccaacaaccccaaccccgggaaaaacggggggggttgcaacataatcatgccctcgtaaaaaaccctgccgcggtaggcggcaaggtcggcttaataaacgggcggggccagcgacaccggtttggtgcagggggcaaaaacaaaccaaaggttgtacaccagtttttgcaggtcgtcggaggcaaacccgtgctcgtccaaaaggctgtaaaagtgcgtgggccggttcgtcccgaaagcccgttggggctgacaggta

SEQ ID NO: 74558 - DNA, 393 bp, Oryza sativa
  Clone ID: PAT_MRT4530_74732C.1
atgccgggcctcgcgcccggcaacggcctcctcacgcatcgcgagttgctcgccctgccggcacgccgccacctcgcggcggttcaccttggcctcgcgtacggcaagcacggcgtccctttcccggcacgcctcctcccgaagccgcagctcctccgcgcgacgagccaccggagcctctgcgacaaaggtggtccgattgtgttcggctgcggcatcctcgcggaggcgaagggaggactccgcctcggccgccgttctctcgtgggcagccaaacgcccgagcatgctcctccagctcccgggctcgctgcgcctgttcccggcagcgctcgtcctgttcgcgctggttacggtcgaggacctcgatccgtcaatggatcatggccttga

SEQ ID NO: 74559 - DNA, 2049 bp, Oryza sativa
  Clone ID: PAT_MRT4530_74733C.1
atgtcggaggacgccaccgtgagggtgggggagtcgcggccgcggccgcggtacccagagcgatccgtgcacctgctgtccttcgccatggtggggttggtcccaccattttccaggttcttccatgaggttttggatttctacaaatttcatgccttgcatctcgcacccaacgccatgataacattggccatcttcgcgcacttgtgcgagatgttcatcggggtgcggccgatggtgcggctgtttcagtccttcttcgtcccgcagctgcagcaaggcgcggcggtgggaggatgctacctccagccccggccgggaacggcggggcagtacattgagagccacctccgcaagaagtgggaagattggaagaagtattggttctacaccacgttgccggatcatccgcaactttggctccccgcccccccccccgaacgatctgccgcgtggttggcagtttcagaactgggcgaggagtacgacgctgtgcgggatcgcctcaggggcctgcgagaccagggcttaacgggggcgatggtgttcggcgactacttccgccgtcgcatcgcgcctctccaggagcggtcccgcggcgcgtgggaatacactgggcacaatgatcccatgcgcacccacgtgggtgagcgctgggactggggcgaggaggacgcgaagacggggtcaaaatccgagcgaccggatcgaccgggacccggccgactcgatgccacggggccttcgcaataccctggcggggcccacgggccacacgccgggtctggctccgagtctgccacagccgaggtgcaaccatctgcgggtgatggcagcggcggcggcgtcccccccgggtccgatcctgagggcgcgacgtacgaggagcgccactcgggggcggaggccgaagcaggtcgtggcctggaggccaaggtggaacgtgctccatgggccgaggcagggcgcggctcggaggtgctcgccaccgccgactccaccgtccgggaggggctcaatgcccaagttcaagccctggtggacgagcgggcggccctggaggcagagtgggcgcagctcgtggtagaccgcgcgcgggttgatgaggggcgtcgcgccgtggacaacatggtggaggtggggcacaaaatgcgccaagcccaactagcggagatccagcgcgaacaggacgagcgctgccgggaacaggcgcagcgagcccgggagctggaggagcatgctcgggcgctggaagagcgtactcgggtgctggaggagcgggcgcgcatgctagaccagcgcgagaccactttggctgcccacgagagaacggcggccgaggcggagtcctcccttcgcctccgcgaggatgccgcagccgaacacaatcggaccacctttgtcgcagaggctccggtggctcgtcgcgcggaggagctgcggcttcgggaggaggcgtgccgggaaagggacgccgtgcttgccgtacgcgaggccaaggtgaaccgccgcgaggtggcggcgtgccggcagggcgagcaactcgcgatgcgtgaggaggccgttgccgggcgcgaggcccggcatctggaaagcgcccacgctgagcgcgcggcgatggcggcgagggcttcccttgaggcccgggagaaggaactggtggcaggcgggcagttcggcggcgcggagttggtgaaccagctcaccgcggctcaaaacactctcgtcgacctggggcgcttggtgcaggaccaagccggggagatcgcggccctccgcctcaccaacgagattggacctggccaactctccgatgccgttgaacggctggagtgcgcggggcgccgggacttccccctggggaccgaggcgagggctcgggagcaagtccgggaggcggccgatgctatcatctccagcttcgaggggtcggcccctcggttaaacctcgcgctagctttagacgaggagagcgggtgcgaggacggtgggggcgatgacggcggcaaggactgggacgaggtggtcagcggcccgggcactccgtga

SEQ ID NO: 74560 - DNA, 467 bp, Oryza sativa
  Clone ID: PAT_MRT4530_74734C.1
accgatgagatgggacgcatttatttatttattttctggcggattgagttgctagcttaatgcacacacaacaacgggaactcttcttatcacagtggcacaggatcacaagctactactggctgacacgtggaggactcgcactgcaaacacgtgggcacatgcccacagcgaaggtcaagacagacacggctggcggtgacggggagctcgcccgtcatgcgcgagatgggacaagtgaaaaactagtcgttgtcgatgacgaccccgttgacgtgcaacatctggtcggacatgtacgaggcgtcgtcgttggccaggaagaccaacctgggcgccacctgctacaggtggacggggcggcccatgggcacctgggagacgaactggctgatcttgtcctacgggaactacgccgggatcagctgcatccagatcgggcactgcgtgacgacgttcacccggat

SEQ ID NO: 74561 - DNA, 279 bp, Oryza sativa
  Clone ID: PAT_MRT4530_74735C.1
aatccacttgtaaatatttgtttgtgtttttttcttcgatgtatataaactctattttattatttaatactccatccgttttgaaatgtttgacgccgttgactttttatcacatgtttgaccgttcgtcttattcaaaaaatttaagtaattattaatttttttccattcatttaattcattattaaatatatttttatgcgggcatataattttacatatctgacaaaagtttttgaataagaccaacggtcaaacatgtgcttaaaaggcatcggc

SEQ ID NO: 74562 - DNA, 629 bp, Oryza sativa
  Clone ID: PAT_MRT4530_74736C.1
cgccggagtccacggggagatcggagcctgcaaggcaagcaaccaccgccgccgacgacgacgacgttgacggcgacgaggagacgatgagctaccagaaagtgccgcctcctcaggacggctaccctcctccagggtactcgcagccatacccgccgccaccgtccggcgggcagtacccacctacgcagtactacccgccgccgaaccagcctcctccggggtaccagggctacttcagcgaggggcagcagccgccatactactacccgcccccgcatgatccccaccaccaccatggtcaccaccaccaccacgaggaccatcaccaccacggccaccaccaccatggccaccacgacgatgactgctgccttggcttcctcagaggatggttggccattctttgctgctgctgcgtgctggaggaatgttgctgctgctgctgctgatggcctgaatgctttgaagctccttgttatcaactattcttgaatggaaaattttaagtgtgaatttgattttctgtgattgatggacagtacgtagtgtgcatcttgttattatttgtcaataagtggactctgttacttgatatgccccgcttaaatatgaaaggtgttcagttt

SEQ ID NO: 74563 - DNA, 371 bp, Oryza sativa
  Clone ID: PAT_MRT4530_74737C.1
ggtgatcccaagaggaattgttataatgacatagtttatcactttacataccacaaacaccataattaacccttacaaaaccccacatggacccagacaaaagaccatcccttattcagccccaaaacaataatcataagagtcgtacaagaacaccatttagcagcggcagattaaaggccttgaaattttcaaagcagccaccagaagaacaaagatgaagactttttgatgccaaccacagtttagctcaaagctgactttcccatggcgcggccttcgttcagtcctggagcatgtgcccggcggcggggtcaggggatctgccatggccggagcacaggctcgtggggggggcactcctcctggat

SEQ ID NO: 74564 - DNA, 2493 bp, Oryza sativa
  Clone ID: PAT_MRT4530_74738C.1
atggcaggtgacggtgccaagtgctccgacgaggtgaacgacggcacctacttcatggccggcgtgatggccgtgaccggcctcatggcgaccgtcctggcgctctccggcatcttccattgcgcgcttcgacgcgttgggcagccaagcataatctcgcacatcctggccggcgtggtggtcgggccgacggtgctcggccgcgccgtggacctgcgtcctctgggcatgcaggacgccggcagcgcgctcagcgacaccatctacttcgtccgcatcatcttcatgttcttcatcggcctggagatggacctccggtacctccgccaccacctgcgccgctccctcgccatcgcctgcggcggctcggggctctgcctcctgctcgccgccctcgcggggcccttcttctacggcctcctccaccccggccagggccccttcaagcccgagaagctctacgcctccaccgcgctcttcatgctcgtcctcaccaccaccgcctccccggtcctcatccgcatcgtcaccgagctcaagctcaccggctccgaggccggccagctcgccatcggcgccgccttcgccaacgacatggctagcctctccgtcttcagcatcatggtcgtcggcaccaccgcctacggccccgacggccagcccaccccatccttcccggacatgtccatcgtcatgtccatggccttcacggcgtgcctggcggtgctcgcggccgccagggccgccaggctgctcaacaggctcaagcgcggccgccgctacgtcagcaagtacgagctctgcgccatgctcctgctcatcatcgccctctcgctgctcgagcaggtgttcggctacagcgcctccatgaccgccttcctcatcggcctcgccatgccgcgcgacgggcccacggcgcgcacgctcgtcgaccgcctcacctatcccgtgcaccagctcgtcatgccgctctgcttcggggccatcggcgcaaggctcgacttcgccgccgtcggcagcttcacagccatgcagttcgccgtcgccgtcgccttcacgacgctgctcggcgcagtcgggaaggtgggcggcacggtgctcgcgggccgcatgctgggcatctcggcgagggagtcgctggtgctgggcttcctgctcaacgtcaagggctactgtgacatcctcgccatcaacttcggcaaccaggccggcatctggggccagacggcgcaggtggtgctgctcctctcctccatcctcaacaccttcatggcaggcccggctgccgcggccatcgtccgacagcagcgcgccgcctcccgataccggtcgcgctgccttcaggacctcaaggtcgaccacgagctccgcgtgctggtctgcgtccacggcgccgggggcgtccacaccatgctgacgctcgcggagctttccaagggcaccgcgccgctggccgtctacctcctccacctggtggagcttatggccgcgcgcaagtacgccatcacccatctgtaccatgacgccgacgccgacgacgacgagtggggttatgcccgcgagatcgagcaggtggccgcggcggtgaacaccttcacctacgacgccggcgtgccggtgcggcagatgaccgccatctccagcctggggtccatggacgcagacgtgcgcaacggcgtggaggactcgcgcgcgtcgctggtgatcgtgcccttccacaaggagcagcggtacgacgggcgcatggtgtgccggcgagaggggaggcggcagctgaaccagcggatcctgcagcgcttgccctgcactgtcggggtcctggtggaacggcgcctcggcgggggcggcgacaagggcgcggaagacgtggtgaagaaccaggtggtggcggtgttcctgggcgggccggacgacagggaggcggtagcgtacgcgacgcggctggcggcgcacccgtgggtgagcgtgacggtggtgagattccttccagcgcgacaggatgatattaccattggcattgatgaacaattattagccaccaccaagagccatggcggtgagggcgccatggaggtggcggtggaggacgaggaggcgatggcggatgaggagttcatggcggacgtgtacgcgaggctggtgttggcgggacaggtggagtacacggagaggtacgtgagcaacggcgcggagatggtgaattcgttgagcgccatggtggggacgtactcgctgttcgtggtggggaagggcggcggcggctcggcggcggcggccatgacgagcggcatgggagggctactggaggacgagtgtccggagctgggccccgtcggggaggtgctggcctccgacgacttcacggcctgcggctccgtgctggtgcttcagcagcacagcgcgcatgtgcatcgcaggatgaggaggtggaatcccaacattcacatcaccaccacaccctcgtcgtccgatcatcatagccacccaccctag

SEQ ID NO: 74565 - DNA, 2670 bp, Oryza sativa
  Clone ID: PAT_MRT4530_74739C.1
atggacgacgccggcgagatacacgcgctcgggggcagcctgcggcgggaggcgtcgtcggcgcggtcgggcgacgccgccgtgttcttctcgcggtcgtcgtcgagggatgaggacgacgaggaggcgctgcggtgggcggcgctggagaagctccccacctacgacagggcgcggacggcggtgctggccatgccggagggcgagctccgggaggtgaacgtgcagcgcctcggcccccaggagcggcacgcgctgctgcagcgcctcgcctgggtcggcgacgaccacgcccgcttcctctccaagttcaaggaccgcgtcgacagggttgggatcgagctgccgacgatcgaggtgcggtacgagaacctgaatgtggaagcggaggcgtacgttggtagcagaggtttgcccaccatcctcaacacctacgccaatgtgctggagggtctggcaaacactcttcacataacaccaaataggaagcagaaaatatcgatccttcacaatgtcagtgggataatcaagcctcacagaatgaccttgcttttgggtcctcctggcgctggaaaaaccacacttcttttggccttggctggaaatgtcccttcaggtctaaaggtatctggacaaataacatacaatggccataccatggatgaattcgagccccggagatcagcagcttatgttagtcaacatgatctacatatgggtgaattgacggttcgtgagacagtcaatttctctgcaaaatgtcaaggaattggccaccgttacggctgctgcaacaggagagcagaaagccgaggtgtcacaaatcacatactaaaggtcttgggattggatatttgcgctgacacaatcgtaggcaacaatatgttgagaggcatatcaggggggcagaaaaagagagtaaccacagctgagatgattgtcaccccaggacgagcccttttcatggatgagatatcaactggacttgacagctccacaacatacaatattgtggactccatccggcagaccatccacattgttggtggaacagcagtcattgctttgttacaacctgcaccagagacatatgaattgtttgatgatataatcctcctctcagacggtcaggtcgtctacaatggtcctcgtgaacatgtgctagaattctttgaatcagttggcttcaaatgtcctgagagaaaaggcgtagcagacttcttgcaggaagttacttcaaggaaagatcagcggcaatactggatgcatggtgatgagacataccgatatgttcctgttaaggagtttgcagaggcatttcagtctttccatgttggtcaggcaataagaagtgagttggcaatcccatttgacaagagcaggagccaccctgctgccctgaaaacatcaaaatatggtgctagcatgaaagaactgcttaaagcgaacattgacagagagatattgctcatgaaaaggaactcctttgtgtatatattcaaggcaactcagttaacactcatgacattcattgcgatgactgtctttatccgcaccaatatgcatcatgactcaataacaaatgggggaatatacatgggcgcactcttctttgggatcctgatgatcatgttcaacggattggcagaagttggtctaactattgcaaaactccctgttttcttcaagcaaagggatctcctcttctatccagcatggacatactccttaccatcatggatcattaagactccactctccttgctcaatgtaacaatatgggtcttcataacatattatgtcattggatttgatcccaatgtagagaggctttttagacagttcctgctgcttttagtaatgaatgagacatcatctggactgtttcgcttcattgctgggtttgcaaggcatcaggttgttgcaagcactatgggttcattctgtatactcatttttatgcttttgggaggatttatcctgtcaagagagaacgtgaagaaatggtggatatggggatactggatatcacccctgatgtatgcacaaaatgccatatcagtaaacgaatttctaggtcacagctggaacaagacaatacctggtttcagggagccacttggaaaactagttcttgaatcccgtggagttttccctgaggccaaatggtattggattggtgttggtgcattgctcggatacgtcctgctattcaatatcctctacacaatctgcctcacattcctcaatccatttgacagcaatcagccaacaatatctgaggagacgttgaagataaaacaagctaatctgaccggtgatgttatagaagcatcctcgagaggacgaattaccaccaacacaaacactgcggatgatagtaatgatgaagcaatttccaaccatgcaacagtgaattctagtccaggcaagaaaggaatggttctcccttttgtacctctctccatcacgtttgaagatataagatacagtgttgacatgccagaggtaattaaagcacaaggtgtgacagagagccggttggagctattgaagggcatcagtggttcatttaggccaggagtacttacagctcttatgggtgtcagtggtgctggaaaaacaacattgatggatgtgttggtgggaggaagaccagtggatacatag

SEQ ID NO: 74566 - DNA, 864 bp, Oryza sativa
  Clone ID: PAT_MRT4530_7473C.1
atggattggtccctggagaggaatattcctctcagatccgggaccaatcgatccgggaaaaagagccggacgaactcgtcccacctgggacgagcgcacggcgtcagctcatccgcgactgccgccactcgtctgcgaccgacgccgcctcatccgcgcccgccgccgccttgcccccacgaccgccgccgcctccaggaccagccgccgcttcgtctgcgaccgcctccgtctccgcgaccggccgccgcctcgtctgcaaccgcctccgcctccacgaccgactgccgccgctcgtctgcgcctctcctcgcatctgcctccgtgcgcggcctccgcctcatccgcgaccgccgccgcctccgcgtccggccgccgcctcgtccgcgaccgcctccgcctccgcgaccgactgccgccgctcgtccgcgcctctcctggcctccgcctccgtgcgcggccgccgccgcctccacgtccgacgccgcctcgtccgcaaccgcctccgcctccgcggccgactgccgccgctcatccgcgcctctcctcgcctccgcctccgtgagcggctgccgcctcgtccgcgaccgccgccacctccgcgtccggccgccgcctcgtcctcaaccgcctccgcctccgcctccgcgaccgaccgccgccgctcgtctgggcctcgcctcgcctccgcgaccgcctccgcctccgtgcgcagccgccgcctcgtccgcgaccgccgccgcgcgcgcctccgcgtccagccgccgcctcgtctgcaacctcctccgcctccgtgaacgaccgccgccgctcgtctgcgaggtagccgctgggagccagacggccctaacgtccgcctactga

SEQ ID NO: 74567 - DNA, 4564 bp, Oryza sativa
  Clone ID: PAT_MRT4530_74740C.1
tttttgtttcttttttttttttgttttgtaaaaaactcaatgaaacaacttgttaatctgagtaccatgaattccaggatacacaatgtgctttaagatgtacaattatggtgatacaaatgtgctttcaagctgtacaattacgatgtgctagtattcacatgctatacacaactcgggtatgccttcctcaatttatctcttctggaagttgaatatcttgattgagagcccgaaaaggaaggcgaagaggacggcaaatgagaccaccatcacggcaaccacccacaagaagtcacgatggtaaccaaagtagctctcgacaaagtcagatatacggacaccattatcaaacgtgtcagttacatccccgaactgtgaagttaccaacccgtagagtgtccacgcaacagggcagacccaatagtaccatctccaccatattggaattcgagttcttggtattataaatcctgagaaaaggttccatatggcatagaatgcagtggaaacaacagaggccacgttatagcttggagtcagacccaccgacatcatgccataaaatgtgtagtatgataaagtgaaatacatgaaaaacaggtaccaaaagaacttggcagctgtccactcaaatccaatcattgcatacactagaacaccatatattaaggactgaacaaggatgtatggaagttcaattgcaacctgtcccaaggcgtatggcaaaggtgaatacatgtgagctgctcgttccctgtagaacacagtgcgttcaacagacacaactggctgaacggaagaagaattctgcactcccataaataaaactgacgcatacatggagcccatggcattgaacaagtcctgttgattggttctgcaagaagggagtatcctcaatgaattgggacaaatataatctcaagaacattgttccaaacaacagtgcaattacaatggtgtagaagtatttgacagcagtatatggagggtttctccagtaggacagactttgcttccataggcaagccaaacattgtgtgatgaaagtttgagagtattctgttggaaaggataggtcacttgaaccatcaggaggtgagcttagctcctttatcatacttttattcctcctgtacagttcagaattcttgtatatttcactgaagttaaccccagttatctgttcctgtacagtactagtcacttccagcatccatgttgatggattgtagccatgttttattttgctgacaccttcaatagactcaaaatatctgatcaattcacacgagtgctgacctactggacctacataaatctcctcacctcctcgtttcatcaggaatagctcatcaaaagattcaaatatgtcaatgcttggttggtgaattgtgcaaacaactgttcttcctgtgtccacagtatttcttattgccctcatgacaatggctgctgctcgtgcatcaagtccagatgttggttcatccatgaatatgatagatgggttagcaactagctccactgctattgttagccttttcctttgttctgttgataatccactaacgccaggcaatccaaccaaggagtcttttaagggggaaagctccacaagttccatgacctcatcaataaacatctttcttgttgcagaatcaatttccgcaggcaatcggagccatgcagagaatgcaagagactcgtagacagtaacatttggtgaatggatgtcattctgctcacagtatcctgatacacgagcaaaagtttcttgcttctttggatagccagagatggtaatgttaccctctatgtatccactggtcttcctcccagccaacacatccatcaatgttgtttttccagcaccactgacacccataagagctgtaagtactcctggcctaaatgaaccactgatgcccttcaatagctccaaccggctctctgtcacaccttgtgctttaattacctctggcatgtcaacactgtatcttatatcttcaaacgtgatggagagaggtacaaaagggagaaccattcctttcttgcctggactagaattcactgttgcatggttggaaattgcttcatcattactatcatccgcagtgtttgtgttggtggtaattcgtcctctcgaggatgcttctataacatcaccggtcagattagcttgttttatcttcaacgtctcctcagatattgttggctgattgctgtcaaatggattgaggaatgtgaggcagattgtgtagaggatattgaatagcaggacgtatccgagcaatgcaccaacaccaatccaataccatttggcctcagggaaaactccacgggattcaagaactagttttccaagtggctccctgaaaccaggtattgtcttgttccagctgtgacctagaaattcgtttactgatatggcattttgtgcatacatcaggggtgatatccagtatccccatatccaccatttcttcacgttctctcttgacaggataaatcctcccaaaagcataaaaatgagtatacagaatgaacccatagtgcttgcaacaacctgatgccttgcaaacccagcaatgaagcgaaacagtccagatgatgtctcattcattactaaaagcagcaggaactgtctaaaaagcctctctacattgggatcaaatccaatgacataatatgttatgaagacccatattgttacattgagcaaggagagtggagtcttaatgatccatgatggtaaggagtatgtccatgctggatagaagaggagatccctttgcttgaagaaaacagggagttttgcaatagttagaccaacttctgccaatccgttgaacatgatcatcaggatcccaaagaagagtgcgcccatgtatattcccccatttgttattgagtcatgatgcatattggtgcggataaagacagtcatcgcaatgaatgtcatgagtgttaactgagttgccttgaatatatacacaaaggagttccttttcatgagcaatatctctctgtcaatgttcgctttaagcagttctttcatgctagcaccatattttgatgttttcagggcagcagggtggctcctgctcttgtcaaatgggattgccaactcacttcttattgcctgaccaacatggaaagactgaaatgcctctgcaaactccttaacaggaacatatcggtatgtctcatcaccatgcatccagtattgccgctgatctttccttgaagtaacttcctgcaagaagtctgctacgccttttctctcaggacatttgaagccaactgattcaaagaattctagcacatgttcacgaggaccattgtagacgacctgaccgtctgagaggaggattatatcatcaaacaattcatatgtctctggtgcaggttgtaacaaagcaatgactgctgttccaccaacaatgtggatggtctgccggatggagtccacaatattgtatgttgtggagctgtcaagtccagttgatatctcatccatgaaaagggctcgtcctggggtgacaatcatctcagctgtggttactctctttttctgcccccctgatatgcctctcaacatattgttgcctacgattgtgtcagcgcaaatatccaatcccaagacctttagtatgtgatttgtgaccacctcggctttctgctctcctgttgcagcagccttcaagtatatatctacttctggatctggtttaatattttcttccttttctctccttgatagttccattagcagatcgtaacggtggccaattccttgacattttgcagagaaattgactgtctcacgaaccgtcaattcacccatatgtagatcatgttgactaacataagctgctgatctccggggctcgaattcatccatggtatggccattgtatgttatttgtccagatacctttagacctgaagggacatttccagccaaggccaaaagaagtgtggtttttccagcgccaggaggacccaaaagcaaggtcattctgtgaggcttgattatcccactgacattgtgaaggatcgatattttctgcttcctatttggtgttatgtgaagagtgtttgccagaccctccagcacattggcgtaggtgttgaggatggtgggcaaacctctgctaccaacgtacgcctccgcttccacattcaggttctcgtaccgcacctcgatcgtcggcagctcgatcccaaccctgtcgacgcggtccttgaacttggagaggaagcgggcgtggtcgtcgccgacccaggcgaggcgctgcagcagcgcgtgccgctcctgggggccgaggcgctgcacgttcacctcccggagctcgccctccggcatggccagcaccgccgtccgcgccctgtcgtaggtggggagcttctccagcgccgcccaccgcagcgcctcctcgtcgtcctcatccctcgacgacgaccgcgagaagaacacggcggcgtcgcccgaccgcgccgacgacgcctcccgccgcaggctgcccccgagcgcgtgtatctcgccggcgtcgtccat

SEQ ID NO: 74568 - DNA, 2196 bp, Oryza sativa
  Clone ID: PAT_MRT4530_74741C.1
atgctgggccgggcgggggcgctgtccgcggcgcggtggcgcggcggcgccgggaccgggaccgggatcgggatcgacctgcgcgccgcgctgcgctccgggggcaacctcctcttcgcgctcttcgtggcggccgtcctcgccttcaccctcctcgccgcggtccacagccccgacgacccgctcctccacccctcatcgcaccagctcaccgcgttcctcacctccgccacctccaactccaccttcctcgccgacgactccgtcctccgcaccggcgaggacttcgccgccgccatcggcgccaactcctccgatgccgccgccgccgcggaggccaccgtcgtcgccgaggccgtcccgttcatcaagctcgaggacgtcgcgaccaaggaggagtcgtcgggggcggagcgggccgtcaccgttgacaccgacgccagctcggacgcgggcgccgcggcggaggagaaccccatcgtcgaggcggtctcctgcgacacggaggcgccggtggactgcacgggggacaaggatctcttcaacctgctcatgcgcacggcgatcgagaagttctccgacctccacttctaccgcttcggccgccccgtcgccgtgccggggagccccatggagtgcgacctcgcatggcgcttccgccccgccgaggacaccaacggccgcaccacctactacaaggactaccgccgcttcacgctcacccgcgacgtcaacacctgcaacctcgtcgtcggcaatgtgggcgagtaccactccggcaccggcgccaagcgcagcggccgccgcaagggcaagaaggggaagaagggcaagcgcgaggcaccggtcaccgactttgtgccggccaagacgcagatgaggctcgatgagaacgctgccaatgcagacaccacggccgcctccgagccggagctagttgtcggtgaagctgtcaatgacaatttaccggtggtcgaatctgagtctgaattcagccgcggaaagtatctcatctacatgggcggtggtgagagatgcaagagcatgaaccactacgtttggggattcttgtgtgcacttggtgaggcacagtacttgaaccggacacttgttatggaccttaatgtgtgcctcaattcacggtatacttcaagtggcaaggatgaagagagagattttaggctctactttgattttgagcacttgaagcaatcagcatcggtcattgaccagagccagttctggacagattgggggaagtggcacaagaaggatagactgaagaatcactacactgaagacatcaaggtgaccccgatgcaacttcgtgacgtcaaggacacactgatcatgaggaagtttgggaatgttgagcctgataacttctggtctcgtgtatgtgagggtgagacggaggcagtgatcaagcgcccatggtatttattgtggaaatcgcgtcgattgatggagatcgtgtctgccatttcctcccggatggattgggactttgattcagtccatgttgtgaggggggagaaagcccagaacaaacagttgtggccaaatcttgatagagatacttctccagatagtctccttacgacacttaatgataaggtcggtgctggccggcatttgtacattgcaaccaatgaacccgataaatcattctttgacccaatgaagggtaagtatcgaacacacttcctggatgacttcaaggatttatgggatgagaacagcgagtggtacactgaaacaaaggagctgagcaatggtaatgctgttgaattcgatggatacatgagggttgcagttgacactgaggtgttccttcgggggaagaggaaattggagacattcagtgatcttactcgtgattgcaagaatggtgtcaatacatgccctgcttcctcatgaacatctcgtgaattatgtgcgctgagtctcaaatgttgtgcttgatataatatttttgaactaccgtgtatcttaagcacatatggctttgttgtagctagctagttcatatgagtgtttctgcaggacactgttgttgtattttatcacccagaacacattagtttgttgaattcatgcatcggcactttgtagtttgtactaattgcttaaacccagaaatttgctcaaaaaaaaaaaaaaaaaaaaaaagctcgcgatctagcctcgcgcccc

SEQ ID NO: 74569 - DNA, 654 bp, Oryza sativa
  Clone ID: PAT_MRT4530_74742C.1
atgacggcaacagggacagatatgacggccgccctacaagcgctgctcgacccgacggcgctgtccctgggcctgcccacgccggcgatcaacaaggaggagtacctcgccatctgcctcgccgcgctcgccggcacgcgagcgaaggccctggtgggagtagggagacgagcagcaggtgcaggcctacaagcggttgtccccgaggcccgaggtggcgagcggcggcgcgcatggcgccgccgtggactcgtggccaccctccgcaacatcgtccgccgccctctcgccttcccctccgcctccggctcgtgcggccccgccgacgccgacgcgtgcgccctcatcgcccgcctcctcgccaaggaccccgccgcccgttgtccccggccccggcgccgcgccgctgcactggtcgcagtcgtgcaaggcggagccgacaacgcagccaccgccgacgacgaaggcggcctgctcagagtccagagaggaggagaggagaagaaaggagaggctggcttgcttaagtggcctcctgagatgtggggtccacgtgggtcccacgctgatttagtcgtcacgtcgaataaaaccggttcaaaaccgtctgaggttaaggaaccttcggtgtactttattggtccaaatctgtaa

SEQ ID NO: 74570 - DNA, 552 bp, Oryza sativa
  Clone ID: PAT_MRT4530_74743C.1
ccaacagctgcatcctcccgtaggcgtaggcagctagctagctagctcgatcgaggccatctccatttccggcctatccctcttcttcttcctcctcctcttcctccgcctgtccggttcttgttctggtgctgctttgctcgacaccatccgattttttggaggcgattgccgtgctgtcaccggaaaaaggaaagagaagaaaagaaaaggctttccttcctcctgtgctgccccgccaacatcgtgttgaatctcgtcgatatatattttgctccgattggtgcctttttctcctggaattttgtgtcctgtttctctgtgtgggtggaaggcctcgcctttcaatccttccatcatcttgctgtccccccctcgattctttgcttcttcttcttcttcgaaagaaagaaattaaatattattacttgtttgatcttttccttttagcaatttctgccaatccccaggttcagtatttagtttccatccgtgcagatttctccgctcttccgctccccctctttgtgccctgccttccatccatttttt

SEQ ID NO: 74571 - DNA, 430 bp, Oryza sativa
  Clone ID: PAT_MRT4530_74744C.1
gacagcaacttgaacttaatttattcactaatcagaaacaacaacagtaggaggagcagtagtactactggaaaggaaacatggtgccagaaaaagcagagatcacacactacgtggatcagagagcacccaattgctatcttggataaattgcagccaccagttcaccggtgaggaggagtaaagagatctgtgtgcacacgtcggcctcgacaatctggaggcatgcataagcaaaacagcagctttggtttgatgacagatcttttctgtcacatcgttttaattttggttttagacctttgctgcatcatcatcaggcacttgagcctcgctgtcatgcagctccagctccaggccggttttgcttgcaccaatcttgttcatctcgtccttctcctctatgtttttcccccacagaacattgtac

SEQ ID NO: 74572 - DNA, 507 bp, Oryza sativa
  unsure (1)..(507): unsure at all n locations
  Clone ID: PAT_MRT4530_74745C.1
cgtttgaanacgtgccgaattcgggcccaatcgggaanaggatccttngcctacacgtgaggagcctctngcgggacggtcgcctgcnccgcnnaaaagtgccggagttctncnacangacaggtccccggangactacggctacaanccttttggcctcagcaanaaccngaggagggcnccnagttccangcccangagctgatcnatgccangtgggcgatgctcggcgccgcccggttcntcnnncgcgaagcccccancnantttggcngcnaactgncgccccnangccgcctggttcnncaccggcgcccccctncttcttgtgtannttntttcncctcaacccctgcggcaacngcgtccccatcagccccntcctcccccgtcgtcncccacgtcaatccntcccncngcgcctnntcactccggnattnnctancgcctcntctcttcnaacganccanccttancccnctncggccccctgnnntnccncgggcg

SEQ ID NO: 74573 - DNA, 660 bp, Oryza sativa
  Clone ID: PAT_MRT4530_74746C.1
atgacgaggaagaggagcaacggtggtggagctcaggctgtggcggtgtgcaagcggtggatccggtggctgctgagtgtacgagccgcagatccggcggcggcggcgcctctctcccgcgagctgcgccttcctccctccgtctgcgtgccggcttctgtcttcctccgcacgcgcaccgccgccgggacggagggagtactttcgatgtcgaccatgtcggttgtggagttcgtcgttgtcgtagccatcgctgtcaccaccgccgcagcacgtctcgtcgtcaccgtcgctttggggagggtgggagaggggcgccgccgccagatccaagcggcggagaggagccgttgcggggagagtgtggaatggccatcgtctgcctccgctctggccacctcctccttcttgtcggcgggggtggcgtggattcgcgaggccaacggcgttactcccggccacctcgtcggcggtggccgtcgggggccgctcctaccgccgcgcgagtgcatgagaggagaggagatggagttgggggtgtggataaggatcaagagtctgttggaaatcaaagctattcactcactcaatctcacaagaactttagaacacagagagtttgcaacgttcgaccgcttcctgctcctggacgtgtgctga

SEQ ID NO: 74574 - DNA, 213 bp, Oryza sativa
  Clone ID: PAT_MRT4530_74747C.1
atgaatatccagaacttaatccacttttttaagtggaaacgaacggagtatgctgcaaggctggttgggctaggccgaaaaggccagcttatcaccgtcgtcgccattgcttctccatttttcgcggttgatgcagccaacccctcgtcgtcgccgtcggctgagacctccatatatggcatgcaacagtcgcgcgccttacagcatctccag

SEQ ID NO: 74575 - DNA, 319 bp, Oryza sativa
  Clone ID: PAT_MRT4530_74748C.1
tttttttttttttttattttttttattttattttttttaccattttttgggttatattaactattcatatacatttatcttatattttttacattaatttcacacctaatattgttttgctcaaggaaggcaaccaaactaacaccaaccctgaacattaccttttgctccacaaaaaaaacccacagaaccgaacggccacaacctataaatattaaaaatatgtactcacgccagaccaaaaatatttgaaaaaaccccaatctgtactatacatgcacactgacccaccacaaatagcagtaccctctgcctccag

SEQ ID NO: 74576 - DNA, 1200 bp, Oryza sativa
  Clone ID: PAT_MRT4530_74749C.1
ctatgtggatagtgtagggctgtcaagtgcaagtcccattgtattgagcccattgtcaacatagatagttgatccagtgattgcagatgccaacggcgatgctaagaatgctgctgtgttccccacttcatctgccaagagctccttctgcagtggtgcgttcacgtacgaatactctatcatcttctcgatgaaaccaatagctttggctgctcgacttcccaatggacctgctgatatggtattcactctgatcttgccttttcgacctgcttcgtaagctagaactcttgtatcactctcaagtgctgcttttgctgagctcatgccgccaccgtataatttagaagtgataaacattgagagagtattcacccaggaattgtcctttcggaagctatgtaggtcaaggatatagtagcaccccctgcaaatcagtgacattcctgtgaagcatgctgaaatggcaatgactcttgaactagaacaactagattccgacctaactggattcattataggaaggaagtgttggagtaaagagatgaaagagtaactagatgctgaaactgcagcaagatacccttttcttgatgtctccagcaaagagttttttacctcaggaccatttgcaagagagtgtacgaggatgtcaatggtaccaaagtcattcttcacagtttcagcaacttccttaacagtccagtttgaagacccagcataccttttgtttgctttaacatcatcaggaacatcctcaggagagtcataaacagcatccaatggatagacttttgtaatctccataagagatccatcaggaagctttcgtgattcgtcaaacttcccacgcctcaagcttgtctcaaatatgttcagtgcaggtacccatgtaccaacaagaatctcggcaccagctgcagcaagagcttttgctattgcccagccatagccattatcatcagcaactccagcaataaatgctcttttacctctgagatcaatggggagtccctgggcagacatcgccctcacggcaaacctcttgtggttcagagaaacaaacggccctgctgatgctgtttttctgcagctcgcgaagccagtttgggtactaagcgcccttccaaatgaaggaagtgctgctcttgaccctagcaggcgttggcaagctgggatacaagggcgtgccgccgccat

SEQ ID NO: 74577 - DNA, 417 bp, Oryza sativa
  Clone ID: PAT_MRT4530_7474C.1
gggttccaaccctattaaagcaatccccgggggtgtttaaacctccaaaggccggaaaaataataagggtaatgataataggtttaacaattcaaacgggccaccattgacttacacaacagctttttttgaagggtgcaaattttatccaggcctgtcacgatttcactttaaagttttgaccctggaacccccctaccttttttttttttttttgccagacaatgaaccaaaaattgataaatggtccgcccaggctttaatccccaaaaaaaacaaaaagggttgaccgacctggggggaccacccatttcgcatgggtttggggcaaatattctcgagtcgagctgttgcggcctcctgattgacccaggctttgcaaaaaaacatttgggcttttaaccaaatggggcatgg

SEQ ID NO: 74578 - DNA, 441 bp, Oryza sativa
  Clone ID: PAT_MRT4530_74750C.1
atgaatcacggcgtgacggcggccgtcaacatgtgggacctcctcaccgtcgacgaccccggccacgtccccggcaccgtcggcgccgccgagtccaaatcaaagcgaaagaagaacaagaagaagaacgcggcggcggacgacggcgacggcgaggtggtggtggccagcaccgccgccgacgagccttgtgctaacgccgaggcagcgaggggatcggagccggcggggaaggccgcgcagatgagcagcggcaaccaacaggcagcggcggcgtccaacgacgacgtcgacggtggtgctccgccggcggcggcggcggcaggaggtggccgccggtctccttgccttacggtggtcggtgagatggtcaaggcggtcgtcgcggcgggcttggttgccttcttctacgccgtcgtgaccgcgcccactaccgtctga

SEQ ID NO: 74579 - DNA, 1037 bp, Oryza sativa
  Clone ID: PAT_MRT4530_74751C.1
cgcacgaggcaaaaccctcgcaaaacccttctctccctccttcccaatgtcgcactagcttccctccgccgccgccgcgtccatcccccgcccccccgatggctctctcggcggcgctccggctgccgctcccgcgcctcctgtggggccccacggggtccctcctcgcggcggccgctgcggcctcccgccgccgcgccgcggtcgtggccgtccccgccgtccgcttcctctcctcctcatcctcctcctcggacggctcgcgctccgtgcagcccctccgcgcgggccgcgatgagcgggcggcggcgggtgagggcggggcggcggtgaaggagcgggtggtgcccgtggagctccacaaggaggccaccgaggcgtacatggcctacgccatgtcggtgctgctcggccgcgcgctccccgacgtccgagatgggctcaagccagtgcaccgcaggatactttatgctatgcatgagatgggtcttgcatcccgtagaccattcagaaaatgtgcaagggttgtcggtgaggtactaggtaagttccatccacatggagattcggccgtatatgaaaccttagtacggatggctcaggacttctcaatgaggtatccacttgttcaaggtcatggaaattttggttccatagatgctgatcctcctgccgcaatgcgatatacagagtgccgcttggattcactaacagaagccatgttcctgactgatctggagttgaatacagttgacttcgtcccaaactttgataattcacagaaagagccttctctgttgccagctcgtgttccatctctattgttgaacggttcttctggaattgcagttggaatggcaacaaatattcctcctcataatctgggtgagcttgttgatgtgctctctgttatgattgaaaaccctgaagctactctccaagaactactagaatgcatgcctggacctgactttcctacaggagggacaatcgtgggaaatcaaggtattttggaggcctataaaactgggcgtggt

SEQ ID NO: 74580 - DNA, 425 bp, Oryza sativa
  Clone ID: PAT_MRT4530_74752C.1
tcgataattgttaacagtgaaatttagtaagcccggagtagtcatcggtttagagtcagcatcggcttcgaagtcttgagattagccgatgagagttgtcaagtcgtcagttgtcggattcttgctatattcgcttgctttttgactgccaataagggttttatcggggtttcagccgattttatgacatcggacctccagccgatgtatgctttagccttcagaccagtgcttattctatcatattgatagccaattggtttctattggattatattgttgttgtattctatcatcatcagccgattgcctttatatcattatctacattagacacatagccgattgcttaaaccctatcgctatcggttggtatcggcatcggctggaatcactacatcggcttgtcagccgatcggctgttt

SEQ ID NO: 74581 - DNA, 126 bp, Oryza sativa
  unsure (1)..(126): unsure at all n locations
  Clone ID: PAT_MRT4530_74753C.1
tgtagatgtgnacaacttnagatgnatatanccagttacnccgcttttaattttnccttgtttnagtgaagttacnagttataaattctgaaattctgncnaggacaaaagttctcatgcttgtna

SEQ ID NO: 74582 - DNA, 558 bp, Oryza sativa
  Clone ID: PAT_MRT4530_74754C.1
atgggccctgaagtgatgcagaaggcacaagcggagatacgacatgctttgcaaggaaagtctagggtaactgaagatgacttgattaatctaaagtacccaaagaacatcatcaaggaaaccatgaggttgcaccctctagcatctctacttgtcccaagaaagtgtcaagagtcatgtaaaatccttggatatgatattccaaagggaacaatcttgatcgtgaatgtatggactattggcagagaccatagatattgggatgacgcagaagtgtttataccagagcgtttcgaggacacaaccattgattttaagggtacacattttgagtttatatcatttggggcaggacggaggatgtgcctaggcatgacatttgcacatgcaacaatagagttggctctcactgctcttctataccactttgattggcatctccctcacggtgtaacacatgatgggatggacatggaggagcaatttagcgtgaccgtctctagaaaaagagatctttatctacatccgatacaacacgtgggagtagaagaaatataa

SEQ ID NO: 74583 - DNA, 1095 bp, Oryza sativa
  Clone ID: PAT_MRT4530_74755C.1
atggcgctggccatcgccctcgcggcgctctgcctcgcggggctggccgccgggttctacctcccaggcgtcgcgcccaacaacttcgacaagaaagatcctcttcaagtgaaagtcaacaaattgacatcaatcaagacccagcttccctactcttatgtcgacagtgctcaaaatctcggtgaagttcttcgtggtgatcgaatcgagaactctccatacacgttgttccaattaaaagaatggaccaagaaggtgcatatttctatcagcatgtcttccatgttggagccaaaggacaatatgcaagggagagtgatatcaagtgggcatctcgctggctgggatacctatctactgatgacggatgaccaaatccactggttttccattgtgaattccctcatgattatcctcttcctttctggaatggttgcaatgatcatgctccgaaccctttaccgggatatctccaagtataaccagcttgggactcaggaagaagcccaggaagaaacaggatggaagcttgtccatggagtccagtttattggcatgctgcttgtcaccatggtctttgcagtccttggattcctttctccatcaaacaggggtggactgatgacagcgatgctcttgctttgggtattcatggggttgctcgctggctactcttcttcaagtctttacaagttgttcaagggcgcagaatggaagaacattgcattgaggacagccttcactttccctggcagtgtatttgctattttcttcttcctgaattctcttatttgggggcagaagtcctcaggcgcagttccattcaccacaatgtttgcccttgtcctcctttggttcggtatctcagtgcccctagtatttgttgggagtttccttggcttcaagaagcctgcaattgaggatcccgtgaaaacaaacaagatacccaggcagattcctgagcaggcctggtacatgaacccgatcttctcaattctaattggaggaatccttccatttggtgctgtattcattgagctctttatcctgacctccatctggctgcaccagttctactacatctttgggttctga

SEQ ID NO: 74584 - DNA, 855 bp, Oryza sativa
  unsure (1)..(855): unsure at all n locations
  Clone ID: PAT_MRT4530_74756C.1
gttgttccaattaaaagaatggaccaagaaggtgcatatttctatcagcatgtcttccatgttggagccaaaggacaatatgcaaggcgttaaacatgaatacgaaggacagtggaatgacaagaagacccgcctgaccacttgtgatcctcatgcaaaacatataattacatcatctgattctccccaggaggttgaagttggcaaagacataatatttacttatgatgtggatttcaaggagagtgatatcaagtgggcatctcgctggctgggatacctatctactgatgacggatgaccaaatccactggttttccattgtgaattccctcatgattatcctcttcctttctggaatggttgcaatgatcatgctccgaaccctttaccgggatatctccaagtataaccagcttgggactcaggaagaagcccaggaagaaacaggatggaagcttgtccatggtgatgttttcaggcctccatccaactctgactagctctgtgtttatgtcggtacaggagtccagtttattggcatgctgcttgtcaccatggtctttgcagtccttggattcctttctccatcaaacaggggtggactgatgacagcgatgctcttgctttgggtattcatgggggttgctcgctggctactcttcttcaagtctttacaagttgttcaagggcgcagaatggaagaacattgcattgaggacagccttcacttttcctggcagtgtattngctattttcttcttcctgaattctcttatttgggggcagaagtcctcaggcgcagttccattcaccacaatggttggcccttgtcctcctttggttcggtatctc

SEQ ID NO: 74585 - DNA, 466 bp, Oryza sativa
  Clone ID: PAT_MRT4530_74757C.1
cttcttttttttttttttttatttttatcgctggccacaacccacagagtcctatattgtcccttatcaccaactttctttctttcaaaacatttcattattcattatttgttttgaacactatctcggtgcatgcaacacaacaaccgcgtgatcctactacctatgaggcaagcccgcggagcctagtactggccggcggcgaaaatgctgcactgcttgggcttaacccggcacatcgactgcagttgccccccttactgcctccccctggacaacctcacccgggtcatcccccgcttctgtttcttctcgccgaagtaaaccttcttcaacaaccccttttcgtaatacccctgatccgacaacaaccccttgcccccctattactcctactactacaactaccagccctgctccaagggcatcgagatgctcttcttgttactcctcaccatccccccga

SEQ ID NO: 74586 - DNA, 1081 bp, Oryza sativa
  Clone ID: PAT_MRT4530_74758C.1
atccttttggatctgggaagaccacatttcagcccaggtgtatgatggttgtcaaagctgggaaacatcttttattgttcaagcttattgttcaacagaccttgttaatgagtttagtcaaacactcataaaagcacatgagttcataaaaatgtcacaggtccttgaaaacactccagacaatgaagcttattaccgccatagatcaaaaggttcgtggacactatcaacagcagataatggatggtgtgtatctgattgtactgctgaagcacttaaggccttacttatgctatcaaagatctctccagatctcgcaggagatgccataaatggagaaaggttgtatgatgcagtggatggcatgctctctttcatgaataaagatggcaccttttcaacatatgagtgcgagagaactacacattggttagaggttctcaacccgtctaaaacttttctgaacattattgttgattatccatctgttgaatgcacatcatcggtacttcaagctctaatcatgtttagtgagtgctatccagtgtaccgcaaagaagagattggaaaatgtattaaaaatgcttccaagtttattgagaacaaacaaaggaaggatggatcatggtttggtacttggggtatatgtttcacttatggaacattctttgccataaaaggattagttgctgctggaagaacatatgaaaatagctcttccattaaaaaagcatgcaactttattttgtcaaaacaacttagtacaggtggatggggagagacatacctttcaagtgaaaccgaggtaattcttaccattcattttcatagatctcatgttgtgaacactgcttgggcaatgttagctttaatatatgctggttaggttgaaagagatccatcgccactatatcatgcagcaaaagaattgattaatatgcaactagaaacgggcgagtttccacaacaagaacacgttggatgcttcaacagctccatttatttcaattacagcaattatcgcaatttattccccatttgggctcttggggagtttcgtcgtcgattggttctacgaaag

SEQ ID NO: 74587 - DNA, 1842 bp, Oryza sativa
  Clone ID: PAT_MRT4530_74759C.1
atgtatgcaaaacaaaatcgccttcaggtggatgttccagccagtaaacttgtcgatagtactcaagtcacagaacagattatattggcatcactgaggcgggctcttactcaacattcttctctgcaagcacatgatggacattggcctggcgatttcagtggaattatgttcattatgcctatcttggagaggagtattgatgcactaaccaaagggcgtgcttggattatatcccgtgggagtgcagctgcagtaccacagtggggaaagatatggttgtcgtttatcaagttgtatgatgaaagggttaatgcaagctattcatatattctgaaggtgattggtttgtatgattggtctggaaataatgccatcattcctgaattgtggcttgtaccacattttcttccaattcacccagggcgattctggtgcttctgtcgtttggtttatatgccaatggcttatctttatggtaagaagtttgttggggcaattacaccaacgatattggaaataagagaggagctctacagtgtaccatataatgagattaactggaaaaatgctcggaacaattgtgccaaggaagaccttcgttatccgcgatcatttgtacaaaatgttatttggactggtcttaacaaagttgtggaaccaatattgagcctttggccatttaataccttaagacacgctgcactgaataatctcttgaagcatattcgttatgaagatgaatctacaaaatatattggcatatgtccaatcaacaaggcactcgacatgatttgttgttggatagataatccaaattctgatgcattcaagttgcatcttccaagaatatacgattatttatggcttgcagaagatggcatgaaggcacagttccatggttgtggtcacaatggcggagatggcttaggcattggagcacactcgcggtggtcatggcgtgggaggcagcaagctcatggagcaggcggtgcaggtagcttcaagatcaagttggagatggtgtatgatggttgtcaaagctgggaaacagcttttattgttcaagcttattgttcaacagaccttgttaatgagtttagtcaaacacttacaaaagcacacgagttcataaaaaagtcacaggtccttgaaaaccatccagactatgaagcttattaccgccatagatcaaaaggctcatggacactttcaacagcagataatggatggtgtgtatctgattgtacagctgaagcacttaaggcattacttatgctatcaaagatctctcaagatctagtgggagatccgatagacggagaaaggttgtatgatgcagtggatggcatgctctctttcatgacataccagttgtgggggctaatacagattttggaagctgacatgaatgaagatggcaccttttctacatatgagtgcaagagaagtacaccttggttagaggtgagtacaataaagtcctactttttgtttaaggtaaagtggttttgtacttggggtatatgtttcacttatgggacattctttgctgtaaaaggattagctgctgctagaagaacatacgaaaatagctcttccattagaaaagcatgcaactttattttgtcaaagcaacttagtgagacttatctttctagtgaaactaaggtttatgtggaggctagtagacctcatgcagtgaacactgcttgggcaatgttagctttaatatatgctgggcaggttgaaatagatccaacaccactatatcatgcagcacaagaattgatcaatatgcaactagaaacaggcgagtttccacaacaagtgagtatttaa

SEQ ID NO: 74588 - DNA, 333 bp, Oryza sativa
  Clone ID: PAT_MRT4530_7475C.1
atggtggagaacctgagcacctgcaggctgtggttggtgagagagcaacgtcgccgaagccccgaagacgacactaccactactgagctcgtcaccgtggccacctcagcggcagccccctcgcaagctcggggaggcctcccgctgccgcccttgggcatcagatccggcgtccccaacctccgcggcgctggatctggccgaggagatggccagagacaggaggcggcggcggccggtagcgaccgtgctgcgcgaggagaggacatggtggtcgggggcatcggcgctcaagaggtagatcaggagacgaccgttgaactccacgaatga

SEQ ID NO: 74589 - DNA, 429 bp, Oryza sativa
  unsure (1)..(429): unsure at all n locations
  Clone ID: PAT_MRT4530_74760C.1
annnannannncnnnnnnnnncccaacagaaacggggcggcaaaaacgcgcggggggcacgcggccggcccgggcgcgcgcgcccgcgcgcccnccccnccgccccgcccnncaccccncnnnncnnnncnnnncnngcccgatggatggtgggccgtgcctagccgtgccgagcgggccttttggccatctatacttacaagtgtgccccgccgccgcccctggtctgtgcgcccggtccaccaaaccgagccgctgacaaatgggcccgctactcccgtccacgtaccggcccatgagccgtgggccgagcccaccacctcatcgcgccgcgcactccgtagacccggtctactgtgcgccggccgcttggtgcaactgacagatgggccccgaaagaatattccctcggaatattctttccaataa

SEQ ID NO: 74590 - DNA, 179 bp, Oryza sativa
  Clone ID: PAT_MRT4530_74761C.1
cgacaacgtccccgactaggacattgttatgatcgtcgacagttttctaggccagggcatcgtttttttatgcgctcgttaagcatttttttacatcatctagtttaatactatgaagagtttttaccatgtctggtataatgaagcccgatgaggctgttgaagcatcattatacttt

SEQ ID NO: 74591 - DNA, 411 bp, Oryza sativa
  Clone ID: PAT_MRT4530_74762C.1
gtccaacccgacgaggcccgtccgccgcatgctcgtcttcgggctcggcctgatgttcatccagcaagccaccggcgtcgactgcgtcttgatgtacagcccgcgggtgttctagcgcgcgacacttacgagaaagagccactggctggccgcgtgcatggcggtcttccggtgcaagatcctgttgatcctgatcgcgacgctcctaaatggaccgcgtgtgtcagaggccgttccagctcgccagcggcagctggatgggcatcttgctgttcaccctggccacgtgcctgctcatgatggaccggcggccggagggccaggcgaacgctcttggcgccttaagattctctcgaagctttcgttcagggcgttctttgccttcgggcttggccccgtcccttgggtgtc

SEQ ID NO: 74592 - DNA, 313 bp, Oryza sativa
  Clone ID: PAT_MRT4530_74763C.1
gcggcatctcaccgcggatcagtcggcctcaccctcacgattctcgcttgatcaattgttgtctgcccgtcatctgtccgcctgcgtgggtgcccgtcccgtccgcccgtccgtccgagtcggccgcacggggtgtcacctcacacgtcgtcgtccaccaatgaccgatgttgcttcacgcaggcgcaggcatactttggagacggccctacacctcatggaatacacgcaggtacacgaagagatttgggggatcgatatcaacttggatcacctgcgagcaaattggaacaaccctacgacggtccatgag

SEQ ID NO: 74593 - DNA, 166 bp, Oryza sativa
  Clone ID: PAT_MRT4530_74764C.1
gcggcggagggtggttcagagcggtgcgagcggcaactacagctcctgcttccctgccgcctacgccgccgaagacgatgacaacgatgggttcgagaaggaggaggacacacacctcctcttccacttcccgtctcatccgtcttcgcgccgccacggtttgtga

SEQ ID NO: 74594 - DNA, 4545 bp, Oryza sativa
  Clone ID: PAT_MRT4530_74765C.1
aaggcagtcccatgtgagttatccatataaacctaagtctgctcatcttttatatttgcaaccctcgtgtttcttaaataaagtgttgattgttcactgttagtctatcatctaccccaaaggtttggttgttcctatttcctattgttttctcattcatatgaatatttgagagcactaatcttcatccttggctctgataactcccaggttctcatctctcacttttgcttctttgattataggcctgaagtccagaaagtcctttggtcatgtgctgctctttccactctgagaagcagcagccacgagactattaaaccaagggaacatctgttacggttccttggcggaggcagcagcgctggctgccttaggatgggtggtatcaccgatcatcaccaagttcatcaaccgcgcctcaacctaccttggcaaggacatggtgtgtgagctccaagaactggaggccaccatcctgccacagtttcagctggtgatcgaagcagccgagaagagtccccataagggcaagatcgaaaggtggctgcgcaaactgaaagcagctttctatgacactgaagatgtgctggatgagctcgagtatgacatcctcaagcgtgtagcagagaaaggcgcacaagcatcgttgatggttgcctcctctaattccgttccaaagcctctgcatgctgcatccaacaagatgtccaatttgcgccctaagaacaggaagctaatcagcaagctcgaagaactgaaggaaatcttggtggaagctaaggcttttcacgatcagcttggcatacaagctggcaattcgacagaacttatggtcacagcacccatcaggcctaacaccaccacttccttttcctcatcaaatgttgttggtcgcgacgaggatcgtgatcgtataattgatattctctgtaagcctgtgaatgccggaggtagcatggctaggtggtactcatctctggcaattgttggagttggtggtatgggaaaaactacactagctcagcatgtctacaatgatgaaagggtggctcagtattttgatgccaggatttgggtctgcatctcgcgcaaacttgatgtgcatcgtcacacgcaagagatcattgagtccgctggaaagggcgagtgcccacgtattggcaatctcgatacccttcagtgcaaattaagggacatattgcaagaatcagagaagttcctgctagtgttggatgatgtttggtttgacgaatccaaaagtgagacagagtgggactgggagcaactgttagctcctatagcttctctgcagaggggaagcaaaattctagtaacgtcccgccggaatgcacttccagctgttcttgactgcaagaaaatttttcctctggaaagcttgaaagatactgatttcttgacaatcttcaaaagccatgccttttctggagctgaaaccagtgatccttggctgcgcgagaagctagagattgccaagaagatctccagaaggcttggacaatcaccgttggcagcaaaagctgtcggttctcagttgagcaggaaaaaggatatagctacatggagagctgctttaaagaatggcaacttaagcgagactagaaaagctctattgtggagttatgagaagttagatccacgtcttcagaggtgctttctgtattgcagcttatttccaaaaggtcaccagtatgaaattgatgagttggttcacctttgggtggcggagggattagttgattcatgctaccagaataacagaatggaagatattggcagagattatttcaatgagatggtgtctggatctttctctcaaccagtttctaaaacatatgtgggtacacggtatattatgcacgatctcctccatgatttggcagaggcactatctaaagaagattgcttcaggttagacgatgataaggtgaaagaaatgccatccactgttcggcatctgtctgtctgtgttcagagtatgacactgcataagcaaagtatctgcaagctacatcatttgcgcactgttatctgtattgacccactcacggatgatggaaccgatattttcaatgaggtagtgcggaaactgaagaagttgcgtgtactatatttgtcattttacaacactaccaatttgcctgaatccattgcagagctcaatcaccttcggtatttgaatatcatcaaaacgtttatttctgaactaccaagatcattgtgtactctgtaccacttacagctacttcagttaaacaataaagttaagagcttgccccacagactctgcaatttaagcaagttacggcaccttgaagcatacgacaatagaatagatatattgatcaaagcagatttgcctcaaattcctgacattggcaagctaagttcgctccaacatatgaatgacttttacgtgcaaaagcagaagggatacgagttacgacaaatgagggacatgaatgagcttggtggcaatttgagagtcagaaatcttgagaatgtctatgggaaaaatgaagccttagaggcgaagctgcatcagaaaactcgacttaaaggcctgcatctttcctggaaacatatgggtgacatggatatagaaggtgtttcacatttcgagattctagaaggcctgatgccgccacctcaattggagcgccttacaatcgaaggttacaaatccgccatgtatccaagctggttacttgatggctcctattttgaaaatctagaatcttttaggcttgttaattgcagtgagctcggaagcctaccttccagtacggagctctttgggcgctgcatggcactaaccctttgggatgtcccaaatgtgaagacattatcttttcttccagaaggtctcacaagcctatcaattgacaggtgcccactgcttctgtttagtactaacaatgagctggaacatcatgatcatagtgagagttctatgaggacggatcacctggcaaaacatgttttaatcgcggaggcaggttctggttcagacactaggagcgcactgttgtcagaacattcatctatgaagcagttggcaacattgatgtgtgcggatatatcggaaaatcttcaaaccattaaaagcaatttagaaaaagagagagatgaagcattggtgaaagaagacaccattgaagcatggttgtgttgccacaaggagaggatgagattcatttattcagcgaagagtgggctgccgttggttccaccatcaggactttgcgaactctatctttcttcatgcagtattacagatggagctttagctctttgcattggtggcctcacttcacttagagaattgagcttaacaaacattatgactttaactacgcttccatcggaagaggtcctccaacatctggccaatctcaatttcttggccattcgttcctgttggtgtatcagatcgttggggggcttgcgagctgtctctattaaagaaatgagattgttttcctgcccttctttagagttggcatgtggcgcagagtttataccattgtcccttaggagactatgtatatacaggtgcgttgttggagccgacttcttctgtggtgattggccgcagatgagggaaattctcttatgccggtgcagatgctctgcgtccttgcatgttggtggcctaacctcccttgaattattcgcactatatcacttgccagatttgtgcgtgctggaagtctcgtcatcccctcgacttcaccaggtgcatttgataaatgttccgaagcttactgccaagtgtatctcacagttccgtgtccagcattcactccatattagcagttctctgattctcaactacatgctatctgctgaagctttcgtacttccagcatatctctctcttgaaaggtgcaaggacccatccatttcatttgaagaatctgcaattttcacatctgtcgagtggctgagattatctaagtgtgaaatgagatcactacaaggaaatatgaagtgcctatccagtctaaagaaactcgatatctatgattgccccaacatatcatctctaccagatctaccgtcttccctccagcatatatgcatatggaattgcaaactcttggaggagagctgccgagcacctgatggagaaagctggccaaagattttaagattgcccatatccgctggaaggaattcagatgaattgtgcatcagaatcacaactacacaacagtggttgcgttggttgcttggttagtctgaaggagaggaaaaaccgggtctttgattgtggtgccaaatcctggccgcggctattcgctaaaattgcagaagaagcaaagcaatggagcttggccggccggccaattgtagagttagtactaccaagcagtctcttttcgtcgtaggtcgttttccatactttgggagatattgctttgtgtctgttccagcctcttggtgttctgtaaactctcctatgaaatcttaatacgaattaatggtgtgcactgttcatacgcaaaaaaaaaaaaaaaa

SEQ ID NO: 74595 - DNA, 222 bp, Oryza sativa
  Clone ID: PAT_MRT4530_74766C.1
atggcgccgccgcgcaatcgctccactcctccttccttccgctgcctcgaagaagcagcggggcagatcggcgaggctgatgaatcaggagaggaactgggaacggggagaggatcggaggaagaacaatgggcggatctgaagaggggattcggaggcggagaagagaaccccacggaaaccccaagcagcggggtgaagcggaagcggaagggtttatag

SEQ ID NO: 74596 - DNA, 545 bp, Oryza sativa
  Clone ID: PAT_MRT4530_74767C.1
gcacgagggtcttacccaacattgatagggtgtgttcggaggtggtggtcgggaacttcgcctcagtattagctaaaataaacttgaaaatgaattaatatgatattttaaaataactttcctataggcttttattttgaagtggaagcggcaaaagctttgccgattatattaggagatcagaaattaatgcagtctagctgttgcgcttatacatggtgcgctaatacagaattacattgaaaccctttaggctagaaaagcctcaactagggattaaaggtagagaagatagcaatgatcctataggcatataaaaaatacaccgtgagtttggccttatatacttctttctgtagggagatttttcgcatataaaacagggctttaccaagtccaaatactactaattaatatattatcactactattattccatgtccaaaatccttgggacaaactgctggggtcaactaggaattaaagatgtagcggccacaccacacgtgaatatgtgcggttcgtgccaaagacaagcagcagaa

SEQ ID NO: 74597 - DNA, 363 bp, Oryza sativa
  Clone ID: PAT_MRT4530_74768C.1
atggcgcacaccaaagctatatgcatcactcttatctgtcagttggcaggagcaactggttttagcatgggtaccctgctcatctcaaagatcagggaggagtacccagacaggatgatgctgacattctctgagaagttttcccctcaccagagccgtgcgccgccgtcgttccagccgtcgccgccactcgggaagaccgccgtcgtcatcgccaagtcgccgccgtcctcgtccgccccttcgctgccgtcggagaccgccgaagcatcgtcgccgtcgtcaagccgaagaccgccgccgtttcaacctcgtcgctgtcgccgtccgttggtcctccgccgtcgctttggtcgccggtga

SEQ ID NO: 74598 - DNA, 744 bp, Oryza sativa
  Clone ID: PAT_MRT4530_74769C.1
atggggttgttgttagtgctcaatcttcggtcagctacgtccttaagtggatcagggggtttgattgcggtgcattatacgtttttagcattaaatcttgtacttggtgcgcgggtgcgggtctttgctggtaaatcgcaagtgctgatggcctctattattcatggggcctttggatatggtaccgtattaatctttagtggaaagatggaggccttttggagggtacctaaatggaagatcgaaaaagcgaaagtcaaggtagtcttccggctacaattccacgctacaaatattccatcaacagggtgggacaagctatttttgtccttcatttctgctgatacgggaaaggtatctgcaaagacaaataaagcaaatgtgaggaatggaagttgcaaatggccagaccctatatatgaagcaacacggcttcttcaggattctaggaccaagacatatgatgacaaactctataagattgtcgtggccatgggtacttctcgatctagtattcttggagagcttgacgtgaatcttgccgaatttgcagaagcactgaagcctgtctcaatagcacttcctcttcgtggttgtgaatttgggacaatattacatgtatgggaatttgagcagcaaagagaaactggtgccaaaagtactcaacagttagtgaaccaaagaagtcatgatccttccgaaattggtgtggcttcatcagacatttatagtcataagttgtaa

SEQ ID NO: 74599 - DNA, 702 bp, Oryza sativa
  Clone ID: PAT_MRT4530_7476C.1
atggggacgccggagatcgtggtaggggagggaggaggagatttttgccgtaaaataagtgcggatatgggaacgaagtgctcgtctctttcggtcgagggggtggttgttgttgttctgttcggcgtcggcggctgtatcgctctccatccgttcgctacttcgctcacgccaccgctcctcacgcctgctcgcgtcgccggcgacgcggggcccatcccgcccgctagcgccgccgccgcttccgcactgctcgtcgctgcctccgatgtcgggatggtgctccaatgtcggtcccacttcgttggcatcgagtcatctccgccatcggcggagtcaaactgcttatgtacggcgaagttgccccgcgacggcttgaggacgagcgagaaagagacgaagccggcggtgttaacctcgacggccatggtgatggctaaggtggtgacgagtgagaagctttgcggcgcctgctccaggaggaggcggtggacaccgacagctgggggcggtcggctcctgagtcatgcgtcggagaagaagctcggctggaggccagcagcctcggggcagcggggccctcatcgacggggtcccagaggcgacggcagcgggaagttgaacccatgggcagtggagctccaggacggacggcggcgtcaggacaaagtggttttcagcggcggcgctgataggcggtga

SEQ ID NO: 74600 - DNA, 117 bp, Oryza sativa
  Clone ID: PAT_MRT4530_74770C.1
atggccaagttgacatggacatggcttggtgctactactgttgaggagaaagaatatgaggatgcggtgtgggtggtcccagggggtgatgcccgactgtgttgccctggtggccaa

SEQ ID NO: 74601 - DNA, 1239 bp, Oryza sativa
  Clone ID: PAT_MRT4530_74771C.1
gtgttcaattctctctctcgctcaatcaattctattcacaatacgttatcagcactttcgctctcgcgaaggagttcgcgaagtttaagaaggaagaacatcactttttgatctacaggaaaagcgaatagaaaaacaacggaaggtacgatgcctacctttcattggatcatggatgccgttctcggcctccctcgccatcagcgcgcacgccagcttcgctatcttcttcgtcgatcgatgaggaggacgcgttggggatcccgcggaggcagggctagggttgtggccgccgccactaccctcgccgccgtgtgactgcaactccagttgtggttcccccgcctgtccttgtcgcacctcctcctccgcctccggttgccgaagcacctcgccggatccttgtgcagggggtacagtactgtgcccaccatggatggacggcggtggtgacactgcctggcaagccgtgtgatctctcactggagatggagtcgctgccggccccgttcgtcgccgctccatcaccaccaaccgctccttcctcacctctatcaacgtcgcagccgacgccaagctttcgacgctcccccactcccgtgccaccaggatttggtcgtaccggaaccatggcggcgcatggaggcagcggtggcggcgtttcagggggagaaggtggcggcggaaatgggatcggcggtggatgagaaaggcggcggtggaaacggcggccaaagtggtggaggaggaggcggcgaaatggcggcggcggcagaagaggtggaggacgcgcggccaatcggtggcggcggcggcgcacaccgcgaggggaacggtgcaaatccaatggtcgatagaaaggaaaagagaagggtaaggcaccacaacctcgttgcaatagcaacaggcattgcaacaggtgtggatctgactatcatgtcactaaagattgccacatcccaaaaacatcttgttctcctgtatcagaaatccctaaaggcgaaaaagtcttctgaggaactaagatttgaagctcacttcatcttacaaaagaaagaccggatgttgaaagttctcactaggctcctattgaaccagagaacaacctcgctcttctcccagaggataccgctgcattttctgcaatggatgacatgctcatcgaatactgctcaacggacccacttggagatttactgtaatctcagtgcgtcccacttagagataaagctgctttaa

SEQ ID NO: 74602 - DNA, 1065 bp, Oryza sativa
  Clone ID: PAT_MRT4530_74772C.1
atgccgggcaccattctagggttggtggccgccgccaccatcctcggcgcagcatttgccgtcgctgctacacctccgactccaccaccacaagcgcccgccatggcaccggcgccccgccgcgtccaggtccaggcaccatggatggattgcggtggtgacacccgccggcgagcagtgctccctcccactggagatggagtcgccaccggcaccgttcgtcgccgctccgccatcaccttcacctcgtcggagctgctcccccgatcccgcgccgccggggtttcggggattggaactctcaccacgcgcacgggtggggagaacggcgtccgaacccgaccggactcttactccgatgaggagagggggctgtcggcggacgacgggggctgcggtgactatagcggtgagggcggcagaaatggaggcgccggcagtggtgtaacaggggaagaaggtgcggcagaaaaggaatcggtggtggatgagggagtcggcagtggaaacggcgctggaagtggtgaagaaggaggcgccgaaatggacggtggcggcagaagaggtgcaggaggcggcgccgcctcggcgacatcatgtgcggcggcggcggcacaaaccgcgggggcggttatggcgcaaatccaatggtcgacagaaaggaaaagggaaaggtcaggcaccacaacctcgtggcaaatagcaacaggcattacaacaagtgtggatctgactatcatgtcactaaagattgccgcatcccaaaaacatcttgttctcatgtatcagaaatccctaaaggagaaaaataaatcttctaaagaactaagatttgaagctcactttaatcttacaaaagaaagacctgagattgaaagttctcaccaggttgaagctcacttcaatcttacaaaagaaaaacctgagattgaaagttctcaccaggctcctattgaaccagagaacaacctcgctcttctcctagaggataccgcggcactttctgcaatggatgacatgctcatcgagtactgctcaacggacccagttggagatttactatga

SEQ ID NO: 74603 - DNA, 671 bp, Oryza sativa
  Clone ID: PAT_MRT4530_74773C.1
gcacgaggggaaaggcgataccccttctcccatcagcaccggttccgcccatctgcatgctgaccgacggcgacgctcacctccgacgacggatcggcgacctggttcagccatggcaatggcttacaagatggagacggaggggatgaacgtgtatgatgagtgccagaggcggctcctcgagatgaagtgtgagaacgtgcaccggctcgaagggtacaagatctactagcggcaacgcgctgtgctgctaagacaaggtgcgagggcccggcgaagggttcaaggagcttgaacccgtgctgtccaccgacgactgcccgtacaccgtattggacttcaactacgttatcgaagacaactggcagaatagcaagatcttcttcatcgcctgggtaccgaccgcatcgaggataccagcccagattgtgttcccacacttcgaaccatgggctgtagtcggtgtttgacggggttcacttcaagtgaaagccccgactttttcatttgggctacaacgcatccgaggccgggcttagggggtgattttctctcgggcctgcgcgccgccgtcaccgatgattcccgggcgggctctgtgccttttcctgggccctaacttaccccagtgcgcggggcttacacggccgcgtgtcactggccctctcctc

SEQ ID NO: 74604 - DNA, 836 bp, Oryza sativa
  Clone ID: PAT_MRT4530_74774C.1
aaattatttttaggttgaaacaccaagctaactactaacaattcatataatggctttgcaaacctcattgatgacaatttcgacataggaaattctgagtaactttgcaaaaggttttcattttagtttggatgatttggaaagctagaaatgacttttatttcaaaaagaaagtctggggacccattcaagtcaatattgctgcacaaatcatgtcttctaatttcgtttgtgatcttaatgctcaaaatgaagatcatgattctcagattcatcaggttaacaattgttcagctcttaattttgcttcagtgattcgttgctatattgatgcttcttggaaagatggcagtactggaattggtctcttcatacataactctgctactcataaagctcttttttttttcaagcttcatctgaattcttctcttcatctttaccagcagagctagctgcaattatcacaaccatatctatttatcaaaagcttaaaatcactgatgttactctcttatcggataatcaagaactagttaaccttttacaggttcaagacaatgatagtcagcctcatcattggagcttaaatcctttacttccaaagctaatctttcatgcaggaacgcaggctcttaacatcaaatggatttcaagacaagttaataaaatagctgagttccttgccatgaaagctagaggaaaaattggtcaatcacaaaatcaaatagtttgtcaggacatttccacttacattctcattccaactgtcctactaaggatgctttagaatcctctcctcttatggagaatgtatagttggttgatgtaatgtg

SEQ ID NO: 74605 - DNA, 384 bp, Oryza sativa
  Clone ID: PAT_MRT4530_74775C.1
acgggttaaatttttatttaaaatactggtgggaacacgaccaaaataaagttacaaaatgggagcgtactaaacctgctttatgctacagaaactatgtaatacaagcatgccgaacgtcaatcattgagtgtgatcgtatgagagttcgcgacagcatattataatgtgtagactaacacgcaagcgacatcaaccaggactctgcacttatgctgaagctgtgacacccatatggatgcacataaacatgagcagacactgaaatatgtatgtccataacacatttgtgcgaggcatgcacataatgcttgagctcgttgtggttgcagaaaacacgaattcaacgtattaaagggaaaaaaaaaaggggggccggtttag

SEQ ID NO: 74606 - DNA, 700 bp, Oryza sativa
  Clone ID: PAT_MRT4530_74776C.1
ggggtaggctgatccgtcctcctgtttcgccgctcagggcgccgatctccatcgcagattaccgtgccggcctccgtttcagccgccgccgtgctcatcctcctccgtcgccactgatggcaccgggcatcgtgtcagccggcgccgggctgctagtggtccttcgtctgcgttcatcgcgccggcctgtacttgcccgtagccgttcgacgcgcctgcctgcttccccgacgccgtcgggctctggtgcggccgacctgccgacgacgatgctcccggacctagggcgccaatggcacgcggctgcggtccctgatactgttcgtggacagcgagcggatccgtctactgaatgcattacctgcttgctgccaatttaccatgcgctgagactgggcggtcgatcacctttgcttttctgtgcactggatggaagcctggtgtatttgcatgttcatcaagtaagagctctgtgcagggtactgtcttgtagttccgttaataccgatggctgcgcccatgctacacatagatcgcatgtgagatgtagcttatccttggcatgaggccatgttgggtttatattaggatgctgtcgcatgcgccgccctctttgtctttcggggttgtttttgtggccgtctaattattgctccagcctttggattatgctcctatttaggttcctggcatatatata

SEQ ID NO: 74607 - DNA, 221 bp, Oryza sativa
  Clone ID: PAT_MRT4530_74777C.1
tccatcatacattcctgaactttagttagtttcttccagtacgtatcatgttgttgtggagatcacacagaatggtgggatgtcgccatttgttgtgtgatctgccaatgaatgttttcctgcttttctggttttatttccctgtagctgaactgaaatgtttctagtaatggataggggaggagctttgctcttctgtttccaaaaaaaaaaaaaaaaaa

SEQ ID NO: 74608 - DNA, 393 bp, Oryza sativa
  Clone ID: PAT_MRT4530_74778C.1
atgacgcaaaccctgttgtgcgcacgtgtgcagctcggcgggccgagctgggcggtgccgctcggccgccgcgacgcgctgtcgccgagtcggagcgcggtgtcgaccgacctcccgggccccgaggccgacatctccgcgctcgtctccgccttcgccgccaagggcctgagctcgcgcgacctcgccgcgctgtccggcgcgcacaccgtcggccgcgccagctgcgtcaacttccgcacccgcgtctactgcgacgccaacctgtacagctccaacgccgccgccttctcgtcggacttcgccgcgtccatgatcaggctcgggaacatcggcccgttgaccgggtcaaccggcgaggtcaggctcaactgcaggaaagtgaattcctga

SEQ ID NO: 74609 - DNA, 1023 bp, Oryza sativa
  Clone ID: PAT_MRT4530_74779C.1
atggctcggcgtgttggtcgggccgtgccgactcggctgatcttgggccgtgcgcccgtgcctggtcatgctcacgccgggccgggatgggtggcccatttggccattatagtccaaggggatttagtaagggaggccaaaactttgtgggagaagtttagagatgggattgtgggtactaaccatgaagttatggccacggtcgactttcttcgtgaaaaaaatgtctacaagaaggacgttcgagccaatgccggagcggctgtctacctcttcccagctgtccacctcagcacgcccctcagcctccacacgatcatcaattgctgctcatgcaggatgcgcaccctgaataggtaccccccgcaaagctcaatgcccatcacctctcagtggcagggtgagtttgtgttgtatgcacagaagtttgtgaaggccggatctcacctccgcaaggaaatagatacccttagtgaaaggaggagtggatttgtgcaacctcacgaggatagggttgaaaaaagaccgggctctttgcaagcttctcgacggagattggaatcccctcaaggatttgaactccgcaaaatacatcatcacttcacagggacaagcatggagattcctcgcatgagtaatgaggccgggcctagtcaggtggttctcccatgcatccaccaacaaatggtaccaacccatggcaaggacaatacatggattatgctgactgatgaagttggtggtttagaagggaacgacaacaaccagcatagaattaaccatgagcgccgtgagcccaaccgtgtttctcttttagctcccgacatgccgcaggtgcaaggaaacagacaaagaaaatgcaagctgcacaccgttgggactctgatgagggatgttaggtctgaaaatcttgcctttaggttcgtgagcatgccagttgatttgatcctgcaatcaacaagaaacaaagacaggaaaatagtggttaaatccataaatgatagccgatcggctaatcgccga

SEQ ID NO: 74610 - DNA, 784 bp, Oryza sativa
  Clone ID: PAT_MRT4530_7477C.1
gacaccaccgctccctccagtgcgccgtcgaccaccgctcattcgtggagttaacggtcgtctcctgatctacctcttgagcgccgatgcccccgaccaccatgtcctctcctcgcgcagcacggtcgctaccggccgccgccgcctcctgtcctgcttgagcgcagacaccgccggccgctggccgccgactccacgccctccctctccccccaagccccactctggccatctcctcggccagatccagcgccgcggaggttggggacgccggatctgatgcccaagggcggcagcgggaggcctccccgagcttgcgagggggctgccgctgaggtggccacggtgacgagctcagtagtggtagtgtcgtcttcggggcttcggcgacgttgctctctcaccaaccacagcctgcaggtatcagtggaggtcctctaaaaaaatctcagtggaagagatccggttgtggaaatttatatctcatggcactaatggcactacagcatggcacaaattaatatctatgaaatgtcccgttagacctgaagttttgtggcaatacatggagggtgttatcttgctgatgtgtattttacatgtcatttagccgatgaaatttgttcagaaatcaggaatttatttctgacacgagcaggcaaaatatggatgagggctggaatcagtatgtattttgtagacatatataatggagtatttcgttgtagctgaaatatgtaaatttgatggaatcattatgtaacatgtcaaaattttccacact

SEQ ID NO: 74611 - DNA, 904 bp, Oryza sativa
  Clone ID: PAT_MRT4530_74780C.1
tgcgtaaaatatatagctaatgttcatactttacataaggacaggagtgatcgagtgagcctagagtatagaatgggtgttgcagatttcttaaatgctgcagagcaagataaaaaatagagagaacagtcaatatatgacttgtctatgcgttgattgtaaaaataagaacatgtttgccgatagagcatgaatacacactcatctgatctatcgaggatgcacaaatggttacacaagagccgctgaatactggagatgaagcgagcgacgaacaaaacgaggaatgacatgaagataatatgtttgtcccttccccgttgggtggttatcgagtgcatgtcgacaatgatagtctaaacacaatgttatatggtgttgaggacccagcttgcaacgaatataaggttggttatctgttctcttggatcttatgaaacttgagataaagtaatggatgaacaaattgttaaaggacttgtttctggaggagaatgtgttgcccaagacaacatatgaagctaaacaagtggtatttccattgtcactagaggttcaaaatacacgcatatccaaacgattgcatattgttctataaagaatacgccaacttatatgcatgtcctatatgtaaggtttattgatacaagcaaaagaacagttctaaatcagggacaatgtgaaggagggctggagggagctggaggggtggtccaacgaaggttttgtgcatccctatcctcgatcgtttcaagaaaatttgtcaatccctagaaagcagagttagttcgttggcaggcaatagatcaaaaggccgatggtatgctaaggcaccctacaaattcgatgtaatgaaagaatgttgatagaacataccttaattcgcgtaatcaaagggatcaaa

SEQ ID NO: 74612 - DNA, 1377 bp, Oryza sativa
  unsure (1)..(1377): unsure at all n locations
  Clone ID: PAT_MRT4530_74781C.1
gcagcaaccggaacacaccggctttcgagcctctatcaacggtatcgattaatcacccttatcgtctttggttccttctgcttgcttctcttgctggttcgtcggtcggtggagtttgagcctgcgccatggctgtcggcgggagagggagacggccgctgctcctgctcctgctcctcctcgccgtggcgctggcgctggcggcgcgcgcgcgggcgcagctgtcgccggggttctactcggcgagctgccccaccgtgcacggcgtcgtgcggcaggtcatgtcgcaggccgtcatgaacgacacgcgcgccggcgccgccgtcctccgcctcttctaccacgactgcttcgtcggcggctgcgacgcgtcggtgctcctcgacgacacccccgcggcgcccggcgagaagggcgtcggccccaacgccgtcggctcgacgaccgtcttcgacctcgtcgacaccatcaaggcccaggtcgaggccgtctgccccgccaccgtctcctgcgccgacgtcctcgccatcgccgggcgccgacagggccacccggggggggggccgagctgggcggtgccgctcggccgccgcgacgcgctgtcgccgagtcggagcgcggtgtcgaccgacctcccgggccccgaggccgacatctccgcgctcgtctccgccttcgccgccaagggcctgagctcgcgcgacctcgccgcgctgtccggcgcgcacaccgtcggccgcgccagctgcgtcaacttccgcacccgcgtctactgcgacgccaacgtgagcccggcgttcgcgtcgcaccagcggcagtcctgcccggcgtccggcggcgacgccgcgctggcgccgctggactccctgacccccgacgcgttcgacaacggctactaccgcaacctcgtcgccggcgccgggctgctgcactccgaccaggagctgttcaacaacgggccggtggactcggtggtgcagctgtacagctccaacgccgccgccttctcgtcggacttcgccgcgtccatgatcaggctcgggaacatcggcccgttgaccgggtcaaccggcgaggtcaggctcaactgcaggaaagtgaattcctgatcgatactactagatagcattgccgcgcgcaaattgttcatagtacaaagtttaaagttatataatcagctgtcaatttcatgtattaagtgaattatgacataagaatgcaatagaaatgtcccaattttagacatcaaaaaaaaaaaaaaaaaacatccgtttgttcaattaattaaaccttgcttaattcagctacctgtaactattgcgacggctatgatttttgnaatgaananaanagntttaaaaaaaaaaaaaaaaaaaa

SEQ ID NO: 74613 - DNA, 287 bp, Oryza sativa
  Clone ID: PAT_MRT4530_74782C.1
catactgggcgcagcggagatcggagatcgccagatcggggagggaaccagagcgccgccgcctttcgtccggtggggattctcgtctcgcagaacacgcaagcagggcgctgtacaaccccaacgcctagacagaggaaaaggcttgagggagaccttttctaatcctgctcctctcggccagcgacctgccgaagcagattcttcacatcatcgacccacctctgtttacttgtgctgttctcacactcaaactctaccagaccttgtgccgtgctcaggccaaa

SEQ ID NO: 74614 - DNA, 636 bp, Oryza sativa
  Clone ID: PAT_MRT4530_74783C.1
atggcacaaggattgtcatcccgtttttcctctggagctgttcagaggaacttcaaggatgaccatgcattttcggaaaacctcatggcggccggccgacgtggagtgagaacttcactaccactggcgcggggacctttactactttacgacgatggccacaggttcccctacggctatcttgttacgacttcaccccagtcgaagaccccaccgtggtatgcgccaataagaccaccaaaggctcaatatgggggatttccgttggatgtaggagtagatcgatcgagccagtcgcccagtgctgctcctgcagcgatggcggaggcagccgggacgagggcttcacagcagcaggaggaagcagctgggattgagaacggaggaggcaaggaccagctgccagaagatacaagtaagttaaacataacagtcctctggcttgcaatctactttaggttgatggacggcttcgggaagctggcacttgcctgggccaccgttgtgctgctaggtggattctccaccctgataaagcccaaggacttttggttcgtcaccatcatcgtggtcatgcaaataacaaggtgcgtatcaatacgacatccctatatatataaagtagaagttaactaa

SEQ ID NO: 74615 - DNA, 451 bp, Oryza sativa
  Clone ID: PAT_MRT4530_74784C.1
acaataaaactaatccgaatatactattatattgtagcttcaatgcttcacttgtgaattgtgatatactagaacaaagtagttatgagcagcgagcggtcacctattgcaaaagaggaaaagtgaaacagttgacaacaagcagcagaagaatgaagcattggatctaagaccttccaacacacctcgtcaaagcaccaccgtacctcgattagctccatgaaaacagcagtaagcccgtgccgtgtcgaatggtgatgtgttgctgctcagagatccgctggtctagcatccctgttggtggcgaaggagagttcgggaaatgtgtggccttggtgtgccggccaacaccactcgttctgagcgaaccaccattcacagcgttgatcatgcacgtccagggggccaattcatttccactacgaaaaaaaacaagtggatccggtcggac

SEQ ID NO: 74616 - DNA, 675 bp, Oryza sativa
  Clone ID: PAT_MRT4530_74785C.1
atgtttgaagaagaagttaatgccaagatcatggtcatagtggagaatttaacggaggaacagaggcaacaaatggagcagtttgtagctgattttcaaatgcgttgtcttcaatgtttcatcatgacaccagaagggcaaactcaaaagactcgattccccaagccgatagttgaaatacttcaagatacagttgatgaagcagttcatcgcgcattgtttaatcattctggtgttttggcggatacattacaaaatttgatcaagccatatcccgaatggttcgatagagttccacttccgcaccgatacaagattctagatttctcaatgtttttagggcaagatgatgtatctacgaaggaacatatcagccggtttttagcacaatgtggggaggcatcggctgaagaggctctgaaagttagattttttccattgtctttgactggatcggccttcacatggttttcatcgctaccaccagattctatccaaggatgggccgatcttgagaagcaattccacgagtatttcttggctggaatcgatgaattgaagctttcagacttaatatcggttgagcagcaagaaggagaatcggctatggaatatattcaaaggtttcgtaatatccgcagccgatgttatggtttgagcctaagtgattcatag

SEQ ID NO: 74617 - DNA, 112 bp, Oryza sativa
  Clone ID: PAT_MRT4530_74786C.1
atgggatcatcgtggtcccacgtttccatcccgcgggacggcatatgttgtggcgacgcctcgcccaattgccgcggctaccatgtcgagcacgcatctgtcggaggtgaag

SEQ ID NO: 74618 - DNA, 282 bp, Oryza sativa
  Clone ID: PAT_MRT4530_74787C.1
atgggagaagacctttgggtcttctcttgcgctgggaaatggaaaccctaccctgaccaggttaggcaaaccgtctccggctgtgatgaggggttgagcagcctctcatcatcacgatgtgacagggggtgcacgccgcctgacaagcaaccagtgtgcaagcacactacctcggtcacactggtcattcgaccggttgcagatcagtcacagaccggtcaggcgcaccacgcgccgcatttaatgcagcgtggcgtgcccgctcaagccgccttaaatgcg

SEQ ID NO: 74619 - DNA, 504 bp, Oryza sativa
  Clone ID: PAT_MRT4530_74788C.1
ataaccaggacgaaaggtttggggcattaacttgggagatcaaaagcaaggaacaagcgccgatacggctgtatactctacaacccgtgatttgtgttttaatcgcgacgatcacgcacaccagagaacgcggttgagggatttatgattccctttgaggaaaacccgtttcttgaggcaccccgtggtcttttccaaaaagaggctttagaccgccggggtgttgttgaccatgccggcagaaacaccaatgtcgttagggaaggggactccgttggaaaccatcttaactgatgatacaagccgggctaccggaggatcccaggacgacccgtagagactcctgaatgagaccgccctgtggcaaaaaaaggattaacgcttgcaggcgcagaaactttggggaaaaaactccaggctgaggataaaagggccttattcacaaaacatggggactccgtccttggaaacgccgaagacaactaacgatgaccccgtggcttg

SEQ ID NO: 74620 - DNA, 195 bp, Oryza sativa
  Clone ID: PAT_MRT4530_74789C.1
tcgccacgcgtgcgcgccctatctttagttctttaaaagaaaaaaacatataggctcttataaactctccaagtgcaatagagataattaagatagctggctgctacaaataaattagactgcaagatacaagacaaaactttttttggggggtatccaaaaccaccaaagagctgtcaagagaggaagacaaaa

SEQ ID NO: 74621 - DNA, 515 bp, Oryza sativa
  Clone ID: PAT_MRT4530_7478C.1
acaggcataaacggatcatgagatattgaatcggatcaatctatagttatatactgtatacttatgcgtcgaagggcttcagggggcagaaaggaaggtgcatgtagcgtccattttgacagcttacactagacctagtagattgcagctaggcttgacaaaaatgaactagctaagggatgaaaaatatggtagctatgctacacaactacacgatgtattgtaagtctatatttacatatgccaaaaacgaagaaagaataattccccactagtttggcgtagaacaatctgctgtatcggtcttgataactctggtattataagaaccacaggagccgcatttatggtacaaccagtgaaatcgagacctcccttttctttcacaatcattacaaagtatatcctgacaccgatcacggtattcctcaggaagctcttcagcagccagcaaggcgtccaacatgccaaagtacaccgccatatctcccaaggatttgcagcagataggacaa

SEQ ID NO: 74622 - DNA, 1834 bp, Oryza sativa
  Clone ID: PAT_MRT4530_74790C.1
ttacataggtgcaggggcaggtgagatatggttcgggttccagctgcttgataatcctccccgatccgaattggagtgattatgtaccactcccaaaccagcaaacattatataagttatatgtaagaagagaagccagttgtagatggaagcgacggcgaacggatactgcctcctgacggtgtgagcccggtgactgagccacaaaaacctccagaatgcacgcgccgtcgtcacaggtccaatccactgtgcgacaaagagagacaaaacgatgatgcccacgtagataacaatgtacacgatggattctgccgtcgaggttctcatcacggcacgggaggccgcgaagaaggccaggattaggctgacgagcgagacccagatgcagtgcaacgccgccacgaagctcttccacgacccggtggagcgcgacgccttcccgtagacgagcaggatcacggcgatcaccgatgatgctaccgcgatggggtcgaggaccacgaaccatctgaacaaggacatgccctcgaggcttgccgagccgtcgttcgtgtacccgcccggcatgttgaatccagctgcaaggcaacggtggcgatgagcacggccaccaccgcgaggctgtccgaagtcctctctatccccttcccttaccatattgaacaaactgggcgatgtggaagcgagatctagcggtgtgtgtccatcgtcgttcaagacatcggtttgcactttccccttctggagtagagcattcacgatgccaggcgcgccggcaaccacggcgatgtggagcggcgtgttcccatccccgtcctgcgcatccagaagaccaccgacctgcttgtgtttcttgatggcaagggacacgatcgaggagcgcttctccctgactgcggagtgcacgaaggtctcaccatggctgtcacgaagctcgacagcatcagggcggatcccaatcaactgcttgacaacatcggcatgccccaacttagctgcgacatgaagagcagagaggccatccgagtccttcatgtacactgtgccaggtggcgcagtggccatgattgcacgtatgattttgctgttgccatcggatgccgcgaaatggagcggggtgctaccattgcagtcgacttggctagccagttctggcttccattgcaataagaggtgaaccatctctaagctccgaaagacagcagcatgcagagcattctgcgagctcggcccaacggctgatgcgtcactgcaggtagtaactattgctcttacagcaggcaccgacctgctcatcaccgccaagtacaacggagacacgccgactttgttcagctctgtcgcctttgcgtgtgccgcgacaagagcctccacagtggcgccatgaccatgcctcgctgccagatgtagggccgtgtccccggccgtgttctggcaccccatgatattctgccacacggtcctgggctagatgtactagggttgtcacggtgccggtgtgcccttcccttgctgcgcagtgcagaggcgtgttcagtaccgagtttcgacgagagaggaagttgttgtccttgatgaacctgtggtagagctccattgatcagctcgacgtgccctttctccgctgcgacatgaagaacggtgttcctctccgccgtcacctcgagtaggttgcactgttcatgctgaataatgccagcgacttgatgacgatgtcctgctgatccagcgccgtgccgttgttgcagaagcaacgccatgacctcctccgagcgccgctctagaggatccaagcttacgtacgcgtgcatgcgacgtcatagctcttcta

SEQ ID NO: 74623 - DNA, 285 bp, Oryza sativa
  Clone ID: PAT_MRT4530_74791C.1
atggaggtggagtcagcggagtgcgagtgctgcgagctgagggaggagtgcaccagggggtacatcctcggcgtgaaggccgacttcggcgggcggtggctgtgcggcctctgctcggaggcggtgagggacgaggcggccaagcttgggaggaacagaggcggcggcggaatggaggaggctgtgagggatcacatgtccttctgcggcaagtgcaggaagaacccggccttccgggtagccgacggcatgcgccagatgctgctccgccggcgatcaaagtga

SEQ ID NO: 74624 - DNA, 1468 bp, Oryza sativa
  Clone ID: PAT_MRT4530_74792C.1
atggccgccgccgtcgtctgcgtcaccggcgccggcgggttcatcgggtcgtggatcgtcaagctcctcctcgcccgcggctacgccgtccgcggcacatcccgccgcgccggtatgggtttttttctttttgattctccgccgcctcgccgtcgccggcggcggcgtggattgggaggtgacgagctcttggattcttgcgcagatgacccgaagaacgcgcacctgtgggcgctcgacggcgcggcagagcggctgacgatggtgagcgtcgacctgctcgaccgtggcagcctccgcgccgccttcgccggctgccacggcgtcatccacaccgcctcgccgatgcacgacgacccggaggagatcatcgagccggtgatcaccgggacgctgaacgtggtggaggtggccgccgacgccggcgtgcggcgggtggtgctctcctccaccatcggcaccatgtacatggaccctcgccgcgaccccgactcccccctcgacgactccttctggagcgatctcgactactgcaagaacaccaagaattggtattgctacgcgaagacgatagcggagaggaaggcgtgggaggtggcgaggggtcggggggtggacatggcggtggtgatcccggtggtggtgctcggcgagctgctgcagccagggatgaacaccagcaccaagcacattctcaagtacctcaccggcgaggccaagacgtacgtcaacgagtcccacgcctacgtgcacgtcgtggacgccgccgaggcccacgtcagggtgctggaggcgcccgggggccggcggacgccggtacatctgcgccgagcgcaccctgcaccgcggcgagctctgccggatcctcgccggcctcttcccggagtatccgatccctacaagaactactgcactagtgacttgccatgaggtacttgaatctcaggttagtcagtggcttgaagatcattttagaatgccatggtgcagggatgagataaatccaccaaagaagggctacaagttcacaaaccaacctctgaaggatctaggcatcaagttcacacctgtgcatgaatacctgtatgaagcagtgaagtccctggaagacaaaggattcatcaagaagacctccaataccaaggagcttcacaggcaaagttctccccctcaaaattcacccgcgagcatgctgatgtcgaagctttgataggattccgagggaatcccttttgactgacggcttatctcagagtttacatagctcactaatttgattcagttcgatatctctggcaaattgccaatttctgggagttcatcctaaaagcagataataagaacaaccaatgtgtatatcatcagggatatgagttgaattattaaaggatgcttcagataaggttatgtggaaaaacttggtatacattgttgatagatcgaccgcacgtctacagtattgttccaa

SEQ ID NO: 74625 - DNA, 210 bp, Oryza sativa
  Clone ID: PAT_MRT4530_74793C.1
atggcggagattggagaacggcggcggctacggcggccgctcgctcggagagtccgccatggttccgctggcgcgttgatcccccggcagctcggcactaagaatggtcgccacggacgcgcgcgccatgtcctccccggcgccatgggctctgcatcggtggctatgactatgtcaaaggtggatttgaagggtagctgcacgtattag

SEQ ID NO: 74626 - DNA, 398 bp, Oryza sativa
  unsure (1)..(398): unsure at all n locations
  Clone ID: PAT_MRT4530_74794C.1
gggtttacattcattgnttgcggggttgaagcatctaggcccccggtgttaattttggtaattaatgacaagcgctaattgtggactaaccgttgtctttgagctatacattttaagttaggtccacgtcatatgtgcgcatggatgattatcgatggattaaaattgacggcgcaaagcaaagggaaagaagacggtaaaactagcgctttaatttagaattgatcgaggtgtagggcgatcaaatttgctagtttatttttagtttcgccgtactattaagaggggtaatgacctagcaaagagatgattataattaccacattaggtcattgcattttcatttgtgctctctttttcatcacacacacattcacttgcaaatttactgggttcgg

SEQ ID NO: 74627 - DNA, 345 bp, Oryza sativa
  Clone ID: PAT_MRT4530_74795C.1
atggaggaggaggcagcagctagtggcgaccataccatcaaagcgtccgtcgtgcttctgttccgtcggcagttgctcgcccaggctgcattgattcgatgcatttgcttggtgccgccaatttggttcgagttcgagacctctgcattcatgcaggggacaaggagaacaggcaaggagaatcaaaaggcacagctggactggactagagctcggctgctcgagcctcgttttcgaaaaggctacacgagcgaaatctgcaggccagatgcagaatcgaatcgcatcgcgtcgaatcgtcgccacggcggccgcggaagccgcgccgaaagctcgtcggagcag

SEQ ID NO: 74628 - DNA, 536 bp, Oryza sativa
  Clone ID: PAT_MRT4530_74796C.1
ggaccgttgaggttcaatcaaacgcacccaatgttgaacgacagtccatgtctcatcgattacagtaggaggaagggacattgtggtgtgtatccactatgacatggcgacgtgcgtattttcatggaaaatttaaacgggtatgtgcaaaatactgccaaatgaagtaagaagtaggatggagcccattgtaacagggggcgaccacaattgagtcaccaactttagaccgttgctggacacccaaaaaggatttacatattgaacttaaattaacaagcttggccggcttgaaacccaaccctgtagggaaaatcctggccataccgcattttatttggattatcaaagtgcctactttctgggcggggtctaaacaggatatgccccaaagaggcgcctttccttaatgtaggcgccactgtccagtgaaagggggcgctccattcccgggggcaaaaaaagaatgcccccttttttaactgctaaacggaaccactgatcatggcggtgcctgagatccaagtatttacttt

SEQ ID NO: 74629 - DNA, 3414 bp, Oryza sativa
  Clone ID: PAT_MRT4530_74797C.1
tcatctgacacccatgtttgaggctgcatgtttgattctaagaatcatggtagaaacctgccccatttctggccgctctctaggcaatgccattgaacatgagagtcctattttaaccaatggaacgaaacacctctccatcatatcggctacactgatatcatcttgtagcattgtgggatcaacaacctcgtgagtattatcgggcaatgctctatcaacaaaatcatgcagggttgtgtcaccattaaaattttcatcggtaggactgctacctgttaccatttctaagagaaggattccaaagctgtagacatcacccttggttgagatatcttcgttcataccatactccggtggaatatatccaatagatccttttagacaagccaagcttgttgatatatctttatgtgcattcgatcttgtgtatacaaatcttgctaggccaaagtcactgacgtgtgcaaccatgtcactatccaacagaatattgcttggcttcaaatcacaatgtactaatggcaattcacactggttatgaagataatccaaagcaaatgctacatccaaggcgatattaattctctgtcttaaagtcagaacctttgtttgactactatgttcatgggattttggatgtaaccacatatctagattcccatttggaaaatatgggaacactatagccttgaagtctgccccagttgaatccacagaagaacatagagtaataattttcacgagatttcggtggcggacattttgtagggtttcacactcggcaacaaagctcttattagatccatggatatcaaggttaaaaatcttgatggcgatatgttcttcctgaagatgcagattgcccttttctttgaaaggaaaatgcagattgcccttataaactgtaccaaatgatcctgagccaagtaagttagttgaagagaatctatttgtggcctttagaacatcttcatatgttatgttcctgtgctcattcagctgttgtacatgtggctctgcttgcattctcttcatacaaataatttttgcaaggcataataaagtgaaagtgatagcaacaattggtattactatcgttaggactagaaccaatgacctactatggttccttttcttgtcaaccaattttgaacaaagaggcatacctgtcgttggagtttctgtgcacagatggtcatttccttcaattgacaccacactagcattggcaaaaataccactgcttggcaccactccatgaaaattattgaatgataagttgagaacttgcaaagaacgcaacaacgttagaaactgtggaatttctcccgataagttgttatgagatatatccatcaccttgatgcctaacatgttcacaaatgtttgcggaatgcttcctacaaagaagttgctttgcatctcaagatactctagaaccacgcattgactaagagtggatgggatatctccagacaatctgttgtatgaaatgataagcttattcagattgacaaggttgcctacttcatctgatatgcttccggacaagtaattgtatgacaagtctaacaccattgaaagtgaagaaattttaaagattgtctctggtattgttccatttagtgaattgtgagcaaggttgagtatttcgagttgagtacaataccctatactcagaggtatgcttccactcaagttgttcctatccaaatttagataattcagctgaacaagtttcccaatgttgtctgggatttgaccagagagtctgttttgagcaaaggacagaatgcctaatttgtgcaaatttccgattgttagagatatatttccagtcaattgattgtaatccatgtacaactcagtgaggctcttaagattgccgatctcttgtggtataggtccggaaattttattatttcttagccacaaccgttggagactactagatagattgccaacagaacttggcaggtttccttgaagattgttcccatccaacatcagcttagtcaatcttgtgcaatttgaaagtgacgagataaagccccagtcgcctgcttctagcatgttgtatgccacatcaaggtcctccaagtttgtcagtgatccaaaggatggcatgattccagttaacttgttttcagctaggtaaagcatttgtagatgggttgaattgagaagagaggttggaattgagcccttaaacttgtttgctaatagaatcaagccttcaatgtttgggagtgtatagccgatctctaaaggtaatcttccggtgagtgagttatttgccacagtaagaaatgtcagggatgacatattgaagaggggtggtggaattgtcccagagaaattgttcaaagtcaacatcaatgtctgtagcgttggaatatgtcctaagctctctggtatgctcccatctaaacaattctgtgaaaggcgaagataaagtagggaggaaaggttccccagagaggaaggtattgttcctgtgagacagttttctcctaaatcaagatattgaacttgtggagagacggttttaacaggtggtatagaaccggaaaaattgttctggttgaggtaaatgccgttaagtgacaacgtgttgagtagagcctttgggagttctccactgagactattgctattgagaatgagttgttggagagatgaactattcaacatgggctttgggatccctccggtaagagcattcttcccaagattgacatatgtgagtgtaaggctactgcccaaagagggtggtatgtcacctgaaagtctgttgtttgccaggaaaagtacactcagtttaggaaggtccccaaaagcagaggggatgctcccttggagcttgttgttgccaaggagaatttgttgaagatgcacacattgacttagactaggtggaatctcaccttgcagggaattgttctgcagatctaggatctgaagttgtgaacatgaagagagttctgatggtatgttaccttccagagagttcatgctgaggtcgaggttctggagttcgttcaggaagccaagctcagacggtatgccgccatggaagctattgtttgatagttgcagccttgtaagagaggtgatgttggcaatacaaggtgatattgagcctatgatgccttcggatgggagatcaatggcgataacacggcgaggagctctcctgctgcatgtgactccatgccagttgcagggtaacaaggatgcattgttccatgaggctagaactccagttggacctgagagctgcgacttgaagcaaaggagagcgtctcgatcagtctcagtttcatcactgatggctaatggctggaagaaaaggaaatgaaatataagatggcaaatgacgcctgtagagaagactctcaaagcagccat

SEQ ID NO: 74630 - DNA, 273 bp, Oryza sativa
  Clone ID: PAT_MRT4530_74798C.1
ttatttgcgcctctgctcaggagaatgctgttcgtgttcatgaatgcaggaccggtcctcaacaaaactatggggcgctagcactccatcatgttgatgttttttactgaccatttggcatgtggactacttgcaaaacgtggaacatctgaccttggattcaaagaataccttcacgtatctttagcctgagcccttgatgtgctagtagaagcactaaaactagtctttgggctcattgtcagagcctagctccctagttctttgggtatt

SEQ ID NO: 74631 - DNA, 231 bp, Oryza sativa
  Clone ID: PAT_MRT4530_74799C.1
atcctctatagagcccgcgccctttaatttttttttttatttaaaaactctaccatataaatatcggtgttttttttcagaggagattgccctttacaaatataacatttaaaaatctctcttaatttcacctcaagctttaagatttaagaaaaactataaaaaaagatatggataatatacacaagctccttatgatcatgaccaacaaacatatgaatatatattaca

SEQ ID NO: 74632 - DNA, 179 bp, Oryza sativa
  Clone ID: PAT_MRT4530_7479C.1
gggaagtcgtgcaggctgcggtggctgaactacctccggcccaacatcaggcgcggcaacatctcctacgacgaggaggatctcatcatccgcctccacaggctcctcggcaacaggtggtcgctgattgcaggcaggctgcccggccgcaccgacaactcaatcaaaaactattggaa

SEQ ID NO: 74633 - DNA, 828 bp, Oryza sativa
  Clone ID: PAT_MRT4530_747C.1
atgaagcagctagcagaccaccacgccagcctcgccaggggaactcgttgccagtgccacgccggaagtcggcgcacctcctccggctcgccctcctccttcatcgtcgttggccggcccctgccttggcggcatcgatctggaggagtctgccgccccgacgacctcccagtcggccttccgcgaccaccgcccgtccgccggctcctccgcctaggctgccaccgctcgtcgtcgtctctccggttggggaccgccgccgcctggggggatctgtctccgccactgccagggggacagccgcctcttctcgacgcgtcaggccgccggccaccgatgctctgccgttgccgtcagggctacggggccaccgcctggccggcggtcggcgtcgccttcccggctcctgatctgactgccgccgccggggggatggggctcaacccctccggccagccggccccgaggccccctgttggcgccggccagcctccgccgcacgacctcctcccgccgaggccatcggcttatcgggcttgcgtcacctaccgcctcgtcgacttctacgcatctccgacatcggcaccaattctgcttcgacttcatcattcagtcccgcgcatcttcggcttgatcacccgttcagtgctgagaggcgccctccttagcatggctacatcaccgcgtcgcccctctcgtcgtcatcatcgccacatgcgcatcgacaccctcgtcgtccgcactggtcatcgtcagccgctcaaggtcttcttcctctacttcgagcttcgctgccgcatctccaagttaccattgtcgccgctctag

SEQ ID NO: 74634 - DNA, 225 bp, Oryza sativa
  Clone ID: PAT_MRT4530_74800C.1
atgcaacgggagacaaagagagaggtgcacaactgtacccacaagacacaatccaccggcatgtcaccgtgcccggctggacacgtcaccatgtcgagtgattgtggcaagacccttcatataactccctctgaccaatcgatgccacacctcaggtttcacccctcccccagcaggcagcaggcagtcccccctcgtgccacggtgaatccggaagcagcatag

SEQ ID NO: 74635 - DNA, 442 bp, Oryza sativa
  Clone ID: PAT_MRT4530_74801C.1
caagtttccaataacatcctcatatagctctggcgaccatagctttctctcggaaatctatctacttttgtgttcttctactatgccatggctctatggcccagctatcaggtccgaacgtaaatgcatagcacaaccctcggcaaggaggttttatggagtgtagatttgatagactacaatcatctgaaccacttcggagagtgaggtcataagccggggttacacagtactttgatgagaagaatgaacaattccactgcacaggtacatttgtgatccgacgtgtcattgagcctcaatgtcttatggtacctcgatacagcaatactgctggcatggtccacaccatccaagggataggttctatgggattaactgtcccgtgctgcccagtaacctaccaacatcaattacaacagttcttgcctgaaggccaaag

SEQ ID NO: 74636 - DNA, 471 bp, Oryza sativa
  Clone ID: PAT_MRT4530_74802C.1
atgaagaaaggctttcttgctctctccctcttcctcctactcacccttgcctcacaggccacatggtgtgatgccgagagaagccacgcgatcaatggagctcgtctgagacctcatctccagtttgaagaattgcatgtcactgatggcaagaagcttgggcaagcagctgacactgacactgacactgacactgagagccacaagcaccatgacgaggtgaaggttccgatgagaatggccatagcacacaagggcggcggcaggggcggcggcgttggcggcggagtaggcggcccgggcggcggcacgggcgtcggcgggaggaacgtcaacggtgctgccgacacacggccggtgcacaacgggaggagcaacgcggcggcgatgccggctccggcgaaggcgacggcgtccgtcctggcactggccttcgcatgtgccattgttctctcggctttcagcttctga

SEQ ID NO: 74637 - DNA, 990 bp, Oryza sativa
  Clone ID: PAT_MRT4530_74803C.1
atggccgatactaccttgcggccatccggtgatgcggcgaagaagatcgctgacgcgctgaggaaaacgcgtggggtcttctccaatgcgtatcgtactgtcagaataagagtgaaagggacaaaggtcgaggagatcctcgataaactcgagaagctgttaaatctctacaaaatcgttcactctgacacatctgatagtactaggactcagaatcgcgctggtcacccccgccttcctgcccgtcacccaagcgtcaggcccaaactcgtcttcgtcttcaatggacgagctctgaagctttggatcgagcggttgcgcctgaagttagcatcatacgctacaccgtccaagaggatgttcctgatcgtatctgcaggggtcgcggtttcggtatttgctctgtatgcggtgcattgcaactacaggggcaggttgggtggaggtggaggtggagggggagggggaggaggaggcgatgttggtggagatggaggagggggaggagatggtaatgtcggtggaggtggaggaggtggagggggaggaggaggcggcggaggtggaggaggaggaggcgatggcgtcgcaagggacgatgacgccccaaagggtcttaggttaattcttgtcgccgcaccttcttccatgccgtggccgcgttacctcgccgtgaaaaactctggggaaaagctcgtgcctcgacaagacggaggcggcggagggggaggcgaccaagtcaagatcgacaagctccgcaccgccgccggcgagttcgtctcacagaagagcagctcggtgtttggcaagaagaaggtcgagcccgtggtcaaggatgctgcagttccaggggagacgagttcgatctcgactctgtttgcaaagaagaatgtcggggccgtcttgatggataaagaagctccatggaaggcgagtccggtggcaatcgagtctcagtacagccgtacaggggatcctgattgtttctaa

SEQ ID NO: 74638 - DNA, 3177 bp, Oryza sativa
  Clone ID: PAT_MRT4530_74804C.1
atgggcggcgacggcgacccccctcacctcgtcttcttcctcccggaccacgttctcgtcttcctcctttcagatcctggcatctccatcctctccgcgccggctaggctacctctcgaggccaccgcctccaccggagctcatgccgaccgccgttgcagccggagcatcccacttcgaccgccgccggcgctgccggatctactgggggcctgcttctgtgtagatgaaggtagaaaaacaccgaagacactaatatttccacgtgatgaacgaaatgcttcatctgtatgtagatgttgcagagaagttggtgtcagatacaaggcggcaaatgatatccaagaactaaacaaaaaattagagagaattacgccaacactgctccaggaactgtgtagagaagatcgacaaagcaatattactactcctcaacatgatgagttcattactattggcagaaatatcgcaaacgagtgcgataatctctttaggctactgcgaggtaaccaagctggtcaatgcctttttgctatagttggtgctgttggagttggcaagaccacactcgctcaaaagatataccatgatacaaagaataattttagaaccaggttatgggtgcacgtctcgaacgactcaaggaacctggggatatggcggggggagagtttcttgggaacaggagaaactgcagtgcaaagagtggtgttgcgtgaatatttaataaatgacagatacagaaggctgttgctggtgatcgataatgtgtgggaagagaatggctggaaccagttcttggggcaggatttctgtcgcggtggagacacagtgctgcttgtgactacacgacatgagtgtgttgcgagaaccatggggatagcccgttgtcaccgtataagaaggctcagcgaggacgatggttggttgctgcttcgcacaacggctaaccttagagaaactgaggctacaggcaacattcaagatgttgggagaagaatcgtgcaaaaatgcagtggccttccggttgcagtaaggacaatcgggtatcacctcaggggaaagaccctagaagatgaatgggagagtgtgtacttggaggattttgttgccacttacccagagatacggaacagcatcgatgcaagctacatgaagttatcttatcgcctcaagcgttgtttcctttactgctcactgtacccagagggtaatgtgatagaaaagcaatgcatcatgcagcagtggattgcagaagggttcttttctgaagtaccactacaagtacaagaagaggaagctgaaagatgttaccaggaactgatagacagatgccttcttctgccagaggacgaagctcatggtgtgacgggggctaagatgctaaacctcttcagatcatttgcaatttatcggtcacaagatgagaactacgtaagcaatcctcgtaatatcggcagaaatttcaaaccatggcgcctgtgtgtcacaaatggaggtagagtagaagacatcccagatgacgccacaagcttaaggtcactctttttgtttgggagtccacagattaatggaaaatccttggaatttatcttcagtaagttaacaagcctaagagttctggaccttagacatacacaagttgataatattagcacctatctcaaaaaactacacaaactcaagcaactcaggtatctaaacctttctaatactaggataagctcaattcctgctagcattgggagtttgacaatgctacaatttttaatccttaaaaattgcccacttctagagtctctaccaagatgtgttggccacttgaaaaaactgagaagccttgatatctcaggaactccaatgctaaatgtcatccaattcaaccttctcgaacttacagaactcaactgcttgcaaggttttgtcccaaccacctcagtacagcaaaacaataatggggatggttggaaatttgaggaggtaagacccctgggtaatctgaggaacctccagatggtaaagctagagagagcttcatcgagcagaggcgacctgggccaattgaatctgcatgagaagcccaacctcaaagagctcgagttatgttgcagctctgctgatcctcaaaacagagaccgtgatgcagagcatataaaagctgtctttgaggcacttaagcctgctcaatgcctcgtttctcttaagatagctaactattatggcgatcagtttccatcttggttttcaaattcccatctgacagtgctgcagcggctaacccttgaccttgatgactgcttacctagttgggatctaccacccctaggtcagatgatgaatctcaagttcctgaaaataacagcttccaatctcttacctgatgccaataacagacaacttcgaggtgaaccaagaaacggcaaggcatttccacgcctggagcaactggtcctaggcaagatggaaagcctggcaccatggtcggttcttcaggagggtgacttgcctttgcttcgtgttttccaccttgatggatgctcacagctgaattcaattccttcatggctccagagctgcagcaaattgacaagcatgaagataaaaaatattgatactcttcaagaaattgctagcctgccttcactcaaggaactagaggttcacaatagtggcaggctacaaacagtcctcaacatccgcaggcttgaggatctcacaatttctgactgcccagttcttgcagctgtggatggtgttcctttgctgtgctctgtgcacatcaaagaacagtctgcccagctaccacagtggctgcagcagaaatcgttcgtactcaggagattggatatcattggcaccgaggtgctactcgacagatgctcctcgcctattgctcagtacgggtctatcattcaagctgctgctgaacatgtttatgcgaaactggttgatggttcgttctacttctcctacaacaaaagtaccagtagtttccagagaagccgacgatgcattgagcgccttacagtggatggtttacataacaatgctgtgcctccggataattggagagcatggatggtgtacacgctttacgctatcctggtgattgcttcttctttcctattcagtggacttctgagaccaatggatgaaactccgcagcatccgcaatga

SEQ ID NO: 74639 - DNA, 466 bp, Oryza sativa
  unsure (1)..(466): unsure at all n locations
  Clone ID: PAT_MRT4530_74805C.1
caaaggattcagcccgccgccccgttgggaagggagcttcgaggcggccggccgcggcgcgtcggccgggccggcttggccggtggcacgggcccttgggggcttgcgcccctaacgtgggtcggggcgggcggcgggcgcaggcgccgcttgctagcttggattctgacttagaggcgttcagtcataatccggcacacggtagcttcgcgccactggcttttcaaccaagcgcgatgaccaattgtgtgaatcaacggttcctctcgtactaggttgaattactatcgcggcacggtcatcagtaaggggtaaaactaacctggtctcacgacggtctaaacccagctcacgttccntattggtgggtgaacaatccaacacttggtgaattntgcttcacaatgataggaagagccgacatcgaaggatcaaaaagcttcgtgccgaattcggcacgagctca

SEQ ID NO: 74640 - DNA, 242 bp, Oryza sativa
  Clone ID: PAT_MRT4530_74806C.1
gcagctggtagcttaattttccttcgcatttcacactttaatcccctgcgaatcctcacgtacactcgcttagccgtggatatattcacatacagatattgcactgttgatcatttctctgtcgaccccctgctcctgttcttgcctagcttgctcttatatatggccggttcatgggtgcgcaccatcacgtcgccgttccgcaaggtgttcggcgcgcagccgcacaaggacggcggcaa

SEQ ID NO: 74641 - DNA, 476 bp, Oryza sativa
  Clone ID: PAT_MRT4530_74807C.1
cggcgccctgaactagtggatccttagcacttatctgggacgatctgcggagcctgtgcctcttcagctaccaccgcttgagagacttactcttgattgtaacgaggattgtggaacttctgggacgcagggggtgggaagccctcaaatattggtggaatctcctacagtattggagtcaggagctaaagaatagtgctgttagcttgctcaatgccacagctatagcagtagctgaggggacagatagggttatagaagtagtacaaggagcttatagagctattcgccacatacctagaagaataagacagggcttggaaaggattttgctataagatgggtggcaagtggtcaaaaagtagtgtggttggatggcctgctgtaagggaaagaatgagacgagctgagccagcagcagatggggtgggagcagcatctcgagggtaccgagctcgaattgctgcaggaattcg

SEQ ID NO: 74642 - DNA, 792 bp, Oryza sativa
  Clone ID: PAT_MRT4530_74808C.1
atgtgtggtggagagaagagggggaacacatgcgcgcgctcgcctcgccgggcaggcggcgtgccgtggactactccatcccgctcgccagcgtgcaccgacgatcgggagagcaggtctccggaacctctgcctttgacgtcctgcaccgggagaaggcggcactaaggtttttgggaagcgcttcgcgcgactgctccctgttcatccgcgacggctcgccttcctatccgctcacgtgctgcgcgccttcgtcgacgctcgcaaccgcgagtagttcctgccgagcagccggtctttccgccacctcgaatgggataaggcgaacctacttttaggggtgtttggtttaggggtgggtgcgatgggttggtcccaggagagaaatattcctctcagatccaggaccaaccgatccataaaaaactggcggacgaacttgtcccacctgggacgagcgaacggcgtcaccgcgccatccgccacctccgcgagcgctaccgcctccgcctccacgagcgccacctccgcgagcgccgccgcctcgtccgcgcctgccgccgcctccgcctcgtccgcgaacgccgccgcctcgtccacgagcaccgccgccgctcttcttagatccgggagccgccgcgcctccacgaccgccgccacctctgcctcgtctgcgaccgccgccgccgctacctccacgagcaccaccgccgctcctctcagatccggacgtcgccgagctcctccgcccctagacggcactaaccgtgagtataaatccatccatcccat

SEQ ID NO: 74643 - DNA, 430 bp, Oryza sativa
  Clone ID: PAT_MRT4530_74809C.1
tttgttttttttttttttttggttttttttttttttttttctttttttttttttttttttttttttttaaaaacacaacacactttgtaaaaccacaaggcttaggggaatggaatcccccaaaacctcgccccggataaacataaaaggggcaccctttttaacaagagagagggcacctgaaaaaaaaaagcaacctttataatgaaactaacctgcaatgaaggggccaaccgttggggccctggggcagggcccaaacaattggctccaagggcccctattgttaagccccccgcttgaaaaaagggtaaaccccttggggtgcccccacggaaaccaccccatttaaaggttttgggggcaaacccctattatctctgggggggaaaccataatccggggtccctcaacaaaaaagatttttccc

SEQ ID NO: 74644 - DNA, 379 bp, Oryza sativa
  unsure (1)..(379): unsure at all n locations
  Clone ID: PAT_MRT4530_7480C.1
gggagagaagtcgaaaactatcagtagctataaaaggattggatgtgatgtttgagaaaaggatcaagtacttcctgtgaaatnataataataacaataagtaccagaatgccaccctctgaaaaaaaaaagtaccagaatgccacagctctgaatgttcaacacatctgcggtacagagagagagaaaaagaaaggaaactggtattatgaaacaaaaagaacaaaaacagcacaagancaccaaaggaaattaggtatatcgttttgcgaattgtgtacgtcgcaacttcttgatcatgtcatacatgatagcttgtgttgggttccaactatgaaaccatatgtcagctctaatcattcatctccgnggcttatgg

SEQ ID NO: 74645 - DNA, 210 bp, Oryza sativa
  Clone ID: PAT_MRT4530_74810C.1
ggcacgagcattagcactaagagcggctaaaaatctctatagagcttatcgtgcatgtctgaattggatgaatcttctggctagaataggtggtgttctgcaaaggcgaccgctgaatgaggggtcatggaccgtactcctcccggcgacgtagtgcagcgagttgcagatgaggtcaaggcacagctgaaaccagcgcttgaaactagg

SEQ ID NO: 74646 - DNA, 564 bp, Oryza sativa
  Clone ID: PAT_MRT4530_74811C.1
atgatgggaggccctcttcgagctaaaagtttgaaaggtcgcgacatgcaagcaagctctatcctagccctgcgtcaagctctgggcttcgtcgacgtctggggccccctgtgctggctcttccgtagcggctggctttggccccaccggctggctacaccctgcgtcgagctctggtcgccgtcgacgcccggaccccctgtgctgactcttccgcagcagctagctttggccccgccggctggctacggcgcccagcctagtttgatcgcgaatgaagtagaacgcaaaaagaggttaacaaaaggcaggggcaagcaagggctaacaccgggagctactgtcggtgagatgggcccgggggtatcatgtttagagggaggaggctgcccctcccaatgccacgtggccctcccccaaggggagtcaggcccgaagtggggtggtcgccactcctacccaaagactaattggaggaggctgccggaagggggatcgggcccgaggtcgggcggcggcggccccctcccccggagtcggccctcccgctctgatcaaagctag

SEQ ID NO: 74647 - DNA, 545 bp, Oryza sativa
  Clone ID: PAT_MRT4530_74812C.1
ggccgcaaattttttttttttttttttactttttttttttttttttttttttttttttttttttttttttttttttttttttttttttttttttttaaataaaaagggggaataattataaatttaaaagacaaaaattttaacctgtacaccaggaaagcagaaaatttaattttaaaaaatggaccccttaacccatcacaaggggggaccagaccccaccaacggggggaaggcccctgggggccagggtaggggcgggccaaaaacccccgcggggtggaaggtttaaggccgaaacagctggagctggaccccactgccggtcaaagaaaaaacccccccccccccccacgggaggtctttgaacaaaagcctgaaccatcacaaggccccgggaagaagaagggggcccacccaccccgaacagcggggaaaactggggatggagaccgtgaggggttaccaaaagaaactgccccggcccccagagggggctggccgcttgtccttcctgtgcccttaacaacctactcggggggggg

SEQ ID NO: 74648 - DNA, 279 bp, Oryza sativa
  Clone ID: PAT_MRT4530_74813C.1
atgcaaacacgcaaatgcaatgcatttcccccgatcgacgatggcccccgccacatgcgcgcgcacgcgtgtgacggctcggtggccgctggaagtcggaagcgggagagatgcgcgcgtggctgcttcggcttgccgctgacaactggtctctactgtccacccatgcaagtggccacccacaaacgcaagtcttcctgctggtgcctctggctctacagcgattttttacaggtctttggactgctactgcctactgggaaatggagtattcaagtg

SEQ ID NO: 74649 - DNA, 339 bp, Oryza sativa
  Clone ID: PAT_MRT4530_74814C.1
acgggaccggggtgacataccgggcatttttgacatgggtcatgtgggggtcccacttacacgtatgctatgcaaccttacagcggggacttacgagggtattggtgaccacctgggggaagttgtatctgtgaatagtcgatcataacaaaatggctcaggggaagttactttgaacggctgcgggccaaaatggggacgacaatacttttacatgttctcaggatataaattgattttaaggggaaaaacattgaggtccttttttatgaacaaagggttccatggggggggagggtgctattcttatttgtcccgctggtggtgcttctttttctc

SEQ ID NO: 74650 - DNA, 275 bp, Oryza sativa
  Clone ID: PAT_MRT4530_74815C.1
atctacccggggaagccgccgacaccagctgggtcacccataacagcccccggaggacatgcgagtccccattggacatgatgagagagggtgccgacatcgacgtggccaccagaatcgactatgggaagctgacgacgctgcctgtgccacctatgaaagccgggagaggacgtgccaccgacgtcgaacacaagatggcgcccgcgtcgccggcgtcgcttgcattggtgagggggccttcaccgcacatgatcacggtggagaagggccct

SEQ ID NO: 74651 - DNA, 140 bp, Oryza sativa
  Clone ID: PAT_MRT4530_74816C.1
caagatctttcttcctcctccacgccttcaggactcatttcgtctattgatagcttagcttgattgacgtgggcgacaatgtgaggtgccaaggactagcatgacgagagcgacaaggcgctctcatataacatgatgca

SEQ ID NO: 74652 - DNA, 303 bp, Oryza sativa
  Clone ID: PAT_MRT4530_74817C.1
gaacgagtgagctctcgtagtcaaagccccacctacccttccttcctgccttcttactcctcatctcttcttcttcgtcttcgtcttcgtcttcctctcgctatatatcctccattcttgccacttgacttgacctgcagctggcgcagctaatgcttaattagcttgtagattgattgggtggttagggtgtcagttaagcagctgattagggaagctacgtaccgtacgtgtatgggtgatcaggagatgaagtactactcgtcgtcgtcgtacgcgaggctgggacggcggtggtggcgg

SEQ ID NO: 74653 - DNA, 111 bp, Oryza sativa
  Clone ID: PAT_MRT4530_74818C.1
atggcggtattgcaggagatcgaggaaggcagaacgtgcaggctttgtattgctgcttactttggaaatggccaatcgtcaattttaaaaacctatggatacaacacctaa

SEQ ID NO: 74654 - DNA, 237 bp, Oryza sativa
  unsure (1)..(237): unsure at all n locations
  Clone ID: PAT_MRT4530_74819C.1
cacggtggaaatgcaaaaggttggtcgtctggcaacgcggagcggccgtgcagggatgttgtctcctccaggaaagttctccacagaaatgatccatgtgaagaacgtgaantancaccanctgaaatctgccgttcccnaaggccaaactgcagaaccnacactcttgacaccatgttgtgctccaggtcgtcggtggtcatggagatacctgatgtggcggtggtgctccattag

SEQ ID NO: 74655 - DNA, 626 bp, Oryza sativa
  Clone ID: PAT_MRT4530_7481C.1
cacgcgtccgccggatgtttgctatgtggccatccatgggatcatcgccgtgtgctgctggtacgagtgaagatatgccgctcgatgcatattctggcctaggggaggcagtggaagaaccttctcaaataatgtcagtgaatccaactgaagcagagaaaacgggcaagagttcaggcgagcttggttcggacgatggtgcccatcaagggagtagcatggttccaaggtctgttgtgggcagttcacttgctgacaggatgctcatggctttgtccttgttcagggaatcattgggcagcggtgctcttgcccaagtctggatgcctgttgagcaggagggtcatgttgtgctgagtacatgtgagcaaccttttctactcgaccaggttcttgcagggtatcgagaagtatccaggcactttgtgttttcagcgaaggaggagcctggtctacagccagggcttccagggagggtcttcatctctggggtgccagaatggacctcaagtgtcctctactataataggccagagtatttgaggatggagcatgctctccatcacgagatacgtgggtcacttgcaatgccaatttatgaccccagcaaggattcttgctgtgca

SEQ ID NO: 74656 - DNA, 1857 bp, Oryza sativa
  Clone ID: PAT_MRT4530_74820C.1
atggccggcgagctcaaggtgctgaacgcgctcgactcggcgaagacgcagtggtaccatttcacggcgatcgtgatcgccggcatggggttcttcaccgacgcctacgacctcttctccatctccctcgtcaccaagctgctcggccgcatctactacttcaacccggcgtccaagagccccggctccctcccgcccaacgtctccgccgccgtcaatggcgtcgccttctgcggcaccctcgccggccagctcttcttcggttggctcggcgacaagatggggcgcaagaaggtgtacggcatgacgctcatgctcatggtcatctgctgcctcgcttccggcctctcgttcgggtcgtcggcgaaaggcgtcatggccacgctctgcttcttccgcttctggctcggcttcggcatcggcggcgactacccgctctcggcgaccatcatgtcggagtacgctaataagcgcacccgtggagcgttcatcgccgccgtgttcgccatgcagggcttcggcaacctcaccggcggcatcgtggccatcatcgtgtccgccgcgttcaagtcgcggttcgacgcgccggcgtacagggacgaccggaccggctccaccgtgccgcaggccgactacgcgtggcgcatcgtgctcatgttcggcgccatcccggcgctgctcacctactactggcggatgaagatgccggagacggcgcgctacaccgcgctggtcgccaagaacgcgaagcaggccgccgcggacatgacgcaggtgctcaacgtcgagatcgtggaggagcaggagaaggcagcggcggcgacggcggcggctgcggaggaggaggcagcacggcgcgagcagttcgggctcttctcccgccagtttttgagacgccatgggcgccacctgctgggcacgacggtgtgctggttcgtgctggacatcgccttctactcgtcgaacctgttccagaaggacatctacacggcggtgcagtggctgcccaaggcggacaccatgagcgccctggaggagatgttcaagatctcccgggcacagacgctcgtggcgctgtgcggcaccatcccgggctactggttcaccgtcttcttcatcgacatcatcggccgcttcgtcatccagctcggcggcttcttcttcatgacggcgttcatgctcggcctcgccgtgccgtaccaccactggacgacgccggggaaccacatcggcttcgtggtcatgtacgccttcaccttcttcttcgccaacttcgggcccaactccacgaccttcatcgtgccggcggagatcttcccggcgaggctgcgttccacctgccacggcatctcggcggcggcggggaaggccggcgccatcgtcgggtcgttcgggttcctgtacgcggcgcagagcacggacgcgagcaagacggacgccggctacccgccgggcatcggcgtgcgcaactcgctcttcttcctcgccggatgcaacgtcatcgggttcttcttcacgttcctggtgccggagtcgaaggggaagtcgctggaggagctctccggcgagaacgaggacgatgacgatgtgccggaagcgcccgcgacggccgatcaccggactgcgccggcgccgccagcttgataccccgcggcaaaacccaaatggtcaatcatcagcgttttgttgtaatatatgtgcaatggatgattattctggttctggtagtgtaccgaacaaaattacaaatactagtcgtcaacccgtgcgagtgatattataaatgacacttagattatgtattaaatatattttctaaaattattgtggcttaaattttgtaaaaaaaaaaaaaaa

SEQ ID NO: 74657 - DNA, 237 bp, Oryza sativa
  unsure (1)..(237): unsure at all n locations
  Clone ID: PAT_MRT4530_74821C.1
ccggccgggatccttcacacaattcaaacattatagttgaagcatagtagtagaatcctacaaaaatgaagatcattttcgtatttgctctccttgctattgttgcatgcaacgcttctgcacggnttgatgctcttagtcanagttatagacaatatcaactacaatngcatntcctgctacagnaaccagngctcagcccatgcagngaggttnngaaggcaacagnatagnata

SEQ ID NO: 74658 - DNA, 2536 bp, Oryza sativa
  Clone ID: PAT_MRT4530_74822C.1
atgccaccgccgtcgcatcttccatccagcgccgtcacgacaagaaaaagttagatcagaggagagctcagagctcaaagagttgggaagccatggcgggagggcagctcaacgtgctgagcacgctcgaccaggcgaagacgcaatggtaccacttcatggcgatcgtcatcgccggcatgggcttcttcaccgacgcctacgacctcttctgcatttccctcgtcaccaagctgctcggccgcatctactacaccgacgattccaaggacacccccggcgcgctcccgcccaacgtgtcggccgccgtcaccggcgtcgcgctctgcggcacgctcgccggccagcttttcttcggatggctcggcgacaagctcggacgcaagagcgtgtatggtttcacgctgattctgatggtcgtgtgctcggtcgcgtccgggctctcgttcgggagctcggccaagggcgtcgtgtcgacgctctgcttctgccggttctggctcgcgttcggcatcggcggcgactacccgctccgcgacaccatcatgtcggagtacgcgaacaagaggacgcgcggcgccttcatcgccgccgtgttcgccatgcgggtgttcgggatcctcttcgtggccatagtcgtgcacacaaatacagggggactcgtcttcttccccgagctttgcgagcagagtcgttcagccatggcgcggcaggagcagcagcagcacctgcaggtgctgagcgcgctggacgcggcgaagacgcagtggtaccacttcacggcgatcgtcgtcgccggcatgggcttcttcaccgacgcctacgacctcttctgcatctccctcgtcaccaagctgctcggccgcatctactacaccgacctcgccaaggagaaccccggcagcctgccgcccaacgtcgccgcggcggtgaacggagtcgcgttctgcggcacgctggcggggcagctcttcttcgggtggctcggcgacaagctcggccggaagagcgtgtacgggatgacgctgctgatgatggtcatctgctccatcgcgtcggggctctcgttctcgcacacgcccaccagcgtcatggcgacgctctgcttcttccggttctggctcggattcggcatcggcggcgactacccgctgtcggcgacgatcatgtcggagtacgccaacaagaagacccgcggcgcgttcatcgccgccgtgttcgcgatgcaggggttcggcatcctcgccggcggcatcgtcaccctcatcatctcctccgcgttccgcgccgggttcccggcgccggcgtaccaggacgaccgcgcgggctccaccgtccgccaggccgactacgtgtggcggattaccatcgtgccggcggagatgtacccggcgcggactccggtcgacgtgccacaggcactctccgccgcccccgggaaggccggcgccatcatcggagcgttcggattcctgtacgcggcgcaggaccagcacaagcccgagcctgggtaccccagggggatcggcatcaagaacgcgctcttcgtgctcgccggcacaaacttcctcgggacgatcatgacgctgctcgtgccggagtccaagggcatgtcgctcgaggttatctcgcaggaggtcgccgacggcgaccggacgaggaggcggcctacccgaagtaatttgaccgcgatgcgtgatcacgcaaggggagtggctgccgttaagcaggtgttgtcctctccgtttgcccaatacgatcatcgcactgttcgctaccggtcccgtgctacgtttttcacctgttctttctcatcgacatcgtcggccgcttcgccaatccagctgctagggtttttcatgatgaccgtgttcatgctcggcctcgccgtgccgtaccaccactggacgacgaaggggaaccacatcggcttcgtcgtcatgtacgccttcaccttcttcttcgccaacttcggccccaactccaccaccttcatcgtgccggcggagatcttcccggcgaggctgcgttccacctgccacggcatctcggcggcggcggggaaggccggcgccatcatcggatcgttcgggttcctgtacgcggcgcaggacccgcacaagcccgacgccgggtacaaacccgggatcggggtgaggaactcgctgttcgtgctcgccggatgcaacctgctcgggttcatctgcacgttcctcgtgccggagtcgaaggggaagtcgctggaggagatgtccggcgaggcggaggacgacgacgacgaggtggccgccgccggcggtggcgccgccgtgcggccgcagacggcgtagagcaggtctgccaacttttatatcgtgtcgaaatcaatttctaacgagagtaatcggtagtgaactcctacttgtgtttgtctatgtgaaattgggaatcatgaacccatgatcatgttttgttaggttaagaagggaaaagaaatgtgtgttaaatacttcaattatgtaaactctgtttttaagtatttggccacttgaggaat

SEQ ID NO: 74659 - DNA, 466 bp, Oryza sativa
  Clone ID: PAT_MRT4530_74823C.1
ccgaggagcgacgccgcctaacctcgtcgcaggccgccttcccgtcttcgcctcaccatcccgtccgctcggtgaacatcccccttccctcccagcctcactctgctgcatcccgtgcatgccgccgcgccagtggtcgttgccggcgaccatcgggccatgcgccgccgctcccctgccggctggccggcttgaagccgtgccgagcccggcagccgccaagcaccgttggattcacccgaggccgtcaacgtggctgtcgtggtgctgtcccacgctggtgccacctcggcgccacgtccttgccaactcccacgtcggtccaccgtggccaccgcgtggctgccacgtggcaagggtgagcgtgatggagttcggatagggtccacagtgcgcccaccccttttagccaccgataggtggggcctgcttgtcattgctacccctctcccctcggtgacgtcat

SEQ ID NO: 74660 - DNA, 644 bp, Oryza sativa
  Clone ID: PAT_MRT4530_74824C.1
tttttttttttttttttacgacgcgcgatgcgcgtcttatcggggctttatagtcatgctaagattatctttgtggtagcagcggagttgacataccaaccaccttcagttaaaagaaaaacaggtaaaaaccaataaaacgataacataatacatatacagcatagcatatgcccaaacatccttagatttctatcatcacttgtctttttttttaagagcaatcatcacttgttatgcatgtgctgttgtttcttgatcaactctatgtcttctgtcggctggctgcctcagtagctttccatcgatggagagggagtcgaggccccaagcctagggaggcaagaaaggggagcttcatgacctcaaaagggagatcttgcaggtctctttggagatgaatctaaaaaataaaacctgcactccatatgttgtgtcattataaaatctcccaaacatcattcgtaatccaatgaccaaacacataaaaaatgatacatctttcttataccacataactataacttgtaagagatcggccagaaagatgtgccacaccttgcaaggagggcaaactctgtaaagacattgattttacctttacaacctacaacaccacatttaaatgcatagtatttttttga

SEQ ID NO: 74661 - DNA, 720 bp, Oryza sativa
  Clone ID: PAT_MRT4530_74825C.1
atggagagctcaccggcgtgcgagagaagcggcgtttcggcgacgattggcggcaaccgagcggcggccgaggtagctctcgcggcggcgaagctaacggcggtggcgggttggcgcggcggcgaccctagcggcagtggcgcgcggccgaaggcgacggcaagcggcggcgctagcaacaagcggcgcgagctcggtaggaggcacgggaggggacgggaaatgggggaaacgagagagggagctcgggagagtgatttaatgggcgagggaggggaggacgtggccgggaaccctcccgatttagccggcgacgtggggaggagagagagaaagaggggtgggattcgaactcgaatcccgccctctcgagcgcgcgcgcgggccgggagatgcgggggaagaggcggcgacgtggggaggacgcgggagcggcgcggcgtgggcgcggaaagagcggaggaggcggcggcgtgggagcggcggttgccggccgagcgcggtcggctggaggaaggggacgacctgacaggtgggccccacctgtcagcgtcccggagagagggggaaagggaacgggccggcccacaaggggaggccgagcgcgggcgacgggtggactgggccgacggcccaagaagaggaaaaaggaggaaaaaggaaaaagaaaaagaagaaaggattttcctgggattaaaattgcactttggtgatttttaa

SEQ ID NO: 74662 - DNA, 729 bp, Oryza sativa
  Clone ID: PAT_MRT4530_74826C.1
atggagagctcaccggcgtgcgagagaagcggcgtttcggcgacgattggcggcaaccgagcggcggccgaggtagctctcgcggcggcgaagctaacggcggtggcgggttggcgcggcggcgaccctagcggcagtggcgcgcggccgaaggcgacggcaagcggcggcgctagcaacaagcggcgcgagctcggtaggaggcacgggaggggacgggaaatgggtgaaacgagagaggggactcggggaagggtttttatgggcgagggaggggcggacgtggccggggatggcccctatttggccggcgatgtggggagtggagggagagtgagagaggtggattcgaaatcgaatcccgccctctcgagcgcgcgcgcgggccgggagatgcgggggaagaggcggcgacgtgggggggacgcgggagcggcgcggcgtgggcgcgggaagagcggaggaggcggcggcgtggcggattcggcggcggttgccgtcggaggcgggtggctggaggaaggggacgacctgacaggtgggccccacctgtcagcgtcccggagagagggggaaggagaacgggccggcccacaaggggaggccgagcgcgggcgacgggtggactgggccgacggcccaagaagaggaaaaaaaggaggaaaaaggaaaaagaaaaagaagaaaggatttttcctgggattaaaattgcactttggtgatttttaa

SEQ ID NO: 74663 - DNA, 1399 bp, Oryza sativa
  unsure (1)..(1399): unsure at all n locations
  Clone ID: PAT_MRT4530_74827C.1
ttttttttttttttttacctaataattggcaacagctcatcttcccttattttctctttagctttgacaaataatctgtaacaatttacagctgtttaatgctacgaaccaatggaatggaaaccccgcctcaacctaagcttttttcctcaatatctacatcacaataacaacaaccaactcactcgcctccaaaacttaggaagatatattagtacagcgactgccgggttagcctaagttctcacatttcacctttttnttttttctctttcgatcctaaacttcaagattggcccgcgtcttgattggctttagcttaacccccatgctctcgggcgagaggagttctggcgatatacaaaacgggttcaaggggctacgagggctgcagcttatctggcttggtctgtacaatccgtatcccatgaggaagtactccagcggcataagcattgcatgcggttgctcctctgtcacaacagatccacatccttgtacctctacgagagcactatatctctcatcaagctttgaggtcatatgaacagcctcagcatggaactgagagttctggccaacaaatattagagttctgcactgcagctcctttaagctttctgttaaatcatgtctctcattgattgtgtggataaaccgccacacattcatgctttgccgttgatctagaaacttgctgaagtatcgttgtagcaaacagtcttttaccatgttgcacatcccataataatatagcaaatttgacatcaccttattatgaaaccattcagtccaagaaggggtcctgcatagaggggaaactaggataagacctagtactcgctccctatacttcgttgcaaatagagtaaggatgtatgcgccagcagtgacacctaagcacataacaggacccagtccaaaaaaatcaagtacatctgaaacctgatccgctaactcatcaacagatgccacaggactgcttggtgaaactggagctgctcctaactcatgtcctggggggctgatatggtaaatacaaaaattatgcagcagtaatgaagatgcttcagggcagaatagtagcccttggaagcatgacatatgattcaatgcaatatcgggataagtaacaagtgctggcttatcatggtcgccatacaccgcaacagatacagaaccatggtttgtttgtatatgatgttccttgccgccgaaggagatgcgctcgacgtccaccgacacgacggagccgccggagtcgcccatctccggccaagaagacggcggcggggccactccctcccacctctcctctcctccctcgctctccccccgctcgctcaccaaccgccgcctcagccgccgctgctgtgccgctgctgtccgcctccaccac

SEQ ID NO: 74664 - DNA, 371 bp, Oryza sativa
  Clone ID: PAT_MRT4530_74828C.1
gccacgcgctacgtcggacgcgctgctgtgcagtccgtccggaagcgaagcagatcttgagcagggcgcgcgcgacacatatctggttcttgttcacctaagttctctgctctccctaaaataagatgacgcgctcctatcggtggcaaatgtggatgacgtatccggtgtccctgccacgtcctctgcggcctatgcacgatgtaccatgatgtgtaggccacaagctgaaccaaaaccttctgactttgtgctccataccacgatggcgagctctgcaggattgtagatggcggggtaaaccttaaacaaccgctggtgccgctgcttcacatgaggggctgtcacaagctgtagaggctgctcttgct

SEQ ID NO: 74665 - DNA, 1402 bp, Oryza sativa
  Clone ID: PAT_MRT4530_74829C.1
gccgaggactactactacttcacctcacgagtctcacgggcgcgcggcctccctttctagagagagaaatagcaccaagaaacaacaacgcctatagtctagtagagcctagagagagaaagcgcgaggagaggagaggagatggagcggccggcgccggtgaggaagtcccacacctcgacggccgacctcctcgcctggccgcagcagcagcaccagcccgacggccacgccgcctccaccccctcccccgctcgccgcccccaccagccatcggaggcgctgaggaaggtggtgttcggtggccaggtcacggaggaggaggccgagagcctcaacaagaggaagccatgctccgcgcccaagtggaaggagatgaccgggagcggcatcttcgcggccggcgccgacggggaggcggaggagcccggcagcgccgccgcgcccggccgcgccgccccgcgcaattaccagccagttactgtgagccacatttcatttgctgaggatggaagtgttcctcccaaaaagccaacttcagtggctgaggtagcaaagcagcgtgagcttagcggtactctgcaaagtgaagcagacagtaagatgaagaagcagatttcaaatgcaaaatcaaaggaactcagtggccatggcctttttgaccctcaagatgtaaggcctaatggggcaaggaacacagcaaatggcaccggtgcctcacacacacctgtgagaaatgcaaatgtgagcagcttctcgtttggggaggccaacactgacagcgtgacgaaaactgcaaagaagataactggcaagaaattcaccgatctcacaggcaacaacatattcaaaggagacgaggcccctgcttctgcggagaagcatctgagcaccgcgaagctgaaagaaatgactgggagcaacatattcgcggaaggacaggcgccaacccgagagtatcatagcgggaaccgcaagcctcctggcggcgagagcagcattgcgctggtttagcattctggtggacaccgtcgctgtccgtgttttcctctttaggatgaaccctaggagtcgttctatcagcagattgagctgccagtttgctttcctgtttcgacggttaggcataaagtttgtttcctgctgatgtgggtaaagacaggctatgctctcctagcataacatttgttgtggtgttgtagtttggtatggtcagtcactttgctgtgacatactcaaatggaacagcctacatggtgtgcgctctcatttctgtgactgaagatgccgttgctttggtgtctctcctttcattgtgtacgccagatctgtactgttgacaaataataaattggttggtatgttgcctaaaaaaaaaaaaaaaaaaaaaaaaaaaaaaaaa

SEQ ID NO: 74666 - DNA, 1557 bp, Oryza sativa
  Clone ID: PAT_MRT4530_7482C.1
atggcgaactgcgtgcggtgctgctgctggctcctggtgctgatgctcatggcgctcgcgatcaccgccgccgtggtgttcgtccgctacaagaacggcgagggggtcttccccttccccggcgtgcccggcgccgtcgaccacaagtacgccgacgcgctcgccgtcgccctccagttcttccaggtccagaaatccgggaagctggtgaacaacacgatccactggagaggtgactcggcgctggacgacggcaaggaggccgggattgatctctccaaggggatgtacgacgccggcgaccacatgaagttcggattccccatggcgttcacggccaccatgctctcttggtccgtcctcgagtacggcgacgccatgcgcgccgccgaccagcgcgactccgccattgacgcgctgaattggatcatggattacctcgtcaatgcccacccctccgacgacgtcctctacatccaggtgggtgatcctaaagcagaccacaagtgctgggagcggccggagaagatgaaggagaagaggccactgaccaagatcacgcccaagtcccccggcagcgacgtggcggcggagacggcggcggccatggcggcggcgtcgctggtgtacaagacgatcaacaagacgtactcgtcgtcgctcctggaccacggcgagaggctgttcgccttcgccgacaagcaccggggatcctacacccggacgttcccggagctcagcgcgttctacaactccaccacgtaccaggacgagctcctctgggcggcgagctggctctaccacgccaccggcaaccacagctacctcgcctacgccaccggcaagaacaaggacttcgccgacctgggcaacccgagatacttcagctgggacgacaagcgcgccggaaccgaggttcttttgtcgagggtgagcttctttgcttcgcaaggatcagacgttgcacaagacgatgttcttgggatgtacaagcagactgctgatgccgtcatgtgcattctcctgccggattcagagaccgccgctttcagaacagaaggtggtttgctgtacgttgccgagtggaactcactccagcacccggtggcatcggcgttcctcgccgcggtttacagcgactacatgcagagctccgggaagacggagctgagctgcagcgggcagggcttctcgccggccgacctgcgcaaattcgccaagtcccaggcggattacttgctaggcagcaacccgatgaagattagttacctagtcgggtacggcgaccggtacccggagaaggtgcaccaccgcggcgcgtccatcccggaggacgtcgacaccggctgcgacggccacaagtggctggagacgtccaagcccaacccaaacgtcgccaccggcgcgctcgtcggcggtccgtacaagaacgacagcttcgtcgacgagcgcgacaacgtgatgcagaacgaggccaccacctacaacagcgccctcgtcgccggcttgctctccgccctcgtctccacctcctccctcgcgcgatccttgtcatga

SEQ ID NO: 74667 - DNA, 304 bp, Oryza sativa
  Clone ID: PAT_MRT4530_74830C.1
ggcgcgctcgctcgttctactgcacagtcgacggagcggatacgcatacatgcatggccgggagcgagtgctcccgtcgcatccatccggagcatgtgcattcatggacataagatcctcaactgtggagccatggacgccatgatacgcatggtgttgccttcttttatgagccaaggtcacacagtctaaagggttcttgcatacgcgcacaagcgtggattgcctgaatcacgatactgtgataccgagctacaatcgcctcacatagacaagacagcgagggagcagttatagatgcatg

SEQ ID NO: 74668 - DNA, 3331 bp, Oryza sativa
  Clone ID: PAT_MRT4530_74831C.1
atggcgggcatgtcgtcggaggcggaggagaagattgagccacctgacgagttctcggacgagatcaaactagcgatggcatcctcctccggcgctgccgtgaatcctctcttcggccaagctatttcagaaaagctgacgaagaacaatttctcgctatggaagacgcatattctcccagtgatttgcggcgcacgtatggaaggttatctgaccggtgcaacacaagttccatcggcggaaatagaagtcaaggaaggagaaaagggtgaaataaccaagaaagtttccaatccggcatatgaggcatggattgctgcggaccaacaggtcctcggtttccttctatcaagcatctccaaggagattctcatccaagtcgcaaacgtcgacacagcggctcatgcatggaagatgatcgtcggccttctgtcgacgcaatctcgcgcacgagccctgaacacccggattgcgctggccacgacccagagggcgagtcaagtgtatccgactacattagcaagatgaagacgcttgcagatgagatggcatctgcaggcaaacctctcgatgatgaagaattcacttcgtatatcctcgctggtttggacagtgattatgaacaggtggtttcctctattgttgggcgatctgagggagtcacaatatctgaagtttactcacaacttcttagttttgaagagctttggcaaaccaatggcagtagcggcagctactcctctgtcaacagcgccaaccatggacgcaacaatggtggcggtggaaacttcaacaatggtggcggctacttctccaaccgtggacgtggtggtggtcgcggtgaccgcggcggctgcggccgcggcaatggcggacgcaacttcaagccgcgccctacctgtcagctatgcagcaaggtgggacatgtggtggctgattgctggcattgctacgatgactcctttgtgccggacgcaagggttgcagcggctgcctcgtatggtgtagattcgaactggtacgtggataccggtgccacagatcatatcactaatgagcttgagaagcttacaacccgtgacagatacaacggcaaggaacaaatccacacggcgagtggttcaggtatggatattaagcatataggtcaatctactattcgtacccctacacgcaatctatatttgagaaatattcttcatgttcctagaaccaaaaagaatcttatatctgcacatcgtcttgccgttgataatcatgcctttgttgaagttcaccctcggttttttgctatcaaggatcaaatcacgaagaacactcttcttagaggaccctgttgtaatggactctatcctctaccagcctccacgtcttcatccaagcaagtcttaggagctatcaagcccactgtctcaatatggcatagtcgtctagggcatccctcatggcaaattgttcaaaaggtcgggttcaagtgtctagatgtagcagctggtagagtgtatatttcaagggatgttgtctttgatgagaatgtttttccttttgcatccctccactctaatgccggtgcaagactacggtctgagattttattgctgccacctacacttctgaacccggatgatagtactggtaggggtacaacaataggagatgaccatatgcttgataatcctgaacatactaatacttttgctgaagaaaatgcagagaatacagatcatatagagctggatttcaacacagccacacaagatccggagttcacagaagatcatgatgatacgggcggagattctcccgctctgtcgtcgccctcgggatcgggagctgctgtcacgtcgccgtcatcgttgcctgtgattcctaaggctccggtgtctcctactgccagccattcagcgtcggccacgactccagatgctcccgaggcacatgattcagctacgaagtctgatggcagtttggatagatacaaggctcgtttagttgcaaaggggtttgagcagagatatggaattgattacgaggatacttttagtccagttgtaaaggcagctacaattaggactatattgtctgttgcagtgtctagaggttggtctcttagacaactagatgttcagaatgcttttcttcatggttatttggaggaagaagtttatatgaggcaaccgcctggttatgaggataggaataagcctaattatatttgcaagttggataaggcactttatggtttgaagcaggcgccaagagcgtggtattccagactaagtatgaaactttgtgatcttggttttcagccatccaaagcagacacgtcactgttcttttataataaaggtaatattgttatttttgttctcatatatgtggatgatattattgtggccagttcgacagaggatgctactaatgcattattgagagatctgaagcaggagtttgctttaaaggattttggtgatcttcattattttctgggaatagaggtaaataagttgagtgatggtattcttgtaacccagaataaatatgcactagatctgttgaaaagagctgggatgttggactgtaagcctgtggatactccgttgtctacaacagaaaagttgtctgcatatactggttctattcaagatgctaccaggtacaggagcattgtaggagcactacaatatttaactttgacaaggcctgatacttcttttgctattaataaggtttgtcagttcttacatagtcctacaatgcaacattggatggcagtaaagagaattttgagatatgtaaagtcttctgtagatttgggtctgaagcttaatagttcatcttctactattataagcgctttttcagatgctgattgggctggatcagttgatgacagaagatcaactggtggtttcgctatctttcttgggtccaatttggtttcttggagtgcacgaagcagagtacgaagcagagtataagctacagtatcctgttctatacagaagcagagtacaaagcagtagctaatgctacagctgaggttatatggattcaaactttattgaaggaaatagatgttcaaacaccgcaagaagcatgtttgtggtgtgataatttggaagccatgtatctttcagttaatccggtttttcatgcaaggacaaagcacattgaagttgattatcattttgttagagaaagagtggctcaaaagcaattggttattaagtttattgcttctggagatcagattgcagatggatttactaagtctctttcagctcaacaattcaagaattttgtatacaatcttaacttagataagtta

SEQ ID NO: 74669 - DNA, 284 bp, Oryza sativa
  Clone ID: PAT_MRT4530_74832C.1
ggtccggtttaccttggacgacccacgctttcggttctatccaaaccaataccccgcacgggcactttttactatgatgctctgcctcaccaccgccttctactacctatacataccttacacctacaagttgaatccgatccccctactccaccttcggttaccctccttctactgctaccgacgagccgagcgcctctgcgctcgccgtcttcgacgccgaggccgacgagcctgtcgaggtggaggaggcgcccccccgaggacggtgcggatgaggtggt

SEQ ID NO: 74670 - DNA, 405 bp, Oryza sativa
  Clone ID: PAT_MRT4530_74833C.1
tagatcaacaaggaggcgcgattcacgccaacaatcacaggatggggagagaaggggagaaatcatccgctcatctcccaaaatcctccaaaaaaatccatctttatcccgaaaagatcctccttttcttggggtttctgacaggcgtgcacggctatctttaggcgttctcggcctcatctctcgtggaaaggttcttcttcttcggggttgtttgctgctgcttaatttgaggaggaaaagcccaattcttgtggggagtgaagggagggaggaggggggcatggctcttgacgacctgctagtgaccacccctggtgccctacagcacctcccggctgtgctgctctttgaggagacccttgaccagaagaccaaggtcggcaagtccttagaagctgtcct

SEQ ID NO: 74671 - DNA, 308 bp, Oryza sativa
  Clone ID: PAT_MRT4530_74834C.1
tttgaaagcgtatcagccgacctgggcttacgaatttgatggccactatcaaggaattcctgaagttgttggccggaatgggaattgctgattgctgttgctactgtgctgcgagggtatgatatcgactagatgcgagaagctgcgactgaaactagaattggggggagaagtgcttgatggtgtgatgatgatggtgaatgcgccccgcctgatgagcggtgaatgcgccccaccctgatgagtgtgatgagtgacccaaatgtgctgatgcttggaacttgcctgatgtgtgttgcaaacaaaat

SEQ ID NO: 74672 - DNA, 510 bp, Oryza sativa
  Clone ID: PAT_MRT4530_74835C.1
tcggtagacgatggcgccggtggccgccgacggaaggttgtacggggagatcgtgatgctgtgcaacaccgtgatgaagggctacctgaagaaccccaaggcgaacgcggaggcgttcgccgatgggtggtactatttctgcgaccttggagtggagacagataatgttaccttcagctctgtgagaagcacaaccaagattgacatggttatttctgcaaggcttcatctctttatactggccatgggatgttatggaacttttaaatcaccctcatttttttgtcttatttctttttgagattggcattgactttctttaaagactttttcacttttttattttatttttatattgtggctattttgtttacttgtttactcttttaaatatcttttttatcgttatattttaatcaatctttcttttgtctccttttatttttttgggagtttgcgttacttttgtctagtttttttaatgagttattctctaatatttttcttttt

SEQ ID NO: 74673 - DNA, 1590 bp, Oryza sativa
  Clone ID: PAT_MRT4530_74836C.1
ttttctttttttttttttttttttttttttttttttttaaataccaccacaccttcaacgagaaaccaacatcaaatccttgttgcaataaatataacgaacaagtctcatgttctgagaagaaatgcaatcatagtgttacatgagctggcactaaaatatatacagatcatgtcacaagagaggggaacgaaaccaatcactagtattagactcgcaaccctttaaagtccatagcaatacagtcacggcaaagcatgtcaaccaaaatcacaacaaacaagctcagttgttgccagaccagatgatcaaaaacatgatagcgccactccagcactcaaattagatcagcaacattcattggcatttcatcaatctgcgtgctgtagtactgctcgatatctctcaggatacggatgtcttcctttttgacaaaattgatggccacacccttgcgaccaaaacgtccagagcgaccaatgcgatggatgtaaagttcacgattatttgggagatcataatttatgacaagagagacatctgtcgtgattagaacacgggttgcaccagacctgaattcacccataatggcatccctttccttttgaggcatgtcgccatgcatagctgatactgtaaagttattgctccacattcgtaccgtaagtcaatcaaccatattctttgtgttgcagtcaatgacagttcatcaatctgggtgctgtagtactgctcagtgtatctaaagataagcgtgtcttcttctttgtcaaaattgatggccacacccttgcgaccaaaacgatcagagcgaccaatgcgatggatgtaaagttcacgattatttgggagatcataatttatgacaagagagagttgctgaacctcgaggcctcgaggccacatatctgtcgtgattagaacacgtgatgcaccagatctgatttcaccttaaagcctctgcccaacatctcatcagcttcatccagaattaggagcttaatggctcttgtacgcaaggtccttctcttgatcatatcacagactctgccaggtgttcctgacaccacatgcactccgtgctcaagctttctaatatcctcaccaatacttttgccaccaatacaagcatgcacttggatattgatgaagtcaccgatagccagcataactctttctgtttgtgcagcaagttctctagttggtgacagtattaaagcctgcacctcacggacggcggtgtctacgatctggcagacggagagcgagatcatggaggtcttgccggtcccggactgggcctgggcgatgacgtcgcggccgctgatgatggggaggacggcgcgctgctggatggcggagggcttctcgaagccgtaggcgtagatgccgcggaggaggtcgtcgcggatccccatctggtcgaagctgctgatgacctcgacccccggggaggtctcgaaggtgaggttctcgtcgtccatggcgcccgggccgcgccgcgacgtggtggccgccgccattgggggagacgaaaccctagcctcggaaggggtagccggcggccccctcgtgccgaattcctgcagc

SEQ ID NO: 74674 - DNA, 603 bp, Oryza sativa
  unsure (1)..(603): unsure at all n locations
  Clone ID: PAT_MRT4530_74837C.1
aaacatgtcaaccaaatcaccacaaacaagcttcacttgttgccagaccagatgatcaaaaacatgattgtgccactcaagcactcaaattagatcagcaacattcattggcatttcatcaatctgtgtgctgtagtactgctcaatatctctcaggatacggatgtcttcctttttgacaaaattgatggccacacccttgcgaccaaaacgtccagagcgaccaatgcgatggatgtaaagttcacgattatttggaagatcatagtttatgacaagagagacctgctgaacatccaggcctcgagcccacacatctgtcgtaattagaacacgggttgcaccagacctgaattcacccataatggcatccctttccttttgaggcatgtcaccatgcatagctgataccgtgaagttattgctgcgcattctttctgtaagccaatcaacctttctctttgtgttgcagaaaatgacagcttgggtgattgtcagtgtatcataaagatcacaaagcgtgtcaaacttccattcttctttctcaacagcaacaaagaattgtttaatgccctctagagtcaattcatcacgcttcacang

SEQ ID NO: 74675 - DNA, 1185 bp, Oryza sativa
  Clone ID: PAT_MRT4530_74838C.1
atggcggcggccaccacgtcccggcgcggccccggcgccatggacgacgagaacctcaccttcgagacctcccccggggtcgaggtcatcagcagcttcgaccagatggggatccgcgaggacctcctccgcggcatctacgcctacggcttcgagaagccctccgccatccagcagcgcgccgtcctccccatcatcagcggccgcgacgtcatcgcccaggcccagtccggaaccggcaagacctccatgatctcgctctccgtctgccagatcgtcgacaccgccgtccgagaggttcaggccttgatactctcaccaactagagaacttgctgcacaaacagaaagagttatgctggccattggtgattacatcaatatccaagtgcatgcttgtattggtggcaaaagtattggtgaggatattagaaagcttgagcatggagtgcatgttgtgtcaggaacacctggcagagtctgtgatatgatcaagagaaggaccttgcgtacaagagccattaagctcctaattctggatgaagccgatgagatgttgggcagaggctttaaggatcagatatatgatgtctacagatatctacccccagagctccaggtttgcttgatctccgcaactctgccacatgagatcttggaaatgaccagcaagttcatgactgacccagtccggatccttgtaaagcgtgatgaattgaccctagagggcatcaaacaattctttgttgctgttgagaaagaagaatggaagtttgatactctttgtgatctttatgatacactgacaatcacccaagctgtcattttctgcaacacgaagagaaaggttgattggcttacagaaagaatgcgcagcaataacttcacggtatcagctatgcatggtgacatgcctcaaaaggaaagggatgccattatgggtgaattcaggtctggtgcaacccgtgttctaattacgacagatgtctctcttgtcataaactatgatcttccaaataatcgtgaactttacatccatcgcattggtcgctctggacgttttggtcgcaagggtgtggccatcaattttgtcaaaaaggaagacatccgtatcctgagagatattgagcagtactacagcacacagattgatgaaatgccaatgaatgttgctgatctaatttga

SEQ ID NO: 74676 - DNA, 1416 bp, Oryza sativa
  Clone ID: PAT_MRT4530_74839C.1
gagcacctttctattcaaaacctttatgctccaaggaccgagttctgtgagccacctttttcttcaaacatatctgttcatctggtatgaactccgtcctagcttaagagccatggttcgggaataatccttctcaggatgtgaaagcgaaaatccctaccatcatttgcgtgagtttgagcaattgtgcttatgcctgacaataacggacatgacataagaaaccttaaagtggaaattgtttcacttctctcttacagagggggcgaagcaatggtatactcataccatgagaaaactgcatattgatgggacaaattaaaaagcatattatgccttgctttcttcctgttaacccgtgtagtctctctacgtggaggttcacgcgaaagaatccattggtgcagcctatgctcgtttctccttgttaactcaagacgacacagacttttctttaccgatcatgtgttgttacaacacttccactcgggtttagacaagatgtctgccatgtatctcgatacttctgctgtaggttcgtgcgcacacaaaacgatgtctgaaggtagggacctcttggatcatatcatagagaacacttccttcgttcattgcgaaaccatcctggaaatcgaggatacacatgaggaaccatcgatggccgaatcagagaatacaacctccacatcccatgtttcgatcgttgaatccttaccggaacctcaggaaccgaaggtagaaaaaattcagcctttggaatccctgttcttatttgagggtgatctttttgaagattatggacacacctcaaacaattcctgccaaaagagaccaccagtcccacgtacttatcctgcactactcgaggagaatctcttcaaagagatggtgcaggaattaactaccatcatgagtgatgagtgattaaggtaggtggagctttcttctgaagtaactcagattagctcctcccccgaatccctcctaaaagatgatgccagtgcattcgtcaaggaggaggacgatcctagagaggtgatcgagttacccaaaaccgatctgccttcacaacctttggttgagccctttaagccttctctatgcctacttgcacgatggtacggaatcgcccgttatcataagcgacaagctttccgatgacaagacctccaagctcacagccgtgttagaaaagcatcgctatgttctaagctactcacttcaagaccataagcggattagtacaatgctctgtactcatcgtattcttctagatccttcttgtgcgccctcttgagagctgcaacgaggactaaataattccacgagggatgtcgtgaaactccaacatgtcgggataatttatcccatcccatataggatagtttcttttatccaagatggatatattggtat

SEQ ID NO: 74677 - DNA, 1104 bp, Oryza sativa
  Clone ID: PAT_MRT4530_7483C.1
atggcccggtggtcggaccgggccggcacgggcctgacccctgacgggccgtgccgtgcttgggccaggccaaaacgccgtgccgtgggccgggccgtcgggcctcgggccttttgtccatctatacatgtagggagatcttctctagtttcccaatcaaatcctctgatgtccaatccaagaaacctgtccatgaagatgatgttggctggcgttccatccctcaacaacgatgatcaccggcggcgggggcatgggagaagcgacctgatcaccgtcaaggtgatggccattttgcctctgctgatctccactccagcccactccatcggcggtgtcgtcgacgacgacgacgatgtggagtatgtggagataacatgctacatcgacacgcagccattcgactactgcttcgagcaagcctacctgttgctgtccgacaacgaaccacgcaagactgtacatggtaatcaccctgtccttgcacccaaacgcaaaggtcaggatactttcaccgctccaccgaggaagtggctcaagatgcatcttgtctgccggaagcctcgcatcgataggtgcacgatagcccttagattcgataccatatatctgatggcattcagcactaatcagaaccagtggtacagcatgtactctgggttcccaattgctcacaccagactcccctttgatgaggattactttgctcttgccgggggcacaagtaatctggttactgtgccattggggaaagaatctgcgctggatgcaatacacacccttgctacattcgatggagaaagtgccaatgacttgaagataccgctggtgaagttgaggataatgttctctgaagcccttaagctaaagcccgtgcgtttggccttttctagagattggaacgaggaaacccacatcaccaaacaagacgcgaactacattggatgttggggcctaatgtcattcaatcttgtagcctggaagaactctggctacgcgtactggaaaagcgagaagaaattggaaaactgccttgtgaacaccccatggaatgcctcagaagtgggcgatcttctcatgcgtccaaatgacgaggcgatctga

SEQ ID NO: 74678 - DNA, 161 bp, Oryza sativa
  Clone ID: PAT_MRT4530_74840C.1
aacaacaaaaattctggatggtactagtaaattgggtactgcttctacaataaatccaaacaaatcacggccaacgatcccagggaacatctgttgctgccgtgcaaaatgcaatcagccttctctgccgagtaccttaaaatatgcaccgattggcaaat

SEQ ID NO: 74679 - DNA, 353 bp, Oryza sativa
  Clone ID: PAT_MRT4530_74841C.1
cgggcgcgctgttgccctgaaatctgtgaattagtggtagtatcggtgggtaggtttcgtcaagaattccggatttttacttttgtctcttgcttaccaacccgatatccagaaggatggctaccccgtaccattttcgcgttgttaatgacgttgttgtgcctagtgtctatgtaaagtatagtgagcgctaacaacttattaccaacaaattaagcagagtgaataatacttctatgtactactagtatcttcgtgcacgtgtccaatcagtcacgggcgctctcctgtcaacatttctgagcttctctcgcacaagatgaattttccttttcagagaaaaaaaaaaaaaa

SEQ ID NO: 74680 - DNA, 382 bp, Oryza sativa
  Clone ID: PAT_MRT4530_74842C.1
agtgccctcctggtgcttcgagagactaccccgggttgccgagtttcttacgacaacctaccatggccgtccaacctaggctaaatacggaggagtaccctccctaggaaagtttcttaggattagatactatcgtggaggaatacccgtactgagctgtcacaattagcagcccacctttactgactcgtagcatataaacccagataatgatacttagtaatctagacaccctgtctacattattaaatactactctacatccctcgagatgacatagagcaaccgagtaatcggacattaaacccacaccattgcacctctctggtaggctaactatatgactgtaccaatacaaacataaagtaaagacaatacttag

SEQ ID NO: 74681 - DNA, 1016 bp, Oryza sativa
  Clone ID: PAT_MRT4530_74843C.1
gacagttttgcctaagggacattgaagatgggaaaccaccactccttctccaaatggttactgattacggtgatctccatttcatgtcggctctgcgttctttcaaacgtcgtgttgcttactcaaacatctgtaacgatttcattgttggctggagaacatcatcaatacgccatcaacatgaacttcccaagccccaaaattttataaatcatgttaaatatccacatgttgtatatgtggaaaagccgaaggttcaggatactgatttttcagattcaatgatatatcaggcgaaaaatacaagtgaaatggaagaactgatgctcaaaggtctgaacagaattccatgggaaagggtagatgttagcttcaagaaaagtagacaaaggatttttgctcatagcaccattcaggtcaagacctatttcttcaactctgatggggctgatgtgatttttcacatgatcgaccattttctttattaacattggtcgggatgggagggtggcggtaacgaggaagctcccccactttgtttttatcccatctggagtttactttcactttgacacgaaaaaatgtgaagaaatgtttttttcaggataactagaattgttaccggaagaagtacagtagatccccatagtaaagataggtgttggatgtagtggagtatgtgtcttgtaaactttgggtctccgaggttggttttttttttccttctctctgtctcttccgggcttcagtggctcagtgacagtgtacatgcatgtaatggaccacattctgctgctccaataataaaatctactgtgtgttgcatctcgaacagacaacacattggcgagattctagaatcttcttcactctcatactaaattttggctttatattggtattaaaccaaacatagataagctaactttgctctaccaattaattggtagggtagagaaccaaataggccctctgtctcttccgggcttcagtggctcagtgacagtgtacatgca

SEQ ID NO: 74682 - DNA, 783 bp, Oryza sativa
  Clone ID: PAT_MRT4530_74844C.1
atgaaggcggtggctgcggcgagaagaggagaaccgtacatcgctaggctgatctgccgacgagctcggcggcaacatggtcggtcaactggcgctacggtcgatctggatggctcactcacaaggcaagcctgtcatcacactgtcctagagccgggtcgccccagtgagggtctggtgctgcgtccctcctcatcctctccctcacgcagctgcaagattggaatcactccggaaaaaaacatgttagctgatattgtttctctatgttacaacagttcaagaactggtgtaatagttgatagagctatacttgcagaagatagaaaacatggtggcttcaagaggttgaatgacttacattatgaaacggaggaagtagttggcaagggaggtggatgtggggaggggttgagttgctctatgtgctcactggttgaagctgattgttgcgctcctatctacctcacttatttaccaggaggtgttaagctcattcggtttctttcctgtagggaaaggaaaggtgatttcagttgcctgactgttgctggaatctgtgaagcatctacaagcgatgccatcggttcaggcagctggcacagcaatgccggttccccttgccccatatccaactcctgtgccatttacacctcccaatgccggagcaacgtcgatttgctgcgcagtctgcagtaccgtgaccgtggtgcctgcccccggtcgctcgagaagaagtacacactgaagttgctctggtcatatttacattattgtgtgtaa

SEQ ID NO: 74683 - DNA, 607 bp, Oryza sativa
  Clone ID: PAT_MRT4530_74845C.1
tcaaagccgcggtggggcgaggtcggcgcggcgtggtgcggcaacatcggcggccagggcggtcgatggcatggcacgaccatggaggcgcggtgtccagctagatcgatggcgggtaggcgacgacagtgccggtgtagcggggcgcggctgagcggcagcaccaagcgcaggcggggaggctacgatgggtcttggcatcacgacttggtatagttggccaaatggcccgcccggcccggcatggcctaggccaagatttgtcgggctggcacggttcgacctacacaccaggtcgtaccgtgccggcccacgtgctccacctatggcccaggcacccaataagggtcgggccgtgctgggccggcccgaaggcacgggcagcccatcgtgctttctttgtctatttcacctccttgaacttcatgtcgtgctaggccggcccaccatgatgaggcataggcccaggcacagcccaacagctgggccgtgccggcacgggcctgacagcaatcgggccttgccgtgcctggtccgtgccatcgagtcaaaacctcgtgccttgggccaaaggtgggtaaattgaactattttgatatttagagag

SEQ ID NO: 74684 - DNA, 129 bp, Oryza sativa
  Clone ID: PAT_MRT4530_74846C.1
gttatcttggctccgctcataggctatccttcagaaggtcaatttgcggggtactatcattgcggcttgtcaacaattggagctagtggccatggagttttctaccccggcgcatgggtggcgttctag

SEQ ID NO: 74685 - DNA, 375 bp, Oryza sativa
  unsure (1)..(375): unsure at all n locations
  Clone ID: PAT_MRT4530_74847C.1
aatagggaaaaaagaaaaacgagcaaatccaaatccaaatccaccaccacccacccttcccgaggagagagagagaggctatgacgcgctgcgccgtcgtcgccgccgtcgcggccgtgctcctcgtcgccggcgcggcggcggcggggggtggggaggaggaggagtnaatatcaaactgcgcgcggtggggcctgggtatttgttattcaaagcaagacgaatatggccccatctcgattcagctattccactctgttgagttgagacctaatgtgttatattgattgggctatccttctatgctaccgattagcgttgttcttactgttctatgctggtggctgttctttctcttctagtctcgagcatgtt

SEQ ID NO: 74686 - DNA, 372 bp, Oryza sativa
  Clone ID: PAT_MRT4530_74848C.1
aacagatgttcctccttttttttttcttttttttttttttttacccaacccccaccctggccctccatttcttttttctgaaaacccccccccaaaaaaccacccttttccttttgcccttctcccttaaaaccacccgggacttcccccttctcttccccccccttttttttcatgcttccaacccccccccttgacattctatacccattaccgacctcattaccaagccccacccggaacactgtttttttctttctaaaaacctccccccaaaaaaccaccctttttttattgccctacaccctcataaaacaccctgtgtttcctttattacaacataccctttctttattatctccccttttaccc

SEQ ID NO: 74687 - DNA, 1161 bp, Oryza sativa
  Clone ID: PAT_MRT4530_74849C.1
atgccgccgtcgcccgtcccgagagccaggacaaggttttcacctgaagaatgggagagacaagagttacagcaacaccccaaggagagagcggcgcccgcagacgtcgttattgccggcccgaaggctgggttttctcccgaatttcgtctcatcccaaaagaaactcctgcacgctccgccgccgccaccgtcaaaagccttcgacgcgcagccaccgcgccggcgccacgccgccggcgaaccgtcaaggaggagctcgacccccctacacgctccaacgccatccacgcagttgggttggatggggagagggtgagagagaagaatggatcccctctcccccacactagcctgactgacgtggccatctttgtcggcaaaggcaccgtcgcaggaggacgaagtctgggttggagcccgtcggagaaccgttgctcctccttgacagtgcaatccgtcgactccgccgcgatcccgttgcccgcccaccctccgcgccatgccgatgacacccttcgtcacagtgctccacaatggtgcaccgagacgtccaccgtagcacggcgctctcgccccaggtccggtggaggggaccggatcttgcagagagagagaggccagacgcacaacacacaagccaagccaccgccagggaggacaccgacgccgcgaaggcgccgtcgccgctgcaaagcactggcgcggcctggcaagcgtgttgaagctctggtcagccaccctagcttgggctccgccatcaccagccgctgccaccatcaccactcgaaagcaccgccgccaccgctcatccccgccgccagctgcctccccgccacctccgccgtcgacgccaacgccgccgctgcgcagccctccgcatgggccacacgccgtcgccgcctccttcgcgcggccctcgtgccgccgcttgtcctagcccagatccggccgaggggccggatccaggctcgccggcgctcctccgtcgccgccccacctccgaccaccgtcgtcgcacctccagccgtcaccgccagcacgaccgctcagccccgccgccgccgagtgcctccccgccagatccggccggggggcacggatctgggcaatttccgccgtcccgggcaatccccctctaccctgagcatggcgcgaaga

SEQ ID NO: 74688 - DNA, 288 bp, Oryza sativa
  unsure (1)..(288): unsure at all n locations
  Clone ID: PAT_MRT4530_7484C.1
ggcaanancaacnacagncgcancnccnaccacagcaacaagggggggggcgaggcagngagnncgnaaggcaacagnanagcanagnggcaacccccnncnggcaaccagcnacgnnncaannganaaacaaccaagncangcagcagcagngnngccaacagcncaggcnggnagcacaacaancncacnaccaggccannagnnangnncaagcganngngcaacagcnacaacngcagcaannnagnggngncaaccccgancagacncaagcncaagcccaaa

SEQ ID NO: 74689 - DNA, 573 bp, Oryza sativa
  Clone ID: PAT_MRT4530_74850C.1
cccgggctgaggaatcggcacgaggacgaacactacttgatcttatctgagcttgccgtccggcggcgccgcggctgcggagtcgcctctccggcattcgcgccgccaccgctgtcctcgtacggttggcgggaaggtggcgcgctttgttcggggaaagaggcgggtttggtatccgtggcgctcgccggcggtgagcgatgacgactgcccgcggtcggagcgcgtgcgatgatggccgcgcgggttcaccaaaacaacaaacagatcacaatgttttgcgttttttctgccattgttttattgatgatttttttattcggagttctattcatttagttgttctcgtattagtcaatgtgcgttgggttgttagtggtttcgtagatcctgtttggcaatagtggatgtaaaagcgctttttgtttgtgtagaatgtgttaggatagtatacaaatgtttcgtaattgaacatgtgcatagatatgttagcattgtacttgttgagcttactttgtaagtttgggcatatcgaattttgcttaattatcattgaaaccttgttttcatcct

SEQ ID NO: 74690 - DNA, 240 bp, Oryza sativa
  Clone ID: PAT_MRT4530_74851C.1
atggtggcggccggaacccttgtcgctccggtgaggtgcccttccagcttggcacccctcacagccgctaaaacctgcgccttccatatggcgtggttcgattttcctaacttctccaagaaaaattggccgaccagaggattcccggtatgggtcttcgaggaacttgccacgggccgcatctctattgatataggtgagaatagccctcgcagtggcgcatacatcgcgatggactga

SEQ ID NO: 74691 - DNA, 2791 bp, Oryza sativa
  Clone ID: PAT_MRT4530_74852C.1
cgctggtcttgtgtcaagtgccagtcactcagttcatccacagcaaagcgcacaggcatagcagcctccttcccctcttcttcttcttcagtagtggagtacatgctacctctgcttcagcagcacatgggaatcacccatgccaactccatcaccaccgagccttctccttctccccgcccgccgcttcttcgcctcttgccccagcctcgccgccggcgtcatgctcatgccaaacacatcgccctcttgaccaactgcaagtgcgcctccgccgcttccgcttccgtggaggaagacgacgtagcaggtgggttgggatatcgtcatcctccaaagcaaatacaagaaatccttgatgttccacccaatcccagttaccttatttcccctcgcagagatcggatcatgttcctacagcgcacagccatgcctccattatctgagcttacgaaaccagaaattgtactttccggcatacgcattgatcctgggtctaacatgaggagcagaatgtcgttttataccggcattattatccatgacctgatggatagtggaactttgggtccagcaaaagaggtccatggatatgctgatggtgcaaagattaattttgtgacatggtcacctgatggtcagcacatggcatttactgtgcgctacgaagataaggtggacaacagcgtcaacttgtcactatgggttgccaatgcagaatctggagaggctcggccactctgcatatcagaagacataagattgaatgctatttttgagctatttgtatgggtgaatgattctaccgtattggtctgcactattccttcgtcacgtggttgtccaccaaagaagccattggttccttttggtcctaggatccgctctaatgagcataaaaatgtagttcagatgagagccacaaaagaaatgttgaaagatttgcatgaagaagaattgtttgattactatgcaacatcacagttaatactgctctcactggatgggacagtgaagccaattgccccacctgcgatatatactgctcttgatccttcaccagatgagaagtatctgatgctcacttctgtccaccggccatattcttctactgtctcgtataaaaggttcccaaagaaggttgagctgtggacagttgatggtacatttatccgtgaagtttgtgatctgcccctagctgaagatattccaatcacatctggtagtgtccgtaaggggaagcgtttaatcagttggaggcctgacatgccttcaacattgtattgggtggaggcacaagatggaggagatgcaaatgttgaagtctcaccacgcgatatagtatatatggagcttgcagatcctttaaatggcgagaaacctcaagtcttgcttaaacttgaccttcggtatagaaggatctcttggtgcaatggatcacaggcactggtttatgagcattggtacaggacacgcagaacaagaacatgggttatctctcctgactgcaaagatgttagcccacgggtattatttgaaagatcttcagaagatgcctattcaaatcctggttctccaatgatgtgcagaacccctgcaggcacctttgtcattgcaaaaattaagacaaactatgaaggaacctacatcttgttgaagggaaaaggtgccacaccaaaaggaagcatcccttttcttgatcttttgaatataaatacgggagtgaaagagcggatatgggagagtagcaaggaaaagtattatgaatctgttcttgctctgatgtcctataatccaaagtgtgaaatccagcttaatcatttaaagttgcttgtatcaaaagagtcaagaatggaacctacccagtattatatcaaggcttggccagataaaactcaagtgcagatcacaaattattcccatccatatccgcaactggcattgctgcagaaagaagtaatcagataccagcgagtggacggtgttaaactcactgctacattatatctgcctccaggctatgatccatcaaaagatgagcctcttccatgcctaatttggtcgtatcctggagaatttaaaagcagagaggctgctggccaagtccgtcgctcacccaataaatttgcacgcatcaggagcaactttcctcttctttggtttgctattctggccgacccaacaatccctataattggtgaaagagaccaagaggctaatgataggtacatagagcagctagttgctagtgcagaagcagcggtaaatgaaattgtaagaagaggggttgctcaccctgacaaaatagctgtgggtggtcattcatatggtgcatttatgactgctaatctcttagctcacgcgcctcatcttttctgctgtggaattgcccgttctggagcgtacaacaggacactgactccatttggttttcagaaagaggtacggacactctgggaggctaccgatacctatattaagatgagtccctttatgtcagctaacaaaatcaagaaaccaattctactcattcatggagaagatgacagcaaagtaacaacagcaatgcagtcaagtcaattttatgatgctttaaaagagcaagctggttcacttggcctttgctcaaattttccatcaggaagttaatatattgcaagggagagcgttatgcatgtaatttgggaaactgataggtggctggagatgtattgtgtgagtaactctaggaacatccaagttatggaatccactgttgatacaacatggtcacctgcttgtgaagctctag

SEQ ID NO: 74692 - DNA, 951 bp, Oryza sativa
  unsure (1)..(951): unsure at all n locations
  Clone ID: PAT_MRT4530_74853C.1
atggcgacgacgaattgcctcctcgcgctcgcaatcgcgggcctcgtgcttgtctccctcccaggactctcgcgcggcgacgtcgacgctcgccgcggccgcgagctggcgggcgggtgcaacccgagcggcacgctccgcccgagcaggagccactcgtgccaggactgctgcaaggccggccggtcctacccgacgtacgcttgctccccggcgaccaccgggagcaccaaggcggtgatgacgctgaacgacttcgaagccggcggcgacggcggcgacccgtcggagtgcgacggcaagttccacaagaacacggagcgcgtggtggcgctgtccacggggtggtacgccaacggcaggcgctgcaacaagaacatccggatcaacgccaacggcaggtccgtgctcgccaaggtcgtcgacgagtgcgactccctgcacggctgcgacaaggagcacgcctaccagccgccgtgccgccccaacgtcgtcgacgcgtcgcaggccgtgtgggacgcgctccgcatcaccggcgaagacgtcggcgagtacgatatcacttggtcggacgcatgagatcgaccggtccgtgatactgttccaaatccaaactttttcatcatatcatcgacgaagagatcgtgtagcgtactcgggtggattaaagtcttaataacgagtacggtcacatccgaaaggaataaatattacaacgtttaataaaggacatgggcattgctgcaaaaaaaaaaaaaaaaaagacttccgagaagcaccaaaaaaaaaataaattgtagacacatttcagccttaagattactggatttatttttttttaccttttggaggtcttttttaaaaatttatttacaagcaactctttgaaaaacataattcanntgatgaacattttcatgatgcagccgggcattgggtgtcatagtccgg

SEQ ID NO: 74693 - DNA, 1128 bp, Oryza sativa
  Clone ID: PAT_MRT4530_74854C.1
atggagaccccctccgctcccgctcccggggatggaaactcggctcccgcatcatctcgggtgacgtttgaggatatgcttcgcagctgcgatcagagttattatcaaatgctcgggttccctgacgctgcttcctacttcgaggcaaaggagcggaatttgttggctcagtactcgcgtcaggtattccctctgctatggcctatactggagaaggatagcctcacgcgcttcaatcgactttgccaagggtggtcgcgcttgatgggccttcgtggtttcatttacccggagattctcagctccattgtcgccaacaacgctttgcgctgtgccagagtggccctgcaaggcagctctccgttgcgcggacgtcgtgccgatcccaacggcctccatccttatggctacacggctctccacctggccgctgagacgttcagcgtcgaaatggtcaagctcctcctccgccacggtgcgtcagcaaaccaccgcactgagggcgactacgtcattgagggcctcctgcctcttcacgtcgctgttgagaatgccagcatgcacaaatacctggaggacaattgggctgatggccactctcctaacaacctcatatctctcctctgtctgccagagatgaagatgtatttggacacaactagattaattgcccaacatacgcataacattgtcgatgagttgtgggattacatcgataagaagaagtttgtccagttagcaattttgctgctggcttctcagaagcagctccatggccccataaataggagccgtggcaaggctaatctgaatgggtttgaatctattagacggcgcacttatgaagctatcagtggcctacatctccagatgatagctatggtgaatgaggggaaaaatggcagtgcgcttaagaagctgaaagagaagaaggaagcccttcttacagcagacgcactagttggtattatagacaaagctggtcaagatcttgaggattatattcagactaactcagagcccaccgtatgcaccaatatgtacaggcagaaatcacaatggatcctagacagaagtgattctgttctgcaaaataggggcaagaacgaaattatccctacaatttaa

SEQ ID NO: 74694 - DNA, 1850 bp, Oryza sativa
  Clone ID: PAT_MRT4530_74855C.1
gggaaagaagaaaaagcaaaagaagaaaaacctgaagctgaagctttagagaaactacggcggctaaaaacagactccaagcagcgggaaggggctaagccacgctacactcccaacaaattcccaaaagcggcgacgccaactaaagaccataaatggccctccgcatggatggactctagaaccactgggatcgaagaaagagcggagttaaaaaccctagagttccgctccttccacagacaccaagagaccaggagcaccatggagtcgaagctgtcgcggaggtgctctggtaagcaggccctagaggatggccaccagtcctggaaccaattgccacggggtggagagagggcagaccggccagaaggcgacaacacccggagccagacctgccgagcgaacacgcagtcgaggagaatgtggttcgccgtctcaagatcctgagcataaaaggggcaagtcgagtgactatcgatgccacgcttttggaggagatcagccgtccagcagcgctgctggaaagcaaaccaaagtgggatcaggaagaatcatatccagtgatgtcagagggccatgacattgatcgtggaaagcagccgctgtccgtcccttggacatcgactgcctttttctcccctgctccaccgccgtcccacgctgtctttgtcagctctctccttaaagggcacgtgggagatgagacgagaattgagacggccagatggatggccgcatggctcgacggttactactaccgctgccatgccagcactaccggtcaaaggggcaaaaatgatgtgagctgccgccgagctggtgttggtttgggacgatgcagagatgggccagatcgagatgcgtccgctttccagctgcacgcgggggggagttggttgcagcgggaagaggccaagggggaaaaatacggggaagagaccgtggacgacggcggttgggggcgtcgtactacgtactccgtactactggtgtggctgatgcgatgcggcggcgacgaggatggagaggcgggagaggagaggaggtccgacggccggcgaccggcaggggagaagagcagcggcgaggcgggagcaggctggggagaggaacggcggcggccatgtccttctcccacgggccgccgccacggatggggagtggcggcgctcagcctcgtcgtcggcggcggttgtcatcggcggctcggggcaaggatacggcgctcgccctcgtcgtcgtcggcacctccaggcaaggaatgggccgccgctgcttctgtgctccccgccatgaatggagagatcggcctcgtcggcggcggctcgtcgtccctttcgctgacctggccgccgcctcccctctgctcgccgtccccttcgccgacctggccgccgcctccctccctcgagccgcgccgcggcatgccggcgtggactcgggcaccaccgctcgcgccaccgcgcgcgctgccgcgaaccgctgccggccgcgccccgcacaacaccgctgatggccacggcgccgcacggcgccgcaccgagagccgacacgccccgaatagtgccgtcacgagccacggccggccgcaccccgcactgcgctgccgcacgccgctgcaagccgcagccgactgcaccccgcacggcggcaccagcctctcctgtgccctcgcagccggaggagccaccccctccccgccaccgccagagaggccacccccgccgccaacgccgatgacgaggcccgcaccctcctccatcgcgcctggagtcgcctctggctggcttgcccagttgctcaaagaagataagataagagagagagaggagaaagggaaaggaggt

SEQ ID NO: 74695 - DNA, 174 bp, Oryza sativa
  Clone ID: PAT_MRT4530_74856C.1
atggccatcttcttcaccggtgaagagatcaatggaggtggcggcgatggcaatggaatagcgaaggttcagatgaggatgaccttcgcatggccagcagatatccgaatagcactggtcatcgaatatccttatctgtcggaaaccccgataccatatctatcggcggaatag

SEQ ID NO: 74696 - DNA, 856 bp, Oryza sativa
  Clone ID: PAT_MRT4530_74857C.1
gactcccaacaaatccccaaaagcggcgacgccagctaaagaccacaaatggccctccgcatggacggactctagaaccactgggaccgaagaaagagcagagtcaaaaaccctagagttccgctccttccacagacaccaagagaccaggagcaccagggagtcgaagctgtcgcggaggtgctatggtaagcaggccctggaggacggccaccagtcctagaaccaactgccacggggtggagagagggcagaccggccagaaggcgacaatacccggagccagacctgccgagcgaacacgcagtcgaggaggatgtggttcgccgtctcaagatcctaagcacaaaaggagcaagccgagtgattatcgatgccacgcttctagaggagatcagccgtccagcagcgctgctggaaagcgaaccaaagaaagaacctgcatttggcaagaccctttgcatgccagagaagatcagcacaagcaaaggaatgatggccatagaagaaagcctggtatgccgaacgtgtagagtagcgctggtcagccgtccagcgccaaacgagacgatcctcgacacccggcaagagctgtacgtgaagcactgcatcccagataaggagaaactaggagatgaccgggacagtgagggcaccgcggatatcagagacccaggagttgttcgctagggcagaagcaactgtgcgtgaacctcggaagcgctggggaacggcgaagaggagatctggagccaaggacgccaccgagcagctgtcgatccattggtcagaccagaggagagagtgattcataggccccatccaactgcaggtggacagtgcaaacaagtatggg

SEQ ID NO: 74697 - DNA, 1113 bp, Oryza sativa
  Clone ID: PAT_MRT4530_74858C.1
atgggctctcacctgcaccgtgacttgctgctcgccgtcgttctcgcggcgatcgccgccgcgagcctcgccggacgcgccgacgccgcgaggccattgccgccgagccccgcgttgccgtcgccgtcgtcgtcgtcggcgttggaggcggccaaggcggcggtgtcgacgctgatggagatgctgccatcggggcccagcgcagatccgcccctgactactctattcctccccctcttcccatctctctctttctccagggctaggcggctggtgacgagtggtgcgtactggcgggagaggcgcacggtggccgacggggagaagctcgacatctgctggcggctgccattaatctcacggcaatgtcaaattgttcgtgcgagattaaggccagggacacatctttcctcatttggccgaaccagcgcgcggttgcgatgcatccgcaagggcatggggtccaatggtcactggagatgctcatgcgacagcgagggcgacatggcgagagaaggctcaaggagggtggcgatgcgaggaattggatcgacatggtccgacggcagcacactgctgcacatggcgacggttcgacagtactcaaggaggactccgacaggagagacgcatggtggccgacaggaaaaagctcaaggaatcgctagacccgggcctgccttgtggaaggcggtgccaaggtcgaggaggtggtgctgggcagcatcgtggtggcatgaaaagggagaggaaatggaagggatcaacaataacgaagggaataagaaggggccgactgtcggcatcgagtttctactcaccagccaccacataatgactaagggcaagcgcaatgttagttgccgacttcggcaatactgtgggccaaggggtcagatgacctttctggttggcatgggcctagtattgataacatctttctacctcaccgtgattcttgatgcacatcctcctctcatcactgtattgctgttcgtgcctgtaactgtcctggtgattgtggcggtctgcgcgtgcgcgggcctggcgatcttttgctttgaggaaggacagattgaagagaaccgccggctgcaaaactcacctgtctag

SEQ ID NO: 74698 - DNA, 177 bp, Oryza sativa
  Clone ID: PAT_MRT4530_74859C.1
atggtgcaggccatcctgttctacgggaaggccaatgaggatacgaacgtcttggacgtctgtatgacgtgtgagacctaccacaatactggacagtcgaggaatgattgccccaagacctgtgaagatgtcttcttcataaacaacaacaacgggtaccgttcacaaggagtctag

SEQ ID NO: 74699 - DNA, 420 bp, Oryza sativa
  unsure (1)..(420): unsure at all n locations
  Clone ID: PAT_MRT4530_7485C.1
agaaattgcatcctaaattcaaaagttagtttcatgcacctcttcaatgcttaatatcctggagatttgggtancggaaattagactacaacgacctatctctgattttggagtcgatactaaataatcaagagaatgggcttgttttgtttttttttttttttctagagtgggatatggaaacacctagcccaccgtctaagatgagatgttgtctaggataatagttgtaattggtagatgggatattgcagggctacgagagggtaaatgatccctctgtgtaataggggaggggagtttatttctagggtgaactaaaccatccaaacaagcaagtgcaattctgaacagaaagtaaggtaattgactgcaacatctatcaccgaatagatggtgaaatgaaaaaaaaaaaaaaaa

SEQ ID NO: 74700 - DNA, 894 bp, Oryza sativa
  Clone ID: PAT_MRT4530_74860C.1
atggcatttgttttgccctcatcatattcaaagagctatctttctttgcctcatccgaggatttcaagtacaaaacaagttagttttggcatagcagcaggttcagtgttcagacagccttgcttgaaattgtcaatattcagtggtggcaagaccttaagcaagggaactaatgcagctatttcagatacaccattgcttggaactattgatgtgctggatgcctttgaggatgattatggtggcattgttgttaaccctacttccttaccaaatacatccaatgcattttcttcatcactccagtcctcactttgttattggaataagcagatgggcaaccttaactttatttgttttacaatttttttaggcgggctttgtttatcatcatgcagagccagggtgcttgttgtcaaagaaggaaaatgtccatcgcactgttcagacatctggaagatccctacgggctttatagataagtttgaagatttgttttctggagccataagagaagttcgagaagaaactgggaactccacttttcagatcgaaagttgtttcctggatgtcgttgctttcagacatgcgcatcaagtccttttcgataaatcggatatactcttcatatgcacactcaagccactctcatctgacatatctatcgacgagtccgagattgaagcagcaaggtggatgccggtcgaagaatttgtcagccagccattccatcaggaggatgaaatgtccagggccatcactgacatctgcatttcggcacatcacaagtgctacgcaggactcgccgcgcatcaggtgatgtcaatgctcgacaacagggtggcttatctctacactggggatactagggaagcaactgggatgtgtccctga

SEQ ID NO: 74701 - DNA, 393 bp, Oryza sativa
  Clone ID: PAT_MRT4530_74861C.1
atgaagaagagaaagttccgtttccagaggccagccgtccccgtcgccgcctccttacctccccccaccgtcgcctccctgccccgatgctgccgcctcccaccgactccggcgtcggcgcggcccacgctgcggtctctccagcgccgtcgccttccaccgatgctggagttggcgtccgtcctcccctctgagctggagaaggcgagcgggtgctcaagcacgcggaggagagtggcggcggggccagtttctttggctgagaaggttctgagcggcataggccgattcatctatcccgaggaaggcatgctgctgcttctgggtcctcaagtaggtggagctcgaacaaagggtgcggcggcgaccacgatttacgatgtgatcctctag

SEQ ID NO: 74702 - DNA, 533 bp, Oryza sativa
  Clone ID: PAT_MRT4530_74862C.1
atgtcggacccatctctccttccttcttcctcccctctctctcccttctctctttctctcccccggcctttttttgttcacgttggccggagcggcggcggtggagagcggtgcccgacgacggcctccattttctctccccatgttcacttcgagctcgccgacaagatgagaacttttcagtgggcagggtcgacttctcttccttcccctccatcaatcactgtcccagtgtccctcctctccacatcccgtcggaggaagtcaggcggcggtggcagtggggagggtagtcggagtagtagcgctggctctgggatctgctccgcccgagccacgacggatgaagtcgagcaggccgagcgaggaaaggacgcaggcgaggacgcgtggagctcggcttgtgaagacgaggcgcagtgaatcgccgtgatcagcgccgacgagaacaccagcaccgtgaaagattggtcactcatgatccgcatcgctccctgcagggcccagctcgccgccaccgccgcgtcctccat

SEQ ID NO: 74703 - DNA, 171 bp, Oryza sativa
  Clone ID: PAT_MRT4530_74863C.1
aattcggcacgagatgaaatgaaattggatctgcccaagcagtaagaggggacccttgcccaccctcaaccgcgggccgcatttatttctgaattcagaggtgtctgaagtcatctttctccttgatacgcaaacgaactccggrgtttttcaatcaagagaacarggtgg

SEQ ID NO: 74704 - DNA, 579 bp, Oryza sativa
  Clone ID: PAT_MRT4530_74864C.1
tttaattaagccttgatttatataaacagcattatcagagtatcagtccataactcctccatgcatgcatccatgcacatgctaaaaacatcctcaaggtattttataaaggtcctaattaattagtaaattgaaaggtacaccttgtcaacagtaaactaaccacttccaatagaacccccaaaaaaaaaacagcacagtaaccactctatgaacaatttagaagtttccataggtttctgtgccgccaaaaaaaatggtgtgccggaaggagaagattcagctggtccaggagaagtctttactcgtcattagctcttcaaacatcgcactagcgacagcgtgtggtaaaatcatttgacgtgttgattaatagttgggatgctgattcaagttcacatttgtgtgagcgtctcctgttcaatctactcgttgcttgaatttttcccccttttgttcgacagtcggagaaatactattttaagtgtattgaagggagaaaaatacgccaacatgctaataagataatcatgttgattagttgcaatgatgccttgaaaatttgggatccctttcatc

SEQ ID NO: 74705 - DNA, 333 bp, Oryza sativa
  Clone ID: PAT_MRT4530_74865C.1
atgttcgttgctgaggcgttccctgaggttgttgtggttgatactgataattcaaatcgccccctgcatactgcacatgctgaccagcatgtgctgcaaacccagccgatgcatccattcagccctgctgccgagtcggctgaacgacctgctgtctcaacggcgtctgctgaatcggctgttgcacaacttgttgcctgggtggtgtttgttgaatcagctgctgctgagttggatcaaccgtattccaaagctaaaagttgcgcagcaaacgtgggagccgatgctggtgtcgtcggctgcggtggcgacggaatgggaggagctgcctga

SEQ ID NO: 74706 - DNA, 886 bp, Oryza sativa
  Clone ID: PAT_MRT4530_74866C.1
ttaattccaccaaaaagataaaggaggtcttggagttattgatctcaaaattcaaaatagagctcttctgatgaagcacttgcacaaattttataatagagctcaggtcccatgggtaaatttaatctggacaacttattatcccaactcggttcctaaaacgctgttctcgtttgcaagacacaaggaagactctgtttctcagcacttggcgagagaacctcaagatcaattcttcttgccattgtctcaacaggctttggatgagtacaatgttctcttggctgatgtccaaactactgcccttttagatgtaaatgatggctggacatatatttgggggtctgcaatgtatacttcgcaacacctctataagattggcttttggtcactgacacccccactgacactccaatggatctggcaatgtaaagttaatatgaagattaaggtctttggatggcttctgctcttggatcgggtaaacactagagacctactggacaggaagcactgtgctcctccaaatacttcggtcttttgttcaacatgtttgattgatgcaagagaaacaagggaacatattttctttcattgtgatttcagtaaggcatgttggatcaaaattggttgggtctgggacacttcattggagttacatcaaatgattcagtctcagcgtttggctttcacgtatcagtgtttcatggagattttcctcttagcaacttggaatatttggaaagaaagaaatggactcatcttcgaaggaattcagccttctgtttcaaattggatgaagaatttgaaatctgatctgagcctacatttaattaggctcaagtagaatttaagatcaatggttcaatcatggacacatgttagt

SEQ ID NO: 74707 - DNA, 2082 bp, Oryza sativa
  Clone ID: PAT_MRT4530_74867C.1
atgcgcacttttagtccgagagaagttgaggaccaattccacatatacagactgaaagatgagattgcagcagttgttgccacgatcgacaagatctacagccacctgcagcttgacaagggttcattggagaagaagaacggattttgctttggccttttggatcccgtaaccaacatcctcatcaacagcgccatctctgaattgtctcctgctactgcagctcaggcggtagtaggaggaggaggagagaaagctaaggacctgaacaacaatgctgctccgcgggtggaagcaggaggaggatcaagaaaacgacgacgaagaggagacaatgctgctgatctgagccagcgttcgcttgacggtctcaccgccttcctcacctgcctcttcccctacctcccggatgccgaggcacggctatacctcgacgccgcggacgctgacccaattgtggcctcgcttctcatcatcagaaggcgcggaatccgggagttcgacctcagctcccagcccaccgaggcagcggttgaggtcgccctcagatgcgccgcggtcgccgccaagcaccccgatccgcggagcctcgtgctagggtggaagctgctctcgcctgtcgtggaggcgctcttcggctctgcgccatcgtcaccacgcgagacgacgatgcacggcgacgtagcgcgtcgcgtactacgtcgcctacacaaggataatgcggcagctgatcctgtccttcggctggaaggatcgtgggaactcgccaagaggcggcttaagcgagaaagattgatgggaatttatgcagggcccaaatggctgcctcctgcccgggcacacatgaagcgagtgctgcttgcaacaatccatggattctacctgcaggcgatgggcaggctgccaacctcggagctgtgcgattcgtttcaccgcagcatgctcatgggtggccactgctacggtccactggaccctgtctccaacatcattgtcaacaccatctgtttccagtgggccatgattagcaccacgatgctgtcgtgcattgtagctcgatcgctctacggcctcgtgtccttcctgtgcactcgataccgaggcctcacacctgacctagccatgcagcgcctgctggtgaccggggttaacttgaaagctgctgatcccaacctttctcctacgcctagtgctactagtagaaaaaagcgtctggacttttcagattgtgctcaagttcttgacaatcctgacacttctcatattcagcactctgtggttgaagaaagcaccccttctgccggtgttgatgaatcatatattgccgcggccaccgccgggtttcatggctaccctcttgcgcagcaagagttccttgcgtcgccaactggtttactgagtaaacttgagcttgtctcagaggttctgcatatccaggtttgcgtcccaggatcacagtctgcctcggatggcccactctccccacagaagcttagtttgcttcgcacgatattacaacggtgtccctcctctactggcaagctgcaccaacaacaggatgtagcatgtagaaaggaggatcacccgtttgaacttcatttcatctgtggtgtcaatgagctggtatctggcccggtgcgcagcttgggtgagaaagttggagactacaatccatggactcgtgacaaatattatcacacccatatcaactttctagcagtttgcaaagcccgcttatatgatcctccaacactcttctttgctgaatgtggcaaagatggtgctgatacatgttggtgtgtccctgtgattccacagaaaccagaagctggacaagttcgttgtatttattgtgagtatcaagggaacagaattctgcatccaaccatggagagtttccatgggcgtgatgagttcgagaagttattctatggatcaaacggttcttacaccaatgataagctcatcacaaatagcgatttagaggtagattgggtacatggcgtgcaggatggtgccatctaccgggactgctgtcctgatagtgatgatgatgaagatgactggatagatattttctga

SEQ ID NO: 74708 - DNA, 1390 bp, Oryza sativa
  Clone ID: PAT_MRT4530_74868C.1
aagaagactagtcctcaaacccctaatgacttcaggcctatttctttgatgaacttgtctgtgaagattctttgtaaaatttttgctgacagactccaaattttgatgaccaagttggtgcaccaaaattagtatgggtttataaaggggaaatcaattcaagattgcttagcttgggattttgagtacattcatcagttcaaacattcaaagagggaaatagttctcttgaaattagattttgagaaagcatttgatacaattgagcatgatacaattttaaaggtgatgactgctatggggttcccttctcaatggaatgagtggatgactaaaatcttttcttcggcttctactcctatactattgaatggagtactaagaaagtttttcaaatgcaagagagatgtaagacagggtgaccccttatcccctcttttatttgccctgggagcagatctacttcagtctttgattaataaagcgcatattaggggaatcctgaagtttcctatacctgtaattggtgatgagaacattccaataattcagtatgctgatgacactcttatcttcttggaagcttctgctccccaactttttgccctaaaggccatgcttaattcgtctgcactctcctcagggcttaaggtaaattactccaagtcatgtatgatccctgaatttgactgaagaaaaggccaatcatcttgcctctacttttggctgcaaattgggctccttaccattcacttatctgggtctgcctcttggaacgactaagccaaaggtggtggatttttcccctctaactgacaggattgagagaaggttaacagtaagctcagctttcctttcatatggtgatagacttacactggttaatttagtgttatcatctctgccaacctactatatgtgctatttatcactcccagtctcagtgattgaatcaattgatagagccagaagacattgtctatggagaggaaatgatcttaattccaccaaaaagataaaggaggtcttggagttattgatctcaaaattcaaaatagagctcttctgatgaagcacttgcacaaattttataatagagctcaggtcccatgggtaaatttaatctggacaacttattatcccaactcggttcctaaaacagctagaagctgtgggtctttttggtggaaggacgtgttccagtttgatgttttgttcaaaggaattgctaaaccaatcttaggatgatctatggaatggtatggtaagatctgtcaaattcccaaggctgttctcgtttgcaagacacaaggaagactctgtttctcagcacttggcgagagaacctcaagatcaattcttcttgccattgtctcaacaggctttggat

SEQ ID NO: 74709 - DNA, 618 bp, Oryza sativa
  unsure (1)..(618): unsure at all n locations
  Clone ID: PAT_MRT4530_74869C.1
ctaaatatgtgatgctaggtttttacgtaacgttcattttctttcttgtatgcctatttacttatttcttcctccaaaagaaacctcaaggtcatgcctattctcaagaactggccgttcctcaggatgcttccaggaatgctccaccaaatccctcgtatctacgactggaccgtcgaggtgcttgaggcgaccaatctatcnttttatttcaaagggccatggcttagtggaacggacatgttgttcaccgccgatccaaggaatattcatcacatactaagctcaaactttgggaattaccctaaaggacctgagttcaagaagatctttgatgttttgggagaaggaatcttaaccgttgattttgagttgtgggaggagatgaggaagtcaaatcacgccctattccacaatcaagatttcatcgagctctcagtaagtagcaataaaagtaagttaaaagaaggtcttgttccttttcttgataatgctgctcagaaaaacattatcatagaattacaagatgtgttccagagattcatgtttgatacttcttcaattttgatgactggttacgatccaatgtcactatccatccgaatgctggaagttgag

SEQ ID NO: 74710 - DNA, 679 bp, Oryza sativa
  Clone ID: PAT_MRT4530_7486C.1
tttctccgtatttaagctcatggactatgagcccgtgttaaaatgcctgaagaagttgcctggagttgctgtgcaagatataccttacaaaacaaggaatgttatcaagaatctccctaagttctttgccgaaagctgcgcttctgataaagaagttgacgggcttctcatgaagttgccacaacacttacgagatgcactcctaccctttcaacttgaaggtgtgaagtttgggcttcgaaggcatgggcgctgccttattgcagatgagatggggcttggtaagactctccaggcaattgcaatagcttgttgctacaaggatgagggcccagtgttaatagtgtgtccagctgttttgcgttatacatgggcagaggaattggaacgatgggatccttcatttctgccaaaagatattcatcttgtgtttggtcaccaagacagtcttgaacgtttaggagcttgcccaaaggcagtggtcatttcatatcagatgctaagccgtcttcgcaaaagcatgatgaataggagatgggcactgatgattatcgatgaatcacacaacatacgctgcacaaagaaaaaacacgaaaaaaatgagacacaggctgtactggaactagcgccaaatgtcagtcgcattgtgctgctctctgggacaccctctttgtcaagg

SEQ ID NO: 74711 - DNA, 508 bp, Oryza sativa
  Clone ID: PAT_MRT4530_74870C.1
ctcgaccaagccgatcccctctctcgatcactctcaactaattctctcaacctcagctgatcatcggagatggttcaccgggcggcggcggacggcgcgcggcggcggctgcggcggcagctgtcaatgccgggatcagggaggccgcagcagcagacgaaggaggcgtcggcagcgctggtgcggctgccgtgcaacaaggggaaggcgtcgcggttcaagcggagctgcttcagcgaggaggacgacgccgcgtccgtcgcgtgcgtcgtctgcgcgccgtccctccctctcattaattagttaattagtcatcactctctctctctctctctatgatctagttgattaattaatcagtcagtgaatcacacttggaggctactgtactcgctagtttgatcctcgcagctggtaatcttgtagtggcattaattaatgtgcgtgtgtgtttgtgtatgtgttgcggtaattaaatggtgatatatataattcgtcctgtccgtcg

SEQ ID NO: 74712 - DNA, 523 bp, Oryza sativa
  Clone ID: PAT_MRT4530_74871C.1
ccaagagccggggagtctgggcagtgccagctttatgaggaaactctgggtgatgctgagcatctcattcactgacagatggcacggcatcaagcctagcctgatcgctagtggcgtgattccgaacgccactcctgataaggggcgacaaccttgagcgttcttatgactgctgcttctgtgacgatgtcgcctttgcagcccatttggccggaatggtgtcagaccactctatcgccggtatggcgttctccagcctggatgagctggacagcatgcaaagatcatgtgagcttacggatcttctcacggctcgggctgattcactagcctgtgagttagcgccgggttattcggtcccggctcgttatattcgtgcagacctcatccctgggttcattagtaggtaaacgcgacatgatatttgcatgccagccgaaaggtctggccatgctcatctggatctctacgcttgcaatggtggctcttcttgcctaccctgccttctttatgacttcgggta

SEQ ID NO: 74713 - DNA, 378 bp, Oryza sativa
  Clone ID: PAT_MRT4530_74872C.1
tttttgtttttttttttattttcccgggaatctttttgctggtttgatttttttttcgatgtatagatttacttcatttatagcctgaaaagcagcctagagtgaagaaagtccatgatagtatatcttgtttgttcatggaatgtctcctgttttagaatgagcaatggacacttcttcagttcttaattgtacacgacaccttgtctgctgcttgggttctgagataaattgccaaaaagaaacctgtctacacgaacaatgttttttccactttcaacttgtaaaatgacagatcatattattgtcttccatgatgatcatctatccctgaaacgcgtgatgttgggaaaaatcttttggtttgctttcctgccc

SEQ ID NO: 74714 - DNA, 425 bp, Oryza sativa
  Clone ID: PAT_MRT4530_74873C.1
gggacaaaaaaaggattgattattttacagataaaccccccgggcacataaaaaaaaacaagaaagaactggggggaaacacatcctaaaactgcgaatcaaaaccgaccgccctaaaagatggaataactaaccccagactcgtatttaattctaaattcggggttaatgggaccaagggagccggcactatcccttaacctgtccagaccagaaaaagcaacggaaattcctgggtggagattaacaccaacagacccgccttcaaggaggaaatggcaacggggaattcctagggggaggttacacaaccagacctgctctaagggaaaagaattttccacatcaccaaaaccgggaaaggcaaacggggcaagaactttgaccatcaccacctaggagcaggtaattaatctgcggggagc

SEQ ID NO: 74715 - DNA, 1860 bp, Oryza sativa
  Clone ID: PAT_MRT4530_74874C.1
tcaagtcaacttctgctgcgctgcgtcatcttcccgcttcctgatccgcaccagtagcccgcccttcatcttcagcgtcgtcgtcacctcgcacgccggcggcgtctccatgctcgccggcgcctggaccggctccaccgcgaacctcctgatcacggcggccgccacggccttcatctgcacgtacgccatctccctcccgaggcacgcccgtggccccgcgtggaacaccgggtacctcgccgcgtccaccgccacgaactcgccgccgtcgctcagccaccgctccggccggaactcgcggcagtcttcgccccacagctgcggcatcctccccatcgcgtacgccgagtagtcggcgaaccacccggcgcgcaccgccgtgccgtccggcagcgcgtccgccgcgaccgccacgcgcgagtcgatcggcaccggcgggtacagccgcatcgcctcgctgatggccgcgtgcaggtagtgcatccgcctcagctcgtcgtacccgtcgccgtggccgtcttctccggcgtcggcgcggcgagggtccgcgtgccgcgacgacgacacctcctcgtgcacgcgccgctcgcagcgcgggttcgcggcgaggagccagaagagccacgtcagggcggaggaggtggagtccttcccggccatcacgaagctcaccacgacgtcgcgcaggaaccggcgcttcgctcccggcgacccaaacatggcggcgagctcgccgccctcttcctccatggacgccgcgaaccgcgacagcaggtgctgctcgtgctcgcgctcgtcctccccgcggcggagccggaggcgctcctccgacgccacgatcgccatgacgtactcgtcgatgaccctgatggcgtcgcgcatccgccgctcgctcccgacgttggcgagcctcatcgccctccagaccaaggtcgtcgggtggaacacgcgcgcgacggagatctcgacggcggcgtcgaacgcggcgaagaacgcctcatggcggcggtcccctccctccagcagcgtcgagctctcgacgccgaacgcgacgttgcagatgttgtcgaacccgaaccggccgagcacgtcctgcaaatcgacggcctcgccggagcccgccgccgcgtcgagcaaggggacgagccggcggtggaggtgcgcgcggaggacgcgcgcggagaagcggcggagcgagcgggaggagaaggagtaggaggcgagcttccgctggagggcccagaggcggccgtcggcggcgaagaggccgcggccgaggaggtcctcgaaggggacggcgaagcgcgcgcccttgacgtagttggggaagctggcccggaggaagtggtcgacgaccgccgggttggcggtggcgacgccggagccgaggccgagggcgccgcgcacctcgatggtggaggtcggggcggcggcgaggaggtcggtggcccagtcgaggaagcggtggcggttgcggaggaagggcagggcgttgccgaggacggggtttgggtgggggcagtggttgttgttgatgcggctcgcggcggcggggcggcgccggaggtagaggaggagggcggggaggaagagcagaagcagaagcagaagcggtgcaagtgttccgtccatgaccatgtacggagtcggtattccgtggttccgttcatccggcaccacaggaccgctcaattaaattcttcgactatcctgtagttgtatgtcccctttcaacacatcggcatcacatgtgcagtaaactatttcattcccattaatactctttcgttcccattctaattgtaattgtagttatgagtttgtatgtctaacgtttgattgttattattagataat

SEQ ID NO: 74716 - DNA, 289 bp, Oryza sativa
  unsure (1)..(289): unsure at all n locations
  Clone ID: PAT_MRT4530_74875C.1
agctggtggcaagtctgtgtcaaccatggcatcgccctccggcgccggcaagccaccggccgtcctcctcctccggccggtggaccagcccttcgccgtcgcgctgcgcgaacgctaccgcgtgctcgacctcctctcctccggccagcctctcccggccttcctngncgccgncgccgccgcgcctgacccgccgcgcgccgccgtcgtcatggggggcggctcaatccgcgtcgacgggcgatcttcgacgncgtgncttccctgcgctgcgtcgtcaacacggcgg

SEQ ID NO: 74717 - DNA, 553 bp, Oryza sativa
  Clone ID: PAT_MRT4530_74876C.1
ggccccgccccttttttttttttttttttgccactaaaactctcgatatgtcgtatatatagctcgaaaatcccatttgtttgatacagcagcaacagcaagaaaggaacccctactccgatccacccactgaaacagtactaatgaatccggattcgcgcattcatcctatctgatgcgatgaaaagaagctagagtataagaatctaatctgggagaaggttgaggtcagtcgtcgaaggcggatgaggggtcggcgaggtgggcgaagcgggcggcggaggcggaggagaggaggaggaacttgcggacgcaggacctgacgcagtcctcctccttcttgccgagggttcgccggtagaaggtggtgacgcagtcggagaagcaccggtgcgacacccagttgtacagccgtatcgcgtctcgggtctggagcttgtcggcgacggcctccatgcgcgccttgtcctcctcctcctccccgccgccggcggccatggcggcggcggcgtccatgctcttcctcagtagcagcacaagaagaaccggccgg

SEQ ID NO: 74718 - DNA, 385 bp, Oryza sativa
  Clone ID: PAT_MRT4530_74877C.1
attaattaaaccaaaacaactggacattattattcagattacaaaacgggattttaccatgcaaatcattttactggaaaagtaacaaggcgaacacaccaaaattttccaattggttatctaccaaaatttaagaggggcttcttctttttgtccctattggagcccgggccttattctttcaaaggacaactttgcttgggatcaaaggactaaaaacggttgatcctaattttagattggcctgggttttgaaaaggtttggccctggttcatttatgctggaacaggcttccaaaaaacctgcacccgaggggggttatgtcctttgcggcatcttggtcattccttgacaaggacttgtcgacagctgcagcagcttgcc

SEQ ID NO: 74719 - DNA, 579 bp, Oryza sativa
  Clone ID: PAT_MRT4530_74878C.1
atggacagctcgccgtcgccggcgccggcgtccagggggcggtggagctggggctcggcactcgtgggcgccgcctcaacggcggcggcggcggccgtgctgctgtgccggccgcgtgacccgacgttcgagctcatctccatcagcctctccaccttccacttccggccgccggcggcgctggacatcggcctcaccctcaccgtccacgccaccaaccccaacgtcgtccccgtccgctacggcccctccaccgtctccatcctctacgacggcgcccacctcggcaccgcccgcctcgacgccggcgagcagccgcccacctcttgccgcctgctccacctccccgcccgcctcgacgccgtcgagctggcgcaccacgcccgctccatcctcgccgacaccgcgcgccgccacatggagctcgacgccgccgtcaagatcgccggcgaggccgccgtggccctctggtcccgccgcttctccgtcagcatcgacagccacatcgtcgtcgaccccgtcttcctcgacgtcatcgagcaggagaaccactccgagatgcagctctacctcacctga

SEQ ID NO: 74720 - DNA, 123 bp, Oryza sativa
  Clone ID: PAT_MRT4530_74879C.1
gctcccgttttaccaacacctagaatcagcattcaaaatcttttcaatagaaaaacctaaatttaatgcacttggacgttaatttacatggacgggactggcaaaaccttgacctggccaaac

SEQ ID NO: 74721 - DNA, 215 bp, Oryza sativa
  Clone ID: PAT_MRT4530_7487C.1
tctattcaaccgttgacgccgctcccctcatccttcgtcgagcccccaccacgccttcaccgaccgccactcctgctcgcccgaattgacgccgccgtcgtcgtgggttgacatctgcgatcctcctatcgaacttctacccgacggcactgtctccatccattcctcctctggcgcctgctctcccggaccctaccgtccttatcgccccaaca

SEQ ID NO: 74722 - DNA, 1016 bp, Oryza sativa
  Clone ID: PAT_MRT4530_74880C.1
cgggctgcaggaatcggcacgaggggacagtttgttcttctgggctcaagtccagtaccacacattcaagtacattttcttctgaactatagtagggtcagctaacatgatcatatttgaatgtagagaaaaggaaataaaaaaaaaaacttaactagctcgtgaacaatctatatatctaaagctggcgggtctccccgccagctgattggtggattttgccaccatcaatctgttgacacgtgtccatttcacattggcgcgcagtaaacggatcctactaggcttcgctggtcttgcgcatcagcccacgccgattggcttgccccgcctggacgctctattgatttgctgacagatgggccatccttaaaatatcctaattattaatcctctgaaaaaacaactgagatgggccatccttaagaagctacggcagcacggttagaagtcattgggaaaaatatatgcatgtaaaaacatgcatgtgaagatatatacgtgcaccaatttgaaataggaaattttaatatatatgtgtatatataagccctattttattattcgtacatatgacaaaattatactaccgtcacataataaaggatgacaatatcacaaaaataattcttattcttacgtaaaaataacaaatgtataaaaaacaatccaaaataattttaatgtaaaactgcatacctctaatcagtaaaaagaacaaagaccaaaaaatacaaactatgaaaaaagacacaaaatcaatctaaaaattatgttctaaaattttaaatttttaacaaataggctatgagagtgcttaccagtttacaacttcctttaatactattagtccaaagtatttcctccagttccataattcttgatgttttgaaaaaaaaatgagatcaaataattaatttgatgacactaaaacttggtgtggtgtacagattggttaaaatactttagtaaaattaaatattgacctatttattatttatattattatagaaatt

SEQ ID NO: 74723 - DNA, 167 bp, Oryza sativa
  Clone ID: PAT_MRT4530_74881C.1
tagcagtgcaaattgccatgcgagtgcccagagagagagagaggcgtgggagagtgtggcgaggggagggtgcagctaaacagcattaagatagtcgcagctccgaggccggtttgtgaggtttgagttgctgcaggcacatcagctgccgcttctttttatatttg

SEQ ID NO: 74724 - DNA, 708 bp, Oryza sativa
  Clone ID: PAT_MRT4530_74882C.1
cctcctcccttcctctcttctttcctcgccgacgacgcgattccccaccggcgtacggcggcggcggcggcgagggatgtcgccggccagctggccccatcctcaacaaattctaggggtcggttgctctcccggtggaagagccccatggcgctccgcgcaccgccccgcatcctgtgttctctccatccgctcaatacgtggccgcgaacaacaacgccccacgaagcgcaaggaagctcggcggcagagtggggcaagggtgaaggacaacgggaaagggaccgcctcgccaagacgcccaaacgctccgatgaccccggtgaccttccccgccgccgcagcacgcccactgacaggttcctcaagctgctccgcaagcacgcccgcgactacaacttcgacgactgcgactactacgagcgcctctcgacatgacgacgacgacgacgagggggccttgcggctacggcgacgacgaggacgccggcgcgctgaccagtttcgaccatgggtgccgcgcgttccgcgatcccttcacgaatatcatggccaagaagctacccgacgacccactgtgtgcaattctttcggcgcacaagaagctggtcgccatcaacgtgtgcgaagacgcagaacaacacacgcccaagggagaaggccgcagataaaagcgcatggctgcagagagggccatgtcattcccac

SEQ ID NO: 74725 - DNA, 245 bp, Oryza sativa
  Clone ID: PAT_MRT4530_74883C.1
cgagctcggtacccggggatcagctcaggggtcagcagaattcctccaaaaacagaggttgccgccatgagatttgccttaactcgattatcttcaatctgttccaatgcagtcgccacttccctcaattttaatgtagggtcagaggtctgcgtcaataccgctaggggcaatagccctgggctttggaggaatatctccgaggggtgctcccagagccggatcctcagagtgaccgcaggcat

SEQ ID NO: 74726 - DNA, 402 bp, Oryza sativa
  Clone ID: PAT_MRT4530_74884C.1
aaaaccgggaaagggtggaactttttttaatttcccagtttttaaaaaaaaaaattattattttgtttttttggggcccccgcacctttaaaaaaaaagggaatttttgcccttttaaggggaaagggcgggccttctcctaaaacaaagttttttaaagaaaaaaaaaggggggaatttttttgtaacaaggggggcccttatgcttactcgattttggggcacaattattttttaaataaaggggggggcccaaccccaaccccccggggataaagggccccccctttcccgcttttaaaaggggggggggccccccccccaagggctttcaaaggggcaggtagaaaattttgggcccgggggcccccgccccgggggtgaaccccaccgtgggggggg

SEQ ID NO: 74727 - DNA, 786 bp, Oryza sativa
  Clone ID: PAT_MRT4530_74885C.1
atgccgttgctcgcctccgcgttccgtctctcctccactcccgcagctgtttcgggtgtcaagtacggcaactcacaagtctgcaaatcgaaagttatgctattgtacttttttttggatgtatatgagaagactcgaagacctacaggccttttcttttctaggaggcataaagtacgaactgatgaggatgatagccgtgcttctcatgttgctatgtatcacacaccaaggggctggtactttagtactcgagctaaaataggtatatggggatcacccaaccaaggacgctttcaagagtctggtgcatccatattagtaaccagcaatgaattagagggcctcaatgcacttgaagctggatttcacgtctatcctgatttgtataaggacaataatgtccatttctttacccactggacaaaggataccgacaggtccactggatgctacaatataaaatgcggagggtttgtgccagcagaaggagccgaacttacgccagggcaggcggttgctcctgcatcaacttacgatggagaggatcattacatctccattagcctacatacggatccaaactcaggagattgggtattgttcagggacgatctggagaagccgttatttctaggccattttccaaaggagctctgccccaagctgaacggcggagcgcctcggatggcatggaccgggttcgtgagctacccgaagaacgaaccgagccctgcgatgggcagcggccatttccccctggaaggcgagagaaaagccgcctaa

SEQ ID NO: 74728 - DNA, 336 bp, Oryza sativa
  Clone ID: PAT_MRT4530_74886C.1
atgtggctggtgcgctccccccgccacctcagcaccgccccgccacgtcagcaggaggatgacgccagagaacctggtgccgtcctgaagcccagcccagcccagcccaacaagttgttaggccgcaaacggttggcgcgggagccatcgggaggcagcaccagggcacggctgggcgcgacgggcacggggccggggcggcacggcggcgtccaggggatgtgcggaggagctcaggcggccctccaccggcggcggcggcgcaaggcggagcaggggcgagcgttgcggcacggcaacgtcatgaccgagcttggctgcaagcagctatggtga

SEQ ID NO: 74729 - DNA, 345 bp, Oryza sativa
  unsure (1)..(345): unsure at all n locations
  Clone ID: PAT_MRT4530_74887C.1
tgtttttttttttttttgaaggtaaaagattatgattcatattattcccacgcgtccgccangagcggtanggggtngnagcagaagatggggctcggccaagtggtggaccggctcatgtccgcctgcggccctgcattttttttcagtggcgtttggatgggtcagtcttgggcaagctagcttgggttcgtgagcaccgttgaggaacttgatggaactcttgacagcactgctatacaagatggaagcggagggacaccctgtggtttgttacctctggaggctatgttcggcacggattagctggctgggtgctgttgagtcaaggtttgagctctacat

SEQ ID NO: 74730 - DNA, 365 bp, Oryza sativa
  Clone ID: PAT_MRT4530_74888C.1
cggacgcgtgggctggagctggagatgcagctggaggaggcgacgtggccggacgtggcctgcccctactgctacgaggaccacgacatcgcgtccctctgcgcccacctcgaggaggaccacccctacgagccccacacctcgccctgtcccatctgcttcgaaaagattacaagagatatgttaaatcatatcaccatgcaacatggttacttgttcaagagtggtcgcaggatgcgcagattcgatattcccgagagccaggcactttctttactgagccgagatctgcgggatgctcagttacaggcacttctaggaggtggtcatcgtcagcgaagaagcaacactactgccacaaacat

SEQ ID NO: 74731 - DNA, 337 bp, Oryza sativa
  Clone ID: PAT_MRT4530_74889C.1
ttaaataaattttctttttttttttttttttttttgttggttttttttaaatttttttttgttttcttcccctttttttaaaaaaaaaaaaagcccttcccgtttaacaaaaaaaagcaaaattgcaaaagcatttcaacttcacttgaaattaacgcctcaaggaggggggtcaaccaacccataacccccaagaacaaggaaaaaaggggaaaacctaccataccatgcgaccatgcccaaaaactacccactactacttaacccgttaaccaaaaagacccccttgccccccaataaaaaccggtttacttaaacttttcaaaaaggggggggc

SEQ ID NO: 74732 - DNA, 3726 bp, Oryza sativa
  Clone ID: PAT_MRT4530_7488C.1
ttgcaggatcaaatcaactggcacgcttacacacccaaaggcatgttttggacctgcactggagttaagcagatctcctaggcctcgtgtttttacatcaacacgcttttggcacgcccggtaggaccgattagaagtcagaatcacaacagcgttctctcatggctgagaaaccaccggcatcgccgtccttagctggcaaagagggtcctcccaaatctaggatccctaagcttgttgggtccgaagttaatgagagcaacatcgtgcccatcactttggacaagttgacacccgaacagaagaaggatcttgaggcaatgatgcagcagacacagagccaatttttgaactcatacatggagactcgccaaggaacaattgttctgaggtacaagatgaaactagttgctgatgttcctgggacaagctcttccaaggatggagaagtgcaacaagtgtcagatggtatagctcagccaggtgataaaggtgctgcagatggctcgggtgacaaaggtgatggttctcaaggggctcaatgtgatggttctcagggatttcaagatcggatcgactatgccgtgcaacatgctttgattaatcaatctggggtgttagtcaatactttgtcaaacatagtgaagtcgatggttgatggttcaatagctgagtattaagctacaggaccggtttatttaccaggagatgtttccccgaattatcagccattgatcactaatagccagccagctgctcagccaattgctcctaatgtgccatcggctcagccgacagcaccagtatcagctcttgcacctgccgcaccatcatcggcaccaggtcaactaattaatcctcggttgttggtgagagagcaaccacaacatagtggacaaaatgtgaatcggctaacttaagaccaagttacagctctattcttaccggctcagcctactgttaacccaatccagcaacagccgattcagcaaacgccaccaaggcagcaggttgtgcagccaagttcggaactcctaacaatcagctaaggcaacatgttgcgagtcaagttgtcctagagcatttggttcataatgtccaaccagatcaaacgatgtgatgagagagcagtttgggcttaagccgaaggatgctggaaacttgtatcggcatccataccctgaatggtttgagagggttccattgccttaccgattcaaggttccagatttttcaaaattctcaggacaggatagcgtttcaacctatgaacacgttagccgatttttagctcagtgtcgggaagcatcggctgtggattccctaagggttaggttgtttccattgtctttgtctggatcggcttatacttggttttcttctttgccatgtggatcaattaacagttgggccgatttggagaagcactttcatagctatttttatagtgggattcatgagatgaaattgtctgatttaacagcgattaggcaaagacatgatgagcctgtgcaagactacatccaaaggtttccggagatgaggaacaagtgctacagcttgagcttgaccgatgcctagttagccgatttggctttttagggtatgatagctccgattagggagaagttctcatcccaggactttgatagtttgtcacaccttgcacagaaggtaaccttgcatgaacagaggtttgcagaagccaggaagaactttaaaaaggttaatcatgtttgtccttacatatatggatcggatgatgatgatgatgatgattccgaggtagcagcagccgaatgggttagagacaagaaggttataccatgccaatgggtgaagagttctggaaaaaaaagagaggtatgactttgatatcaccaaggctgataagatctttgatttgctacttcgagagaaatagattcaacttcctgctggtcatacaatctcatcggctgaggagctaggcaagaggaggtattgcaagtggcataattctgggtctcactctaccaatgattgtaaagtcttcaagcagcagatccaggcggctattgagggaggcaaaatcatgtttgataactccaagaagccaatgaaggtcgatagtaatccttttcccaatatggtgcacacagctgctcgaacagccgatggaggaagggctagaggtttttaggtgaattcggctagcagcaggagaggtattatgaagaaaatgatggcggtatgaggttgccatctattgaagactatcctaggtgcagcaatattgcagaaagttcaagctgattgtataatagaagcaatcggccaaggcaagcaagagttcctgttcatcaaagatttggcccagtgaaccaagatcgtgaccaagaggacaatgaagaccagaagactcaatcgtgtccttctagtatttttacaaagaatcagaaggaaaggaaaacaaagccgaagcaggagtggcgcattaagaatcaggttcctacagccaatgaagctacaaccaatgaagcgaagagattggctaaagggaaaagtgttgtgattacatcggttaacatggcttccacgttacctgctgagtttggagtcgaacaagccgatgttaatgaagtggaagaagaatcggctaagttgatttgatcaccagaacaagcagtctttgagaagccagaagggatagagaattggcatcttaagccgttgtatgtaaacggctatgtcaatgggaagccgatgtctaagatgatggtcaatggtggggctgcaatgaatttgatgccttatgctacatttaggaagctaggcaggaatgctgaggatctcatcaagacgaatatggtgctcaaagactttggtggcaatacatcataaaccaaaggagttttgaatgtagagctgacagtcggcagcaagactatcgctacaacattttttgtgatcgatgggaagggttcttacagtttgttgcttcaaagggattggattcatgccaattgttgtattccttcaaccatgcatcaatgcttgattcagtggcaaggcgacaagattgaaatcgtgccagccgacagccaattgaagatggagagcccatgttattattttgagggcgtcgtggagggttcaagcgtctacaccaaggacacagtagatgatctcgatgacaagcaaggacagggtttcatgtcggccgatgatttggaggaaattgacataggtccagaatttagaaccaagttgatagagctcttaaaggaattcagagattgctttgcttgggagtattatgagatgccaggactcggccgatcgattgttgaacattggctacctatcaaaccaggggttagaccacatcaacaacctccgagaagatgcaaagccgatatgctagaacctgtcaaggctgagattaaacgtttatatgatgctggttttatttgtccttgacgatatgctgagtgggtttctagtatagttcccgttatcaagaaaaacgatttaaacaaggctaccccgaaggatgagtatccaatgccagtagccgatcagctggttgatgctgcttcagggcacaagatattgagtttcatggatggaaatgcaggatacaatcagattttcatggctgaagaagatatccataagacagcttttaggtgtcctggtgcaatcggctggtgaaatcgcctgggggtcgcttcgtgcaccgag

SEQ ID NO: 74733 - DNA, 1743 bp, Oryza sativa
  Clone ID: PAT_MRT4530_74890C.1
ttatgggcactcaacctgcacatacaccttcattgtggtgagatagtaattttgtactcccaacgttatcgtaaacctcttccgaggtattttgtcggttttcatgaaaaacctggagacatttttgctgagttgatggtctctcgtttttttttttttttttttttcgatataaacggtgcttctgcatttgcctttgcattgtacaacatgtaacagcttttatgtttgtacaaaccaatgttcctagacagtatggagaggtacaacaacgagttacagtcaaggtgtggctacccgttaattcataaaaagcaatggtacagggcagctgacataaattaaggtgtgtatcatgcccaaatcaacttcgcgctttactgaagcgaaagaacaacggggcaccagaagcacatccatctcactgttgacgaaatcagattcaccaaatcaggtggaacattgcgcttttatgggaaccagcgagaggaaacatgcatctagcaagaaaaactagggctacttgaacagtcagtcttcaaataaagtggagagcaccaggccttgcacaaaggttgctctgtcagtggcttgtttccgcttttgttccctttcctcactcgtgagcgatgagtcgatccttgattcccatggctgagcaggagtatccttatgaattgatgtatcatcaggaataggaactggtgcttttgatcgttcctctgaatccaatgttgagaagcccaggccaaacgaagaaagcagaggatcagcagaaatgtttgtggcagtagtgttgcttcttcgctgacgatgaccacctcctagaagtgcctgtaactgagcatcccgcagatctcggctcagtaaagaaagtgcctggctctcgggaatatcgaatctgcgcatcctgcgaccactcttgaacaagtaaccatgttgcatggtgatatgatttaacatatctcttgtaatcttttcgaagcagatgggacagggcatcattaacttttctaggttattttgtgccattgcaaaatcaactcctgttgcttgtttacagaagtaggccgaggtgtggggctcgtaggggtggtcctcctcgaggtgggcgcagagggacgcgatgtcgtggtcctcgtagcagtaggggcaggccacgtccggccacgtcgcctcctccagctgcatctccagctccagctccatgccctcgccatcatcctccatctccatctccacctcctccattccaatccccgccatatcgtcgacgtgaccgagctgcgccgcgtagaaccgcttggcggcggcgaggctcgagatccagtgctccgagtccatgattccctgctgctgctggtacaaccaccacccgcgttcgagcttaaggctagaccccctctcaagctccctcttcagcctccctaatataccggttccgtgctccgagtccgagtccgtctccctcacctgctcgagcttcgtcggatcgccgatcgagtcggacctgaatgaatcggagactttgccctcgggaagcctctcgtgattttctccgaagggttgtttgtttctaatccctcaccctccctctgcttaagccttgtggagattttttgatggagcggcggaggaagggaaagaggaggaggagacggcgaagcttcttatcggaaaggcgaggaagcagcagcgggtgggaagaaatggtgcgcgccgtgggattttttttattgttcc

SEQ ID NO: 74734 - DNA, 328 bp, Oryza sativa
  Clone ID: PAT_MRT4530_74891C.1
ctcactcttacgacgtcgccagggccgacgccactagccatcggttacatctgcactagttagctgatctctacgggggacgaagtgaggctgaagctcacgctctgttggcttataacgtaccatctatatatggtatctaccctaggtactatggtgcacccagaaccattaccacccttggcggtgtcttgtaatgagttttaacagtatagcggctcggacgataaaactaagctcagatatcatcatatgtgacatgtgaaactttgagtgatataaatataaaaaatgttgactttcatatttaaaacacaaaaaaggatag

SEQ ID NO: 74735 - DNA, 458 bp, Oryza sativa
  Clone ID: PAT_MRT4530_74892C.1
gactatattctgacgaaagaaaaacatatgtttcaaacaataaaaacttaatgtttcatatgtgatagcaatattgtcagtgatatgggcccgggagtatcatgtttagagggaggaggttgtcccccaatgccacgtggccctcccccagggggagtcaggcccggggtcaccacgtacggtgggttaggtgtccgcctacaggtgtccacctacccgcatttatggcgacccgagcggtcgcgccacgccgcatttaatgcggtgtgcagtgcactcaaccggtctgtgaccggtcgaatgaccgatgggacccagtatgtcaggcgcaccatcgcgtatgtcaggcgacgtgcagcccgacatgtcccatcaaataatgatggtgagaggttcttatactcttatcccagccggagtcggtcctccctctttggtcaaagcaaggctcccgtttc

SEQ ID NO: 74736 - DNA, 279 bp, Oryza sativa
  Clone ID: PAT_MRT4530_74893C.1
atgaatgctgcgggggcggggcgtgttcaggcgactggctgggtggtggtgatgcgaggtggcgacgcctacgcgtgggtgaaatgcgagtgggaggaagacgtcgactgccgcgagatcgctgctgctggcggcggggatcatctcgcggtacacgcgggtgaacctcctcaagacacaggacgacttcgacgtgctcctggagaggatcaccgattttgtctacgccgagaagcacagcagagctcccgttgcatccggctgaccggctccatgtga

SEQ ID NO: 74737 - DNA, 1636 bp, Oryza sativa
  Clone ID: PAT_MRT4530_74894C.1
ggtatatcttgctgggcgggctatccctcctatggttctgatggacagtcgattctacctcgatcgcccacgggccgggcattaactctttgcctttggtggttgcccgggctcctgatacgcttccttgtccggttcctgctccgccgaattacgggtgcaggcacatacccatgttggatatggccagccttaggtggtgtacacacgcaggctcctccgctgattgagtaacgccgatcgctgctcaaatttgcttatgggacatcaaagcaaatagtaaaaacaaaacccttgacgctcttcagatttttaagtatcatgatggtgtcgttgaagatgttgcctggcatttgaggcatgaatacttgtttggctcagttggtgatgatcacaatttgctaatttgggatttacgttctcctgtgtctactaagcctgtacagtctgtggcggcacaccagggtgaggtgaattgtctggctttcaaccccttcaatgaatgggttgttgcaactggttcaactgacaagaccgtgaaactatttgatcttcggaagattgatacttccctacacacctttgattgccacaaggaggaagtatttcaagttggatggagcccaaagaatgagactatacttgcatcttgttgtcttggcagaaggttaatggtctgggatttaagcaggattgaccaggaacagacaccggaggatgcggaagatggtcctccggagctcctgttcattcatggaggccatacaagcaagatctccgacttctcctggaacccgtgcgaggactgggtgattgctagcgtcgctgaggacaacatccttcagatatggcaaatggcagagaacatctaccatgacgaggatgatgtgccgactgatgacccggccaaggctccctgaaaacctccggtaggaaaaccaaaaatgaacaaaataaaaccttaactgtgtgactttaggtaccctcctttgttgtaagttgttggcctggttggcagtttacaaacagaatgtcagtcgtaatacataccagttagcaacccgtctgtcattgccgttttcatttctttgtgttgtatccctcaatttatgctatgacgctatgctgaggccacgggggttgtatatgacttcatgcttagggattttagcattgcttcaacgtagggatttaaacgtgctagattgggttggtcaaaaaaaaattaatccttttctgaaacgggttgggttggtctttgatttaacttcacccgtcagatcaatttcgtgtattggtttgttaggatataactgtactggagttgcatgcagaagttcttccaaaaaaaaacttttgttgggaattgggattagcttggtgcctgagtaattaagctctcaactatatcttctgtgccaactacatggtgcacaggcgattagtttagatctgctccatttcatgaagtattgacgaattgcgtgtgttggatattcagcttgtatctcattgattgcattgataaatccataatagtataagttacttccaaagaaatattttgcaactgtatacactgttcagttcagttgagcacaactgttttaattaaaaacaaatttgttttagacgt

SEQ ID NO: 74738 - DNA, 1210 bp, Oryza sativa
  Clone ID: PAT_MRT4530_74895C.1
ggccgcccctttttttttttttttttttttttttttggaataccataaagataagtcacatattgatagcacttagtaccaacagcttccaggggcggaagttgagttaaacatgagtttgaaaacaggatatagatagagcatgctggcataattcgaattcattgaagttcagcacatcgcaactactagccacaccaaaatgtaggtatttactatcagtaaaggcatggaatcgtagccatcctttaaaaccgacaattagtgatcaggctggatgataaattagcatagtaccttctacggctcatcctacaatttctaatgcttcttgtttttcaacggacccttggggatcttagagaggcatttctcatcgaaaatagcatagtacttcttcagttcgatcatggccttctctccaaaagcatcgatttggtcctcatacttctcatacagaacaggcacggtgtacagtaccataaagactatgtagaacaaggtcaggaaattgcagcagctcccaagaacagagagaacccagagacccacgacaacaatcagaaatttcttcaggtcatgcccttgaccaatctccctcaaggtagcaaagcccctattgatctcaaatctcagtgagcgagcaacattaacagccaggtcctctgggatcttcacttcaggaatgttaggaggggacttgttgatgaaagttgaggcattggaccagaggaagagcatggccagggtgaggatgatacagtggcacaacagggtgaggagatgataatccatgacttcaaacagcagccagatggccgtggcgccagcgagtaccccaacggagattttcttgttcctccatagaaagagatcagcaggcttgccgccgccgaggacggagtggacgggcttctcgcggccgaagaggcggtagatcttggccttcaagtcggccgtcctctccccgtcggagtccgacgacgacgacgacgagcccccgcggccgtggagcttgtcggagatcttgtccatcaccgactccaccaacgactcctcctccttgtgctccgccatggctagctgctggctctctctctccccctcttcttctccctcctcgctcgaacagtcgaactcttctttcttttttttttcgcacgaactctttttgcctttttgcttttctttttcctcctttcccggccgg

SEQ ID NO: 74739 - DNA, 222 bp, Oryza sativa
  Clone ID: PAT_MRT4530_74896C.1
atggcagccatagagtgcactgaaggaaacatgacgaacaggtgcacgggcagcagactggctgtggagctcgcacgggcgcctaagcatggtaagatcattgcgatcctggatgtcaggccagcactaacaagccccaagcacacgatagagttgaccgtcgtcgcgcacgattcaggagagaaggacggcgaactgagtacagagctgaaaccgagatga

SEQ ID NO: 74740 - DNA, 985 bp, Oryza sativa
  Clone ID: PAT_MRT4530_74897C.1
atggagcagaaagatgaagccgagatggaggaggtggacgaggaggaggaggaggaggtcgacgaagacatggccggcgggcacgcggcgcagtcgccgtcgccgtcgtgcgggctgggcgagaagaagcggcggctggcgctggagcaggtgcgcgctctggagcggagcttcgacacggacaacaagctggacccggaccgcaaggcccgcatcgcgcgcgacctcggcctgcagccgcgccaggtcgccgtctggttccagaaccgccgcgcccggtggaagacgaagcagctcgagcgcgacttcgccgccctccgcgcccgccacgacgccctccgcgccgactgcgacgccctgcgccgcgacaaggacgccctcgccgccgagattcgggagctgagggagaagctgcccaccaagccggcggacacggcggcatcggtgaaggtagaagccggcaatgacgcggcggccggcgccgcggcccgccacggtgtgcaaggacggctcgtcggacgacagcgactccagcgtggtgttcaacgacgaggcgtcgccgtactccggcgcggccttcattggattcggcccgtcgttcttggtcgacgacgcgtcggcggcaaccgtgggctgctcgtcgtcgctccccgcgctcgagtccaaatggcacggtccgtactccgacgactcgtgcaaaggcggcgtctatggcttcacggaggaatggctcgctgcctgctccggcgagatggccggcaacgacgccgccggcttcttctccgacgagcacgcctccaacctcaacttcggttgggatcgcctcatctccttcagctttggctcaacgatgcccaggatccacctcggcatggatggataccgctacgccaagtctgagctctcccatgatcatggtggcataagagaggagggggatgtagtggtggcggcagccggcagtgcttggtttggcactgcctag

SEQ ID NO: 74741 - DNA, 408 bp, Oryza sativa
  Clone ID: PAT_MRT4530_74898C.1
atggctgatctcatttggtcatccgagataccaagcatccacattccgtcagctgcaggtggccagcatgttggaacggtgccgtctctgaccggtatcactagtgccaccacatcaatggtgaacctcatgcagatgccggctatccacatggagcagcacatgctacatccaaccatgttaaactcatctgcttctccggaatgtatcactagcactgccgtaccatcaacgctgaacatgatgccaatgcgggatatcctcatagatcagctttcactgcctcctgccatatctagctcatctgcttctggtgttctctgtgagtacgtgatgcctgagcacgaggacatggtccgcctcaccttgggtcagtcatccaccatggacctagatcttagcttctag

SEQ ID NO: 74742 - DNA, 686 bp, Oryza sativa
  unsure (1)..(686): unsure at all n locations
  Clone ID: PAT_MRT4530_74899C.1
ttttttttcttaggtgaggcggagcgcagacgtcccgttgtattggattaaagggaggtcataattacaagaaatgaagtagggataggaagaaaatatatggaaaaaggcatctattcgatctacccaactacgcttcttgaaaatttaaagaaaatggaactcaaccaagaatcgaactactttacatcaacaattgtttgtctatcatcaattctattctgtaccaacatggtgcatggacatgtctgactttgtatcatgatgctgcagccgtatcacccctgtcgtgtaggagcggatgccatcctctgatgatgataactggatgccatggtagtaactaggactacggcgaggccaacacgcacagtctagcgggagctggagcaccttgacagagcaagccttctccaggtttggtgtggcatggagccgagaagggagttctatggtgaagttgccattctcatcagttactgtgaatacagagttagccatcgtctttatacctccagtttcacaggccactcctactgtagctcctggcagctcgatgctgaggaggtcggacccgggtgggcggagggagagcttgcagacgaccttcccggacacgatcaccgtcgacaccagctttttcgccgtaccccgcaatgcgaacgagcttcgccggcnaagaagta

SEQ ID NO: 74743 - DNA, 810 bp, Oryza sativa
  Clone ID: PAT_MRT4530_7489C.1
ttcgcgcccatatcagtaagggcaaggcgaagcgtttggcacgctgtccgcgcggactcggtggttttcaccatctcccgcgaaaaaactgaacatcctgggcggttacgtattcgtgggtgcaccatgactttatcgggtgtccccacatcaaaccattacaaccggtcaaggttcaattttcgtgtccgatgagtttgttcagtttgcctatagcatgggtatcaaattgttgaattcttcaccatattatacacaagctaatgggcaagccgaggcatctaataagagtttgatcaaattgattaagagaaagatttctgattatccttggctatggcatactcgattagccgaagcattgtggtcttatcggatggcttgtcatggatcgatccaagtccctccttataagcttgtttatggacatgaggctattttgccatgggaagttagaattggctcaaggagaacggagttgcaaaatgatttaacagccgatgagtattataacctcatggccaatgaaagggaagacttggttcagtctagattaagggcccttgcaaaggttaccaaggataaggaactatttcggaaggtgaacttgtatggaagttgattttgccgattgggagtcgggatagcaaattcggcaagtggtcaccgaattgggaaggaccgttccaaatctatagagttatgtctaagggagcttacatgttgcaaggactcgatggagaagtttatggacgagcactaaatggcaagtacttgaagaaatattacccaagtgtttgggttaacgca

SEQ ID NO: 74744 - DNA, 723 bp, Oryza sativa
  Clone ID: PAT_MRT4530_748C.1
atggtgtccccggacttgatccgcaacgtggtgggcatcgtcggcaacgtcatctcctttggcctcttcctctcgccggtgcccattttctggcggatcatcaagaataagaatgtgcagaacttcaaggcggaccccatcctcgtcgtcaccatcaacggcattagcctcgtcatagaggccgtctaccttaccatcttcttcctcttctccgacaagaagaacaagaagaaaatgggagtggtgctcgctacggaggctctcttcatggcggcggtagcggtcggtgtgcttttgggcgcgcacacccatcagaggcgctctttgatcgtcggtatcctctgcgtcatctttggcaccatcatgtactcctcaccactcaccatcatggttgtgaagacgaagagcgtggagtacatgccgttgctgctatcggtggtgagcttcctcaacggcctttgctggacgttatacgcgctcatccgcttcgacatcttcatcaccatccccaatggtcttggcgtgctctttgctatcatgcaactcatcctctatgccatctactaccggaccacacccaagaagcaggataagaaccttgagctgccaaccgtcgcccccatcgccaaggacaccagcatcgtcgcccctgtcagcaatgacgacgacgtcaatggcagcactgccagccatgccaccatcaatatcacgattgaaccataa

SEQ ID NO: 74745 - DNA, 429 bp, Oryza sativa
  Clone ID: PAT_MRT4530_74900C.1
atgtataaatattctacccaagaaaaaggccatgtcgaactgccgaaattcgacaggtgcctatcaaacggcgagtcttcaacaggtggaagcaatcgaacaaaaggagttggactggacctgtcgaactacgagtgttcgactgggcccacatctgacagtgtgcaatgtcaacaggtcccagcgcacaatattgaactgtggctgtcaacaggtccctgcgactgcccctatcaaacaatgggtgttcgactggcggctttaaatccccctctccacccttcgacaagggtcatttttggagttgagggggcgaggaccaccaagtgtctcatcgggctgccatcgtcgcgggagagatctgcgcggctggaaggggatgcgatgcccatgactatgcagaagagagcagcaacgctggaggtataa

SEQ ID NO: 74746 - DNA, 405 bp, Oryza sativa
  Clone ID: PAT_MRT4530_74901C.1
atggtgcggccgccgccgtcgtcggatgacgatcccctcgtcccgcagttcgggcggcagatcgactccggcgtcgtcgcggcggccggcggcaacctcgtcgccctctacgccggcccgtaccgccccgcctcctcgtccatggggtgctacctcgtctacgacgccgccgcccgatcgagttcgccgccgctctccacggtccccggcgtcccctactccgactcccactcgagccccggccgcgcgaccgtcatcgcgccagccgccaccggcggcggattcatggatggccacagtgtactaccaccgtcgaccgccgagatcaccatcaccacatggacactcgatctacaggatgatcattcgacgtcaacacaaaactggacgaatcgggaagcataa

SEQ ID NO: 74747 - DNA, 338 bp, Oryza sativa
  Clone ID: PAT_MRT4530_74902C.1
atgaccttgaatctctggtttgtatatggggcttacaaccagaataccgagatatcgtatgccttcctatggtttggaacaaccaaccaattgcagccgtgtgcaggcgctgctcgtggtcacggagagaagccaagaacaagcagctgatcgacaagccgctgcactggagaagcaacctcatggctcaatggattgaatgtgttcatggtagtgcaaaaatctttatggagtgtttgggatgaaaacatagtatctcttctccaagatttaatttttctttagctattcttttcacgaacgcgcaaatctttagctattttgcaatgtttctattt

SEQ ID NO: 74748 - DNA, 2988 bp, Oryza sativa
  Clone ID: PAT_MRT4530_74903C.1
atggccagcgaccgtctatgggagctccccgatgacctgctcatacgcatcctctccttcgtccccgtcaaggaggccgcaagcaccaccctcctctctcgccggtggcgcaacccgctgtggctggagactggcaccttcaacgtcgacttgacgtcggagcaattctccaaccacgcccacaactgcctggcgatgtggcgagacgagggagacgcccgggaagcgctccgccgcgaccgccgcccccgccgcctcaagaagctctccgtcacggtgacagccagcagggacgacgacaactactattcggatttctcggaatacctcaacccgttcgttttccacggcaagtgcgtgcggatgttccggaacgtcgaggagctccgcctcgagtgccagatcgacgcccccgccggagccgggccgttgtcgtcgtcctcgccgccgcggtacacgtacgccatgcccggccccgagtacaatctccgtctgcaccacctgccatgcgaggatttcggggttcttcacctcacgggatgcagcctgaaagaggagattcatctatgtcttcggaatcggatcgcctacccgtgcctgacgacgctgcggctccggcggtgcaccgtgccgctcggcgagctccagagactgatcaccgccgcgccggcgctcgccgacgtatgtctcgagtcagtcaccttcccggatcagggatccgtcggcggcatgaccaccgacaaacgcgtccgtctccactgcccggcggtcaccgccttcgccatggtcaactgccacatgttttgccgcagcttcgagctcgatgcgccggcgttgatctgcttccgctacgcccagatctcatcttacgagcaatccatctcgctgaaaccacctgcgccgtgcttggaaaaggctaacctggagtcaatctccggcacggaaatattcaggtctcttctccacgacatgtgccatgtcaaggttttgaagctgacggtgtactccattgttggtgatatcaagtttgagcgattgccttgcttccctaacctcaagcacctcgtcatagaggaattgtgtggatttgccatgggcaacggctcggcggcggcggcggcaacggctatcggggagctgctacaaaggtgcccggtgatccgtgagctctggataagattcagctggtcgaagtatctccatgagagcccggacctggcagctgttcttgaagagtttgacatcgacggagaaagtcaggatgtcactgaccagataaacaccaagattgccacatggagagctagtataaaactccgtgaatggaggccaccgttaaccatggatcggccggcgcaccgaatcaagcggcgaaggctgactccgccgggagcggaagagccgatcctctcgccggtgcagccacccgcagtgccgtcgttggccgccgccgccgccgccggcgacggctacccgccgtgggtgatcctccagcccgacggcgaacgcgagggcgaggacgaggacgacgaggaccatccatgcctcacccccgacgccgagacggcgacggcctcccacacctccactggccatcccatcaccgtcgccttctccctcgccgcgcccccggcgccgtcgcgcatgtggttccggttctcctacgacgccgactccgagacccgctgcaattgcagcgtcatcgccgcccatggcgactccgtcctcatcaacattttttacttcagcaacgcttccgtccacaaccacgaggaccgcttcgtttacagggcatcagccgctgccagcgaccgctcatgggcgcggccgccgtcgttgtcgatgctgccgccgcctccggtggagtatactccattccaggacgccaccggcatccttcgccgtggcgaggacgacctcgtggtggcggagctcaccgtggaggggaagctgcgccacgacacgctgctgggggtggtggccaagctcctcgtgttccgctccggcgagtggggcgtcaagcgggcgccgatcaaccacggatcaggcagtggtagcagcagtagcagaggccacgacctgcccgcgccgtggccgtgggagaccgacatggtcgtccccgtcggcgaccggctgctgtgctacgtcgacctgcaccacaccacggcgtcatcatcttctccgaccggcggcggcggcggcggcgcgttgaagttcgtcgacatctccccccgctgctgctgcggcagcctgagcaagggccaaacctcctgcgaccgttccagccaagccttcgtcatcaggacatggacgctgaggataggcgacgacgtcaacggcgacgacatggcgtgggagatggacgccatggtcgacgcctccgagctctggtccctcgacgcctacgcgggcctcccgctcgtccgaccggaataccccgtcgtgaacatggatgatcctcacctcatccgcctcgccgtcaccggggcgcgccaggaggaaggaagaacctacagtgacgagactgacgagaactactcatcgctgatcatggtcgacacgaggaggaagacgatgccctccgtgccccccttcctccacctgccatttaacggcgaaactctcgttagcaggttctccagctacttcaattccaatcatagtagcaacaatggcggcggcggcggcggcggtgcattgccgagcaaaatccatgtcaacattgagccaccgccaccaccggccgccgtcgccaccggcgagccgcgaacaagcgacaccgctgagccgaagatcgtcctggtcctggagagattttcatggcgattgaagggatacagcatacaggacatggctggcggcgacgatatgctgaaagcttacaccattcttagccaggacaatggccgttgttttagatctcttctggggctcccgatgagtttcaactttgagctaggattggctgttgatgatgatcaagagtag

SEQ ID NO: 74749 - DNA, 1641 bp, Oryza sativa
  Clone ID: PAT_MRT4530_74904C.1
atggccagcgaccgtctatgggagctccccgatgacctgctcatacgcatcctctccttcgtccccgtcaaggaggccgcaagcaccaccctcctctctcgccggtggcgcaacccgctgtggctggagactggcaccttcaacgtcgacttgacgtcggagcaattctccaaccacgcccacaactgcctggcgatgtggcgagacgagggagacgcccgggaagcgctccgccgcgaccgccgcccccgccgcctcaagaagctctccgtcacggtgacagccagcagggacgacgacaactactattcggatttctcggaatacctcaacccgttcgttttccacggcaagtgcgtgcggatgttccggaacgtcgaggagctccgcctcgagtgccagatcgacgcccccgccggagccgggccgttgtcgtcgtcctcgccgccgcggtacacgtacgccatgcccggccccgagtacaatctccgtctgcaccacctgccatgcgaggatttcggggttcttcacctcacgggatgcagcctgaaagaggagattcatctatgtcttcggaatcggatcgcctacccgtgcctgacgacgctgcggctccggcggtgcaccgtgccgctcggcgagctccagagactgatcaccgccgcgccggcgctcgccgacgtatgtctcgagtcagtcaccttcccggatcagggatccgtcggcggcatgaccaccgacaaacgcgtccgtctccactgcccggcggtcaccgccttcgccatggtcaactgccacatgttttgccgcagcttcgagctcgatgcgccggcgttgatctgcttccgctacgcccagatctcatcttacgagcaatccatctcgctgaaaccacctgcgccgtgcttggaaaaggctaacctggagtcaatctccggcacggaaatattcaggtctcttctccacgacatgtgccatgtcaaggttttgaagctgacggtgtactccattgttggtgatatcaagtttgagcgattgccttgcttccctaacctcaagcacctcgtcatagaggaattgtgtggatttgccatgggcaacggctcggcggcggcggcggcaacggctatcggggagctgctacaaaggtgcccggtgatccgtgagctctggataagattcagctggtcgaagtatctccatgagagcccggacctggcaggttatctggaatccatggcgtgcagatttgacgagtccgattactgtgatcgctgtgcggtttcagctgctgacaggggaagacaagaactcaacgatagttggaagaactctctgagaaaagtaactgtgcaatttcagaagggaaagcttacgtgttcccaagtcgaacttgtgatgttcttggtagaaaatgcagctgttcttgaagagtttgacatcgacggagaaagtcaggatgtcactgaccagataaacaccaagattgccacatggagagctaggtcatcttcatctagggaaaaggaagctcatcctgcaggtgttggtgcagaacgtcctactcgtcggccgccgccacagcatctgcacgagactcgctacttgtacaatgggtggcaccctaccttccgtaggtga

SEQ ID NO: 74750 - DNA, 291 bp, Oryza sativa
  Clone ID: PAT_MRT4530_74905C.1
gcgcggtctaatccgattcaaacccgccgtttccaagcttgctctcctctcccccccaatccttccctcccgaggtggcaggtgctcggcgggatggcgcagaaggaggccaatggcagcagcaacggggagcacaccacccgcccgccgccgacgccctcgccgctcggttctccagttcttcagcgacctgagatctcgcaccggggactgctcatcggctcgcacctcgcgcagctagggaacggagcacagcattgcgcaacactttcactgttcaagacacctgag

SEQ ID NO: 74751 - DNA, 1285 bp, Oryza sativa
  unsure (1)..(1285): unsure at all n locations
  Clone ID: PAT_MRT4530_74906C.1
atggatcggccggcgcaccgaatcaagcggcgaaggctgactccgccgggagcggaagagccgatcctctcgccggtgcagccacccgcagtgccgtcgttggccgccgccgccgccgccggcgacggctacccgccgtgggtgatcctccagcccgacggcgaacgcgagggcgaggacgaggacgacgaggaccatccatgcctcacccccgacgccgagacggcgacggcctcccacacctccactggccatcccatcaccgtcgccttctccctcgccgcgcccccggcgccgtcgcgcatgtggttccggttctcctacgacgccgactccgagacccgctgcaattgcagcgtcatcgccgcccatggcgactccgtcctcatcaacattttttacttcagcaacgcttccgtccacaaccacgaggaccgcttcgtttacagggcatcagccgctgccagcgaccgctcatgggcgcggccgccgtcgttgtcgatgctgccgccgcctccggtggagtatactccattccaggacgccaccggcatccttcgccgtggcgaggacgacctcgtggtggcggagctcaccgtggaggggaagctgcgccacgacacgctgctgggggtggnggncnanctcctcgtgctcccggccgggtgtgctgtgttgggccgtctgggggcggggggtggccgtggtgctgggtgcggggtggggggtgcgggctggggggccgtggtggttgggtggtggggcggggggggcggttgtccccgcgttgcgggggtgtcgggcgggggtcggcgtgggtggtgggtgcggtgggtgtccgggttttgggtgtgcgggggtgcgccgggcgggttggcgttcgttggctggggggggggtctggggtgggggccctcctgctccttcctcggccgcgctgttgggggttgcccggtgccgttccggtcctngtgccggcggcgtggggcgcgggggggggggtgtnnnncgtgcgngncggggggcttgcccccccgggggggcgtgcgcccnnggcggggccccgccgtcctggcgtggggtggcgtgcggcgccgggtccgtgtggggcgcgggggggggcgttggttcggcgtggtgggcgtgggggggcgtggtgtcctcgctgncgtcgtcgccgttcccggccgcgtgccgtcgctcgggcggtgnccgtgcgccgtgtcgttgcgtcgcggcggtgtgggcggcgatcgtgcggctgagagaaatcaaaaaaaagaaa

SEQ ID NO: 74752 - DNA, 433 bp, Oryza sativa
  unsure (1)..(433): unsure at all n locations
  Clone ID: PAT_MRT4530_74907C.1
gaanntgtcacncnatcagcagcatcaagtcgtatcgatcgtcaacacacacnaccaagatcgagatggcncgtgcncagctggtgttggtcgccctcgtggcagcggctctgctcctggcgggcccacanaccaccatggccgccatcagctgcggccaggtcnactccgccgtgtcgccctgcctcagctacgcccgcggcggntccggcccgtccgcggnctgatacnncagngtcaggagnctcaactccnccaccagcacaccnctganngccgcaccnccannaaagtgcctccngaanatgggcggnatcancttttttttnttacncctgccntctcantnggatnnccncctantncggnntnngnacccccnnaccantngncccncgttagantgntnntcnatnaaatngattnttaattt

SEQ ID NO: 74753 - DNA, 414 bp, Oryza sativa
  Clone ID: PAT_MRT4530_74908C.1
atggaaccaaggcagtcctaccaactaagctcgcactcggaggccccatggtatggggcttataacgagggtgaagtcgagcactcgttgcatatagacatggtccaccctgaaggagacggcgaagaggccacgattgagtcagcccgcggcggcgccctcccctctgccagatccggcgggaggggaggcgcggtggcggcaaacggcgtggaggcagcgaacggtgcaggtggcggcccgatgggtgacggcggcaacggtggcgccctctcctccgccagacccggcgggaggaaaggcagcagtgacgtcggcgagcttcggatccggtggtctctccgtccgccttccctcgcctacggtggccgacggtgtcctgctgcttccacctttggggagctcctgtgctga

SEQ ID NO: 74754 - DNA, 348 bp, Oryza sativa
  Clone ID: PAT_MRT4530_74909C.1
atggtggtcccctatctcgcctgtgcggtattggcaacactggtgcgcacgttcgtcccaagttgtcccggggtctggcaaaccctgtgtgatgtctcgtccttcacggttcgattacatcggctcttcagcatcatcatcctcaatgactgccacgatcgtgtcaccttcatcttcttcagcgcgtcctcgctcacgactactctacagcgccccaagcacgccttgccgctcggctacctcgacatcagcttccccacttcggctacattgaccacggctactctacgcacggcttcatcgaccacggctccctcgcatccttcgcttcagctacatcggcaatag

SEQ ID NO: 74755 - DNA, 4851 bp, Oryza sativa
  Clone ID: PAT_MRT4530_7490C.1
atggccgagaagccgccagcatcgccgtcctcggctagtccaggttctcttaaagaaaagatccagcagctaggcttatctgagattaatgaaggcaacatcgtgaccattactccagacaagttgacacctgatcaacagaaggattttgactcaatgatgcagcaagcacggaaccagttcttaaactcattcatgcagacccgcaaggggacagtggtgcagaagtataaggtgaaggtagttgctgatattcccggaacaggttcttctaaggatggagaagtacagcaagttccagatggcacaacccaaccgtgtgataaaggtgttgcagatggttttcaaggaattcaaggtgatggctctcaaggggtccaaggtgttggagttcaaggtgatggttcccagggagttcaaggcggtaatcttaaccaagatggtaacgcagcacagttacagtttaacaacttccaagatcaggttgactatgttgtgcaccatgctttgatcaatcaatctggaatattagtcaacactttgtcgaatatggtgaaaaaaatggttgatggttcaatggctgagtatcaagctacagggtcggtttatctactgggaggagtattccaaaattatcggccattaattactgataatcagccagctgctcagtcaattcctcctaatgcaccatcggctcagtcgacggcaccggtatcggctcctgcacctgctgcattgccatcagcaccgggtcaattggtcaatcctcggttgttgctaggacagcacgctgtgaatcgagttgtcccagagcacctagttcatcatgtacagccagatcaaacggtgatacctcaagttgttcccgagcatttgcccatgacacaacagcctcaaggaacacctcagcaacaaccatgggccgatatgattgcgggtgtaatgaaggaacagttcgggcttaggccgaaagatgctggaaatttataccgacagccttaccctgaatggtttgagagagttcctttacctaaccggttcaaagttccagatttctcaaaattctcggggcaggatagtacatcgacttatgaacacatcagccgatttttggcccagtgcggtgaagcatcggctgtggacgctttaagggttagattgttccgactgtctttgtctggatcggcctttacttggttttcttctttaccatatggatcaattaacagttgggccgatttggagaagcatttttatagctatttctacaatggggtacatgagatgaaattgtccgatttaacagcaatcaagcaaagacatgatgagcctgtgcatgagtatattcagagatttagagagatgaggaataagtgttatagcttgagtttgactgatgcccagttagacgatttggcttttcagggtatgattcctccgattagggagaaattctcgtctaaagactttgatagcttgtcacatcttacacagaaggtaaccctgcatgaacagaggtttgcagagtccaggaaaaactctagaaaggttaatcacgtttgtccttacatgtatggattggatgatgatggtgatgactctgagatagcaacagccgaatgggtgagaagcaaaaaggttatactatgccaatgggtaaagaactctgggaaagaggagaggtatgactttgatattaccaaggctgacaagatttttgatttgttactccgagagaaacagattcaacttcctgctggtcatacaattccatcggccaaagagttgggcaagaaaaggcagcaaatccaagcagctattgaggacggtaaaattaggtttgatgattctaagaggccgatgaaggttgatggcaatccttttcctgttaatatggtgcatacaactggtcaaacagccaatggaggacgtgcaagaggttttcagtcaaattcggctaaaattattaggaagtatcagaaaagatatgacaggcagcaggagaaacattatgaggaaaacgatgacggctttgatcctcattggggttgtatgaggctgccatctattgaggactgtcctggatgcagtgatataacaaagagttcaagccgatcatgtaatagaggcaatcggctgaggcagaaaagagttcctgttcatcaaagattgggtccagtaaaccaagatcgtagccaggaggacaatgaaaacaggaaaactcaatggtgtccttctgagtttggggtcaagcaggccgatgttgatgaagttgaagaagaatcggctaaattgacattgtcaccagaacaggcagtcttcgagaagccagagggtacagaaaatcggcatctcaagccgttgtatataaatggttatatcaatgggaagccgatgtccaagatgatggtcgatggtggggctgtagtgaatttgatgtcttatgctacattcagaaagttgggcagagacgctaaggatctcatcaagacaaatatggtgcttaaggattttggtggcaatccatcagaaaccaaaggagttttgaatgtggagctgaccgtcggcaacaaaactatccgtacaactttctttgtcatcgatgggaagggttcttacagcatgttgctcggaagggattggattcatgctaattgttatattccttcaaccatgcatcaatgcttgattcagtggcaaggcgacaagattgagattgtaccagctgacaggtcagtcaacgttgccagtgccgatttagctctttgggagatggatgatttggattgtttgtctggaaaagtttgggatggagattttctaaaaatggagaacccaagctattattttgagggcatcgtggagggttcaaaggtctacaccaaggacatagtagatgatctcgataacaagcaaggacagggtttcatgtcggccgatgatttggaagaaattgtcataggtccaggtgatcgaccaaggccgacatttattagcaagaatttatcttcagaattcagaaccaagttgataaagctgttaaaggaattcagagattgcttcgcttgggaatattatgagatgcccggactcagccgatcaattgttgaacatcggttacctatcaaaccgggggttagaccacatcaacaacctccgagaagatgcaaagccgatatgcttgaacctgtcaaggctgagtttaaacgtctatatgatgctggttttattcgtacttgccgatatgccgagtgggtttctagtatagttcctgttatcaagaaaaatggtaaggtaagggtgtgtattgactttagagatttaaataacgctaccccaaaggatgaatatccaatgccagttgccgatcagctagttgatgctgcttcagggcacaagattttaagctttatggatggtaatacgggatacaatcaaatctttatggccgaagaagatatccataaaacggcttttaggtgtcctggtgcaatcggcttatttgtgtgggttgtaatgacttttggcttaaaaagtgctggagctacttatcaacgggctatggattatatatatcatgatctaatcggctggttggttgaggtctacattgatgatgtggttgttaagtctaaggaaatagaggaccacatagccgatctgagaaaggtttttgagagaacaaggaaatatggcttgaaaatgaatccgacaaagtgtgcttttggcgtatcggctggtcagtttttgggatttcttgttcatgagaggaggattgagataactcagaggagtgttaatgcaatcaagaaaattcagcctccagaaaataaaaccaagttgcaagagatgatcgacaagataaattttgtcagaaggttaatgcattatctactgtccaacgaatgcactgtcatatgcaaggccgatgttgtcaaatacatgttatcggctccaattttgaaagtaagggttggaaaatggatattttctttaactgagtttgatcttcggtatgagtcaccgaaggcggtcaaagggcaagctatagccgatttcatagttgatcatcgtgatgattcaatcgactcagtggagattgtgccatggactttattctttgatggatccatatgtactcatggttgtggtatcggcttagttataattttccctcgaggggtatgttttgagtttgcttatactattaaaccttatgcgaccaataatcaagctgagtatgaggcagttctcaaagggttgcagttattcaagaaagttgaagccgatgctatcgagattatgggggattctttgctagtaattagtcaattggcaggagaatatgagtgcaagaatgatacgttaatagtttataatgaaaagtgccaagaactgatgaaggaatttcggctggtgactttgaagcatgtatctcgcgagcaaaatattgaagctaatgatttggcccaaggggcatcgggatataagccgatgatcaaggatgttaaaattgaggttgttgtgttgacatccgatgattggaggtatgatgtacatcaatatttacaaaatccatctcaatcggcttctcgcaagttgcgatataaggcgttgaagtatactttattggacaatgagctctattatcggacaattgatggggtgttgcttaagtgtttggatgccgatcaggccaaggtcgcaatcggagaagttcatgaggggatttgtggcactcatcaatcggctcataagatgaagtggttgcttcgacgtgcagggtatttttggccgacaatgctagaggattatttcaaatattataaggggtgtcaagattgttag

SEQ ID NO: 74756 - DNA, 765 bp, Oryza sativa
  Clone ID: PAT_MRT4530_74910C.1
atggaaccaaggcagtcctaccaactaagctcgcactcggaggccccatggtatggggcttataacgagggtgaagtcgagcactcgttgcatatagacatggtccaccctgaaggagacggcgaagaggccacgattgagtcagcccggtatcagcaactaccacgcaaataccaaagccgcaatatccggcgggaggggaggcgcggtggcggcaaacggcgtggaggcagcgaacggtgcaggtggcggcccgatggtgggagaggaggcggtggtggcccggtggcagcccagcggtggtggatccttagggtgacggcggcaacggtggcgccctctcctccgccagacccggcgggaggaaaggcagcagtgacgtcggcgagcttcggatccggtggtctctccgtccgccttccctcgcctacggtggccgacggtcttgcacaagcgtcgacgccggtacctttactttttatcaagccgatgtatatctacgtcaatccactcgccgtgcgccaccgcctcccgtcgtcgccgttgctgccgttgcgtcatcgcaccgccgtcaccgttgatctcgtgcttgccgccggaccgccgccgccgccgtcatcgcgctccctcaccggttttgctctctgtgctaccgccgggccgagccgccgcggcctcttccgtgagccgccgctgccgtgccgccgccgtgccgagccgccgcttgccgcctttttgccacggccatgctttgctagaacctag

SEQ ID NO: 74757 - DNA, 120 bp, Oryza sativa
  Clone ID: PAT_MRT4530_74911C.1
atggagaaagtaaagatgaacagcaagcaggtgcttggcaccagaacccacaagatgatggccaacatggaggtggatgctggaatccttaatctggttggtgaaggaacgaggtcatga

SEQ ID NO: 74758 - DNA, 389 bp, Oryza sativa
  Clone ID: PAT_MRT4530_74912C.1
tttgtgtttttttttttttttttttttttttttttttttgtttttttttttttttaaatagcaatgcaggaggggttcccctttttatttgaaaaagaaaacgaggcatacaagggacttttttggggccttgggtaccaaaggggccactccaggaataaaattggggcagacggggggcccaaaatggttgaaaccaaagattaaaaccaagggacccaggccggactgtgagcccccaaaagggggcacaaaaatgattaaacccaaactacccacccccttttttaaaggaaaacgacacggtggagggcaatggacaaaccgtgtcccagggtatggaacaaatagcgatttcctttaaccgccccaaaaagggggttattttt

SEQ ID NO: 74759 - DNA, 1245 bp, Oryza sativa
  Clone ID: PAT_MRT4530_74913C.1
atggccgcagccgcagccgcagcgtccgatgatgccgccgccgccggcggccggttcgacttcgacgtcatcgtggtgggcgcgggcatcatgggcagctgcgcggcgcacgcggcggcgtcccgcggcgcgcgcgccctgctcctggagcgcttcgacctgctccaccacctcggctcctcgcacggcgcgtcgcgcaccatccgcgacgcctacgccaaggcgcactacccgcccatggtgcgcctcgcccgccgcctctgggccgacgccgaggccgagtccggctaccgcgtgctcaccccggcgccgcagctcaccgtgggcccgcccggcgatgcctcgctgctcgccgccgtcgggaactccggcgcgcgccgggtggacgaggacgacctcgccgggaggtggggcggcgcgttccgcggcgtcccggacgggtgggtggctgccgtcagcgagctcggcggcggcgtgctgaacgcgaccaaggcggtggccatgttccaggcgctcgccgtcaaggggggcgccgtcgtcagggacaacgcggaggtcgtcggcgtcgtcaagaaggacggtgaggccggagtcttcgtgaggacgagcggcggcgaggagttccacggcgccaagtgcgtcgtgacggtgggcgcctggacgagcaagctggtcaagtccgtcgccggcgtggacctccccatccagccgctgcacgcgctcgtcctgtactggaaggtcaagcccggccgcgagcgcgagctcgcggcggaggccggcttcccgacgttctccagccacggcgacccgcacgtgtacggcacgccgtcgctggagctcccgggcctgatcaagatcaactacgacggcggcccgccgtgcgacccggacggccgggactgggccggcggcggcggcgacgcggcctcccgcgtcgcccggtggatcgaggagttcatgccggaccacgtcgaggccgccggcgggccggtcgtccggcagccgtgcatgtactccatgacgccggacaaggacttcgtgatcgacttcctcggcggcgagttcggcgacgacgtggtggtcggggccgggttctccggccacgggttcaagatggggccggcggtggggaggatcttggccgagatggccatggacggggaggcgaggacggcggcggaggccggggtggagctccggcacttcaggatcagccggtttgagggcaacgccatgggaaactag

SEQ ID NO: 74760 - DNA, 339 bp, Oryza sativa
  Clone ID: PAT_MRT4530_74914C.1
atggctgggattcttggtttggcctacaactcggtcttgcgaggaccacgagtggagtgccgaagtggtggcctggggtcgctgttttgcagcggtagtgcttgggagggccggagaaccaccagttggagagtggatgatggcagtgatggcaccaaagaggatagatgcctattgcagcattggagtggggaggactggttgagggaaggtggaggcaatgtccgcatcgatgacggcaacaccctccttattgttgtcgcggcgtccatggctatgcccttgcatagccacgcccagcaccactactcgctgacatcgtcgctgcaccacctgtag

SEQ ID NO: 74761 - DNA, 207 bp, Oryza sativa
  Clone ID: PAT_MRT4530_74915C.1
atggggacctcggtgccggctattttgcgggcggcgggggtggtggtggccatggaggcctcgccggcggccgcggcggcggcggcggcggcggagggttttggaatgggcgcgggttttgggcggcaccggcgcgtcaaaacattggatcttaagagcaaatggaagcggctggccatccccggcgacggcgttctcgggaaataa

SEQ ID NO: 74762 - DNA, 1269 bp, Oryza sativa
  Clone ID: PAT_MRT4530_74916C.1
atggctggaagtggttcatgtatgaagaaatcatgcgtttgttgccaaaaatatttggagcatttggatggaaagatgaactgtttcgtcaggcgaatgacggccgattctagacgtagcatgatcatgccatgtaaatttgtgaaccattttggaggagatttctcagggaccataaaactgcaatcccctaatggtattctgtatgttgttgaagtcactaagtgcaagaataagacagtcctcagatgtggttgggaggcatttgttgatgcccatcacatagaagagaatgactccttgttgttccgttgcgtcgagaattctcgttttgaggttctgatctttgattccgatgattgtgagaaagagaggacagtccctctgaacatgaatctgttgagtcaggtcatttccttttgctatgctgaagtacactttccacataaaagcgtaaccgtgacacttcagaggccatgcaaaagcaagaagtggcatcccagattctacaagagaaaagacgcgaggatgaacattctcaggggatcttgggtagagtttgtcaaagacaatcgtgtgcaggaacaggacatctgtgtctttgtaccaactaaggatgcaagaagaaatttcacgtttacggttcatctgcttcgcgtagcggcagcttattcctggggtggaactggtgttgatagagccggctcaagccttggaagaacagatgtgaagtcagcttcagagatcagtatcaaggaggaaccaattgatcaagaagaaaatgtttcctcgagaaacaggaatggagtttctgacgaatctgaggaggatgaggattctgaaggccctgctcatcctccctacattgtaccatgcaagagccacctgtctcggttgcaaaagaagatagttgaagagaaagtgcgatccttccaatccaaatttcccgtttatgtagcaatcatgaagaagagcaatgttgagcgaagtgcttcccgttgccagctagagctaggcgcgcgattcgccgctgctgttcatcttccagacaggaggcagaccgtggtgctgcagcggaggggggagagatgggccaccgtgatgcagatcaggagcggaaccaggcggctcctgatcagcggctggcacaggttcgtgcgcgacaaccgcctgcgcgtcggggacatctgcctgtttgagttcaagacgcacgagaggtggcggctcaccatggctgtccatgccatcttcagggagcagtgctgttag

SEQ ID NO: 74763 - DNA, 1317 bp, Oryza sativa
  Clone ID: PAT_MRT4530_74917C.1
atggagctgaggaagcgcccgaggccgcggcgcgtcgaccccgacttcgtctcgtcaccgccggcttcgctgctgctgccgccgccgaggaagcgggcgaggaggcaggccgcgccgccggcggctccggctccggctcctgctcctgcgcgcccatcaccagcggcgaggaggcggccgacgtgcgcgcgggtgatcatccagagccccgtcgctgggcttcagccatccgtgtgctgcccgtgcgaggcgccgctccgggcgtgcaggcttccgcgcgcctccttcctcgctcgccgtcgccctcccttcgactggtacgaggcggacatgtggacggaggtggccaagtacctgttcggcgcggagctggtgcgcctctcctccacctgccgctggttccgccgcctcctcgccgacgagttcatctggcgccacgccttcctccgcgacctctccctcctccccgccgccgccgaccggtaccctccccgcccgctccaccgctcctggcgcctcctctacgccgccgccttcagtaagctcctcccctccctccctccctccactgacgacccggtcccactcactgacatgacacgtgtcccctctcttcttcctccagacggcgcccactcgtactggttccgccggagcagcaggcacattggggcgtaccggattggtgggttcctgctcgagtcgccttacatgctcctgacggcgaagctggcggtgccgcagtggctgccgccgcaggaggacggcccgcagatcgccatcgagatgaccggcgcgtgcgtgctccccaacgcgcgccctggcatctggatcaccgacttccatcttgtgaggtgtcccaattgcaccctcaacaagtgcgcaggggtcctgcaggttctggacgcgcgacactgcgagctgttcctggagcagggattctggaatggcacctgggagtacgaggacctgggcgaccactacaacgacgaggagacccccaccgcagcctgcgccatcttcaacgccagcacccgcgctcatgagtccatttcatgttcgtccctggatcatttggcatttgtcaattccagttctctgttcatttacattcttggtgttctccactcgaagtcttgggtcaggagatgcgacgacccacagcccaaggcacattgccgcccatacgctgttgccctcaattccaacctcctgtccaactccaaccaggggttggtgtcaaggttccaggcgatgcgagacacgaccgggaacgggcagatagtgtctatccggatcatacagcagatttactga

SEQ ID NO: 74764 - DNA, 265 bp, Oryza sativa
  unsure (1)..(265): unsure at all n locations
  Clone ID: PAT_MRT4530_74918C.1
gngggtttngcccctntttcntaggantcnaaactccaactccnncntctaancnntancnccngtgngagctgnctgctatagangctgnanagggagcannaagngcttggntannctattnanntncacggcaccatattcctcgtcancatntncatcgnacaccttgttggngtnaacctancgtggtcgtcgcccgcnagccgccgncgacgntcagcccacggccaccanctgtngacgccnccngnanngncaggca

SEQ ID NO: 74765 - DNA, 706 bp, Oryza sativa
  unsure (1)..(706): unsure at all n locations
  Clone ID: PAT_MRT4530_74919C.1
atgacgacggacgaagagctggtaaggcctcaggctagcggggccaagaacatgggattcgccaagttcgattccatgtcggagctgcactgcaagattcccactgtcctagttcattgggggcttggcttgatgagactgaagagtgggtggaaggagatgccttcgattcaaaaggctttgcctccagagcttgctgataatgtgatcagactgtaccgtgaatgcttaaggagggccaggttcattgggcatcagaaacacaatacggggcttattgtttcaatggtaagggagcagtttaagaaaaacatgcatgaaactgatccagagaagatacagaaaatgaaggatgatgcggcaaggggccttatcaatcacattttgtatgaatctgagaagatgacaggacgcaaattttcaagttaagaaatttggaactagacaatcagtgtgctgtatgaataatagtaaacagtgatgtgatcttgtggttgctgaattactttgttttttttttggcacaaggatcaactaatcctttgatgggtcattgagttattaaggtggttgntttctttgggttcatctactgtggctcttgactctttgagtgtttcacccaagctttgcatatgctacttgnngcagtcatctttgaacctgnnaaaatatgatctcagtgattgataatgctttctttcgc

SEQ ID NO: 74766 - DNA, 255 bp, Oryza sativa
  Clone ID: PAT_MRT4530_7491C.1
atgggcaaaagcatcttccagcgggcgaaagcgacggcggagcacatcgcccctgtgacctcgccggcagtttccagcggcgaaagcgacggcggaggaggaggagcttctcgccgcccccgctccacggtcgtcgctgacctctccgtcgtcgacgagcgcccagactcgacggcgatgaccggagacttgaacgtcaaacctgtctcacgtcaacagctcaaaaggacaggatgccgttcttacagcaattga

SEQ ID NO: 74767 - DNA, 4722 bp, Oryza sativa
  Clone ID: PAT_MRT4530_74920C.1
atggaaacaaggtcttcaaaagaattagcaagaacagcacagatgaagaggaaagaccacattcagctcaagcagggcaggaagcgtgcaagaaccgatggaactgaaagaacagcaagagatgaaccaactcccatcagcaatatggacttgaaaaacaccgttaccttgaacttagttaagccaaaatgcatgtgccaacattgccaaggacccaaaggaatttgcaagaacatccataatgaagcgcgacgaacagaatccaatattcaactattgcaactcaaggaatcgtcagttataaacagcacaatgatatgcaaccaaatgatgaaagcaatacaatcaaaagaattagccagaacagcgagaatgaagaggaaagaacagaatgcactaaagcggagcaggaaaggaactataatcaataaaaatgaaataaggaaagatggcatttcaagtgctagtaaaatatggaactttgggggcccaacatgcatgtgcccacactgccatgcgcttatgtggcatggagaaaaaatacaatctacaagaagcaaacagccatccttttctcgtcaaagaaaaaaccagccatcctttggactctgctgcaagcaagggaaggtcgccttgccaccattaaaagaaccgccacatttcctttcaagtttattggcaagagatggaggaacatcagaaaactaccaacagaacattagatcatacaattccatgtttgcatttacatcaatgggaggagctgttgacagaaaaataaacaaagggcgtggaccttatgttttccgactgaatggacagaattaccatcacataggaactcttctacctaaaggtagcaacaagcctcgcttccaacaattgtacatctatgacacagagaatgagatcaagaataggatagaggcatcaagatctggcacgcgtaatgcctcattagatgaaaaaactatcgccggcctactaacaatgcttgatgagaacaacacactagcccagacattccgaatggcaagagaaagattcaaagaagatgactatcacaattacactctgagattacttgataatagggatcaagatggaaggcaaaacaatatgccatcaacatcagaagttgctatgttgatagtcaaagatccaactgaaaaaagctatggacgcgacattgttcttgagtacaaagatatgagacccaaaaggatatcagaaacccatccaaaattcatggccatgcaatacccgttgctcttcccttatggagaagatggctatagacttggaataaaatacagcggaaaggatggtgtaaggtacgacaagaaatgtgtcactatgcgtgaatattatgcatatcgcctccaacagcgtcaagaccaatcaatgttaccactagcgtgtggaaatctctccatgcagttcatggtcgatgcttatacatgcatagaacagtgtaggctcagctggatcaggcaaaatcaaggaattctaagaacggaactttatggtgggctacaggatgcacttagaactggagacacaagaacagagaaattagggaggaggatagtactcccagcaagtttcacaggaggtcctagaaacaaagagcaaaactaccaagatgcgatggcaatatgtcgttgggctggaaatcctgacttgtttgtaacattcacatgtaatccaaagtggccagaaatccagtgcatgctagaaaaggttgggcaccagaaaccatcagaacgaccagatattgtagtccgagtattcatgataaaactaagggagctaatgtcagatattaaaaggaatcaacattttggaaagactaaagcaattatcttcacaatagaatttcagaagaagggactaccacatgcccatatcctaatattccttgacaagaaagagaagtgcctaaagccctcacaaattgataaaatgatatgtgctgagattcctgacagcaacaaggatcctgaaacatttgaagctgtcaagaatttcatgatgcatggaccatgtggagagacaaacccaaagtcaccatgcatggtagaccataaatgtgataggtacttcccaaaaggtttttctgatgagacaatcattgatgaagtcaacttcccaatatacaagagacgagatgatggaaggcagataaaaaagggacgaatcaatttgaacaatggatttgttgttccatacaacaaagatctcctagtgaagttccaagcacatataaatgtcgagtggtttaaccggtctaagtcaatcagatacctatttaagagcatctacaatggagatgaccaagcaacagcagttgttgaagaaactgataccgcaaaagataacgatgagattaaaaggtatctgggatgtagttacatgacagcaactgaagcgtgttggcgaatattcacatttcctctacactaccaagaaccatctgttcagaggctattcttccacgtggagaatgagcaacaagtgatttttccagactcaacagacctacaggaaatcataagacacccaagatcaggggtcactatgtttactgagtggatggaaacaaacaaaaagcatgaagatgccagagaattaacatattcagaatttcctacaaaatggacgtgggttaacaaagtgaagaaatgggtaaggcgaaaaggaagaaagaaaattggcagaatctacaatgcccatccggcaagtggagaaaggtactatctcagagttatcctcaacactgcaaagggttgcacaacatttgaagatatcagaactgtcaatggattcgtgcactcatcatacaaatcagcatgccatgcactaggatttctaaatgatgacaacgagtggattgagtgcattaaggaagcatcctgttgggcatctgggatagaattacaacaactgttcgcaactattttatgccactgtgaggttactgacccaaagagtttgtgggaatccatctgggaggaactctccaaagacattcagcatacacaaagttggctcttgaactttcctgcctcctgcctcacgccttcacataaaaggaaatgtgctttaatagaaattgagaagaacatgcgacaagcaggaaaatcacttaaggaatacactggaatagagcccccaaatgtggcaaagttaagtgaaattgagaacagtcttataaatgaagagatgaactatgacaaagagaggttgaagcatcagcacctgcaaatactaaacactctaaacatagagcagaaaaaggcatttgatgcaataatagaatcggcacaccaatcactaggcaagctaatatttgtggatggctatggtgggacaggcaagacatacctttggaaagcaatcacaacaaggttaagatcagagggaaagatagtaattgcagttgcatcaagtggcattgctgcacttctgcttcaaggaggtagaacagcacactcagcattcaatattccaatcaacctaacagatgaatctacatgcttcatcaaacaaggctcgcgtatagctgatctattaatgaagacatcactaatactgtgggatgaagctccaatggcaaacagaaactgtttcgaggcacttgacaagagcctaagggacgtacagaggtttagaaatgagaatagttaccaaaagccctttggtggcatgacagttgttctaggaggggacttccggcagatcctccccattgtgccaaaaggaagaagggagcacactgtaaatgcatcaatcaaattctcgtacctctggcaacatttcgaggtgttcaatttgacaaaaaatatgcggctcaattctgtatccaaagatcaagcagaacatcagaagactgcggaattcgctgagtggatactacgaatcggcaacggtgacacaattttattagatgaaaagggttgggtgagtatgcctagtgacctgctgctacaaaagggagatgatccaaaagctcaaatcgtcgatagtacctaccctggcctacaatacaattgctgcaagccgaagtacctagaagagagagcgatattgtgtccaacgaatgatgatgtcaatgagctcaatgagtacattatggaccaaatccaaggtgacaaggtaacctaccttagccatgacagtgtgagcaaatcaatgtcttacagccatgagatggaaatgttgtatcctacagagttcctaaacagcttaaagcaccccggaattccaaaccaccaacttaagctcaaagttggtctaccagtaatgcttcttcgtaacatcaatcaaaatgcagggctatgtaatggtactagaatgagaattacgcgattcgggaaaagggttattgaggcagagattataaccggaacacacataggtgatatggtatgtatcccacaaatcatcatgtcaccaaacgaacgaaaatggccatttgtgctaaacagaaagcaatttcctctctcggtgtgttttgccatgacaataaacaagagtcaggggcaaaccttaaacaaggtcggcctctatttgcctaggcaagtttttactcatgggcagctctatgtcgcagtctccagagtcacaagcagagatggcctgaagatcatgatcgctgacaaagaatgcccaggcgaaggaatggtgaaaaacatagtgtacaaagagatcttccagtaa

SEQ ID NO: 74768 - DNA, 557 bp, Oryza sativa
  unsure (1)..(557): unsure at all n locations
  Clone ID: PAT_MRT4530_74921C.1
ccancaaattaanttgatcacaaactgacntntcaaaacacaatcaaatttncngggcagccaaacntcaaacacaaatccancccattaaatnaaatttttaaaaaaattntcataaggtaacatgggcatctcaaactttcaaagctgcaanatgcncntctcaaccgtnacacctnatttttncntagcatnaanatnccnncccaaatnatctcaaatnannttcattaacaaatcatacaacccnccccanctctcttaccatacttaacttttggttganaacctgcaaaaatngtntcnccttgcgggggngggtcccctcccccttttgnaaaaaaaaagaaccancctttaccccccattncgggtggcccccctgcaaattttntggtgcaatnnttttncaaaactnaaaaatcaanctttnttttttgcttcccctttttaannttaananaccctnnccantggaaccaaccnttcancttttaaatgnttttggnaaaaaanccaaaaattaacntttttcctngggncnccntgcaaccccc

SEQ ID NO: 74769 - DNA, 1386 bp, Oryza sativa
  Clone ID: PAT_MRT4530_74922C.1
atggcagaagaatctatagaatggactgcatttacatgtcctcaaggacattatgaatggcttgttatgccattaggattaaaaaatgcaccagcaattttccaaaggaaaatgcagaatatatttaacgaaaaccaagaattcatattagtttacatagatgacctgagagggcaaaattcatttgcaagaacatatgctaagaaaattttacaattccctgatgctatgaatgataaaaagaaattacagcaattcttaggacttgtaaattatgctagaaatcacatcaataatttagcaaagttagcaggaccgttatatgctaaattaagaaaaaatggtcagagatattttaattctgaagacattaaattagtaagattaataaaagagagggtgaaagaattaaaacctctagaattatcattagaagaaagttactttatcattgaaactgatgcatcacaacacggttggggtgctatattaaagcaaagacctactaaattttccgctaaatcagaagaaaaaatatgtagatatgcttctggaaattataaattaaaaactgtcaataatacagatagagagatcatggcaataatcaatgcaatcaatgcctttaggttgtacttaggatttaaagaattcacggttagaaccgattgtgaagccatttgtaggtactataatcagctaaatagcaagaaaaactcaactagaagatgggttttatttgaagatattataacaggaaacggctataaagttatatttgaacatattaaggggaaagataataatttgcctgaaatgctttctcgtttacctgaattgcagaagcctatatatgtcgtatttgatggaaagctcccaggggtctatatatcttttgaagaaattgtggcccaaaagatagatgctaaattaattggaggaatatcttggaagaaatataaagacattgatgaagcactaagccaggctagaaaaatactaggaataaattattatctagagcctgctgcaaaagaatatattcaaaaatgcaaaaaagctaaaggaaagaagactccagaaatacccattaaaacgactataaaagaagaagggtattctaaaaaacccacatacaaggaatgcctaacaaaaggagtggatctattagatggggaatatattgattggaaaataatagaaaaatttgaagaagcctccccacaattaaagaaagaattaaaggaagaaatacttaaagaattaaaacaagaaatggatcagaaatttgaacaaataaaaaaggcagtagatgagagattagaagtttccttttctgatctggacactatggatcttggtggtcaagggcaaccagatgaatag

SEQ ID NO: 74770 - DNA, 1333 bp, Oryza sativa
  Clone ID: PAT_MRT4530_74923C.1
cacggggagaggtttgcacatctccatgaactcctggtagtctgaagccaagagcaggaagattgacctcaggtgcaaactcgtccaagagtgcagaagaccagcagaggcgatggatgggttcatggtgagcgtcgccacgggggcgatgaactccctaatcgacaagctcaccacgctgctgggtcaggaattcaggctgcacaagggggtacagcgcgacatcgccttgttgaatggtgagctgagctgcatgaatgctctgctggagaaactggccggcatggaggtgcttgacccccagatggaggagtggaggaaccaagtgagggagatggcctacgacatcgaggattgcatcgacaggtacatctaccagctacactacgagccacagagacctactggaattgtgggattcttccatgactatgttcacaaggtgaaggagctgctagctcgacgcgaggtcgctcagcagataaaagttctcaaggatgacattgttgaggcaagccacagaaggaagaggtacaagattgatcctgaattgtactctgaaaccacaaatgtggtgcccattgatcctcgattacctgcactctatgttgaggcatcgaatctagttggtattgatattccaagggatcagctgattaacctggtagatgatggtgatcagtcattcaaggtgatttcaattgtaggagttggaggcttaggcaaaactacccttgcaaatgaagtttacaaaaaaactggtgggcgatttgattgtcaggcttttgtgtcggtctcccagaagcctgatgtaaagaagattttacggagcataatttgtcaaatcatggaaccataccatgctagcacaaatccagataaagctgtaatttctcaaatcaagaagcaagattacagtagcacagaatctggtgatgtggagtggctcataaacatactgagggttttcctgaaggacaagaggtatttgatcgtaattgatgatatatggagcacgcaagaatggatgaccattaaatttgccttgtttgagaatacttgtggtagcaggatactagtgacaacaagaatttttactgttgccaagtcatgttgctcccctgatcatggtacagtttatgaattaaggccactaagtgaagctgactccatgtgtctattcttcagaagaattttcggctcagaagatctatgcccagttaaccttaaagatgtttcaactgaaattataaaaaagtgtggtggtctgccattggcaattattactatggctagcctattggctgataaatcagatagaagagaagaatgg

SEQ ID NO: 74771 - DNA, 3360 bp, Oryza sativa
  Clone ID: PAT_MRT4530_74924C.1
ttattcatctggttgcccatggccaccaagatccattgtgtccaaatcagaaaaagaaacttctaatttctcatctactgctttttttatttgctcaaatttctgatccatttcttgttttaattctttaagtatttcttccttcaatttcttctttaattgtggggaggcttcttcaaatttttctattatcttccaatcaatatattccccatctaatggatccactccttttgttaagcattccttgtatgtgggttttttaaaaaacccttcttcttttatagtcatcttaatgggtatttctgaagtcttctttcctttagcttttttgcatttttgaatatattcttttgcagcaggctctagataataatttattcctaatatttttctagcttggcttaatgcttcatcaatatccttatatttcttccaagatattcctcccattaatttagcatctattttttgagccacaatttcttcaaaagaaatgtagaccccagggagctttccatcaaatactacatatataggcttctgaaatatgggtaaacgagaaagcatgtcaggtaaactattatctttccccttaatatgttcaaatataactctataaccatttcctgtaataatatcttcaaataaaatccatcttctagttgagcttttcttgctattaagctggttatagtatctacagatggcttcacaatcggttttaaccgtgaattctttaaaccctaggtataacctaaaggcattgattgcattgataattgccatgatctctctatctgtattattgacagtttttaatttataacttccagaagcatacctacatattttttcttctgatttagcggaaaatttagtaggtctttgctttaatatagcaccccaaccttgttgtgatgcatcggtttcaatgatgaagtaactttcttctaatggtaattctagaggttttagttctttcactttttcttttattaatcttactaatttaatgtcttcagaattaaaatatttctgaccattttttcttaatttagcgtataaaggtcctgctagctttgctaaattgttgatgtgatttctagcataatttacaagtcctaggaattgctgtaatttctttttgtcattcatagcatcaggaaattgtaaaattttcttagcaatatgttcttccaaatgaattttgccttctcctatttcatgtccaaggaagttaactttttctttgcatatctccatcttcttttttgataggattaaaccattttgctcaacctttctaaaaaataattctaggtgagcaatatgatccttataagtttttgaaaatattaacaagtcatctatatatactaacacaaattcttgattatcgttaaaaatgttttgcatttttctttgaaatagggcaggtgcgttttttaatcctagtggcatcactagccattcatagtgtccctgggaacaggtgattgcagtccattctatagactcttctgccatttttacttgccaaaatccagcttttaagtcaaatttcgagaaatatttgctaccttgtatcctattaatccattcttgcttatttgggatattataggcatcttctatagtattatcatttagctttttataatttatgaccatcctagatttacctctaacttcttccgcatgatttcttactataaatgctgcagacctatgtggacttctactctctcttattgctcctagtttcagcagttcttctatatcttttggagttgcttctattgggctggtcttaataatatattctgggtttattatattaattttacactcgatagcgtttttctcccaatatttcataggaatttctcctataatttggatatcctctaatctttgaacaattttttctatatcctttttagacttaatatccctataccaatttggtgcaaatgcttgtaatcctatgcactctatattggaatttgatatataatagatgtctatattctcactaagttcatattcattaattctttcttcagactcaaggttgagtgcttcaaggttgtcgggtttgattctgactccaccacgctttcgtacctctgagatatatggcacattgttttgatatgggataaaagtaattccctgctcatgtattactgtggtttgtaccgattgttgtaaaaaccttaggccaattatcatgtcatcacttatcatggataagtttcttattgtaatctcatctattatatatttagttccattaatgtatacttcaacattatgagctaactgattatgaattttctttattccggacatgtctgtagggacttctgccttattatcatcaattgtatgaactatctctttccagcttgttaaggttaatttttctatttcttttaatctttcattttgcagggttgtatatcctaattctgggtcttcagctatgataatattagatactatatttgcaaagttgtgaggattatttcctgctctttttagctcttcgtagttattaggattcttttcaacccattgttcccataggactttagcagattcacccaaaaatgtttctaaataagttatcatatcctccaccttattccctatattatgctgattttgtatatatttttgaactattaaccccttccaaatactaatgatatttggccagtctatgggatcatgtgctgctagatttagtatagccccatcacttttttgattttgaaattttattggtttctcaaaatctcttcttttagtgcccatgtgcctatactgtcctgggatataatgatatgaatattcttctttttctggaggccatcttcctgctgccctagctggtctttctctttctccttcattttttacagaaccctctccgtatcttttcctttttcctgttcccaaatctacttccatggcttccattgcattatctagattatgcaaacctacctcatccaatgagtcttggtgaatatatttatatcctgaatattttaaactattttcaaattctttagctactatttttaattctactggttttgttagaacacttaattctacatctctagatattctatatagcccattcttattctcaaaaaatcccatgcagtatacttgttgaggtcttattgcccttaaagtatctcgttgatatctttcgagctgcttatctacttgtgcaacatctttcagctcatctatgtcatcatatttgcctttttgtttatcaaaacagttatcgtctctgcttgctattcttctaaagagactcctagatatgtccat

SEQ ID NO: 74772 - DNA, 3018 bp, Oryza sativa
  Clone ID: PAT_MRT4530_74925C.1
ctattcatctggttgcccatgaccaccaagatccatagtgtccagatcagaaaaagaaacttctaatttctcatctactgccttttttatttgttcaaatttctgatccatttcttgttttaattctttaagtatttcttcctttaattcgttctttaattgtggggaggcttcttcaaatttttctattattttccaatcaatatattccccatctaatggatccactccttttgttaggcattccttgtatgtgggttttttagaatacccttcttcttttatagtcgttttaatgggtatttctggagtcttctttcctttagcttttttgtatttttgaatatattcttttgtagtaggctctagataataatttattcctagtatttttctagcctggcttagtgcttcatcaatgtctttatatttcttccaagatattcctcccattaatttagcatctatcttttgggccacaatttcttcaaaagatatatagacccctgggagctttccatcaaatacgacatatataggcttctgcaattcaggtaaacgagaaagcatgtcaggcaaattattatctttccccttaatatgttcaaatataactttatagccgtttcctgttataatatcttcaaataaaacccatcttctagttgagcttttcttgctatttagctgattatagcacctacaaatggcttcacaatcggttctaaccgtgaattctttaaatcctaagtacaacctaagggcattgattgcattgattattgccatgatctctctatctgtattattgacagtttttaatttataacttccagaagcatatctacatattttttcttctaatttagcggaaaatttagtaggtctttgctttaatatagcaccccaaccgtgttgtaatgcatcagtttcaatgataaagtaactttcttctaatggtaattctagaggttttaattctttcaccctctcttttattaatcttactaatttaatgtcttcagaattaaaatatctctgaccattttttcttaatttagcatataacggtcctgctaactttgctaaattattgatgtgatttctagcataatttacaagtcctaagaattgttgtaatttctttttatcattcatagcataaagaaattgtaaaattttcttagcaatatgttcttgcaaatgaattttgccctctcctatttcatgtccaaggaagttaattttttctttgcatatttccattttctttttggataatattaacccattttgttccacctttctaaaaaatatttcaagatgagcaatatgttctttgtaagtccttgagaagactaacaggtcatctatgtagactaatatgaattcttggttttcgttaaatatattctgcattttcctttggaaaattgctggtgcattttttaatcctaatggcataacaagccattcataatgtccttgaggacatgtaaatgcagtccattctatagattcttctgccatctttacttgccagaatccaactttcaagtcaaattttgagaaatatttactaccttgtattctattaatccattcttgcttatttgggatattataggcatcttctatagtattatcatttagtcttttataatttatgaccatcctagatttacctctaacttcttctgcatgatttcttactatgaacgctgcagacctatgtggacttctgctttctcttatggctcctagtttcaacagttcttctatatgcatcttaaattcttctatgtctttcggagttgcttctattgggctagtcttaataatatatttaagctcatattcattaattctttcttcagactcaagattaggtacttctaagttgtcgagtttgggggaggttccaccacgctttcgtacctctgagatatatggaacattattttgatatgggataaaagtaattccttgctcatgtattactgtggtttgtactgattgttgaaggaaccttttctttgttctaatattattgttgtttctattttgatgtttataaatccttttacttctaggcttgtcttctccatatgacaagggtatttgaactattttattgcagaaattgtaatcagagtgtttcatagatctttgggcttggatacccgtgcatatttttcttagttgcttaaacacaaaagttatggcttgcgagatgttgatttcagctccttcagtttcctttttatattcttcaaatatcatacttcctagtgggtcaggtaatttattgaaataacgttcaactattcccctgttatatccttgtttagcagttgtagcattatataaataatgttgggagaattcttttatgcctttcaaacttgttaacgttaatttttctatttcttttaacctttcattctgcaaagttgtataacctaattccgaatcttcagctataataatgttagatataacatttgaaaaattatacggattgctaccagctcttttcaattcttcataattattaggattcttttcaacccattgttcccatagaaccttagcagattcaccttctccatatctttttctctttcctgttactaagtccacttccatagcttccattgcattatcaagattatgtaatccttggtgaatatatttataccctgaatactttaatccattttcaaattccttggctacaatttttaactcaactggctttgttaaaacgcttaactctacttctctagatattctgtataacccatttttattctcaaaaaatcccatgcaatatatttgttgaggtcttattgccctcagagtatctctttgatatctttcgagcagtttgtctacttctgcaatatcttcaagctcatctatgtcttcatttttacctttttgtttctcaatacaacttaaagatttatcgtctctgcttgctattcttctaaacaaactcctagataggtccat

SEQ ID NO: 74773 - DNA, 1791 bp, Oryza sativa
  Clone ID: PAT_MRT4530_74926C.1
atggaggataaggtgctacccgagtggtatagtaaagaagataacggtgagtacctctcgctcttcctcgagctggtccgcgaatccacttccaacaatgtcagggccatttttgacgccttcttggtggaaaaagacgacgagccatcttccacccacgcagacaggggcgtgcatgttcacccaaccaatggctataccgcatggggatggccacagttcgtgaagcgaagcgatctcgagtcgtcgtcgtcgtcgtacgtggtggatggcaaggtcagaatcatgtgtgtggtcatcgtcatacgagacaacaccgtgcccgtgccaccgtctgacattggtgcccatctcggtggcctgctggaccgcggggaagggacggatgtctccttcctcgtcgacggcgagacgttcccggctcaccgtgccgtgctcgccgcccgctcgccggtgttccgtgccgagctccttggttccatggcggagtccaagatgtcctccatcactttacacgacatcgagcctttgacgttcagagctctacttcggttcatctacaccgacaagttgcctgccgacgacggcggtgatcagctcaagatggcagcaatggcgaccgatgagctattccagaaattgcttgcagctgctgataggtatgatttgagcaggttaaagttgatgtgtgcgcagaagctatgggaggcagtgtcagtggacacggttgcgacgacattgatccacgctgagatgcatggttgcccagagctgaagagtagctgtcttgacttcttcgtgcaggacaagaacttcaaggagaccgtgctaactgagggctatgtgcaattggtgcagcgttttccctcgattaaggatgagatcagaggtcgcaccgaaaggaagaagggcggaggctgcctgctagcggggagaagggcgaggcgcggcaaccatcgggttgggaagctggcgagcatgcgcggagagagggaggaggcggggaggccgatgaatgggacggggaggccggcgagggggcgaggaggccgacgagtgggatggggaggccggcgagcatgcgaggagagggagaaggcggggaaaagggcggagggtgatagccatcgggtggggaggccgatgaacgggacggggaggtcggcgtgcgcgcgaggagagggagaaggcggggaaaagggtggagggcgacagccatcgttgcacggagggggaggaggcggggaggccctcagcgcgtcgatcctggtggcctcaactccccgcgtcttcacccgcgacgccgccggtagtctccatcctgacaacagcgacgctgccggtgtccatcctactgcttctgccacacccttgataatgggtgctagaaagctatgtgtagctttggtctttgggctgctggcagcagacgtgatggtaacaagcatattgaaggggtcgtttgttttgatgttggtgcccaaaagctttgaatctgaccacgcaagggttcgtggccagcaacaaccgaaagtttgccaagggcttatggccggcaacaccgcaacaggagactgccagactggagacggggagaggcgtgtgaggctcagagaggcttgggcgttcaggcgttggcgattagaggatagaggcggccctggcgtgccggtggccagccggccactcggccaggcgcccggcgacctggcgccatcgacgcggagagccggagaggagacacgtcgcggtcgcggagttagggagtcactcgtggaagcggaatcgtga

SEQ ID NO: 74774 - DNA, 469 bp, Oryza sativa
  Clone ID: PAT_MRT4530_74927C.1
ttttttttttttttttttttttttttttttttttttttttttttttttttttttttttttttttttttttttttaaaaacccaaaaaccccggtttttggaagccccccaaaaactttttttaagggggatcccttataacaatggtgataaaaccccctttggaaaggggggccattatccccaggatgggacaagtcccctaggtgccgccttttttgggggattacacaaaaaccccccaacccccttccccaaaaaacaaaaaaaaaggggctttttttaatggccaatgaacaattttgtaatagggggggcctgccccccaatcgaaatgggatgaaaattttttttggggggaatttcttttttttccctttcccttttttttaaacttttcccacacaaaagcaatttaccaaaatctcccaaaaatggaacaacccgtaccaccccgtaaacttgggaag

SEQ ID NO: 74775 - DNA, 3243 bp, Oryza sativa
  Clone ID: PAT_MRT4530_74928C.1
atggacatatctaggagtctctttagaagaatagcaagcagagatgataactgttctgataaacaaaaaggcaaatatgatgacatagatgagctgaaagatgttgcacaagtagataagcagctcgaaagatatcaacgagatactttaagggcaataaggcctcaacaagtatactgcatgggattttttgagaataagaatgggctttatagaatatctagagaagtagaattaagtgttctaacaaagccagtagaattaaaaatagtagctaaagaatttgaaaatagtttaaaatattcaggatataagtatattcaccaagaatcatctgacagagatattatagataacagaagacatagtatatctgaattgatggaaaaattagaccatgaaagtgaaataaaatattatgaagataaattaagagatatagcagatgaatataataactctatgaaaaagaactatccaggattaagaaacaaaaaaaaagagaaaagcttggccatagaaacccccagaacccaggaaattaaaatagaacaaataaagtcagaagaaccaagagaagaaatccaaaagttagataaggtattaagtgaggaagagcaatgggaagtaaatgagaaattattactagagagttatgaagaagaaaacaacctgatagaggaaatagagaatatagaagaagaagataatgcagaacaatataatgattttatagactcattggatgaggaaggaaaaaggaaaagatacggagagggttctgtaaaaaatgaaggagaaagagaaagaccagccagggcagcaggaagatggcctccagaaaaagaagaatattcatatcattatatcccaggacagtataggcacatgggcactaaaagaagagattttgagaaaccaataaaatttcaaaatcaaaaaagtgatggggctatactaaatctagcagcacatgatcccatagactggccaaatatcattagtatttggaaggggttaatagttcaaaaatacatacaaaatcagcataatatagggaataaggtggaggatatgataacttatttagaaacatttttgggtgaatctgctaaagtcctatgggaacaatgggttgaaaagaatcctaataactacgaagagctaaaaagagcaggaagtaatcctcacaactttgcaaatatagtatctaatattatcatagctgaagacccagaattaggatatacaaccctgcaaaatgaaagattaaaagaaatagaaaaattaactttaacaagctggaaagagtgcataggattacaagcatttgcaccaaattggtatagggatattaagtctaaaaaggatatagaaaaaattgttcaaagattagaggatatccaaattataggagaaattcctatgaaatattgggagaaaaatgctatcgagtgtaaaattaatataataaacccagaatatattattaagaccagcccaatagaagcaactccgaaagatatagaagaatttaagatgcatatagaagaactgctgaaactaggagcaataagagagagtagaagtccacataggtctgcagcatttatagtaagaaatcatgcggaagaagttagaggtaaatctaggatggtcataaattataaaaggctaaatgataatactatagaagatgcctataatatcccaaataagcaagaatggattaataggatacaaggtagcaaatatttctcgaaatttgacttaaaaactgggttttggcaagtaaaaatggcagaagagtctatagaatggactgcattcacctgtccccagggacactatgaatggctagtaatgccactaggattaaaaaatgcacctgccctatttcaaagaaaaatgcaaaacatttttaacgataatcaagaatttgtgttagtatatatagatgacttgttaatattttcaaaaacttataaggatcatattgctcacctagaattattttttagaaaggttgagcaaaatggtttaatcctatcaaaaaagaagatggagatatacaaagaaaaagttaacttccttggacatgaaataggagaaggcaaaattcatttgcaagaacatattgctaagaaaattttacaatttcctgatgctatgaatgacaaaaagaaattacagcaattcctaggacttgtaaattatgctagaaatcacatcaacaatttagcaaagctagcaggacctttatatgctaaattaagaaaaaatggtcagaaatattttaattctgaagacattaaattagtaagattaataaaagaaaaagtgaaagaactaaaacctctagaattaccattagaagaaagttactttatcattgaaaccgatgcatcacaacaaggtatgaaaagatcaatgaattacgccggagtcgagtgcttcacatttggagatgacaacaaactcagaatattcccaccaaattcatataaatttaagccaaaggaccatataatcctagatgaagttcaagagtgcatcttggataatttctggtaccaatacaataataaaagggaagaaaaagggtatttgttatcaatattgaatagcctctctgaatattttcacctaataaatgggtcattaatgcctgccaatgaagatcatgaagtaatccaacaaaagcctatatatgtagtatttgatggaaagctccctggggtctacatttcttttgaagaaattgtggctcaaaaaatagatgctaaattaatgggaggaatatcttggaagaaatataaggatattgatgaagcattaagccaagctagaaaaatattaggaataaattattatctagagcctgctgcaaaagaatatattcaaaaatgcaaaaaagctaaaggaaagaagacttcagaaatacccgttaagatgactataaaagaagaagggttttttaaaaaacccacatacaaggaatgcttaacaaaaggagtggatccattagatggggaatatattgattggaagataatagaaaaatttgaagaagcctccccacagttaaagaaggaattgaaggaagaaatacttaaagaattaaaacaagaaatggatcagaaatttgagcaaataaaaaaggcagtagatgagaaattagaagtttctttttctgatttggacacaatggatcttggtggccatgggcaaccagatgaataa

SEQ ID NO: 74776 - DNA, 750 bp, Oryza sativa
  Clone ID: PAT_MRT4530_74929C.1
atggagatatgcaaagaaaaagttaacttccttggacatgaaataggagaaggcaaaattcatttgcaagaacatattgctaagaaaattttacaatttcctgatgctatgaatgacaaaaagaaattacagcaattcctaggacttgtaaattatgctagaaatcacatcaacaatttagcaaagctagcaggacctttatacgctaaattaagaaaaaatgtatttgatggaaagctccctggggtctacatttcttttgaagaaattgtggctcaaaaaatagatgctaaattaatgggaggaatatcttggaagaaatataaggatattgatgaagcattaagccaagctagaaaaatattaggaataaattattatctagagcctgctgcaaaagaatatattcaaaaatgcaaaaaagctaaaggaaagaagacttcagaaatacccattaagatgactataaaagaagaagggttttttaaaaaacccacatacaaggaatgcttaacaaaaggagtggatccattagatggggaatatattgattggaagataatagaaaaatttgaagaagcctccccacagttaaagaaggaattgaaggaagaaatacttaaagagttaaaacaagaaatagatcagaaatttgagcaaataaaaaaggcagtagatgagaaattagaagtttctttttctgatttggacacaatggatcttggtggccatgggcaaccagatgaataa

SEQ ID NO: 74777 - DNA, 4119 bp, Oryza sativa
  Clone ID: PAT_MRT4530_7492C.1
atggcggggagggcggcgacgtggggacgtggagtgggggcgtggcgtggagcagagaaggcggcgacgcggacggtttcggcggcggttgccgtcgtggggcgggcggctagaggaaggggacgacctgacaggttgagctgcatcggtttcaatcttcaacaagagaaatacaaagtgaaggtagttgctgatgttcctgggaccagttcttctaaagatggagaagggaaacaagctccaaatggctcggctcagtcgagtgataaaggtgctatagatggttctcaaggagaccaaggtgacggctctcaaggagtgcaaggtgttcaaggtgatggtgctcagggagttcaaggtgaaggccttaatcaaggcagcaatgtggcacagttgcagttcaataacttccaagatcaggttgactatgttgtgcaccatgctttgatcaatcagtctggaatattagtcaacactttgtcaaacatggtgaagtcgatggttgatggttcaatagctgaatatcaagctacgggaccagtttatctgcaaggagcaacagtagattcagcaaacgccaccaaggcaacaggttgtacagccgattcagcaaacacctccgatccaacaggttgtgcagccaattcagtagacgccaccaggacgacaggttttgcaaccaattcagcaagcgccattaaggcaacaggtcattcagccgattcaacagcaaggcttgatgaatgcatcggctgggttccagacttttcaaagttctcaaggcaagatagtacatcgacttatgaagacatcaaccgatttttggccaagtgcggtgaagcatcggctgtggacgccttaagggttaggttgttccaattatccttgtctggatcggcctttacttggttttcctctttaccatatggatcaattaatagttgggccgatttagagaagcaatttcatagctatttctacagtgggattcatgagatgaaattgtctgatctaatagcgatcaagcaaagatatgatgagcctgtgcatgagtatattcagaggtttcgagagatgaggaataagtgctacagcttgagtttgactgatgcccaattagccgatttggcttttcaggaggtttgcagaagccatgaagaactcaagaaggttaaccatgtctgtccttacatatatgggtcggataatgatgatgatgatgattctgaaatagcagcagccgagtgggtaagaagcaaaaaagttataccatgccaatgggtgaagaattctggaaaagaggagaggtatgactttgatattaccaaggctgacaagatttttgatttgctactccgagagaagcagattcaacttcccgctggtcacacaattccgtcggctgaagaattgggcaagaagaggtactgcaaatggcataattccgggtctcatactaccaacgattgcaaagtctttaggcagcagattcaagcggctattgagggaggcaagatcaaatttgatgattctaagaagccgatgaaggttgatggcaatccttttcctgtcaatatggtgcatacagctggccgaacagccgatggaggtcgtgcaagaggttttcagggttgggagttccttagattttgttggaatgaaggtatgagactgccatctatcgaggactgtcccggatgcagtgatattgcggagagctcgagccgatcgtatagtacgggcaatcggctgaggcaaacaagagttcctgttcatcaaagattgggtcccgtgaaccaagatcgtggccaggaggacaatgaaaacatgaaaactcaattgtgtccttctgaacaagcagtctttgagaagcctcaggggacagagaatcggcatcttaaaccattgtatataaatggctatgtcaatgggaagccgatgtctaagatgatggtcgatggtggggctgcggtaaatttgatgccttatgctacgttcaggaagttgggcagaaacgctgaagatctcatcaagacaaaaatggtgctcaaagactttggtggcaatccatcggaaaccaaaggggttctaaatgtggagctgacagtcggcagcaaaactatccctaccacattttttgtcgtcgatgggaagggttcttacagtttgttgcatggaagggattggattcatgccaattgtggtattccttcaaccatgcatcaatgcttgattcaatggcaaggcgacaagattgagatcgtgccagccgacaggccagtcaatgttgccagtgccgatttagctctttgggagatggatggtctcaattgcttatctggaaaagtttgggatggagattttttaaaaatggaaaacccaagctattattttgaggatgtcatggagggttcaaatgtctacaccaaggacaaagtagatgatctcgatgacaaacaaggacagggcttcatgtcggccgatgatttggaagaaattgatataggtccaggtgatcgaccgaggccgacatttattaagattgcttcgcttgagataactcaaaggagtgttaatgcaatcaagaagattcagcctccggtgaacaagacagaactacaagagatgatcggcaagataaattttgttagaaggtttatttctaatttgtctggacggttaatgcattatctattgtccaatgaatgcactgtcatatgcaaagccgatgttgttaaatatatgttatcggctccaattttgaaaggaagggttggaaaatggatattttccttaactgagtttgatcttcggtatgagtcaccgaaggcgatcaaagggcaagctatagccgatttcattgttgatcatcatgatgattcaatcggctcagttgagattgtgccatggactttattctttgatggatcattgttcaaggaagttgaagccgatgctattgaaatcatgggggattctttgctagtaatcagtcaattggcaggagaatatgagtgcaagaatgatacattgatggtttataatgaaaagtgccaagaactgatgaagggatttcggctggttactttgaagcatgtatctcgagagcagaatattgaagctaatgatttggctcaaggggcatcagggtattacaaaggatgtcaagattgtcagaaatttgaagcgattcagcgagcaccggcgtcggctatgaatcctatcattaaaccatggccatttagaggttggggaattgatatgatcaggatgattaatccaccatcaagtaaaggacataagtttatattggtggcaaccgattatttcaccaagtgggtagaggcaattcctttgaagaaggttgattctggggatgctatacaatttgttcaagagcatataatctatcgatttggtattcctcaaaccattacaactgatcaaggttcgattttcatgtccgatgagtttgttcagtttgccgatagcatgggtatcaaattgttgaattcttcaccatattatgcgcaaactaatgggcaagccgaggcttctaataagagcttgattaagttgattaagagaaaaattcctgattatcctcggcaatggcatactcgtctagccgaagcatatcggatggcttgtcatggatcgatccaagtccctccctataagcctatttatggacatgaggctgtcttgccatgggaagttagaatcggctcgagaagaacggagttgcaagatgatttgacagccgatgagtattataatcttatggctgatgaaatagaggatttggttcaatcacggatgcgagcccttgcaaaggttactagggataaggaacgaattactcggcattataataagaaagtggtgcccaaagatttttcggaaggagaacttgtgtggaagttgattttgccgattgggactcgggatagcaaattcagcaagtggtcgccgaattgggaaggaccgttccaaatctataaagttgtatctaagggagcttacatgttgcaaggactcgatggagaagtttatggcagagcgctaaatggcaagtacttgaagaaatattacccaagtgtttgggttaatgcatga

SEQ ID NO: 74778 - DNA, 132 bp, Oryza sativa
  Clone ID: PAT_MRT4530_74930C.1
atggttttgaaggtcgcgctcatgacaattaagaaccgactgagaagtggcgagaagtccgtgggggtcgctggggagtccattgcctctggttttgagggggaggttatgatccaggaatggtgcactgtg

SEQ ID NO: 74779 - DNA, 303 bp, Oryza sativa
  Clone ID: PAT_MRT4530_74931C.1
atgcgccctgagctcctgcacatgattcccacatatgtcccagtggctggcctcatcctattgctcatccgcaaggcccccaaacgttgtcgcattggtggtgactgggttcttgcatcaggcatttgcgagaaacaaactatcaaggacaaaggtttcctcgatagttttaccactgtaggcgagggctttctgcgacatgctgttcgattgattggccaagattgcgatgtgctaacgccagtgccagagcagagcacggagagcccgaaagccatgctcaccaatcagactgtagattga

SEQ ID NO: 74780 - DNA, 1467 bp, Oryza sativa
  Clone ID: PAT_MRT4530_74932C.1
atggctatgagcttgagacaagaggtacgaaagcgtggtggaacctcccccaaactcgacaacttagaagtacctaatcttgagtctgaagaaagaattaatgaatatgagcttagtgagaatatagacaactattatatatcaaattctaatatagagtgcataggattacaagcatttgcaccaaattggtatagggatattaagtctaaaagggatatagaaaaaattattcaaagattagaagatatccaaattataggagaaattcctatgaaatattggaaaaaaaatgctattgagtgcaaaattaatataataaacccagagtatattattaagactagcccaatagaagcaactccgaaagacatagaagaatttaagatgcatatagaagaactgttgaaactaggagccataagagaaagcagaagtccacataggtctgcagcgttcatagtaagaaatcatgcagaagaagttagaggagagggcaaaattcatttgcaagaacatattgctaagaaaattttacaatttcctgatgctatgaatgataaaaagaaattacaacaattcttaggacttgtaaattatgctagaaatcacatcaataatttagcaaagttaggaggaccgttatatgctaaattaagaaaaaatgatagagagatcatggcaataatcaatgcaatcaatgcctttaggttgtacttaggatttaaagaattcacggttagaatcgattgtgaagccatttgtaggtactataatcagctaaatagcaagaaaagctcaactagaagatgggttttatttgaagatattataacaggaaacggctataaagttatatttgaacatattaaggggaaagataataatttgcctgacatgctttctcgtttatctgaattacagaagcctatatatgtcgtatttgatggaaagctcccaggggtctatgtatcttttgaagaaattgtggcccaaaagatagatgctaaattaataggaggaatatcttggaagaaatataaagacatcgatgaagcactaagccaggctagaaaaatactaggaataaattattatctagagcttgctgcaaaagaatatattcaaaaatgcaaaaaagctaaaggaaagaagactccagaaatacccattaaaacgactataaaagaagaagggtattctaaaaaacccacatacaaggaatgcctaacaaaaggagtggatccattagatggggaatatattcattggaaaataatagaaaaatttgaagaagcctccccacaattaaagaaggaattaaaggaagaaatacttaaagaattaaaacaagaaatggatcagaaatttgaacaaatgaaaaaggcagtagatgagaaattagaagtttctttttctgatctggacactatggatcttggtggtcatgggcaaccagatgaatag

SEQ ID NO: 74781 - DNA, 4371 bp, Oryza sativa
  Clone ID: PAT_MRT4530_74933C.1
ttattcatctggttgcccatggccaccaagatccattgtgtccaaatcagaaaaagaaacttctaatttctcatctattgccttttttatttgctcaaatttctgatccatttcttgttttaattctttaagtatttcttccttcaattccttctttaactgtggggaggcttcttcaaatttttctattatcttccaatcaatatattccccatctaatggatccactccttttgttaagcattccttgtatgtgggttttttaaaaaacccttcttcttttatagtcatcttaatgggtatttctgaagtcttctttcctttagcttttttgcatttttgaatatattcttttgcagcaggctctagataataatttattcctaatatttttctagcctgagttaaagcttcatcaaaatctatatattttttccatgacaatccacccattaattttgcatctattttttgggctactatctcttcaaaagatatgtacactccaggaagctttccgtcaaaaacaacatatatgggtttttgcggtatcacttcattattttctgatgttggcattatatcattcattagatggaaatattcagcaagactgtttaatattgatagcatatagcctttttcttccctcttattattgtattgataccagaaattatctaaaatgcattcttggacttcatctaatattatgtgggtttttggcttaaacttataggtattcggtgggaatactttgagcttattgtcttctccaaacgtgaagaactcaattccattataattcatggacttcttcattccattttttcttaatttagcatataacggtcctgctaactttgctaaattattgatgtgatttctagcataatttacaagccctaagaattgctgtaatttctttttatcattcatagcatcaggaaattctaaaattttcttagcaatatgttcttgcaaatgaattttgccctctcctatttcatgtccaaggaaattaattttttctttgcatatttccattttctttttggataatattaacccattttgttccacctttctaaaaaatatttcaagatgagcaatatgttctttgtaagtccttgagaagactaacaggtcatctatgtggactaatatgaattcttggttttcgttaaatatattctgcattttcctttggaaaattgctggtgcattttttaatcctaatggcataacaagccattcataatgtccttgaggacatgtaaatgcagtccattctatagattcttctgccatctttatttgccagaatccagctttcaagtcaaattttgagaaatatttactaccttgtattctattaatccattcttgcttatttggaatattataggcatcttctatagtattatcatttagtcttttataatttatgaccatcctagatttacctctaacttcttctgcatgatttcttactatgaatgctgcagacctgtgtggacttctgctctctcttatggctcctagtttcaacagttcttctatatgcattttaaattcttctatgtctttcggagttgcctctattgggctagtcttaatgatatattctgggttgattatattaattttacactcaatagcatttttctcccaatatttcataggaatttctcctataatttggatatcttctaatctttgaataattttttctatatcccttttagacttaatatctctataccaatttggtgcaaatgattgtagtcctatgcattctatattggaatttgatatataatagttgtctatattcttactaagctcatattcattaattctttcttcaggctcgagattgggtacttctaagttgtcgagtttgggggagattccaccacgctttcgtacctctgaaatatatggaatattattttgatatgggataaaagtaattccttgctcatgtattactgtggtttgtactgattgttgaaggaaccttaggccaattattatgtcatcattaatcattgacaaatctcttattgtaatctcatctattatatatttagttgcattaatgtaaacctccatattataagctaactgattatgaattttctttattccggacatgtctgtggaaacttctgccttattgtcgtcaattgtgtgaactatttcaggacatctttgggcttgtattcctgtgcatatttttcttaattgtttgaacacgaaggttatggcttgggaaatattaatttcagctccttcagtttcctttttatattcctcaaaaatcatactacctaatgggtcaggtagtttattaaaatatcgctcaactattcccttattgtatccttgcttagcagttgtagcattatataaataatgttgggagaattcttttatgcctttccaacttgttaacgttaatttttctatttcttttaacctttcattttgcaaagttgtataacctaattccggatcttcagctatgataatattagatactacatttgcaaaattatgcggattgctaccagctcttttcaattcttcataattattaggattcttttcaacccattgttcccatagaatcttagcagattcacctaagaatgtttctaagtaggttatcatatcttcaactttacttcctatattgtgctggttttgaatatatttttgaactattaaacctttccaaatactaataatattaggccaatcaatagggtcatgtgcggctaaatttaatatagcaccatcactcctctggttttgaaatttaacaggcttctcaaagtctcttctctttgtacccatatgcctatattgacctggtatatagttatatgaaaattcttctctatcagggggccattttcctgctgccctagctggtctttctctttctccttcgtttttcacagtaccttctccatatctttttctctttcctgttcctaagtccacttccatagcttccattgcattatcaagattatgtaaccctacttcatctaatgtgtttataaaatcattatattgttctgtattgtctatttcattttctatattctccatctcatttattagattaatttcttcttcataactttcaagaaataatctttcattctctgcccattgctcttcttcacttaaaattttaccaagattttgctcttctttgtcatgcttatcttgctcttggtttttaaaaatttctactgccatatcttcattcttctttactttctttactctagctaattctctatagaaataaagttctttatctcttattttaggccactcacacttcatagagttattatattcttcatttatttcctttaatttattttcgtaatattttatctcactttcttgatctaatttttccataaactctgaaacactatgtcttctattatctattatatttctatcagatgcttctgtttctaagtcatctgtggttctgggtttgtaatttataaatctaatgctggtatttcctttactattttgataacttatataattttcaggctgactcaaagttttgctttcaattaaatcactaattttccattcttctcctgccctttcttcagaacttatttttagagggctcatgaaagttattcccttagagtgcatattttcaatcacgtcatttacatttattttgtatttggaggcacttctattagttaatcttcctataaattctatgcttactagcaaatttgttcctttaaattcttcgtatccctttgtttgaaaaccaaaactcattttatctataaattcttttataggcatcattagatctggggctatatatgttatcaacatattctcattcatgtcaccttctaaaaatcctaatgctgctttatctattgtgtcccaccttttatctaacagagttattagaactttagctcctaatttctttcttgtcatacctttgattcctattatatacataccttggtgaatatatttataccctgaatactttaatccattttcaaattccttggctacaatttttagctcaactggctttgttaaaacgcttaactctacttctctagatattctatataacccatttttattctcaaaaaatcccatgcaatatatttgttgaggtcttattgcccttaaagtatctcgttgatatctttcgagctgtttgtctacttctgcaatatcttcaagctcatctatgtcttcatttttacctttttgtttatcagaacagttatcatctctgcttgctattcttctaaagagactcctagatatgtccat

SEQ ID NO: 74782 - DNA, 1269 bp, Oryza sativa
  Clone ID: PAT_MRT4530_74934C.1
atgtctgaattctcgctttgtttgacgaccaggtcgttccgtagcgaagttggaatccgaccatcacggcctttcctggcagatcgggagctctacagtgttgatgaagttcttacttttgggtatgcgtttagcaacgtggtgggaatgttggggaaagcacatttattagagttttgtgctggatgcgtaaaagatgtggatatcaacttaccaaatgttgaaatacccgagccttttttattactggatgtcgttctaccagatctagtcaattatacatgattgcttaagtgcttaaacaaataacttaattagtgtcactttgctaataaattgaagtgtcttaaaatcccatgtacttactgaatatctgtcttcaatgttgtacccgctccgaaagaaattcgtgaaaatatcgttgtatattattatttaatgtttggtggtgtgcatacagcactagtactattattctttagtgtattgtgcttttctacccgttgtcgtactaatagtgatataaattacatgcttgagattggtggaaactcatatgcaaattccatttatgagtcttttcttccaaaagatcacccaaaacccaagatggattcaactatggaatataggactaaatttataagagccaagtatgagacacaagattttttgaagccaagtttgcgcattacatcaaagggttcttttgatgcgaccaatgctgtgaagagtgtaactagcagtatctctagcgcttcagggaagcatgtcgctgacgatacaagagaatttgttggagagctgaacattacagtggtaagaggtattcagttggccgtcagagacatgctaacgagcgatccatatgttgttctaacacttggggagcagaaagctcaaaccactgttaaaccgagtgacttgaacccagtatggaatgaggtgcttaagatatcaattcctcgaaattatggacctcttaaacttgaagtatacgaccatgatacgttctctgctgatgatatcatgggggaagcggagatagatcttcaaccaatgatcacagccgtcatggcctttggagatccctcgcgtgttggtgacatgcaaattggaaggtggttcatgaccaaagacaatgccctggtgaaagatagcactgtcaatgttgtgtcgggcaaggtaaaacaggaagtgcacctaaagttgcagaatgtagaatcaggtgagatggagttagaactggaatgggttccaataccctag

SEQ ID NO: 74783 - DNA, 4561 bp, Oryza sativa
  Clone ID: PAT_MRT4530_74935C.1
ttattcatctggttgcccatggccaccaagatccattgtgtccaaatcagaaaaagaaacttctaatttctcatctactgccttttttatttgctcaaatttctgatccatttcttgttttaattctttaagtatttcttccttcaattccttctttaactgtggggaggcttcttcaaatttttctattatcttccaatcaatatattccccatctaatggatccactccttttgttaagcattccttgtatgtgggttttttaaaaaacccttcttcttttatagtcatcttaatgggtatttctgaagtcttctttcctttagcttttttgcatttttgaatatattcttttgcagcaggctctagataataatttattcctaatatttttctagcttggcttaatgcttcatcaatatccttatatttcttccaagatattcctcccattaatttagcatcctttttcttcccttttattattgtattggtaccagaaattatccaagatgcactcttgaacttcatctgaaatatggttaaacgagaaagcatgtcaggtaaactattatctttccccttaatatgttcaaatataactctataaccatttcctgtaataatatcttcaaataaaatccatcttctagttgagcttttcttgctattaagctggttataatatctacagatggcttcacaatcagttctaaccgtgaattctttaaaccctaggtataacctaaaggcattaattgcattgataattgccatgatctctctatctgtattattgacagtttttaatttataacttccagaagcatacctacatattttttcttctgatttagcggaaaatttagtaggtctttgctttaatatagcaccccaaccttgttgtgatgcatcggtttcaatgataaagtaactttcttctaatggtaattctagaggttttagttctttcactttttcttttattaatcttactaatttaatgtcttcagaattaaaatatttctgaccattttttcttaatttagcatataaaggtcctgctagctttgctaaattgttgatgtgatttctagcataatttacaagtcctaggaattgctgtaatttctttttgtcattcatagcatcaggaaattgtaaaattttcttagcaatatgttcttgcaaatgaattttgccttctcctatttcatgtccaaggaagttaactttttctttgcatatctccatcttcttttttgataggattaaaccattttgctcaacctttctaaaaaataattctaggtgagcaatatgatccttataagtttttgaaaatattaacaagtcatctatatatactaacacaaattcttgattatcgttaaaaatgttttgcatttttctttgaaatagggcaggtgcattttttaatcctagtggcattactagccattcatagtgtccctggggacaggtgaatgcagtccattctatagactcttctgccatttttacttgccaaaacccagcttttaagtcaaatttcgagaaatatttgctaccttgtatcctattaatccattcttgcttatttgggatattataggcatcttctatagtattatcatttagccttttataatttatgaccatcctagatttacctctaacttcttccgcatgatttcttactataaatgctgcagacctatgtggacttctactctctcttattgctcctagtttcagcagttcttctatatgcatcttaaattcttctatatctttcggagttgcttctattgggctggtcttaataatatattctgggtttattatattaattttacactcgatagcatttttctcccaatatttcataggaatttctcctataatttggatatcctctaatctttgaacaattttttctatatcctttttagacttaatatccctataccaatttggtgtaaatgcttgtaatcctatgcactctatattggaatttgatatataatagatgtctatattctcactaagttcatattcattaattctttcttcagactcaaggttgagtgcttcaaggttgttgggtttgattctggctccaccacgctttcgtacctctgagatacatatatatatatatacatacatacatatatatacatacatatatatgtatatatatacatacatatatatacatacatatatatgtatatatatatacatatatatacatatgtatatatatatatattgatgtgataatagcatatattcgtcaattaaatctaactcttcatcggatgattcatattcttcgttgatagtttcaacttcgtctgtttctatgatagaatatattgattcgtcatcttttatttcatcatgtccagtacgtgaatgagtctcccccaaactcgacaacttagaagtacccaatcttgagcctgaagaaagaattaatgaatatgagcttagtgagaatatagacaactattatatatcaaattccaacatagagtgcataggactacggctgtattcggctaattactattcaaaaacactattcagtttattgtttaaattactgttcaatactgttcacttcgagagatattttaactttaggatctttgcagggtggcgaatcctatttagacagcctcagaagcttgcttcggatgatgtaaagtccgagtgactagcccaatagaagcaactccgaaagacatagaagaatttaagatgcatatagaagaactgttgaaactaggagccataagagagagcagaagtccacacaggtctgcagcattcatagtaagaaatcatgcagaagaagttagaggtaaatctaggatggtcataaattataaaagactaaatgataatactatagaagatgcctataatatcccaaataagcaagaatggattaatagaatacaaggtagtaaatatttctcaaaatttgacttgaaagctggattctggcaagtaaagatggcagaagaatctatagaatggactgcatttacatgtcctcaaaggacattatgaatggcttgttatgccattaggattaaaaaatgcaccagcaattttccaaaggaaaatgcagaatatatttaacgaaaaccaagaattcatattagtttacatagatgacctgttagtcttctcaaggacttacaaagaacatattgctcatcttgaaatattttttagaaaggtggaacaaaatgggttaatattatccaaaaagaaaatggaaatatgcaaagaaaaaattaactttcttggacatgaaataggagagggcaaaattcatttgcaagaacatattgctaagaaaattttacaattccctgatgctatgaatgataaaaagaaattacagcaattcttaggacttgtaaattatgctagaaatcacatcaataatttagcaaagttagcaggaccgttatatgctaaattaagaaaaaatggtcagagatattttaattctgaagacattaaattagtaagattaataaaagagagggtgaaagaattaaaacctctagaattatcattagaagaaagttactttatcattgaaactgatgcatcacaacacggttggggtgctatattaaagcaaagacctactaaattttccgctaaatcagaagaaaaaatatgtagatatgcttctggaaattataaattaaaaactgtcaataatacagatagagagatcatggcaataatcaatgcaatcaatgcctttaggttgtacttaggatttaaagaattcacggttagaaccgattgtgaagccatttgtaggtactataatcagctaaatagcaagaaaaactcaactagaagatgggttttatttgaagatattataacaggaaacggctataaagttatatttgaacatattaaggggaaagataataatttgcctgaaatgctttctcgtttacctgaattgcagaagcctatatatgtcgtatttgatggaaagctcccaggggtctatatatcttttgaagaaattgtggcccaaaagatagatgctaaattaattggaggaatatcttggaagaaatataaagacattgatgaagcactaagccaggctagaaaaatactaggaataaattattatctagagcctgctgcaaaagaatatattcaaaaatgcaaaaaagctaaaggaaagaagactccagaaatacccattaaaacgactataaaagaagaagggtattctaaaaaacccacatacaaggaatgcctaacaaaaggagtggatctattagatggggaatatattgattggaaaataatagaaaaatttgaagaagcctccccacaattaaagaaagaattaaaggaagaaatacttaaagaattaaaacaagaaatggatcagaaatttgaacaaataaaaaaggcagtagatgagagattagaagtttccttttctgatctggacactatggatcttggtggtcaagggcaaccagatgaatag

SEQ ID NO: 74784 - DNA, 353 bp, Oryza sativa
  Clone ID: PAT_MRT4530_74936C.1
ctctagaatccccttcaatagttcgaccgaggccctcgccggcgccggcgccgccacgcccatctccatccccgaccaccacttcttctccggcgagctcgcctcgggagacgaatccgcagctccagaggcagagaatcgaatgctactaccacccgtgaaaggtacggtgtgtcgtgtaccgccttgaaatcttagctggttcgccggtgatcatgccgtgaagccgccgccgcaggcatcttcccggcgagcgagttggtaggggcgcttccactcgcgtagctacgaatcttggccttcccggcggcgattggatggtgcccctgaccctgaggtgaattccaagaaga

SEQ ID NO: 74785 - DNA, 4341 bp, Oryza sativa
  Clone ID: PAT_MRT4530_74937C.1
ttattcatctggttgcccatggccaccaagatccattgtgtccaaatcagaaaaagaaacttctaatttctcatctactgccttttttatttgctcgaatttctgatccatttcttgttttaattctttaagtatttcttccttcaattccttctttaattgtggggaggcttcttcaaatttttctattatcttccaatcaatatattccccatctaatggatccactccttttgttaagcattccttgtatgtgggttttttaaaaaacccttcttcttttatagtcatcttaatgggtatttctgaagtcttctttcctttagcttttttgcatttttgaatatattcttttgcagcaggctctagataataatttattcctaatatttttctagcttggcttaatgcttcatcaatatccttatatttcttccaagatattcctcccattaatttagcatctattttttgagccacaatttcttcaaaagaaatgtagaccccagggagctgaaatatgggtaaacgagaaagcatgtcaggtaaactattatctttccccttaatatgttcaaatataactctataaccatttcctgtaataatgtcttcaaataaaatccatcttctagttgagcttttcttgctattaagctggttatagtatctacagatggcttcacaatcggttctaaccgtgaattctttaaaccctaggtataacctaaaggcattaattgcattgataattgccatgatctctctatctgtattattgacagtttttaatttataacttccagaagcatacctacatattttttcttctgatttagcggaaaatttagtaggtctttgctttaatatagcaccccaaccttgttgtgatgcatcggtttcaatgataaagtaactttcttctaatggtaattctagaggttttagttctttcactttttcttttattaatcttactaatttaatgtcttcagaattaaaatatttctgaccattttttcttaatttagcgtataaaggtcctgctagctttgctaaattgttgatgtgatttctagcataatttacaagtcctaggaattgctgtaatttctttttgtcattcatagcatcaggaaattgtaaaattttcttagcaatatgttcttgcaaatgaattttgccttctcctatttcatgtccaaggaagttaactttttctttgcatatttccatcttcttttttgataggattaaaccattttgctcaacctttctaaaaaataattctaggtgagcaatatgatccttataagtttttgaaaatattaacaagtcatctatatatactaacacaaattcttgattatcgttaaaaatgttttgcatttttctttgaaatagggcaggtgcattttttaatcctagtggcatcactagccattcatagtgtccctggggacaggtgaatgcagtccattctatagactcttctgccatttttacttgccaaaacccagcttttaagtcaaatttcgagaaatatttgctaccttgtatcctattaatccattcttgcttatttgggatattataggcatcttctatagtattatcatttagccttttataatttatgaccatcctagatttacctctaacttcttccgcatgatttcttactataaaagctgcagacctatgtggacttctactctctcttattgctcctagtttcagcagttcttctatatgcatcttaaattcttctatatctttcggagttgcttctattgggctggtcttaataatatattctgggtttaatatattaattttacactcgatagcgtttttctcccaatatttcataggaatttctcctataatttgaatatcctctaatctttgaacaattttttctatatcctttttagacttaatatccctataccaatttggtgcaaatgcttgtaatcctatgcactctatattggaatttgatatataatagatgtctatattctcactaagttcatattcattaattctttcttcagactcaaggttaagtgcttcaaggttgtcgggtttgattctggctccaccacgctttcgtacctctgagatatatggtacattgttttgatatggaataaaagtaattccctgctcatgtattactgtggtttgtaccgattgttgtaaaaaccttaggccaattatcatgtcatcacttatcatggataagtttcttattgtaatctcatctattatatatttagttccattaatgtatacttcaacattatgagctaactgattatgaattttctttattccggacatgtctgtagagacttctgccttattatcatcaattgtatgaactatctctttccagcttgttaaagttaatttttctatttcttttaatctttcattttgcagggttgtatatcctaattctgggtcttcagctatgataatattagatactatatttgcaaagttgtgaggattacttcctgctctttttagctcttcgtagttattaggattcttttcaacccattgttcccataggactttagcagattcacccaaaaatgtttctaaataagttatcatatcctccaccttattccctatattatgctgattttgtatgtatttttgaactattaaccccttccaaatactaatgatatttggccagtctatgggatcatgtgctgctagatttagtatagccccatcactattttgattttgaaattttattggtttctcaaaatctcttcttttagtgcccatgtgcctatactgtcctgggatataatgatatgaatattcttctttttctggaggccatcttcctgctgccctggctggtctttctctttctccttcattttttacagaactctctccgtatcttttcctttttcctgttcccaaatctacttccatagcttccattgcattatctagattatgcaaacctacctcatccaatgagtctataaaatcattatattgttctgcattatcttcttcttctatattctctatttcctctatcaggttgttttcttcttcataactctctagtaataatttctcatttacttcccattgctcttcctcacttaataccttatcaaacttctggatttcttctcttggttcttctgactttatttgttctattttaatttcctgggttctgggggtttctatggccaagcttttctcttttttttgtttcttgatcctggatagttctctatagaaataaagttccttgtctctaattttaggccactcacttttcatagagttattatattcatctgctatatctcttaatttatcttcataatattttatttcactttcatggtctaatttttccatcaattcagatatactatgtcttctgttatctataatatttctgtcagatgattctgcatccaaatcatccgaagctctggttttataatttgtaaatctaatactaacattccctttgctgtcttggtaacttatgaagttttcaggctgactcaaggttttattttttataaattcactaattggccatttttctcctgctctttcttcagagtctattgttaaagggctcataaattttattcctttagaatgcattttttctatcacatcatttacattgattttgtatttggaggcacttctattagtcaatcttcctataaattctatacttattaataaatttgttcccttaaactcttcgtatccttttgtttgaaaaccaaaactcattttatctatgaattcatttacaggcatcattaaatcaggcgctatataggttatcaacatattttcattcatatctccttctagatagcctaaagatgctttgtttattgtgtcccatcttttatctaataaggttattaacactttagctcctaatttctttcttgtcattcctttgattcctattatgtacatatcttggtgaatatacttatatcctgaatattttaaactattttcaaattctttagctactatttttaattctactggttttcttagaacacttaattctacttctctagatattctatatagctcattcttattctcaaaaaatcccatgcagtatacttgttgaggtcttattgcccttaaagtatctcgttgatatctttcgagctgcttatctacttgtgcaacatctttcaactcatctatgtcatcatatttgcctttttgtttatcagaacagttatcatctctgcttgctattcttctaaagagactcctagatatgtccat

SEQ ID NO: 74786 - DNA, 185 bp, Oryza sativa
  unsure (1)..(185): unsure at all n locations
  Clone ID: PAT_MRT4530_74938C.1
tcctgaattccctttcgacccacgcctccgcattttttttaccagaccccatttaccctcctgggggggttttaaattaaaattgcctttgtaaacattttnatttttttccttattctgctgctgtggagcgtctattctttctctcaattcatttttcttatcttatccaaccttctcattta

SEQ ID NO: 74787 - DNA, 450 bp, Oryza sativa
  Clone ID: PAT_MRT4530_74939C.1
cccggtaagaataaaaacactttattttgtaccgaataaaagggacaaaacggaccgtaacatggtgagactctaactgagggatgaaattaaatgggctactatgtacggaaacaataattgaaactggattcttaaatgctttttgtgaaaccttaattattctttagatacatacaaagtatatgctgctatgcactgcactgtagaggcgtggacaatcaacactaagggactgcatgcatatgtagtagctcatgggtccggggcccacaccctaccgacatgggaagatggccccgatatattcgcagtcccaggctcataaagatatcccggtaggacagtttccatgaaatccaacaagccccatatttagttgaacttggtggcgaggaggacctcaccctctgacaactagccgtaaaggcatccaatcttgcaaagtga

SEQ ID NO: 74788 - DNA, 1942 bp, Oryza sativa
  Clone ID: PAT_MRT4530_7493C.1
gaaatataagtctagtaaaccgagggtagtggatccccgggctgcaggtgcagagcaaaaccggcggccactagaaaactaatggcggaaacccattaatcaaaatcaaatggcgcatgagtctcctcctcctcctatgctaggagtacatttctactagcgtaggacaacaagatagacagagtatacttctaataggagtaggagtaggagtattaaaacaaaaatcgatcttccgtcctcctagtttagttgtctctcctcttggctctgctttaatttgtctctcctcttgcccctctttgatccgcttggcactctctcctcctgctgctgtagaatcgagatcgagagagagagagagattgaaaaggcagccagggatcttgtgaattaatggagctggccccttttgcggcggcctcctcctcctcctcctcttccacagtcacaaacacgtgcaagctcaggctcaggctcagctacacccactgttccatcggcttcgccccccgagttcgcagatggatccgagcggcagctgagggccgaggcggcgaccaacggaggagcggccgcttggctgcagatggccccagagtcgtggaggtcgctgccccacctgccgcccccgtcgtcaccggcggaggcggaggaggcgggggcttcgcagcccgggacgcggagctggccatgtgggagaggctgggagcggttgtcaggctcagctatggcattgggatttatgccgccatggcacttactgggagattcatatgccagatggccggaatagactgcacagggggcttccatccatctctctctgcgcttgttgagggactcggatatgcagctccgccgattatggctttgctctttatcctcgacgatgaagttgtcaaatattcacctcatgctcgcgccatcagggatgtcgaggatgaggagcttcgcagcttcttctatggcatgtcaccatggcagttcattcttattgtaactgctagctcaattggagaggagctattctatcgtgtcgctgtccagggtgcgttggctgatatttttctgagaggcacagagctcatgaaagacgctcgagggattgcatccctgagtggcatggtgcctccatttgttccatttgctcaaacgtttgcagcagccatcactgcggctctcacaggatcactctattatgtggctactgccccgaaagatcctacttatgtggtgacaccagcaatgcgttcaaatactgggcgagagaatctcaagaaactatttgcagcatggtatgaaaggcggcaaatgaggaagatatattcccctcttcttgaaggaatcttggctttctaccttggctttgagtggatccagacagataatattcttgcacctatgatcacccacggcatatactctaccgttgtgctttgccatgggttgtggaaaatacacgaccacaggagaaggctacggcaaagaattcaggaaatcagacaggaaggaacaacaaattcagacacgttgtaacagatcatgagatggtagctagctagcaccgcttttcttgaatggcaaaatgggatgatcagatcagatcacagaaccatgtacaagacacagctgacaatttttgatgatccttaggtaggtatgtacttgtacgtagaagatagaaagattaagtcaacatgtacatagacagtatatttgttgtatatcctcagtataagtgtgtatacacagtagcaatatttctacacttatgcaactaaaatgggtgagcatttctccgcgcaaaaaaaaaaataaagacaaaaaaaaacccctgcggcccgcggggtcctttctgggttcactgaatcctggtatacgcggaagagagatggctgagttcttttcgttgcatcagtaatatgttcttgttttcttt

SEQ ID NO: 74789 - DNA, 132 bp, Oryza sativa
  Clone ID: PAT_MRT4530_74940C.1
actcctaagtcataggaagatgaaatccctgtgcctgaagatactgccgcactacataagctaggaacaaaatagtcagccacattaagttcctatttctgaggcacatcctgagctaccgacaaccatatt

SEQ ID NO: 74790 - DNA, 467 bp, Oryza sativa
  Clone ID: PAT_MRT4530_74941C.1
acaaaaattagcatccactattttatttcatagcataagttaactctgtcattacataaatacgcatctatatcagacagttctcagaaactcaagtgtcaaacatcataccatattaacaagcacaataacgatgataatgttattgcattactaagatccctgctttaacagattttctggcaaaataactttcaagattggagcatcagaggagatctccagtgtatctccatgctgaattgaatgcattacatgtgaaccatcaaaataaacagcgccttcctcattgtaccaaacgacaagtatgtgttgaccttgcttaactaacccatgcagcagtggcttgtcagcatcccttggagaaatgggctcccttatcatatactgaagctcatggcttgatattggcatcacgaatcctcctgccgatagcatagcagcagttgatccagcaggcgttgcaa

SEQ ID NO: 74791 - DNA, 389 bp, Oryza sativa
  unsure (1)..(389): unsure at all n locations
  Clone ID: PAT_MRT4530_74942C.1
ccttattgcaccaagtgaatttaaccgccccatagctcgtatattacgcttcaccttaataggggtaaacgtctggtacgcctgcaagtgtacacggtccaggaattccacacagggtcagacccaacgtcgtccagacgacgcgcttttcggacgcgacgaggacctgtcaacattgggtggatctctgtgagactctcctgacctgacactgccatagtggagttcagagcttattgagcatntgattcatatttaggagggcagtgaattatttgggacggtaagaatcgacgttgtaacttcgataaaatctctgatgatgatctctgcatcacatgatcaaccccgagngcagttttgtttttctgaaaaaaaaaaaaaaaaaa

SEQ ID NO: 74792 - DNA, 151 bp, Oryza sativa
  Clone ID: PAT_MRT4530_74943C.1
atgtccagaggtgacgcggaagaggacatagggccgtctgtcacgcttccactgcggtcgccctcattgtgcataatggcagttatgacgaccgtgtggcatggtgatgaccgggggatcaaggcagctacaatggtggcaggagtgcaag

SEQ ID NO: 74793 - DNA, 1594 bp, Oryza sativa
  Clone ID: PAT_MRT4530_74944C.1
atggcctctgcagagagaagaataaggatgtggtggcgcacagctgggaggcctaagcatctatggggtcgccggagcatgctctacatgggccacagccgcatctacatggaccgctactacgaccccatcgagctccatgggcagccgccgccactgctcatgattccaggcggtggcggcggcggcggcggcggcggaattagcccttacttggtgcagagccagcatgggcatggtggcggcgtcgacggcatggagatggaggagggcggcggcttcatgggcgagcagccacagtgccacccgctgctctacaacctgtccgtgctcaaggacagggtgcagcagctgcacccgctcgttggcctcgccgtcgcccacaacgcccacgcccacggccccctcgacgtctccgccgccgacgccatcatccaggaaatcgtcgccgccgcctcctccatgatgtacgccttccagctgctctgcgacctcggcacggcgccaaccaccgcgccatcacaggagaccgccgccgcctccgccgttgttgtcaagaacaacgaccatgccgccgatgccggtcagatggaggacgaccatctcatgcagcagcagtggcagcagaacggcagccgccagcacgattacagcagccatgcccatgcgccgccggtgttccacagcgaaacggcggcaccggcaggcgcgacgtcggcgacggacacgatcatcgagctggacgcggcggagctgcttgccaagtacacgcactactgccaggtgtgcggcaaggggttcaagcgcgacgccaacctgcggatgcacatgcgcgcgcacggcgacgagtacaagagcaaggcggcgctgtccaatccgaccaagctgctcgccaagggaggcgacgagacgatggcggcggcggcgaggaagtactcgtgcccgcaggagggttgccggtggaacaggaggcacgccaagttccagccgctcaagtcggtgatctgcgcaaagaaccactacaagcgcagccattgccccaagatgtacgtgtgcaaccgctgcggccgcaagcacttctccgtcctctccgacctccgcacccacgagaagcactgcggcgaccaccgctggctctgctcctgcggcacctccttctcccgcaaggacaagcttatcggccatgtctccctcttcgccggccaccagccggtcatgccgctcgacgccccccgcgccggcaagaggcagcgatcgtcctcggcgtccgtcgccgggaacattgacgacaccaccggcattggcatgggcgccgcctgacgaccttactaactaactgtgattgtattgttgccatcacctgctgcatatatatgtccatgaaagattcaatccagtactgcatggctagttaaattagcatgacaatgctaattggaacacacatgttaatttggaaatcgatcagggcagcaatttcaggcagtttatcagttagttctatacattagcttatgagatgtgtgatgaatatatactgtattagctaactagctaggggctttagctttacaatataatactaaggtttatt

SEQ ID NO: 74794 - DNA, 201 bp, Oryza sativa
  Clone ID: PAT_MRT4530_74945C.1
atgacgccgcacgcccgggggctacgccgtcctcaccgcatgcccggggcttccccccttcgcggctcatgcggacccggttacgcctctatgactttgccgcggattcggggacttttcacctacctcgttatccgggcgctctacgccgactcgccacggactcgggggcttaggggtggatggggaggcccggaatag

SEQ ID NO: 74795 - DNA, 306 bp, Oryza sativa
  Clone ID: PAT_MRT4530_74946C.1
atggatgcatccgcggaggaaggtgtacttggttcatcgtgtcggttcgtcctcgagctcgatcctctcttgaagatgcccgagaatcatttcttcatggctacaacaaagagcaagggtacaagactactcgagcggggaggggccataacggccatttatgacatgtgggacacaaaaaccgttgcaccacaaaaggacaggcccaacggccaccttcctgggttagccaacctcttggtggggcctactggcccaggatttcgtggtgtggattcaacggctagttggagtgggacccactga

SEQ ID NO: 74796 - DNA, 536 bp, Oryza sativa
  Clone ID: PAT_MRT4530_74947C.1
aaaccttacgtattttcttattaggtatatatatatatatatgtatatatatatatatatatgtatatatatatgtatatatatatatgtatatatatatatatatatgtatgtatatatgtatatgtatgtacatacatacacacacacacacacacacacacacacacacacatatatatatatatatatatatatatatatatatatatatatatatatatatatatatatatatatatatatatatatatatatatatatatatatgtgtgtgtgtgtgtggggggccagtgcacacacacacacacacacacacacacacacacacacacatatatatatatatatatatatatatatatatttatttatttatatgtgtgtgtgtgtgtggggggccagtgtttctatatatacatgtagctgaatgacacaaccttttggaatgaatgaaagtttatgtttgatattgtgcccgtgttgttgaaatatgcactcgattctcttacgatctatacaccctcgaatattat

SEQ ID NO: 74797 - DNA, 2599 bp, Oryza sativa
  Clone ID: PAT_MRT4530_74948C.1
ccccaagcttgttgattattcttcgcattgcatcatctttgcttcccctcttttgcatgctcttgctgtccatgctgattggggattgtatcttgagaacctccccgtgtaatcctttgtaaccataccactgtttcctcatttgttccatatacattttctttctatccagttggatacccatggctgcatcctgtttgacattattgcataacaagtactcttgtttatttggttgtttttcttcctatccttgtatcatcactttgctctcccaatattgttggctcctttgctctttccaaagttgccttggaactttgagcttttcaagatgccaaggaggacagataatgctgcttctgccaattcagttgaaccagacaaatcagaagaatgtttggagtttgatgatgaggaggaggaggtagaagaggaggaaattgaatatgaagaaatagaggaggagatagaagaggaggaggctgtagaggaggatgaagatgtcgtggaggaagttgaggaggtagatgaggaggaagatgaggaggaagatgaggaatctgatagaaactgaaggtgtaagtaaaactgaattggtgttcaccagaaggatagttacgtgaaaaggggaagcgatgctgagcttcttgcatcttcctcatggtcatgctccatggattgctcacttgacgaaacctcctgctgctgataagaaggatgatagagtaccactacctagttcaaatggagctccattgctcccgagttatcctccacttggatatggtatcatgtcagtaccaggtgcctatggtgctgctcctgctagtactgcacagcctatgctgtatgctccaagagctcctccaggcgcagcaatggttccaatgatgttaccggatggtcgtctcgtattggaaatgtaccccatagttggacaggatgatgatttcagaaaggcgtgtggaggaacgttggtccaggagtattaaaaggtgctctcatgaaggtctcaagtgcaaatcgcaatcggggttatggtttccggcagtagcacgcccggggcagtgcagagtatgcaaggcaggagatgtcttccccaacattcaaactagattcaaatgctcctacagtcagctgggcagatcctaagaataacgactcgggctctacttctcaggttaaatctgtatatgtgaaaaatctgcccaagaatgttactcaagcacagctgaaaagactgtttgagcaccatggagaaattgaaaaggttgttcttcctccttcaagaggaggtcatgataataggtatggttttgttcactttaaggacagatccatggccatgagggctctgcagaacacagagagatatgagcttgatggtcaggtcctggattgctcacttgcgaaacctcctgctgctgataagaaggatgatagagtaccactacctagttcaaatggagctccattgctcccgagttatcctccacttggatatggtatcatgtcagtaccaggtgcctatggtgctgctcctgctagtactgcacagcctatgctgtatgctccaagagctcctccaggtgcagcaatggttccaatgatgttaccggatggtcgtctcgtatatgttgtacaacagcctggtggacagttgccgctggcttcgccgccgccgcagcaagctggacatcgtagcggcactggaggacgtcatggcggcagtggcggccgctatggcggtggtggtggcagctccggcagtagcaggccagaggaatgcgtttctgaaacaagactgtacttgcgtatttaccagtattttccaatatcgcagagtgctgaatctgatggtgcactgtaccgtcaattcacccctgtaagccacatggactatgagatttctgggccagaatctgaggtagacagtgaggtgtggcttggctgggtggcacagccacagattccaaccagccttgatgacttcctgccaagcatcaggacaacatgcacacacactcatacttgcaacccgcctggtccatcggcaacagagcacacgcatacatgctaccacacccacacccatgtcttcagctcagatgatgatagttgtggaggtgacaaagccaagccaaagaagagccgcaagccattgggcaaccgcgaggctgtccgcaaataccggcagaagaagaaggctcatacagcacacttggaagaggaagtgaagaggctccgtgtcattaaccagcagctggtgaagaggctgcaagggcaggctgcacttgaggtggaggtggtacggttgaggtcgttactggtggatgtgcgatcgaggatcaatggtgcattgggtagttgcccgatccaagcacaatgtggagttgataatgttttgggttgtgatggaatggctcagtgctttgctggaaagccggagttgggtgtgagacagagttgtgcaccttctacagtgaattgccatatcagctcggattcagggcagaacctggtggtgccccatgctttaagccctagcgatgttattggaagcttcatggtctcatctacctcaaaggatgagtag

SEQ ID NO: 74798 - DNA, 431 bp, Oryza sativa
  Clone ID: PAT_MRT4530_74949C.1
acagtaggcatagaacatgagcttttagatgagttgtccatatctaaacagtatgattggaccgttctgtcagggttacgggttgggtataccctttacccttcgatatacgttacatatcgatatggcatacccacgctcatgcggatatttcctatatattctaaggaaacatttcacggaatctacagacgggaagaatcctactcggacagaactgggtcgttggcgtatcgtatagggtctgatacctccgacttctacgtggagacctccagatctgcgatataaaagggaccccccggggagggtttagggcatcgaatctcagagccaacacaacctacacagcctacgaagccggagcctacgaggagccaagtcatcgagagctagttgaaacaacttgactacaatctcgccggatccga

SEQ ID NO: 74799 - DNA, 739 bp, Oryza sativa
  Clone ID: PAT_MRT4530_7494C.1
ctcgcaccctcgcacccatgtcggaaagggcaaggcggagagtttggcattgttgtttcgacaacagcgctcaaagattttggtggcaatacatcagaaaccaaaggagttttgaatgtggaactgacagtcggtagcaaaactgtccctacaacattctttgtcatcggtgggaagggttcttacagcttgttgcttggtagggattggattcatgccaattgttgtattccttcaaccatgcatcaatgcttgattcagtggcaaggcgacaagattgaaatcgtgccagccgacaggtcagtcaacgttgccagtgccaatttagctctttgggagatggatgagtgtccgattgtgataaacagccaattgaagatggagagcccaagctattattttgagggcgtcgtggagggttcaaacgtctacaccaaggacatagtagatgatctcgatgacaagcaaggacagggtttcatgtcggccgatgatttggaagagattgacattggtccaggtgatcgaccaaggccgagatttatcagtaagaacttatcttcagaatttagaaccaagttgatagagctgttaaaggaattcagatattgctttgcttgggagtattatgagatgccaggactcagccgatcgattgttgaacatcagctacctatcaaacgaggggttagaccacatcaacaacctccgagaagatgcaaagccgatatgctcgaat

SEQ ID NO: 74800 - DNA, 554 bp, Oryza sativa
  Clone ID: PAT_MRT4530_74950C.1
atggaagccacaacctccagcttgctcgtgcgccccgtcgacacgcggctctccgccgcctccctccccatcgtcgtccgcgcccgccggcgcgtggccgtcgtcacggcggcggcgccggagcggaagccggccgcggcggcgagcagcagcaactacgtggtggtgccgctggacgcggcgccgtcggggatcacgcggccgctggtggaaatcctgcgcgacctcaacaagcgcgtccccgacaccgtcgtccgttcctcccgccgccgcgcgtcgccctccgatccggtcatcccctggtacggaacaacctatacatccttggcctttgcttgtgctactggtaaagcactgcagatcttgctgccatacacatttgcttgcaacaaggagcactcgcgatattcaggctcatgtacagcatcgaccaatgacgctcagatcctcacatttctagtggcacactctcaagagtcaagacacaaaaagaagtttgttccttgctgagcattctgcaaggcctgcgcaaggtttggctttggtctgtatct

SEQ ID NO: 74801 - DNA, 514 bp, Oryza sativa
  unsure (1)..(514): unsure at all n locations
  Clone ID: PAT_MRT4530_74951C.1
aaggatttgtccagattaaacatgctgcctggtgttatgtgatcacggagtttatgccgatagatggagaaccaccatctatatgatggcccttgggaatactctatctctattggatggctgttgccacatctaacatgcccggaagcaaccgaatgcctctggatatgcatgcgttagcactnacagccattgtgttcctatgaactctacttctggttatgttggctatcggtgcaactgctctcccggtttccacaggaaatccttatatcccgaatggatgcacagatatcgatgaatgcccaataccacggaatttgccataatggtactgtttgcgataatcatatgggtggttatgtatgcctgcagcatattttaggcactaccatgttctcctaggtacgccaatagctattgcttgactattcccctggaaaagaaaattcgtctttcccctatttttttttactgaaaatcatctttgtactattttgaagaaggccataac

SEQ ID NO: 74802 - DNA, 565 bp, Oryza sativa
  unsure (1)..(565): unsure at all n locations
  Clone ID: PAT_MRT4530_74952C.1
cccatctcgagttcttcccgcacgtcagtagcagcgtcaaattccggacctggggcgaggcgactctagcgcgggaaatcatagcagcggcgctggtgcgcagccacggcgagcgcgacgaccccggcgcccgcgacaggtaggagccgtacgtgcagcatcctgtatgtgtcatctttgccggcgctggggctcatgcgttcccggagcttgtaggctacaggataagttctgtggctgtcggggcaggtgcatgggctgcacggcgacgctcgacgcgccggccgcaagcacggcaaggatggacagggccaagtgatatgaactgtagaacatggtgatagaaaagaattttttcagtgtaaatccatgcatatagattagggaggaatgaaatgtgtaaaagaagctcatctattatccctctactgttgagtgtaatgtggagattgcccaagtgatattgtataatctagtaagcatattattatgcaattcaaacgttgtatccttttgggattaaaaaaaaaaaaaaaaaaannannnnnnnnnnnnnnnnnnnnng

SEQ ID NO: 74803 - DNA, 457 bp, Oryza sativa
  Clone ID: PAT_MRT4530_74953C.1
aaggcttggtggctttgcccatcatagcttgtggtcacgggacaaaccggggcctttattggcatttttggaggtaaaacacctcgcaatcattcttacttgggactatttcacatgaaaaactgccgctgtaaaaattttttatagctgtatacccaagcctttttaccgagtgggatccttatttccaaacaatgttttaatggggaaaattaacaggtcctgtaactattcccccacctttttattcccgatctttttgtttgcttgtgaaccatcggactctaaaagggcctgaaattcctgtttggaacaggaatcaaatcggatcaatgttcagcgtactgtattttgagaaaagaaaaagttctttagaaggggatattttaattatttgttccaaaaacttaaagggggtttttttcctaggagaataaccaccattttaataaagggc

SEQ ID NO: 74804 - DNA, 243 bp, Oryza sativa
  Clone ID: PAT_MRT4530_74954C.1
cacgtccatgccgtggccgccactagcccacccatctccgagacttgtcctcctcgatcacgccgcggcgatgacgtcgaggccggcatcgacgacgcgacgttggaggcgttcacggccgtggtctacaagaactacggcgatgctgacgttctctgcgtgctgccgaacagcggcaacctgttccagctgacgccgctcgtcaaggtgacgccgctgtctcttggcattgctctatcgtga

SEQ ID NO: 74805 - DNA, 157 bp, Oryza sativa
  Clone ID: PAT_MRT4530_74955C.1
ttgttttttattaacaacccgggctatatcaatacagtatcaccttcatatatctacaaccactcccgtttccaccaaaagatgaactttcagtaaccaaaccaaccactcctcccaagttgcaagtgcattcactgtcacgctgccctttcctaac

SEQ ID NO: 74806 - DNA, 408 bp, Oryza sativa
  Clone ID: PAT_MRT4530_74956C.1
atggatcgggcaacccccaagctcgagatggcgggagcttggggaacgcattatccggtcgatcttaagacaaagggcgtcaagccctcgggtggcaacgatctcgaggagaccggggtcaagggttgccatcacggctatcacatagtcatcccatccgggcttatgtcgtcgccactgtccaattgccatcctattcccggtgataagtgccgctttcttagctccattggcaccggcaacgtcggtgaggacggcgacggggtgaggacagcgacggcggcggtcaaggaactagcggggagaacagaaactagcggggaggaagtgcggcgaaagacggagaggacctgggcagtgacgagtggcgacgacatcaccaagcttgactgccacggggagatctag

SEQ ID NO: 74807 - DNA, 497 bp, Oryza sativa
  Clone ID: PAT_MRT4530_74957C.1
accaaaatgaagcttcgtcttcctttcgatgtatttcttatgcgcgtcctggcatctttcatgctctccagcactgacggattacacacaggaggagaaatgtatttccatcatcaaaatgaagcttcatacttttaagttatttacagtttggagtatttcttgagtgtgtcccctgcatctctcacgctgcctggcatcggcagattacatagaagagttactctggattcagaaatctgaggctctttctccttcatggatggatgatggatccatcttctacagcttcacctcccataccccttcagagttcatccattttttagcgctaagcacaaggctgaagcttcttgaaagatcaataagcaagacatgtgcatggtacggaggatatcactttattttttttaccttgaaagaaaacttgtattttttattgctcgatgttgaattggcttatctggagataaattttgatagtgttcgagactatc

SEQ ID NO: 74808 - DNA, 510 bp, Oryza sativa
  Clone ID: PAT_MRT4530_74958C.1
acggacttgcgcggagggtgtttgtttaggaagaaaggggatgtgccatttccccgcaaacataggtgggcttacatgatgcgggaacatttcaaccaagcatgatgcatactcaaatgtaacacaaatatgtgatttggggggcaagtcacattggtcagattgcagaacggtattcaggagtgaggggggaagaagccagccacagagtaccagcagacacagaccttaacttacaccttggaaaatgcaccctgtcgacatagcgctgcgacatcggcgtctgaacattcctgcggaacttttgggggtcagctcggaggacagccggagcatcatgggttaagggatcctcgggattgggttggatgaaaagaaggtttaaaccatatacaatgggatggaatattaagacaggttttcagtgttcacgcagggtattaggcagacatttccgttaaggcaatattagggtgataaccttaggcgggcacttgaccttgggcggtt

SEQ ID NO: 74809 - DNA, 2271 bp, Oryza sativa
  Clone ID: PAT_MRT4530_74959C.1
tccccgggctgcgcgtatcggcccgcggccttcaccgctccccctctcctgccgcggccgcccccgcggataaggcccgtggggtttctcctcctctttcctctcctcctccgccccgacgcctcgctagggtttttgcctctccctccgccgccgccgctgccgcgaggagaggagggggggagagcacccagccggcgagccagccatgtcgctgcgcccgagcgagcgggtggaggtgcggcggaaccgctacaaggtggcggtggacgccgaggaggggaggcggcggcgcgaggacaacatggtggagatccgcaagagccgccgcgaggagagcctcctcaagaagcgccgcgaggggctccaggcccaggcccccgtccccgcctccgccgcaaccggcgtcgataagaagctcgaaagccttcctgctatgattggtggagtttattcggacgataacaaccttcagcttgaggccacaacacagttccgcaagttgctttctatagagaggagccctccaattgaagaggttattcaatcaggcgttgttcctagattcgtgcagtttcttaccagagaggatttcccccagctacagttcgaagctgcgtgggcacttacaaacattgcatctggcacttcggagaatacaaaggttgtcattgatcatggggctgtaccaatatttgtgaagcttcttggttcttctagtgatgatgttcgtgagcaggctgtatgggcattgggcaatgttgctggtgattcccctaagtgccgtgaccttgttcttgccaatggtgcattgctgcctctgctagcacagttgaatgagcacactaaactctctatgctaaggaatgcaacttggactttatcgaacttctgcagaggaaaaccacagccatcatttgaacagactaggcctgctcttccagcactggcacggcttattcactccaatgatgaggaagttctcactgatgcgtgctgggctctttcatatttatctgatggcactaatgacaagatccaagccgtgattgaagctggtgtttgcccccgtcttgtggagcttctcctccatccatcaccttcagtgcttatacccgcactacgaactgttggaaatattgtaactggagatgacgcgcaaactcagtgcatcattgatcatcaagccctcccttgcctcctaagtctgttgacacaaaatctcaagaaaagcatcaagaaagaggcttgctggactatttcaaatattactgctggtaacaaagatcagatacaggctgtcataaatgctggcattattggtcctctggtgaatctgctccaaacggcagagttcgatatcaagaaggaagctgcatgggccatctcaaatgctacttcaggcggtagccatgatcaaatcaagtatctggtgagcgagggctgcatcaagccattgtgtgatcttcttatttgcccagatataagaatcgttacagtttgtttggagggtctcgagaacattcttaaagtaggagaaaccgacaagaccttggctgcaggtgatgtgaatgtcttttcccagatgattgatgaagcggaaggtttggaaaagattgagaacttgcagagccatgataacaatgagatctatgaaaaagctgtgaagattcttgaggcctactggatggatgaggaggatgatacaatgggagctaccacggtagctgctccccaaggtgctacttttgactttggccaaggcggtggtgctgctcaattcaaataaatacagatttgaccagaggtggtaaattgtggccactgtgcggggtactgaattgttctggtggttcaataagctaaaggtttcaagggggccagtgttacattatttccctactggtcacggatatcatatcactacgtctgtaacagggattaaagctttgaagtctgcgtttttcatcaggctactactatgtagtgtttgcatcttttagtatggtgtgcaacattttgctacttgtatagcctgagtcgaagcttctgcaaagccgtcacaacacattcctgaacccgtctggttttgagtttcgtcaggagtgtgctgagttgcagtttgtccggacatgtaaaccattatgccttttaaattatatattgctagggtttgttcggttctaaaaaaaaaaaaaaaaaaaaaaaaaaaaaaggggctcgtgccgaaataaaaaaaaaaaaactcgagactagttctctccctcgtgc

SEQ ID NO: 74810 - DNA, 4881 bp, Oryza sativa
  Clone ID: PAT_MRT4530_7495C.1
atggccgagaagccgccagcatcgccgtcctcggctagtccaggttctcttaaagaaaagatccagcagctaggcttatctgagattaatgaaggcaacatcgtgaccattactccagacaagttgacacctgatcaacagaaggattttgactcaatgatgcagcaagcacggaaccagttcttaaactcattcatgcagacccgcaaggggacagtggtgcagaagtataaggtgaaggtagttgctgatattcccggaacaggttcttctaaggatggagaagtacagcaagttccagatggcacaacccaaccgtgtgataaaggtgttgcagatggttttcaaggaattcaaggtgatggctctcaaggggtccaaggtgttggagttcaaggtgatggttcccagggagttcaaggcggtaatcttaaccaagatggtaacgcagcacagttacagtttaacaacttccaagatcaggttgactatgttgtgcaccatgctttgatcaatcaatctggaatattagtcaacactttgtcgaatatggtgaaaaaaatggttgatggttcaatggctgagtatcaagctacagggtcggtttatctactgggaggagtattccaaaattatcggccattaattactgataatcagccagctgctcagtcaattcctcctaatgcaccatcggctcagtcgacggcaccggtatcggctcctgcacctgctgcattgccatcagcaccgggtcaattggtcaatcctcggttgttgctaggacagcacgctgtgaatcgagttgtcccagagcacctagttcatcatgtacagccagatcaaacggtgatacctcaagttgttcccgagcatttgcccatgacacaacagcctcaaggaacacctcagcaacaaccatgggccgatatgattgcgggtgtaatgaaggaacagttcgggcttaggccgaaagatgctggaaatttataccgacagccttaccctgaatggtttgagagagttcctttacctaaccggttcaaagttccagatttctcaaaattctcggggcaggatagtacatcgacttatgaacacatcagccgatttttggcccagtgcggtgaagcatcggctgtggacgctttaagggttagattgttccgactgtctttgtctggatcggcctttacttggttttcttctttaccatatggatcaattaacagttgggccgatttggagaagcatttttatagctatttctacaatggggtacatgagatgaaattgtccgatttaacagcaatcaagcaaagacatgatgagcctgtgcatgagtatattcagagatttagagagatgaggaataagtgttatagcttgagtttgactgatgcccagttagacgatttggcttttcagggtatgattcctccgattagggagaaattctcgtctaaagactttgatagcttgtcacatcttacacagaaggtaaccctgcatgaacagaggtttgcagagtccaggaaaaactctagaaaggttaatcacgtttgtccttacatgtatggattggatgatgatggtgatgactctgagatagcaacagccgaatgggtgagaagcaaaaaggttatactatgccaatgggtaaagaactctgggaaagaggagaggtatgactttgatattaccaaggctgacaagatttttgatttgttactccgagagaaacagattcaacttcctgctggtcatacaattccatcggccaaagagttgggcaagaaaaggcagcaaatccaagcagctattgaggacggtaaaattaggtttgatgattctaagaggccgatgaaggttgatggcaatccttttcctgttaatatggtgcatacaactggtcaaacagccaatggaggacgtgcaagaggttttcagtcaaattcggctaaaattattaggaagtatcagaaaagatatgacaggcagcaggagaaacattatgaggaaaacgatgacggctttgatcctcattggggttgtgagttttttcgattttgttggaatgaaggtatgaggctgccatctattgaggactgtcctggatgcagtgatataacaaagagttcaagccgatcatgtaatagaggcaatcggctgaggcagaaaagagttcctgttcatcaaagattgggtccagtaaaccaagatcgtagccaggaggacaatgaaaacaggaaaactcaatggtgtccttctgagtttggggtcaagcaggccgatgttgatgaagttgaagaagaatcggctaaattgacattgtcaccagaacaggcagtcttcgagaagccagagggtacagaaaatcggcatctcaagccgttgtatataaatggttatatcaatgggaagccgatgtccaagatgatggtcgatggtggggctgtagtgaatttgatgtcttatgctacattcagaaagttgggcagagacgctaaggatctcatcaagacaaatatggtgcttaaggattttggtggcaatccatcagaaaccaaaggagttttgaatgtggagctgaccgtcggcaacaaaactatccgtacaactttctttgtcatcgatgggaagggttcttacagcatgttgctcggaagggattggattcatgctaattgttatattccttcaaccatgcatcaatgcttgattcagtggcaaggcgacaagattgagattgtaccagctgacaggtcagtcaacgttgccagtgccgatttagctctttgggagatggatgatttggattgtttgtctggaaaagtttgggatggagattttctaaaaatggagaacccaagctattattttgagggcatcgtggagggttcaaaggtctacaccaaggacatagtagatgatctcgataacaagcaaggacagggtttcatgtcggccgatgatttggaagaaattgtcataggtccaggtgatcgaccaaggccgacatttattagcaagaatttatcttcagaattcagaaccaagttgataaagctgttaaaggaattcagagattgcttcgcttgggaatattatgagatgcccggactcagccgatcaattgttgaacatcggttacctatcaaaccgggggttagaccacatcaacaacctccgagaagatgcaaagccgatatgcttgaacctgtcaaggctgagtttaaacgtctatatgatgctggttttattcgtacttgccgatatgccgagtgggtttctagtatagttcctgttatcaagaaaaatggtaaggtaagggtgtgtattgactttagagatttaaataacgctaccccaaaggatgaatatccaatgccagttgccgatcagctagttgatgctgcttcagggcacaagattttaagctttatggatggtaatacgggatacaatcaaatctttatggccgaagaagatatccataaaacggcttttaggtgtcctggtgcaatcggcttatttgtgtgggttgtaatgacttttggcttaaaaagtgctggagctacttatcaacgggctatggattatatatatcatgatctaatcggctggttggttgaggtctacattgatgatgtggttgttaagtctaaggaaatagaggaccacatagccgatctgagaaaggtttttgagagaacaaggaaatatggcttgaaaatgaatccgacaaagtgtgcttttggcgtatcggctggtcagtttttgggatttcttgttcatgagaggaggattgagataactcagaggagtgttaatgcaatcaagaaaattcagcctccagaaaataaaaccaagttgcaagagatgatcgacaagataaattttgtcagaaggttaatgcattatctactgtccaacgaatgcactgtcatatgcaaggccgatgttgtcaaatacatgttatcggctccaattttgaaagtaagggttggaaaatggatattttctttaactgagtttgatcttcggtatgagtcaccgaaggcggtcaaagggcaagctatagccgatttcatagttgatcatcgtgatgattcaatcgactcagtggagattgtgccatggactttattctttgatggatccatatgtactcatggttgtggtatcggcttagttataattttccctcgaggggtatgttttgagtttgcttatactattaaaccttatgcgaccaataatcaagctgagtatgaggcagttctcaaagggttgcagttattcaagaaagttgaagccgatgctatcgagattatgggggattctttgctagtaattagtcaattggcaggagaatatgagtgcaagaatgatacgttaatagtttataatgaaaagtgccaagaactgatgaaggaatttcggctggtgactttgaagcatgtatctcgcgagcaaaatattgaagctaatgatttggcccaaggggcatcgggatataagccgatgatcaaggatgttaaaattgaggttgttgtgttgacatccgatgattggaggtatgatgtacatcaatatttacaaaatccatctcaatcggcttctcgcaagttgcgatataaggcgttgaagtatactttattggacaatgagctctattatcggacaattgatggggtgttgcttaagtgtttggatgccgatcaggccaaggtcgcaatcggagaagttcatgaggggatttgtggcactcatcaatcggctcataagatgaagtggttgcttcgacgtgcagggtatttttggccgacaatgctagaggattatttcaaatattataaggggtgtcaagattgttag

SEQ ID NO: 74811 - DNA, 465 bp, Oryza sativa
  Clone ID: PAT_MRT4530_74960C.1
aaacttttggtgcaggttctaggcaataaagggggggggggggttctaagttcgaaacctgtacaatttttgatcaaaatgcctgaagttttctgtgaaaaattgaaatgtacattgagttttacgatgttatgtctgttccaatggcaattgctttgtctggtcaaccgctgcttggacaagcagtgatggttaagccatctgaggctgaaaagaacttagttcagtcaaatgcgacatcaggtggtgcggcttcaggtggagcaagaaagttgtatgttggcaatcttcactcaaatattactgaagaccaattaagacaggtatttgaaccattcgggcacgtggagcttgtacagcttcctctagatgcaatgactggactgtgcaaaggttatggctttattcagtttgcccggcttgaagatgcaaaagctgcacagagtctgaatgggcagcttgata

SEQ ID NO: 74812 - DNA, 359 bp, Oryza sativa
  Clone ID: PAT_MRT4530_74961C.1
aaaaaaaaaaggggggaaaaaaaaaaaaaaaaagaccacggcaaagaaaaagggggggcaaacggggttgaaaaacaacggaaattttggtggaaaaagggcaaccaggccaaaaatttaaaaaaaagggggggcccaaaaggcaaaaaggaaagggttaatttgggaaattttggggttccccaccggggggtttaagggggccctggccgggaaaaaaaggggaaaaaaaaccccgaaaggggaaaagttctttgccatttgccaaaatgaaggggggggggcctcagggaccctggaaaaaacccattccttgaaggggttaaaaaaaaaaacggaaaatttgtttggagggcccc

SEQ ID NO: 74813 - DNA, 200 bp, Oryza sativa
  unsure (1)..(200): unsure at all n locations
  Clone ID: PAT_MRT4530_74962C.1
gatggaacggatttgtgaggagaacgactncactgaatgcagcgagcagagagtaaacactctgagaaactacacgtagatacgtagactgattccagacaaaccacacgtgccggaagataacaactgtgcaactgctcagagttggcccatcttaactcatgccagatgagcgctacagagtaactataccagatgca

SEQ ID NO: 74814 - DNA, 400 bp, Oryza sativa
  Clone ID: PAT_MRT4530_74963C.1
gagatcggaaccatcatcaccaataattcaatctgtcaagatcgcgcaagttacgggacatcgccgtcgcggaggacattaattcaatgttttttgccacgacatcctcacaacgtagcgatcctcgtaccacgacttctaacgacttctaatggtcgaggtacaactatgactggtcttcagccagcaacgtagcgatcctcgtacctcaacctcaaaacagtcgagagactcctccttgttctcaaaccagtaagtcatagcgatctctcgtacctccacttcaagtggtcaagttatagctacaactggtcttcgatcagcagtgtagtgattctcccactacttctgcgttaaatagtagagccaactattagacatggagtataaattatatcgg

SEQ ID NO: 74815 - DNA, 253 bp, Oryza sativa
  Clone ID: PAT_MRT4530_74964C.1
ctttttcctttattttattgcaaaagaatgtttcaattcaccgcaacatttgatccgtacatagtaaaacattgggaatacactaaacgaaacatttttgatggaacattttacagaggcgatttattgcaacggcctgcgtggtggggacacgtggcaggagcggcgcaggacacgtggtgagggtggcgcgcggggggggggggggtggtttttctaccccctaaaacttccaccctttcccctaccatcc

SEQ ID NO: 74816 - DNA, 1907 bp, Oryza sativa
  Clone ID: PAT_MRT4530_74965C.1
tttttttttttttttggtcttgtactgcactcattgtcctcatgtccaggtggaacaatcaatcaacaaagataaacagcatctcttgctattgagtatttacaacaaagtaagaataaaactagaaaaaagtttaaaataacactccaactacaacaaagtggcaggctggcagctaacaggtcagtctacgtgcaaccaacttgagcataatctcctttggagttcatacaataccaagctaaactctgaggctaatctcaaactgaacaaacttcacttcttcaaaagatacaacaggacaagtattgcgccaccttacatccaagaaatttcatgcttcaatcttgtcaccgataacaatggattttatctcttccacaaaatgatccttccagtcagaaagagaggcaaacgggagcaagccagtcaaggctggaagaataagccccaccgcagcataaaacaagcaccggcgaacccagtatggtaaccagacaacttgctctctgtgagatactgaaataggtccatgtagaacgtggtataaaagagatggaaaaagatttccaagtaagtggatagaacaaagaacctcccagtacatgagccaagtgtttccatcgccacctagtgtattggtacaaaaccttccagcaaagccgcagataattcccagcaaaatgagattgaatgttataggcatatttgacccagtagttgaggaacgctgaaatgctaaccaagcaattgccaggatcattagtatgccaaagcacatacgtgttacggcaattacatgacacctgagaaaaagaaacccagaactgaagttcgacactgaatttggcatccaccatgacttagatccctttgatgtggcagaacaagctgacgtaacatccgttatcctttgatacgaataaatataagttccatatccaaagcacgctgacataactatcacagcactaacaagaaaatctattagcgtcctaaggatttctgcgtctcttgtctcctgcatgcgagtcttgaatttctctcctttgaaggaagctttctgaaatccgaaagatagcttaatcttctctaacatgtgtgaatgggaactaagagctaactgtgactgtttgagttgcaactttctcatggtaagccctatttcaaattccttgagttcgttcgagcgatcaatggcattaagaatgcgattatcagcttcaggagaggatctgctatgccgaagatgcgttaactgctgattgtcactggcaaagagaactagttgactttccactgtgttcacaaggtcatgctctattctgtttgtctgattttgcaaatcagatgagctcaagctgtccacagccacagaatcatcatgtttaaaagaacattcaggaatatgacttctctcattcacaggtatttcattaacaagatgaagcgtcctaaaagtgctgctgaaagatttttcgaaatttttgatgaaactgttggaactgtcaccatatatcttggagaggaaatcaggatgtaatctttgtcctgaaatattctttgtatttataacctgaacaataagggcatagggctgcgcgaggacggcggcgaaggacattccgagaggcagcgcgagatcctcctgcacggcgccaccgcccccatcgcccggggcgcgctcggcctccacaggctgccgcccccgccgtcgcagcatccggagccggacccccttacgctgccgatggcgagcgttcctcgaagaagcaggcgagccggacaacgacgcctccgcggccgacgccgccgccgccgccatcgtcgccgacgaggaggaggaggaggacgccgccgcggcgtccatctcgcgggagagagagaaagcgccgcgtgagatttgg

SEQ ID NO: 74817 - DNA, 563 bp, Oryza sativa
  Clone ID: PAT_MRT4530_74966C.1
attttgcaaatcagatgagctcaagctgtccccagccacagaatcatcatgtttaaaagaacattcaggaatatgacttctctcattcacaggtatttcattaacaagatgaagcgtcctaaaagtgctgctgaaagatttttcgaaatttttgatgaaactgttggaactgtcaccatatatatttgtcagagattccttgactgctgatgtacagatcttggagaggaaatcaggatgtaatctttgtcctgaaatattctttgtatttataacctgcgcgaggacggcggcgaaggacattccgagaggcagcgcgagatcctcctgcacggcgccaccgcccccatcgcccggggcgcgctcggcctccacaggctgccgcccccgccgtcgcagcatccggagccggacccccttacgctgccgatggcgagcgttcctcgaagaagcaggcgagccggacaacgacgcctccgcggccgacgccgccgccgccgccatcgtcgccgacgaggaggaggaggaggacgccgccgcggcgtccatctcgcgggagagag

SEQ ID NO: 74818 - DNA, 709 bp, Oryza sativa
  Clone ID: PAT_MRT4530_74967C.1
ggggaaaaaaaaaattttggggttttggggttgaaacaaaccaaaattttacccccactgggggtgggggggcatttatccaagacccccccttaaattttttttcccttttccagaaagggaaccgttgggaaaaaaaaaataattaaaccctggagggttttgggttggggggtcccggcttataaaaaaaaaaatccggcacctctacctgggcggggaagggggggttttttaaccttttcccacgggccccaagggggaaatttccaaccttggccccccccaaggcccccacagtttggttaaaaaaggtgaggggggggtggtttaaaatcttggccaaccccccccggggtcggggcccccccccccccaaaaaacccctcgcgtttttgggcccccccaacccccaaaaaaaaaaccccccccccccccttcttttttttttccggaaatggttgttataaaaatttttttggcccaatctccggaaaaaccttcaaatttccccggcccccctgtgggggggccacccccaggaaacaaattttttttttccacggtgcccaaacggggcccccgtttttttacacgggggggggcacccacacttttttttccccccaaaaaaaccaacccccacccccaaatggcctgcaaacttgggttattatcccccccctcttttttccggggaccccccccg

SEQ ID NO: 74819 - DNA, 631 bp, Oryza sativa
  Clone ID: PAT_MRT4530_74968C.1
ggcagaaaaacccaaattttattattgaaccgcatgaatcgaaggaagctaaacaagagcatcgacccgacaggccgggcgattgcacacccacacccttaactcccccctaaggagctagggtcacaaaacacccatgccctcgggcgggcgggccagctaaattagcttgcttgctcgggcggtctttgcatgcaagctggacaaaccaggcgagtcaccccccaatacagcccctactaaatcgggccggagtactactggccgtactaccccaagagggggctcacctagtagctagtacccccccgaagaacatgggttcgggtttatgtttgggaaccaccagctagcgggctatcccccacatgagaaaattaccactagttctctaagcttaatcaaactacccttccacaacaatggccatggcaggcttgaagaactgctccgttctgaccatagggggatcgccggcaccggccattttgtccggacgggtgggctcctcggaatccaccttaacctccaccaccttcgagggcatcacgtcgtcgagggggggcccccccgcgccgaagatgatcctgccctccggggctgccgagaagggccccttggggacggcctg

SEQ ID NO: 74820 - DNA, 480 bp, Oryza sativa
  Clone ID: PAT_MRT4530_74969C.1
atggcggagcggacggcggcaagggagtccgcgaagccgtgggcggcggtgggtggagaaggccggcgcgaaggcagggcagagcggcgctgcggcggcatcgagagctgccagtcaccgcggtcgctgctgtcgcgtatcctgcagcgaggcgacggcggcggtgggatgttcgggtgccgggtgcggctgccgcggcggtacagctccacctccgccgccggcgctggagctgccggagagaaggagatgatgtcgaacgcgttcaggctcgaccgccgccgcgagctcccgccccgcccgaatctcccttccagcaacgacggcgccgccatcgtcccggtgcactccgccgccgacatcgccgtcgccgacaccctctggaaggccaccaccgcgggccggccgccccgccccccagatccgtcgccactccacccggccaccgtcgccaccgatgcgtccgaagggggaagataa

SEQ ID NO: 74821 - DNA, 900 bp, Oryza sativa
  Clone ID: PAT_MRT4530_7496C.1
atgccgctgacgaacatcactggtggcgccataatctggccacccgcacaggaagccccgccgtcggcggcggcagcggcgcctgcgccccctgatgacgccgcggccgcgtgtgcagcatggagagttggagacgccgaggagaagaagttgaacgagaggttggggatgagaaggaatgaggataagattggggaaaggtccttccgcctcgaccgctgtcttcatcaagctccaccagacgtcggcatccccatccgcctctactgccgcccgggggatagacccacgtcttcaccgcctctccgcctgcctcctccctcgtggcaggcaagacgccgctggcccgtcgtctctggcgcgggccgacacctcgccaccaggatctgcaccattgtcgccgcttgcggcctcgacgccctccgccgttgggcagagaggttgctggacgtggacttggtctatggaccatgtagatcgagtttgcgtcgcccactgcctcgtcgacatctatgtgtctccgacatcggcatcgactctgcttcgatttcatcgttcagccctgcgcatcttcggcttgatcacccgttcaggtgcccggctacaacgacttctgtaaccaatcgttatcgagcatgcgtctacgccatcaatcttcgggttgccgctgcgttgcccccttgggctgcagtgccgccgcccgtggtccacctccactggttgttggaacacggagaggcgccctcctcagcgtggcctcactaccggtggagttctcgccgctatatcgacatcgggccgcacctgtgtcgccccttcgggtcacagcgtcacccctctcgtcgtcttcatcgccgttcatgcatcgacatcctcgtcgtccgcattggtcatctctag

SEQ ID NO: 74822 - DNA, 524 bp, Oryza sativa
  unsure (1)..(524): unsure at all n locations
  Clone ID: PAT_MRT4530_74970C.1
gcgagccgtgcttcaccagcagggcgctcgccgtgagcctctccctcatntcgacgacgatgtgtcgtctctgctcgtgtcgacgctcctgcacgcgttcgtctggaggtcgctgttccccaacgacctggccatcgccatcaccaaggacaggcagaacggcgcgttcaagccgcacggcaaagggaggaaggccggcaagagggtgtacgacatcaagcgatgggcgaagcaggcgccgctctcatctcgtgtcgtccatcaccaagagcaactcggcggacaaggaagaagaggagaaaacagaatgaagcgcaactcagaaatacagaaccaggaattgatgatncatgtataaatggtcaggatatagccaccagggaataacattcacgaacaaggaagatgatgtaccgacatataagttagatcgattaccatcacatataaacccatcacgcatcatgtaatgaaatgtctaaaagccatacggcagattatcataaaaaaaaaaaaaaaaaaaa

SEQ ID NO: 74823 - DNA, 2238 bp, Oryza sativa
  Clone ID: PAT_MRT4530_74971C.1
cgcctccgctcatccctatccccactcgccggagatggccgccggcgacctcctcctccgcacccagagcggcctccccgtgctcgcaagggccttccccagctgcctctgcctccgcgtccctgcccgccgccgccggggcgctcctcccctgaccgccgccaaggtcgacgtcgccgacgccgtcggccgccgtgtcaggtcgggcggcgcggccgtaccgaagcggcgtcgtagccgtagggacgcggaggaggaggaggaggagggcctcgcgttctcgagggtggtcacgggcaggggaagaggcgtccgcgaggagggcgtggcggaaggggaggctccggaattcgatgcggcgaagagcggtgacgagtcgggaggcgtggatggctcgtacctcagcgacacaaggtttgatcaatgcactatttctccgttgtcactgaaagccgtcaaagatgctgggtatgaaaggatgacccaggtgcaggaggcaactctgccagtaatccttcaaggtaaagatgttcttgcaaaagcaaagacaggaactgggaaaactgttgcctttttgcttccagccattgaagttctctccgcattacctaattctcggagggatcaactacgtccatctataaatttgctggtgatgtgccctactagggagcttgcaatccaagtggctgttgaggccaagaaacttctcaagtatcaccgctcgctgggggtgcaagttgtaatcggtggcacacgattaacccaagagcaacgaagcatgcaagctaacccatgccaggttgtacccatgaactacagacagattcttgttgctacacctggaaggcttaaagaccatgttgagaacacacctggtttttctacccgactaaaaggtgtgaaggttcttgttcttgatgaagctgatcgcctgctggatatgggattcagaagagacattgagagaataattgcttccgttcctaaagagcgacagacattgctattttctgctactgtgccagaggaggtccgccaaatttctcatattgcaatgaagaagaattataagttcattaacactgttaaggatggtgatgaggagacacatgcacaggtgagtcagatgttcatgatcgcgccactagatctgcacttccccatcttatatgatgtactgaagaagcatatcgcagaggatgcagactacaaagtgattgtattctgtactactgcaatggtcaccaaacttgttgctgaagttctttcccagctgaaactgaatataagagagatccattcgagaaagtcgcaatcagcaagaactaaggtctcagatgaatttaggaaatcaaagggtctgatattagtgagttctgatgtatctgctcgtggtgttgattatcctgatgtcacccttgtcatacaggttgggctgccagctgatagagaacagtatatacatagacttggtagaactggacggaaaggcaaagatgggctaggtctcttactgttggctccctgggaaacatactttctgaatagcgttcaggatttgtctgtatcacaagctgtggtacctacaattgattcgagcattcagacaggagtcaaagatgcactcggaagagtggagacaaagagcaaggaatcagcctaccaggcatggttagggtactacaactcaaacaagaccattggtcgagacaaatccagacttgttaggctcgcagaagagttcagccagagcatgggtcttgcaattccgcctgccatacccaaactcattcttcgaaaaatgggccttaacaatgttcctgggctgcgatctgtgtaacccttgtgctgaaggttgacaatttttttactgcccccaagtttgacaacctcagttctaagatgactgctgcatcctttttttgaagccagctcttgaccaatctattatcaccaccgggcaggttcaaagctgaaatgaacccagtgatccttcatataggagtaactattttttttcacagttgtactgacctacatcatgtgggagcatatttttttccttcaccataactacactgggccccaagtcctcccgagtatggaaaatgaaatgtacctgttcttgcggcgccacaagacgccacaccacataagcagtggcgtaatataatgcagtcatattgttacattatatatcaactactcgtaatagtagaatcattatcttgtttc

SEQ ID NO: 74824 - DNA, 1683 bp, Oryza sativa
  Clone ID: PAT_MRT4530_74972C.1
accgccgccgccgccgccgcccgcgccgccggggagggcgccgtcgagatagagatcggtcgccggggagagatgatgtctggcggccccagcgacgcgacccaccggaagcggcggcggaggcgggggccgaagggctcgggggtcgacgggccctcgatccccagggcggtcacgaccaacggagcaggtcccgaagaggaggaggtggtggaagggaaggctatggagttggatgcggggatgagcgctgccgaggtgggaggcgtggttggctcgcatctcagcgagacacgatttgatcaatgtcctgtttctccgttgtcattgaaagcaatcaaagatgctggatatgaaaagatgacccaggtgcaggaggcaactctgccaataatccttcaaggtgaagatgttcttgcaaaagcaaagacagggacaggaaaaactgttgcctttttgcttccagccattgaacttctctctacattacctcgttctccatctataaatttgcttgtgatatgccccacaagggagctagcaaaccaagtggctgctgaggccaggaagcttctcaagtatcatcgctcactgggtgtgcaggttgtaattggcggcacaaaattacctcaagaacaacgaagcatgcaatctaatccttgtcagattcttgttgctacaccgggaaggcttaaggatcatcttgagaatacacctggtttttccaaccgaattaaaggggtgaaagttcttgttcttgatgaagctgaccgcctattggatatgggatttagaagagacattgagaaaattattgctttcattcctaaagaacgacagacacttcttttttctgctactgttccagaagaggttcgtcaaatttcgcacattgcaatgaagaggggttacaagttcattaatactgttaaagagggtgatgaggagacacattcacaggtaagtcagatgtacatggttgcaccacttgacctgcacttctctatattgtacaatgtactgaagaagcatatcgcagaagatgcagactacaaagtgattgtattctgtactactgcaatggtcaccaaacttgttgctgaagttctttcccagctgaaactgaatataagagagatccattcgagaaagtcgcaatcagcaagaactaaggtctcagatgaatttaggaaatcaaagggtctgatattagtgagttctgatgtatctgctcgtggtgttgattatcctgatgtcacccttgtcatacaggttgggctgccagctgatagagaacagtatatacatagacttggtagaactggacggaaaggcaaagatgggctaggtctcttactgttggctccctgggaaacatactttctgaatagcgttcaggatttgtctgtatcacaagctgtggtacctacaattgattcgagcattcagacaggagtcaaagatgcactcggaagagtggagacaaagagcaaggaatcagcctaccaggcatggctagggtactacaactcaaacaaggctattagtcgagacaaatccagacttgttaggctcgcagaagagttcagccagagcatgggtcttgcaattccgcctgccatacccaaactcattcttcgaaaaatgggccttaacaatgttcctgggctgcgatctgtgtaa

SEQ ID NO: 74825 - DNA, 249 bp, Oryza sativa
  Clone ID: PAT_MRT4530_74973C.1
atggtccctgcgcaaccgtcccacgggaccgatggtcccgcgttttggatctgtggaccatcgcggtcccgcgtttccgttccgcgggacggggagaccgaggacactagatctggcatccctctgatggatctagttgagggcgcacagaatgaagatgaggaggacgtgatcctcaaccaaggccgtctggatggtccctggaggcagcgagatgctaagatcgagagtgagctcaacgtacgctga

SEQ ID NO: 74826 - DNA, 138 bp, Oryza sativa
  Clone ID: PAT_MRT4530_74974C.1
atggcgccatttaactacgagcctatctacctctggtgcctgtacaccgaagagcagccgagcagggagctgaatgatcttttggacgctacccccatggagccccatcttgttgagataaactcagaggacaactag

SEQ ID NO: 74827 - DNA, 387 bp, Oryza sativa
  Clone ID: PAT_MRT4530_74975C.1
cgggactcttgggctcaaccataggcaggaccgccggggtctcctttaaactcgtccgtggtttgctaaatctactcctgcaccgcccaactcaccggcctccatctgatacgcgtccagccatcccacaacaaacaggcggcacctaggaagccgtgccagcaatcacattacccggccaccaatgccctcgaccgaggtggactccagatcccgaccatcccggaagttcggagactcccccggatgggcgaccaaatgggctggttcaaccaccctcacatgcactgccggtgggacagaggtgacaccacgccctactacatgcactcgctcaggaattcgatcatgaccacggtacagctctatgacaacggcccacgctac

SEQ ID NO: 74828 - DNA, 701 bp, Oryza sativa
  unsure (1)..(701): unsure at all n locations
  Clone ID: PAT_MRT4530_74976C.1
cggtccggaataccccgntcgacccacgcgtccggggatgctcacttctggtcagcatggtgtcgctcgtctgtctcgtcctgctccaatccaggggaaaccatcaaagaccctggtggattgccttgccatcttcgtggtcatgagacaatgcacagctcggttgatgaagccctcttgctaaatgtaccgcataatcaaatcaagatgcaccttgttgtttgtttttttttgttttttgtttgcataagaactttcatttgagctttcagtgtatactagatcgactcccgccgcaagcttgtcccattgaatagtgatccaccataaccattcaccaattcggttgcaaatctgaaattctatgatcttagattcttggtacagctggtgcttcttctccaagactctcgccgagcgcgaggcgttctattacgtggttgacaacgctgctgtcatggacttcatcactgtgaacaccagcggctccatcctcatcaacatgctcaagtgaaatatctttgaatattttatcgattactctggatcatgtngaaggatatcttgaatcggctgcaaagacaataatttcgtgacgactttgttcaggtggggtgcagagtactacattaaagtggatgttgatttacatgtaaatttatatgtgtgcgaaatgttgccctctgatctaacatcatacc

SEQ ID NO: 74829 - DNA, 809 bp, Oryza sativa
  Clone ID: PAT_MRT4530_74977C.1
ttttttttttttttttataagaaacttcttgggtattgagttgttgacttcactttcctagtgtcgtgccgctgtactgtagctgttgcgagttacaatgtgtaccaattaaccaatacatgaagctgggaattttccttccctaattgggcatcgaaagcaccatattcctcttaaaaaaatataacaccgtatcctactgcggctttttgttagcgttcgaatacctcctgggtaaaccatttggaagagctggaaggagtcaaagtgacttctccctgtcccacattattccgttactccttgtaatgacaaatataacaattaactcaccacacctacatcagaagaggatacaagttttattgtgattatttgaccgctatcttttatcaacattagtacatactgcactcctataacagcctattagagtcctccatggatgcggccttcgacgaaaaccttttatgcatcacagatggtgaaattagtacagttttactcttgtatcaattggccttcgacagatagggcaatgttcgacttgcggtccacattcagcacatgtctggtgtccgcaaccaaaagccatgtcccggggtttggagaggcaaactgggcagagttgaggttctgctgctctagcatccacgcttggtggggatgtaactgatgctgtgattgctgaatctacaggtgcctcatccctaggatgagaaggcatactccggaagctatttgctcgagatggtgctgctctcgagattgtattatagcttgcaaagggagggggcagtggaactcgc

SEQ ID NO: 74830 - DNA, 3003 bp, Oryza sativa
  Clone ID: PAT_MRT4530_74978C.1
atggcgacggtggcggcggcagcatcccccttcgccgcgccgcacgagatgatggcgcgcccggccgccgccgcgccggaggcgacgatgatggatttggggcagctgctgcggctgacggacttcgacaagatcgccaacctcggcgacggcgcctcgggcgtggtcgccaaggtgctgctccgcggctgtggctccagcgccgtgttcgcgctcaagaccgcgcactactgcggcggcggcgcggaggtggaggtggaggcgctccgccgcgtggccgccggggccgggccatcgggctcgtggtcgccgcacgtcgtgcggtgccacgcagtgttccggtgcgccggaggcgagcccgcgatgctgctcgagctcatggacgccgggtcgctcggccgcgtcctcgccgcccgccgcggcggcgaagggcggcgcggcctcccggagcccgcgctcgccgaggtggccgcgcggtgcctcgccgggctggcgcacctgcactcccgcggcgtcgtgcacctcgacctcaagccggacaacctcctcgccagcgcccgcggggacgtcaagatcggcgacttcagcgtgtcacgcatcttcctcggcggcgccggcgagcgcctccgggtcccggtcgccgccggatcgacggcctacctgagcccggagcggttcgagccgaacgcccacgccggtccgcgcggcgcgtgcgccgccgacgtctgggccctgggcgtgaccgtcctggagctcttcctgggtcgctgccccatcctgcccgtcggcgagaggccgtcctgggagaggctcaagaaggcgatatgcgacggcgaggcgccgtcgttgccggcgagcgcggcggcgtcggcggagctccgcgggttcgtggcgtcgtgcctgcacaaggacccgagacggcgcgccacggtggcgcagctgctcgcgcacccgttcgtcgctcgccgcgacggcgaggcgtgccggcgccagctacgggagatcatcgtggagaccatcgccaggagccggacgtatggcacgcggcgctcgctggcggcggcggggatctactcggcgccggcgttcttggcctacctggcggcggaggcgtcgcccgtccacccgctcgctgcgcggaacaaggcccgcgccgccgccacgctggtgcaggcatggcgcgcccgccgtcagcctcaccatggccgtgcctaccatggctcccctccccgtgcccctgcccatcgcccccatcccagtctctcctccgcgagccttacgcctgcctcggcagccgccgtcgccgtcgcctctacctccgcggcgggaggaggagggggcggcggtgaggctgagtacgaggtctccgatgaccaccgtgctgcgcgggagcgccatgagcgcgtggtgcaggagctgctccagcgccgccgcaccttcgccatggccgtgcctaccaacgacttcgccgtgcgggcgcgcctccgccgcctcggtgagcccgtcacgctcttcggcgagcgcgagatggagagccaggaccgcctccgcgccctcatggtctgcctcgaggccgacggccacctcgaccgcctcgtccgagcgcaggagaaggagcagggcggcgcgagcgccgaggaggaggagctggccgcgaccgactgccgctggcgcacggcaaggctgcgcccggcacggaccgagatctgtgccaggcagtggcaacgaactccggaggacagcggccgccggatctgggtcgaggtcgaccggggcaaacggtcgcacggcggcatgagggcgaactccggccgccccgtcgttgctcccaccgccgccgccaattgccgccgccgcagccgccctcgcgccgcccccattgttgctcctccttctccgccgccaccgccgctgtgtcggccatggcgcgatggccacgaagaagatggagaaggaaggaagaagacggaaatggagaggatggatagaaaaggtaaaattgcagtggtatggatcaaattaacacattcaaaaaataagactagcgcgcagtgcgacacggcggcggcggtggtggccagcaactcccgatcgccggagagggcacgatgcggggcggagcggccagatagaggagcgggcgacggcgcggggagcggccggtcggacagcgggcggcagctgcgcccgtcgtactggcctgccggaggaccgggcgagcggtgggcggagcaggcgacggcgcggggagcggccggctggccagcggggcagtcgagcgaggcgggcggcgatctcgctatcgttcgcgtgcggccgagctccccggtgacgctcatggagctttcctctcaccgccccaacagcaagacgctcgtcgaggcaggcgtcgtcccggacatggtggaggagctctacatccgaaaggtagacgacgagccgctccgcaacaaagccatggccgtcgccgtcctcgccaactcggataccaccgtggtgaataaagaaggccatgtcctcacgtccaagtactccatctacgacttcgtccacatgctcaagtgcttcattcccgacgagctcaacgcctcaacctcagcatcatccgtgtcaccgcgcacgccaattcgctcgccgccgtggtctcggtcgtcaaggagaaccaccggggccactccatcctggagctcccggactgaagcgctcggtgtcgccgcgacgaggctactcatcaccctgtcagtgcacatggggcacaccatcgccgagaggctccgcaagatgcagagcgccggcgccagcgaaggaggcagacgaggggcggagggccgctctgctacgggcggttcgcggtcgtgggcggcggcatgtcggcggtgtcatgctccaccgtgcgagccgccgtggagaggggaggagagaggaagagagatggtgaggggaggggaagaagtggctgacatgtgggacccacgtgggtcccacgctgagtcaacggccata

SEQ ID NO: 74831 - DNA, 263 bp, Oryza sativa
  Clone ID: PAT_MRT4530_74979C.1
ccccccaaaaacttaaataagcagcgccctttccctaagcgaggaaagggaccacctcattaaaaaacccccttcaaacttatcctataaaggggcctctccccagataatcacctcaccgccccgacatcccaccaaatagttcccattaaataactctaccctccaccattcgcgcattctcctccccagcatcagcagcacaacagctgcccttccttcatggaaggatgcttggctgccctctccttctgctgtctcct

SEQ ID NO: 74832 - DNA, 4210 bp, Oryza sativa
  Clone ID: PAT_MRT4530_7497C.1
atggcggggagggcggcgacgtggggacgtggagtgggggcgtggcgtggagcagagaaggcggcgacgcggacggtttcggcggcggttgccgtcgtggggcgggcggctagaggaaggggacgacctgacaggttgagctgcatcggtttcaatcttcaacaagagaaatacaaagtgaaggtagttgctgatgttcctgggaccagttcttctaaagatggagaagggaaacaagctccaaatggctcggctcagtcgagtgataaaggtgctatagatggttctcaaggagaccaaggtgacggctctcaaggagtgcaaggtgttcaaggtgatggtgctcagggagttcaaggtgaaggccttaatcaaggcagcaatgtggcacagttgcagttcaataacttccaagatcaggttgactatgttgtgcaccatgctttgatcaatcagtctggaatattagtcaacactttgtcaaacatggtgaagtcgatggttgatggttcaatagctgaatatcaagctacgggaccagtttatctgcaaggagcaacagtagattcagcaaacgccaccaaggcaacaggttgtacagccgattcagcaaacacctccgatccaacaggttgtgcagccaattcagtagacgccaccaggacgacaggttttgcaaccaattcagcaagcgccattaaggcaacaggtcattcagccgattcaacagcaaggcttgatgaatgcatcggctgggttccagacttttcaaagttctcaaggcaagatagtacatcgacttatgaagacatcaaccgatttttggccaagtgcggtgaagcatcggctgtggacgccttaagggttaggttgttccaattatccttgtctggatcggcctttacttggttttcctctttaccatatggatcaattaatagttgggccgatttagagaagcaatttcatagctatttctacagtgggattcatgagatgaaattgtctgatctaatagcgatcaagcaaagatatgatgagcctgtgcatgagtatattcagaggtttcgagagatgaggaataagtgctacagcttgagtttgactgatgcccaattagccgatttggcttttcaggaggtttgcagaagccatgaagaactcaagaaggttaaccatgtctgtccttacatatatgggtcggataatgatgatgatgatgattctgaaatagcagcagccgagtgggtaagaagcaaaaaagttataccatgccaatgggtgaagaattctggaaaagaggagaggtatgactttgatattaccaaggctgacaagatttttgatttgctactccgagagaagcagattcaacttcccgctggtcacacaattccgtcggctgaagaattgggcaagaagaggtactgcaaatggcataattccgggtctcatactaccaacgattgcaaagtctttaggcagcagattcaagcggctattgagggaggcaagatcaaatttgatgattctaagaagccgatgaaggttgatggcaatccttttcctgtcaatatggtgcatacagctggccgaacagccgatggaggtcgtgcaagaggttttcagggttgggagttccttagattttgttggaatgaaggtatgagactgccatctatcgaggactgtcccggatgcagtgatattgcggagagctcgagccgatcgtatagtacgggcaatcggctgaggcaaacaagagttcctgttcatcaaagattgggtcccgtgaaccaagatcgtggccaggaggacaatgaaaacatgaaaactcaattgtgtccttctgaacaagcagtctttgagaagcctcaggggacagagaatcggcatcttaaaccattgtatataaatggctatgtcaatgggaagccgatgtctaagatgatggtcgatggtggggctgcggtaaatttgatgccttatgctacgttcaggaagttgggcagaaacgctgaagatctcatcaagacaaaaatggtgctcaaagactttggtggcaatccatcggaaaccaaaggggttctaaatgtggagctgacagtcggcagcaaaactatccctaccacattttttgtcgtcgatgggaagggttcttacagtttgttgcatggaagggattggattcatgccaattgtggtattccttcaaccatgcatcaatgcttgattcaatggcaagggcgacaagattgagatcgtgccagccgacaggccagtcaatgttgccagtgccgatttagctctttgggagatggatggtctcaattgcttatctggaaaagtttgggatggagattttttaaaaatggaaaacccaagctattattttgaggatgtcatggagggttcaaatgtctacaccaaggacaaagtagatgatctcgatgacaaacaaggacagggcttcatgtcggccgatgatttggaagaaattgatataggtccaggtgatcgaccgaggccgacatttattaaaagggataccttttcagttatatttgtcggccggttaatgcattatctattgtccaatgaatgcactgtcatatgcaaagccgatgttgttaaatatatgttatcggctccaattttgaaaggaagggttggaaaatggatattttccttaactgagtttgatcttcggtatgagtcaccgaaggcgatcaaagggcaagctatagccgatttcattgttgatcatcatgatgattcaatcggctcagttgagattgtgccatggactttattctttgatggatcattgttcaaggaagttgaagccgatgctattgaaatcatgggggattctttgctagtaatcagtcaattggcaggagaatatgagtgcaagaatgatacattgatggtttataatgaaaagtgccaagaactgatgaagggatttcggctggttactttgaagcatgtatctcgagagcagaatattgaagctaatgatttggctcaaggggcatcagggtataagccgatgatcaaacacgttaaggttgaggttgctacaataacagccgatgattggagatataatgctaaggttgcaatcggagaggtttatgagggaacttgtggcactcatcaatcggctcataagatgaagtggttgcttcggcgtgcagggtatttttggccgacgatgctagacgattgtttcaggtattacaaaggatgtcaagattgtcagaaatttgaagcgattcagcgagcaccggcgtcggctatgaatcctatcattaaaccatggccatttagaggttggggaattgatatgatcaggatgattaatccaccatcaagtaaaggacataagtttatattggtggcaaccgattatttcaccaagtgggtagaggcaattcctttgaagaaggttgattctggggatgctatacaatttgttcaagagcatataatctatcgatttggtattcctcaaaccattacaactgatcaaggttcgattttcatgtccgatgagtttgttcagtttgccgatagcatgggtatcaaattgttgaattcttcaccatattatgcgcaaactaatgggcaagccgaggcttctaataagagcttgattaagttgattaagagaaaaattcctgattatcctcggcaatggcatactcgtctagccgaagcatatcggatggcttgtcatggatcgatccaagtccctccctataagcctatttatggacatgaggctgtcttgccatgggaagttagaatcggctcgagaagaacggagttgcaagatgatttgacagccgatgagtattataatcttatggctgatgaaatagaggatttggttcaatcacggatgcgagcccttgcaaaggttactagggataaggaacgaattactcggcattataataagaaagtggtgcccaaagatttttcggaaggagaacttgtgtggaagttgattttgccgattgggactcgggatagcaaattcagcaagtggtcgccgaattgggaaggaccgttccaaatctataaagttgtatctaagggagcttacatgttgcaaggactcgatggagaagtttatggcagagcgctaaatggcaagtacttgaagaaatattacccaagtgtttgggttaatgcatga

SEQ ID NO: 74833 - DNA, 231 bp, Oryza sativa
  Clone ID: PAT_MRT4530_74980C.1
atgacgaaatttttgataaattttattgctcttcctcgcgtggtaacagtgatgtcacctgtggtgtgctcggctcagagtgatcgttcggtgtacgaggggtacttccagttggccctgccactcctccttggtctcgttgacgggatcttcaaagctggaaaatatagccacaactggatcatttcagtcaacaactcaacatgcaactccgggttcattcaagattag

SEQ ID NO: 74834 - DNA, 339 bp, Oryza sativa
  Clone ID: PAT_MRT4530_74981C.1
atgaacggccagatgtgtactggcaccgagcagtaccagtaccagccgcgcggtgcagaccctgaaatcagccgccaggagcggacctcgccgtggtcgcggccgcgtcgcccccctccggctccgcgggccgaccgtggagagcgcggcacttggccctcgccccaacgcgcacggagcccttcgtcgaaggaggtcgcggcggagccccagggggccgccctcctaaaccctaaacccgtctcgccgcccgcgggattctggggttctggggattctgggctcggtggaagcggagaggaagagggggatccgggcgcggcggtggcggcgaaatag

SEQ ID NO: 74835 - DNA, 2313 bp, Oryza sativa
  Clone ID: PAT_MRT4530_74982C.1
atggcgatggatcaaccggaacattttctataaggtatttcgaaagaattcttcgatctccaaataggttgtagaggtggctatggttagatttactagggagggcggacaattgggaaagatattgctgtggagtcgggaggtcatttgcggggactaggtgacgtacaatttatcgaggaatgcggcaacctaatgaggcttcatgatagaattaacgtacgatttataggccagtgccaggaagcggcacatgaacttatggaggttaatagggaagatgtaattggtaatttgagggtataagtgctcttctatggatatctgccgcgtgcaagcctggagtactatcggtatgatcttagtatccttcctgaaggattggaagaaccaattttgcctctggaccttaaaccagtcagcttacttcttgttattatcaaggtgctggtagtagctaatgtttacttaacatggcccttaagtggctcgcatacacattccaccaaagttttcgcaggttaagagtactatatggcaccagaatactcagcacaacctaaaaaatcaaataagaatgatatattcagcttaggtattataatcatccagataatggtgggacataaaggctactcaaaatatggcgaaatgtcatcaacccaacaattcgtcgatctcgttgcaaataattggaggaataggatcggggacacatcaatgcacgcgaaagaagagtgccagcaagtgaaaaaatgcgttgaaatagctgtacgctgcgtcgaggttgatagacacagcagacctgctataaatgacattatccatgagttgaaacagacagaaatttatactagagccgtgtcgtcatcacaggaccaggctaaggtagccaagattgggctgtggggtggagctggtggttccagtcactatgacattgaggtggcaccccgccggttggaaagcttgataatttctagcggtgaggtcatctactcacttgagttctcatacattgaccacagtgggcagcagcacacatcaggcacatggggcggctatggcccaaataaagggaacaaacgtactaagattcagcttggtcttatagagtatgtaacggaagtttctgggacaatcggaccatttgatagggcacccgctggtgttattacatcgcttacgtttatcactaataagggaagctacggaccttttggagaagtaagaggaactcctttccacatcccagtgcaggacaatggcagcattgttggcttttttgcacgtgctgggtggtacgtggacgcttttggtatctatgttaaccctaagcagaaaacagtagaagacgatgatgatgaggattccctcgcgaagattgggccatggggttggaacggagggagtcatcgggacatcaaggtggcaccacggcgtttggaaagcgtgacgattcatagtggcaatgtcatcgattcacttgagttctcctacagtgatcgtgatgggcagaagcattcgataggcccgtggggcggtcttggtggaaccgcttatacgatagagcttggccctttggagtttctaactgggatatgcgggaccatgggcccatttaacgaggcaccggatagggatgtcgtcacatcactcacgctgatcaccaacgcccgtaggcgcggtccattcggacgaggcggaggaagtcctttccagatcccgatgcgcggcaacggcagcatcgtcggcttcttcggctgcgcggactccttcgtccatgccattggcgtctatgccaacccccacctgcaggaagcaccggcaccacagactgggcttaccaggattgggccatggggtagaagtggaggtgagtcccactacgtcgatgcaccggagccacatcgtctagtgagtgtgactatccgtagtggtgacgtcatcgattctattgagttctcatatgccgaccatgacggaagtgagcaagttgttggtccatggggtggtcctggtggcaatgcgtataagattgaactgatgcctctggaatcacttcaggggatcaccggaacgttcggtcccttggatgcagcgtcacctgacacagtcgtcattacctcgctcacgttctccacgaaccaatgcctcagctacgggccgtttgggcaaggcgccggaggcggagggactccattcacggctccgggggagagcgacgggtgcattgtcggcttcttcgcccgcgcggggtgttacctcgatgcgctcggggtgtacactcgcacggacgcccaactttactag

SEQ ID NO: 74836 - DNA, 566 bp, Oryza sativa
  unsure (1)..(566): unsure at all n locations
  Clone ID: PAT_MRT4530_74983C.1
ccgggtcgacccagcgttcgtttgcgcgcgtgtgtgagcagggggggcatggcgcggnggcggcgggcggcccggacgggtggatgacggtgccggcgttcggggactgggacatgaagaacggcgcgctgccggactactccatggatttctccaagatccgcgagatgcggaagcagaacaagaaggagctctcccgcaccagcctcggcggcgacgacgacctcctcgcccagcagaagcagcagcagccgtagccgcagcagaggccggccggtcacccaccctcgcgcgatcaatcgatcggtacggtcaagctagctaagacgagctatggccatgctcgggaggaagagagggggatcgtngtcggccaagctgncaccccacgccgaggacccgtgtgcggtttcttcgtcgccgcaggccggtcttaccgtcaccgacggtgggcaggaggtggccatgttgcaatttgttgcgcagttaggcatacgaggcggggcggaagaggctggacagcatgaaccagaggcttaggtggttggagcaggatatggagacgc

SEQ ID NO: 74837 - DNA, 216 bp, Oryza sativa
  Clone ID: PAT_MRT4530_74984C.1
cccacgcgtccgcccacgcgtccggaagatcgtgtggcccagattcgccgcgacgagctacagaggggaagaattgccgtactgtgggcgtcatcgtcgttgtcgtttagctatgggcgtactcaatataagcccgagcttttggctgtaactttttatcaacttgaaccctaatataatttcccctcttgttcttgcggccaaaaaaaaaaaaaa

SEQ ID NO: 74838 - DNA, 538 bp, Oryza sativa
  Clone ID: PAT_MRT4530_74985C.1
cccacgcgtccgcccacgcgtccggcgtgacagttgaaactagatgtcatataaatctaaataaaatcacctatttggatgggataaagcaggagaggaagcagagttcccctcatgttatgcatcggggggatcatagaaatgctgatcaagttacaggcaatgggcaccttggcaagcagaatacaccaaagactgctcaagatgccccaatggacgacattaaagaacagcgcaattcccatggctcaaagcaccatgacagtcatgatactgctcatgagcgaggtgaaagagactataaaaggcctcggcctgaaggttagttttgatgacattgagagatcatttgtgattttgagcgatgtgctggaaagtgagcacttggcttggaacttaacatattaagatcagcatatgttactcgaacatatgcattttctgcctgagatcgctgccatgtgacatcaaagtgggcatatgctgtggagtgacaggcataaggatgctcatgtttttacccagctgtatacaacct

SEQ ID NO: 74839 - DNA, 2164 bp, Oryza sativa
  Clone ID: PAT_MRT4530_74986C.1
atggctatgatgccaagtgattcatcacatcatggaattgtagaaaatagcccatacagaactacccagggcaggaatgaggagactggtgaacttggtgcttcatggtatttcagtagaaaggaaatagaagagaattctccatccaggagggatggcattgatttgaagaaagagtcttacctccgaaaatcatattgtacttttctacaagatttgggcatgaggcttaaagtgccacaagtcactattgctacagctattgtgttctgtcaccgtttttaccttcgtcagtcccatgcaaaaaatgatagacgatgtcaaaagctcagagctataaccagaaagagaaatgaatacaaattcttactgccaatggaaagagacagtattgtagtgcatacattgccacagtttgcatgttcttggctggaaaagttgaagagacgcctaggccttttgaaagatgttattctggtttcttatgagattattcataaaaaggatcctgctgctggtcagagaatcaagcagaaggaagtatatgatcaacaaaaagaacttattttacttgcggagcgagttgtacttgcaactcttgggtttgatttgaatgtgcatcatccatacaagcctttggttgaagcaataagaaaatttaaagttgctcaaaatgcgcttgctcaggttgcatggaattttgtcaatgatgggctgcgtacttcgctttgcctgcagttcaagcctcatcatattgcagcaggtgctatctttttggctgctaaatttctcaaagtgaagcttccatctgatggtgagaaggtttggtggcaggagtttgatgtgactccaagacagctggaagaagttagcaatcaaatgttggagctgtatgagcaaaactgtgcagcacaggcacaaccgtcccattgatttttaggtcgaattttctagcgacgtgccgtagattagcgtagggttcaactttcggccacaagatgaattgaatatgcttttgcagagtcaagttcacagaattcaacaggtgctccaagtcatcatggtgtcgagcactcaaatctagaaaagcaaactgtggaccagaaaatgcttcaaaatgacaatggtgaccatgggagcaacaaaacaagaagcaatcagagtggaagtagagttgattttggtgccaacgatggtttacatcatgacaaacagtccatgacagaaaataagaatcttccatcacatggcaactccagtgaaatcagagatgtcaaccgcaatggcaatgatggtacgaatgtgacatccttgatggtaaataaaattgacaaggataaggtgaaagcacaaatggaaaagcaaaggaaactgaaaggtgatgttgctaggaaggtagaggtaatagatgatgatgatgatcttgagaggcaactagaacatgacattgaattggctgttgaggataataagataaagcaggagaggaagcagagttcccctcatgttatgcatcggggggatcatagaaatgctgatcaagttacaggcaatgggcaccttggcaagcagaatacaccagagactgctcaagatgccccaatggacgacattaaagaacagcgcaattcccatggctcaaagcaccatgacagtcatgatactgctcatgagcgaggtgaaagagactataaaaggcctcggcctgaaggcgaattttcagcgacgttccgtagattagctagggttcaactttgtccactagatgaattgaatatgcttttgcaggctgtctgccccttaactagctcgagaagttggcattggttcataactttgaaatattttagcttgttcaggtggcggtttcttcccaacattgaacctggattctcgaatggaatggcgttcaaatgttctatcgaactatgtgcatggggtgcagttaatgaaatgggttctattttcctcgttttatatgttctatcagattacatgcttctgttggatgatgatggctggataactgggttcatgttcgaaaccaattgagagaccaattacaaatttgagcgatgtgctggaaagtgagcacttgtcttggaacttaacatattaagatcagcatatgttactctaacatatgcattgtgtgcctgagatc

SEQ ID NO: 74840 - DNA, 484 bp, Oryza sativa
  unsure (1)..(484): unsure at all n locations
  Clone ID: PAT_MRT4530_74987C.1
ggtccacgncngatgttncacttgtcagaaaaccnaaaaactgggttcaaggcgatcgcnctgaccgtggacctccgcnactgggacncacggaanctgacatcaagaaacangttccgttctgccaccatggcttgacctgaaanaatttcganngcctggacctcncggagatggaccanancaacnattccgggctggcctcctacgtcncnggcanatcatcgcgcgcncanctggaaagatgtgaagtggtgctaacatcncntccctccgatctcntccagggcgtcatcnccgcggaaggatnccaagctgggncgtgcactccngcnccgcnggggatcatccgtgtcganacnccgcccccggcanctggactncgttccccgcgaaccatcnccgcccctcnaagaagttggtcncggcnggcgggnggggcgcctccccngtgttcctcccacggnngggttccgcccccggg

SEQ ID NO: 74841 - DNA, 451 bp, Oryza sativa
  Clone ID: PAT_MRT4530_74988C.1
gctttaaatttaactaaatttataaaaaatataataatatttacattacgagtaaaatccataaccggtctctaaacttgtaccgttgtgtcatcccggtccctaaactcgcaaatcgaccattcaggtcctcaaacttatttgattgtgtcatcccgatccctaaacttgcagatcactcgtttaggtcctccaacttgttcagttgcgtcaccccggtccctaaacaggacggtctagagactttatatcaaaaatttagagaccagagcgacttaactgaataagttggaggaactaaacgagtgatctgcaagtttagggaccaggatgacacggtcgaacaaccagaaactgtcgtgcgactgtggcttcggctgccgatcggggccccctcccccaggccctcctctcctcgctttcggcacgcacgactccaaaaactgcaccc

SEQ ID NO: 74842 - DNA, 573 bp, Oryza sativa
  Clone ID: PAT_MRT4530_74989C.1
atgcggcaggctgaccgcaacgtcggcgccatcgtcatcaatccgctcttgccaccggggccgggcggggaggagggcaaggtggttcggcggcgaggtggggagagcaaggagaggacgtcatcgacgctgtcgggcggcagcacagggaggagtggcgcgtgggcgctgggggacgaggggcgctccgggcggtggttgggatcggggcgcgcgccgcgcgcgtctgtggggctgaagagtggtcaggagcggggggggtcaggggatgggaactatattgccggacgcaatgcgaggtcgtccttgtgctatcggtcggctgccccctggagcatgggctcgtggtggtgggtctctggaggtgttttgggggccgggtttccccggtggagggcctgccggccctcccccgtcagcccttccccgtggccggtgcccagctcctcccccgtggctgcccgccgcgccccagcttctcccccggtggcggcgacgtgggaggccgtgcggcgccgccaccggactccggcctcccccaccggccagctgccctgcccactgccgaactga

SEQ ID NO: 74843 - DNA, 177 bp, Oryza sativa
  Clone ID: PAT_MRT4530_7498C.1
atgggcggcggcgaaggcaaactggcgatgacgatgacgcctgtcaatgatgacgaatacgcgcagccgtggaggcgaaaaaaccagtcggcgtcagacaaggcggccaacaatgaagacgatgatgcggagacaccagtcggcgccggcgtaggcaagccggcggtgaagacgtag

SEQ ID NO: 74844 - DNA, 174 bp, Oryza sativa
  Clone ID: PAT_MRT4530_74990C.1
atgaagtcgaggacggtgaatacgaaggctgcgactgcgagacgaaggcagaagcagggagatggccaggttggactcgactcggacacgggttttaggagcggggcaattgatctcggccagtatggcgtgtccattatggattggactcatctagcactggttactggttga

SEQ ID NO: 74845 - DNA, 702 bp, Oryza sativa
  Clone ID: PAT_MRT4530_74991C.1
tttgttttttttttgttaaggaacaccgttttaattacgcgggtaaatgcacttgagcttagcggttgcatttttgcatgtagtagaaggagcagtagattagtagaagtacaatggagaagaagaaagaaaagctaaaagctactcttgctgaatcgaagtgaaaggggaggaggaggagatgtgaattgaatgagccagcagctatggagtaagctatagctcgaatgctatgtacaaaaataaacgtggacgaatcgcaatcagtacaccttcttggagaagaaggtccggaggccgaacagcccctgcggcgggttgctttcctcgccgccggcttccgagcacgacgcgttgttccggcaaccggcggttgccgccgccgccgctggcgtggtcgcgctcgccgcggccttgtcctcgccgtcgacgtcttgggtggtgggggttgctgctgtggttgtggtggcagtggccttcttcttggtggcggcggtggtgggggtgggggtgtcgctgctctgcttctgctcggccgcggcgccttgctgctgcagcttgttgcgcctgagctgccagacggggctggcgcggcccaggcggatgccggtgacggtgagggcgcctgttcgtccatgaccgggcaccagcctcctcagcatggaggtggcgggtgctggcgccggggcggttgctgcggcg

SEQ ID NO: 74846 - DNA, 599 bp, Oryza sativa
  Clone ID: PAT_MRT4530_74992C.1
gtggggaggagaccgaccgaaaaagaggtctagcggccggcgacgcggcggcagcggcaaccgaaggtccttctcacgggagcgccgccggccgagtctcggccgtgccgctcgccctcatcggccgcgtcccggccatccgccgcctccgccagcgcggcggcaagagcgccgaagaagtcgcggtcgacgtaagacgggctgacgatgagcacgtcgatgtcggagccgcggccgtggatgccaaggcagtaggagccgaaggggagcaccgggccaccgtctcctcggcgctctcgtacaggccctcctcgcggaagaggctctccagtcgcgtcatgctctccaggtccaccggcgtcgagcgcctctctctcctcgccccaccagccgcctcgccctgcgccctcttgtctcgccccaccagccgcctcaccctgtcggcttcctcccctcccgtcggccagcccgcacagaggataaagacaagaccggggtcagcgacggcgcacgggggaggagcttgccaaccggctgaccgcacaaggaagagctcgtcggccggccgcagcgcgcactgggaggagctcgtcaactag

SEQ ID NO: 74847 - DNA, 354 bp, Oryza sativa
  Clone ID: PAT_MRT4530_74993C.1
atgaattgggaagaaacaagaaagacgggtacccccaaaatggtttaataggggggtggggttcatcccaaaaaagtgggggggataagggttcccgggggggggaacccttttagagggaaactcccaccctggggggggaacccctaatcatggactttacaaacccgaaattaatttcaggggcagccctaatggcatgggggccactaggggccattgggaaagcccttggggggagggccataacgggccctgggtttggctgaaaaaatccccttggggggcttccttttataaaaattttgggacaagggggcaaccctggggggggggaacccccccggggggaaa

SEQ ID NO: 74848 - DNA, 387 bp, Oryza sativa
  Clone ID: PAT_MRT4530_74994C.1
atggcagctgtttgcttgagcttcttcttcaacaccttgagcgcctccttgcagtacttcacctgttcccgcgtgagcgccggccgcggcgccggatccgcgaagaggacgaaagggtcaaacggagcgggcggaggcgatccagacgaaggcagcgggagccgcgagccgcgtggtggagccgaggtgttggcttggcgggggccgccgccgccgccgccgccgccgccgcggccgcggccgcccagcggcgagttccccgtggctgcggcggcggcggcgtccgggtcagggtcggggtcgagcacgcggcggcgcttggcggtggggggcgaggcggggcgggtcgtcggggtcgccgtggcgggcgaagcgcgtggtatataa

SEQ ID NO: 74849 - DNA, 343 bp, Oryza sativa
  Clone ID: PAT_MRT4530_74995C.1
cagctcaccctccccgggagtgcagaggagacggagggagggagctcgctaagggagaacagtgcaagaaccgcactcggtcgtgcagacagggcaaacaatgcacagttggagcagtcaaccataggagcaagccagagaccggcgaggtgattggcagtcttcgagagcagtgcaacacagtcggacacaagacactcggcagcacaaaggtggccacaaggatgttcaagatccacaaggggtgtggtacagcaccaagctcgagtagggaatgaacaaaatgttttgtgcagtgccacagggttgatatatcagatacatggagagagggaaggaaggc

SEQ ID NO: 74850 - DNA, 315 bp, Oryza sativa
  Clone ID: PAT_MRT4530_74996C.1
tgagcaagcacaacaggaggaatcaaggaacaagggggaaaatgtgagggaggaggaaactgggatacctaagtaatttcctaatccgtttttaggctacctattccaatccctcatcgtatggtgtacattcagattcagatatgatggcttgatatttaggagtctttagaggccaaatcaaggaatgcaaataactatagagttgtacagggttccttaagccctctattaattcaaccataactcgagctgtcaacttgcaagggtttcatcctgtctatatggtcaatattgccactctgtaactaatcg

SEQ ID NO: 74851 - DNA, 2659 bp, Oryza sativa
  Clone ID: PAT_MRT4530_74997C.1
gtgtttgttttttttgcggtgtttattttttcctttttatagagataattacagataatccataacttcacacgacaagaatcatgcacattattctggtcctcgtaacaatcatatacgctaaaacgtactaatcgaatttgcaagctgtgatgttctggaatggactggaatggatgaattttgtagtagaagatacgataggagctaattaagtcgttttagcggacagggagtcggcgatgccatttgcaaggcaatacgctacggactgtatggtgatcatggggttgacgcccaccgcggtgggcagcacgctgccgtcgcacacgtacagccgctccgcctcccagctctcgccgcgggcgtcgacggcgccgtcgcccgccgtggcgcccatccggcagctgcccatgtggtgcgccgagcagaagaggccccacgtctcgctcctcgactgcggcccgcgcaccacggtgacgccgtcgaggaactcctccagcgcctcctcggtcagcccctcgcaccgcagccgctgcccgtcgctccggtgcgtgcccacctccgccgcgcccgccgcgacgaggacccgcagcgcgcgccgcaagccgtcgcggatgtcctccctgtccgccgcgtcgaggcggtacgcgacacgccgctcgccgtgcaccgtccccgacccgcggtccctgaccagggagaagatgtgcaccgtccgggcgaaccggagcatccgctccttcgagtctcgcccggacagccagggcatctgcgtccccgtggcggccacggccatcatcggcgtctcgaggatggcacggtgcggcgcgccggcgccggaggtctccaccttgtgcatcgacgtgatgatgccgccctcgtacgccttccccttcaggtccggcatcgtgtccgggaagtagccccacgccagggcggtcgggtggaggtggaggttcttgccgatgtgcgggttggtgagcccgctccgctgcagcagcacgggcgtgaggagcgagccggccgccgacacggtcaccttggcgcgcacctccagcgtcttcgtgatcgccgggttggtgctcctggccaccacgccgacgcaccgcctgcccctcgccccgccgcgttccagcaccagcttctccgccttgcaccccgtcaggatcaccgcgccgcggcccaccgcgtcgaccagccacgtcgtgtccgtgccgcgcttgtccccggtgcggcagccgaaaccgcagctgccgcagtagtgtccctccgacgagttcctcgccaccgcgtcgaccttgtagcccagcttctcgcaccccttgcggaggaccttgttctggagcccttcctccgtacaccccgacgtcacgccgagccgctcgaacaccttgtccatggcggcggcgtagtcgggggtggcgaacagcgggagcccgtgcgcggccgcccactccctgcgcacgaactcgggcgtcttgaggcaggccgaccagttcaccgccgagccgccgccgaccgtggagccggccaggagcagcccgccgccgttcatcgtggtgacgaacccaccggactcgtagagctggttgatcgacgggccctcgaaggacgtgtagtcccgcgacgtgaagtagttgcccttctcgatgaccaccaccttgtggccggccccggcgagcaccgcggccgccacgcccccgccgcagccggagccgacgatggcgacgtcgcactccacccggcacacgttgcgcgccgcgtcatcggtcaccgcgaggcctttctccgcgagggacgacgggagggacgcgtccgtgaggttgatggtctcgaccacgccgtcgtcgagtggccgcttcgtcgcctcggtgtgctcctccgccggcggttcgtcggtcggcgggctgtacccgatcgctcgccagtgcgggttctctgagctctcgtcaatcggcataccgcgatgcgccgcatgcggaggcgctatggcctgcgccaagacgaggcgccaggagtagaagacgtagaggcagaagaccttgacgacgaggaagaaggcgcgcagcggcgggagcacggtcaccctgctccaccgcccgagcgcctcctcccgccgctccaccggcatctccgcgaacgtgagcacgaacggccacctcccccacgacacgcaccgccccccgcacagcgccagcgtccccagccgcgtccccagcagccacagcaccgcccgcaccagcgccagcgcctcccggaggcacatcctcgtcatcagctccgccacctcgtcggggacgggcgggtcggcggcggaggcgaggaggaagtccctgacggccttggcgtcggacgcaccggcgccgccatagcgtccgcctccggcgtcgtcgtcgtcgtcgtcgcgggtgtccggcgggagcgagggcgccagcgcgccgcacagggcggcgagcgcgaccatctgggaggcggagaagccgtgggtgtaacgccgcccggcctgcttccccgcgccgcctcccctcaggagagggtggccctgccgccgccgctgctggctcttctcctctcccatggcgtctctgcccccgtccggcagtcgatcggcaccaccgcacgtaccagctagcagtgagagtctctcttcgatcct

SEQ ID NO: 74852 - DNA, 177 bp, Oryza sativa
  Clone ID: PAT_MRT4530_74998C.1
cactcgaagatttactcatgagtaaaacttttattgagagaaaatttcactctatggggacgaaataaatctgggacttttagttttcaattagtaatttttaggttttcactatgtattttcctgcatctgacacacgcaacaggtgtgacaccaacaccaagacacacatgccat

SEQ ID NO: 74853 - DNA, 2439 bp, Oryza sativa
  Clone ID: PAT_MRT4530_74999C.1
atgcaggcattccttagagctgctgaagttatgaaaaagaaagatgaactattaaagttggtgaaacttagagagcgccaccggatcgctatccgtatccacaacctcaaatcaagagttgaagaagtgagtagcaggaacacacgctacaatttagtcgagcctatttcctccggcacagaggatgacatggattcctatgcagaagacattcgcaatcaatcagctcgaaatgtggatgaagctgagcttgttgggttttctgactccaagaaaaggctgcttgaaatgatcgataccaatgctaatgatggtccggccaaggtaatctgtgttgttgggatgggtggtttaggcaagacagctctttcgaggaagatctttgaaagcgaagaagacattaggaagaacttcccttgcaatgcttggattacagtgtcacaatcatttcacaggattgagctacttaaagatatgatacgccaacttcttggccccagttctctggatcaactcttgcaagaattgcaagggaaggtggtggtgcaagtacatcatctttctgagtacctgatagaagagctcaaggagaagaggaatttctcctcagttgtcggacgactcattcattttcatcgcttccaacaattatcaactgtgtctcttcctctccccctagatccggccctaccaccgccaaagctgaccggcgtctgcgcggcggctaggacatcggcgacggggaggttagaattagggattattggtatcattcaccttccaaggctcaaggaaatttcacttgaatacagaagtaaagtggctaggtttgctcagcttgagggagaagtgtgcgcacatccaaagcatccagtgctgcaaatgatggaggatcgaagctatcgcgacctaggagataggcacagctcaagctggtttgatcaagtcatcatctcctcctccattggcatctcgggtcgtccctggctccctgcttctgtggctccgagcaggggtgctgatctaaggaggcatccacttttttcaattgcgtctcagttgtttgctagaatgtctgaaagagcttgtgttcatgggagagatatagaagagtgggaaattttgtatgctcaacttccatcagaacttggatgcaacccaagccttgcagcaatgaagaaggtggtagcccttagttacaattacttgccttctcatgttaagccttgctttctatacctttgcatctttcctgaggattttgatgtccaaaggaagcgcctagttcatagatggattgcagagggatttgttagagctaagggtggagaattttggtgggatggggatggggaattgagaaaggaactccctccttttcaatacctgggtagggacagaagacaaggatcctactatgaccttgatacatataatcgtaaggaacgtgtacttattttatcatgtattcctttgattatggctttaagtgattctgataaccatagaagactaattaccgatctacacacgggttgttcaagtcattggcatagaattaaagatggtgtaagggtaccaagaggaatcaagaatttgaagagattgaaagtactagagatagtggatatcgcggtaactgacagcaaagcaattcaagagttgggggaacttaaccagctaagaaaactaagtgtcatgacaaaagggtcaaacaagaaaaagtgcaaaatactttgtgcagccatcgaaaagctcacttccttcaaatctctctatgtggatggtgatcatggatactcacttgatggaacacttgagtgtcttgattctatttcccatcctccttccctcaagagccttagattgaaggggtgtattaaggagacacccaactggtttagggagctcaaacacttggtgaagatttacttatataaaagtcacctaaatggagataccatggagatactcggggaactacataatctcatggatcttcactttcgttggtatgcatacgttggggagaagctagtgttcattgagggagcattccaaaatctccggaagcttgttgttgaaactgaggataaactaagagaggtgaggtttgaggagggcacctcaccccagatggaatggatagaaatctgtcattgcgaactgatatcagggattgttggtgtcaagcaccttccaaggctcaaggagataggactcaaatctgctaaagtggcaaggcttggtcagctggagggtgaagtggacacacaccccaatcggcccatattgcgcctgtctgagaagcgaagctatcacgacttgggggaaacccatgtatctgttgttgaggtggaagtggcggatgagccccttctcaccagcagcctgtggacgttgacgatcgaacaacaaccagtcagtcctgcattatga

SEQ ID NO: 74854 - DNA, 4314 bp, Oryza sativa
  Clone ID: PAT_MRT4530_7499C.1
atggcggggagggcggcgacgtggggacgtggagtgggggcgtggcgtggagcagagaaggcggcgacgcggacggtttcggcggcggttgccgtcgtggggcgggcggctagaggaaggggacgacctgacaggttgagctgcatcggtttcaatcttcaacaagagaaatacaaagtgaaggtagttgctgatgttcctgggaccagttcttctaaagatggagaagggaaacaagctccaaatggctcggctcagtcgagtgataaaggtgctatagatggttctcaaggagaccaaggtgacggctctcaaggagtgcaaggtgttcaaggtgatggtgctcagggagttcaaggtgaaggccttaatcaaggcagcaatgtggcacagttgcagttcaataacttccaagatcaggttgactatgttgtgcaccatgctttgatcaatcagtctggaatattagtcaacactttgtcaaacatggtgaagtcgatggttgatggttcaatagctgaatatcaagctacgggaccagtttatctgcaaggagcaacagtagattcagcaaacgccaccaaggcaacaggttgtacagccgattcagcaaacacctccgatccaacaggttgtgcagccaattcagtagacgccaccaggacgacaggttttgcaaccaattcagcaagcgccattaaggcaacaggtcattcagccgattcaacagcaaggcttgatgaatgcatcggctgggttccagacttttcaaagttctcaaggcaagatagtacatcgacttatgaagacatcaaccgatttttggccaagtgcggtgaagcatcggctgtggacgccttaagggttaggttgttccaattatccttgtctggatcggcctttacttggttttcctctttaccatatggatcaattaatagttgggccgatttagagaagcaatttcatagctatttctacagtgggattcatgagatgaaattgtctgatctaatagcgatcaagcaaagatatgatgagcctgtgcatgagtatattcagaggtttcgagagatgaggaataagtgctacagcttgagtttgactgatgcccaattagccgatttggcttttcaggaggtttgcagaagccatgaagaactcaagaaggttaaccatgtctgtccttacatatatgggtcggataatgatgatgatgatgattctgaaatagcagcagccgagtgggtaagaagcaaaaaagttataccatgccaatgggtgaagaattctggaaaagaggagaggtatgactttgatattaccaaggctgacaagatttttgatttgctactccgagagaagcagattcaacttcccgctggtcacacaattccgtcggctgaagaattgggcaagaagaggtactgcaaatggcataattccgggtctcatactaccaacgattgcaaagtctttaggcagcagattcaagcggctattgagggaggcaagatcaaatttgatgattctaagaagccgatgaaggttgatggcaatccttttcctgtcaatatggtgcatacagctggccgaacagccgatggaggtcgtgcaagaggttttcagggttgggagttccttagattttgttggaatgaaggtatgagactgccatctatcgaggactgtcccggatgcagtgatattgcggagagctcgagccgatcgtatagtacgggcaatcggctgaggcaaacaagagttcctgttcatcaaagattgggtcccgtgaaccaagatcgtggccaggaggacaatgaaaacatgaaaactcaattgtgtccttctgaacaagcagtctttgagaagcctcaggggacagagaatcggcatcttaaaccattgtatataaatggctatgtcaatgggaagccgatgtctaagatgatggtcgatggtggggctgcggtaaatttgatgccttatgctacgttcaggaagttgggcagaaacgctgaagatctcatcaagacaaaaatggtgctcaaagactttggtggcaatccatcggaaaccaaaggggttctaaatgtggagctgacagtcggcagcaaaactatccctaccacattttttgtcgtcgatgggaagggttcttacagtttgttgcatggaagggattggattcatgccaattgtggtattccttcaaccatgcatcaatgcttgattcaatggcaaggcgacaagattgagatcgtgccagccgacaggccagtcaatgttgccagtgccgatttagctctttgggagatggatggtctcaattgcttatctggaaaagtttgggatggagattttttaaaaatggaaaacccaagctattattttgaggatgtcatggagggttcaaatgtctacaccaaggacaaagtagatgatctcgatgacaaacaaggacagggcttcatgtcggccgatgatttggaagaaattgatataggtccaggtgatcgaccgaggccgacatttattaagattgcttcgcttgagataactcaaaggagtgttaatgcaatcaagaagattcagcctccggtgaacaagacagaactacaagatatgatcggcaagataaattttgttagaaggtttatttctaatttgtctggacggttaatgcattatctattgtccaatgaatgcactgtcatatgcaaagccgatgttgttaaatatatgttatcggctccaattttgaaaggaagggttggaaaatggatattttccttaactgagtttgatcttcggtatgagtcaccgaaggcgatcaaagggcaagctatagccgatttcattgttgatcatcatgatgattcaatcggctcagttgagattgtgccatggactttattctttgatggatcattgttcaaggaagttgaagccgatgctattgaaatcatgggggattctttgctagtaatcagtcaattggcaggagaatatgagtgcaagaatgatacattgatggtttataatgaaaagtgccaagaactgatgaagggatttcggctggttactttgaagcatgtatctcgagagcagaatattgaagctaatgatttggctcaaggggcatcagggtataagccgatgatcaaacacgttaaggttgaggttgctacaataacagccgatgattggagatataatgctaaggttgcaatcggagaggtttatgagggaacttgtggcactcatcaatcggctcataagatgaagtggttgcttcggcgtgcagggtatttttggccgacgatgctagacgattgtttcaggtattacaaaggatgtcaagattgtcagaaatttgaagcgattcagcgagcaccggcgtcggctatgaatcctatcattaaaccatggccatttagaggttggggaattgatatgatcaggatgattaatccaccatcaagtaaaggacataagtttatattggtggcaaccgattatttcaccaagtgggtagaggcaattcctttgaagaaggttgattctggggatgctatacaatttgttcaagagcatataatctatcgatttggtattcctcaaaccattacaactgatcaaggttcgattttcatgtccgatgagtttgttcagtttgccgatagcatgggtatcaaattgttgaattcttcaccatattatgcgcaaactaatgggcaagccgaggcttctaataagagcttgattaagttgattaagagaaaaattcctgattatcctcggcaatggcatactcgtctagccgaagcatatcggatggcttgtcatggatcgatccaagtccctccctataagcctatttatggacatgaggctgtcttgccatgggaagttagaatcggctcgagaagaacggagttgcaagatgatttgacagccgatgagtattataatcttatggctgatgaaatagaggatttggttcaatcacggatgcgagcccttgcaaaggttactagggataaggaacgaattactcggcattataataagaaagtggtgcccaaagatttttcggaaggagaacttgtgtggaagttgattttgccgattgggactcgggatagcaaattcagcaagtggtcgccgaattgggaaggaccgttccaaatctataaagttgtatctaagggagcttacatgttgcaaggactcgatggagaagtttatggcagagcgctaaatggcaagtacttgaagaaatattacccaagtgtttgggttaatgcatga

SEQ ID NO: 74855 - DNA, 175 bp, Oryza sativa
  Clone ID: PAT_MRT4530_749C.1
tctggtgcaggcgctgccgctagctcccccccatctcttcgatctcctagctgagctgatcagatcagctgatactgctagcttcctcgccatgattgtgcagtgctgcttacacgtgaggcctccacagggcaccggcgctgattggaggcccgaaagcaagcatgagagatga

SEQ ID NO: 74856 - DNA, 314 bp, Oryza sativa
  Clone ID: PAT_MRT4530_74C.1
ggacggttgagcacttcttttctatgagagaatgggctgctaagactgtaagacatgtcttgaattctatacacaccaaagaatccgaagagcaatcacaaatgaagcagatatttgagagtatcaaggtttatttggatggacagtgacccaatcattgtatatactgacgtgggttcgtgatcaggtccagttttgtcgttgtggctgaatgatatttagtccttgcagggctttgccaacatgtacgtacctagttggggatattagctggtgttcttgatcatttgatctggttacagtcattcacattc

SEQ ID NO: 74857 - DNA, 1922 bp, Oryza sativa
  Clone ID: PAT_MRT4530_75000C.1
ccccggcgcctggggtcggctcggggctcgctccctccccggcgtccgcgccgctcccccgccatgagcggccaccacgaagctaagccctaccagccccgccgcggcccggctcccgccgacgaggaggccgcccccgccgctgcggcggacgaggcggaggcggaggcggaggtggaggctatggagcggtacgagcaggagcaggagtacgaggagggggaggagggggaggaggaggagtacgagggcggggagggggtccccatggacgccgacgcctccgccgcggccgtggcggggatggacccgcacggggagatggtgcccgtggccggcggggaggcgggcggcggctacccgcacgtggcgtcgaacaccctcacgctgtcgttccagggcgaggtctacgtcttcgagtccgtttccgccgagagggtgcaagctgtgctgttactgcttggaggaagagagctagcaccagggtcgggttcggtaccatcatcttcagcggcatacagtaagaagatgaattttcctcaccggatggcatcattgatgaggttccgggaaaagagaaaagagagaaactttgataagaagatccggtatactgttaggaaggaagttgcacttaggatgcagcgtaatagaggccagtttacatcatcaaaatcgaaggctgaagaagcaacatccgtcataactagttcggaaggttcgccaaattggggcgcagttgaaggtcgacctccatcagctgctgagtgccatcattgtggtattagtgcagcgtcaacacctatgatgcgccgtggtcctgatggcccaagaacattgtgcaatgcatgtggacttatgtgggcaaacaagggtacgatgagagaggtaacaaaaggtccccctgtgcccttgcaaattgtgccagctgcaaccaatgatgttaacggaatcgtcgaggcaacaggtgtcgagcagcacaattctgcagtcgaggaggcagtttctgctgcaaatggccatgaatcgcagtcgggagtcgcgtgatgcttgagggttcggatttaggaaaaaggaggaagatgcgtatcaatcactattgacttccatccgcaccacacgagctaaacgggaccagcgcgacgacggccatgggcgtggcggcgatggcggcatgccggtctctccgagatgatatatgcttgtggtccgactttttctcccatgtgtataaggattctattgtggaggcccagggtagaaggatgaactgcagctctgaatccgagaggcgtcaggctctcgagtcgcacgttgcagatctcaagagtgataatgagcgattgagaaggctgtatactgaaactttgttcaagttcaccaatcagatgaaatttcacacagagtctcgtaatctgaaggaagaactggaaaaggcaaacacgagattgctatccatggaagaggagtataagagggaaatcgaacaacttaagcttggcagtgaaatgaacagcaatgacctggagaacaagctcagctgcgctgttgttcagcaagcaaccaatgaagctgtgataaagcaactcaatctggaactggaagctcataaagctcacattgacatgctaaatagcaggttggagcaggttactgctgatgtgcaccagcagtataaaaacgagatccaggatctgaaggatgtagtcattgttgaacaggaggagaaaaatgacatgcataggaagcttcagaatactgaaaatgaattgaggatcatgaagatgaagcaggcagagcagcaaagggattccatctcggtccagcacgtggagacactgaagcagaaggtgatgaagttccggaaggagaacgagtccctaaagcggaggctggcgatctctgaacttgactgctcatga

SEQ ID NO: 74858 - DNA, 353 bp, Oryza sativa
  Clone ID: PAT_MRT4530_75001C.1
ggtgagaattcaaaaaaatacgcgcttaccccatcacaaaacaaaggtgagcacacggactacaccatgagtttagcataagtaataaacctaaaaaaataaagacatctcatactcttcaggctaacatgctctacacacaacataactggagtggaattcctgatgggacaagatcaacctaacagatggacaaggacatacagacacggcagaacctttccgggaagataagactgtaacaggggggttccgtgcacgttcaactgtcattgccatcagcggaacatccaacctaccgggaagcgcaaattcaagggcctctggacgacacctgtaggagggcagtgatt

SEQ ID NO: 74859 - DNA, 1324 bp, Oryza sativa
  Clone ID: PAT_MRT4530_75002C.1
atggggaatcggtgcggtggacgcgtggagaagtttcgtggatttttgagaatggattggggcggattgatgaaccctagcttcgtcggcgcagctttgtactgtaacaaggagtggggaaatgacgagagtttcggcggggaagacgaagcgtcgcttggacttcgtttgataattctttggaattaccacgatgcaaataaaaaggtgcccgacagaaagacaacgacggcgagggagagctcgagcaagggtttctctggaggggcaggcaaagtgcaagccaatggaggttgctgtcggatcgcttggtcgagggtgtgtgctcctaagaactatggcggtttaggcttgccgaatctggagttgatgggtattgcacttcgctccagatggacttggctacagcggacttcactaggtaaaccatggaaaggcctagacatcccggggtcgcaaaaagagaagagcttcgtggctgcatccacagtctgtcagctgggagatggacaaacgatcctcttctgggaggatagctggctgcaagagggctgcatccggtccattgctcctaacatctacgatcgcgtttcgccttgcatgcgccggcaccggacggtggctgaggcactaacggatcgtagatggatcaaggatatcgccggggcacttgggatccaagccatcctagagtatttgaagctttggtcgctacttcatttggcgacctgtatccctaccactcctgattctttcagctggaaatgggaaagctcgggtcagtacatctcaagatcttcttacaaggctctgttctttggtcggatctccttcctctcgaccccgatttggaaatcacttgctccacctcgatgccgctttttcctgtggttggtagcaataaacagatgttggaccgccgatcgtctgcgaagccaggggttgcctcacctggaccgctgtgtcctttgtgaccaaaaggaggagagcattgaccacattctggtaggctgcccagagtcgaggcaactttggtggtggacattaagagcgttaggcattccagattgtctacccatcaacgaaccatcctttcacctctggctctgtggaagccggatgaaattgagagagcaacatcgccggggctttgacaccattgcaacgctggtggcctggtcgatttggaaggagcgaaataatcggatcttcaatcagcagtccaagtcttggatcgaagtggcgaaagcaatggtggaagaagccgtactttggaagtcggcaaatgcaggggtcccttccattttacctctgcgaggtcgtg

SEQ ID NO: 74860 - DNA, 374 bp, Oryza sativa
  Clone ID: PAT_MRT4530_75003C.1
agggttaatcatgttcttgattctgaacagatgataatacaaactactatctccatcctcataatataaaggattttgataatcaaatcataaggggagtgcacctctaagctaggagataacaagaattctctctctaatacttggcaagcacgcgctagctaattgacccatctggaccctatctctgttcttcctgctgctctcttgtgcggttgtgccccatgtagcccaaggaccatatggcagatggtcttggttcttcattgacaacgaggcaaacgataggagttctggtacagtaatagagtcttttctcttcaaatgaagctgtggttgagtgggtgactaatggaggacatagtgcagttatg

SEQ ID NO: 74861 - DNA, 177 bp, Oryza sativa
  Clone ID: PAT_MRT4530_75004C.1
atggccttaggaggcggtggcagtgcagctcgaccgagccaccgccggcagccactccgcgcccccttctcgttgaatctggccataggaggcagtggtggcagcttgaaagcgacagcgagggctgaagctcgacggtggcaagctcatactgctcatgtctctggtgaggtttaa

SEQ ID NO: 74862 - DNA, 2698 bp, Oryza sativa
  unsure (1)..(2698): unsure at all n locations
  Clone ID: PAT_MRT4530_75005C.1
tcagtatatctcagctccgagcttatcctgcactgtagcaaaattagcttgtggataactctgtatatccagtgattctatttcagcccagtcctggtcagcattccacgagaatccaagctcatgtgctgggaacagatgcttgaacctactctggcttttcttgtaaaaccaggtggcatgcctttttgtttttgttttgtggatggatgaaggaatacagctattaagagtaatgaataaaattgaattgacctggtcacgaatcgtgatattcctatgaatttcatcggtcagtactggtaatggagaaaatagaaatgctgggtcaacattcccctgtacactaattttgttaccaaggcgtctccttccatctgccatatccactgtccagtcaagaccaataacatcgactcctgtgtccgtcattcgctcaagcaagcctccatttccatttatatagagaacaagtggtacattggggcattcaatcttaatcttattcacaatctgcttgatatatggttttgaccactgctcccacacatgaggtggaagttgtccaccccatgaatcaaatatttgtatacattgagccccagagtttacttggtaaataatgtattcagatatggcgtctggtctgcaactcactggttgctggaaggatttaagtgaatcacacaatatcatgaatcccaaaaatttaaatcacttgaatcctgtaaaggccaacacagcttgtcgttttactttcacaataactgccagctcatataactcagtgcgtagaatcttgagcgactcaccgacgaaccggagcttctcgaagtcaatgggggtgagctccctcacctgctcctcggacctcacgggagactggatcacaggccccttggagtcggagatatcgaatggcaccccaatggccggcagcggcgtgagtatgtccgagaacaggatgacgccgtcgggcgcgaaggcgcgccacggttgcagcgtgatctcgacgatgagttcggtcgtctcggaccgctcccggaacgaggggtggcgcttggcgagcgcctggtactccgccatgtaccgcccggcctgccgcatcatccacgccggcggccgcggcagcccgtcctcgcccctcgccgcccgcaccagcagcggctcctcagtggaggaggcggttgcgagggacgcggagatggcgggaaggccgctgcgccggcggtgggtggtgcaggaggaggaggaggccggcgccgcggcgaggaaggcggcggtggccgtcgcggagatcatggcggtggcggcgacttcgcggcgtgggcttaggtggctgttttgcttatctaatcctgcttggggtcgggagtttgggtttgggtggagaaggagcaactgctggtgcggattccgcctccgcgccctcgtggcctcgtgggccaacggggaaggacctggcatgccaccgtggcgtttgtcgtcgcgcgtgtcggaggagccgacacgagcgaggacgcggaaggggactccgggcgcgccctcttcttcctcttcctttgccgtcgctcgccgtgtgctcgccgctgtcgccgcccgagctcggaaacgcctctcgtcgccggccttcctcgatgcgtttcctcctaatccggcgcaagggacggattcccgtagccgcgtagatgctctcgccgccgggaatcggcccctcgtgacctcgtcgccgttttccccttttctctccgctggtggccgccgccgcaatccgccgccgtcgagctccctccagcgaatccgagccgttggctcgactcccctcgtcccgcgcaacttcccggtgtgctctctttcgcctagatcgccgtgtttcgctccgccgctcgccaccgccgtccgccgtccgttccggccggcgtcttcttcaacctcccgccggcccgcgttgctgccacgtaggcgccagctcggccaagaccgggtcgagccgaccccggtcagccgctccctccggccccgctcgcgggcgcggtccaccgcgagccgtgaggctgcgcgtgggcccgccgcatccgcgtccaccgcgaaccacgcgcatgcaccgcgccccgctccacaccctagcgccgcgccacgtgctccctccgcacggtgagccgagccgctgtctccacaatccaagcccattctgccttcagatctggtgacggctgccttgcagtagccggatttggcgagctcggggggagggggaggagcccacgacgatggtggagctgaagcggatgacagccaccgtggtggtgtagactgattggcccaggaggcggacgcctcgagcttgcgagaagatggcgtcggcacggtgttctccaaggtgggggtccccctcgcgcctttctctcgcctgctttagacaatcacgagccgcctcgcatcgcctaccgccgccgctgcatcctccgtcctcccctcgctgcttcatctggtgccgcctcccataatccagaggagggctccatatggtggtgcagcgcttgatccggagcagctctgatgttggacacgatggcaagccaagggattntaccaccagcatctcctggccaccctcatcacccccctgctgcctcctctaccatctcctgctntgaatcagattntttttaaaggaaacaatacacggtgtactcaa

SEQ ID NO: 74863 - DNA, 342 bp, Oryza sativa
  Clone ID: PAT_MRT4530_75006C.1
cgggctgtgacggtggtggcgttgacaagcggcgcgcgggtggcggtgtcgacaggcggcggcggcgagtttgcggcgccacacgggcagagcagcggtgtttgcatcggcgatggcaggcggcggctacggcggctgcggcggcaacagcagggcaacgcacgagtggcggcggctcgcgggctgaccggctgcggcaacggcaaggcgacgccatccaggagccagctcccactggagttggagtttagggcctgtttggcacagctccagctccagctccacctccacctcttctggagctggagctcagccaaacagtttcaactccacctaaaatag

SEQ ID NO: 74864 - DNA, 141 bp, Oryza sativa
  Clone ID: PAT_MRT4530_75007C.1
atggcgctccttttgcagcagctgggagcagtgcatcgagacccggagacccacgagagctacgtgcactgcagcagggagagcagctgtggcactggcagtggctggctgctgctctttggtttgggtttgcctgcctag

SEQ ID NO: 74865 - DNA, 368 bp, Oryza sativa
  Clone ID: PAT_MRT4530_75008C.1
gtcgaggaatggagtaatatacgagcttaagaaccgaccgcccagggatcttgcagcggaatcgtacatggcggccgctcttcgatttgcggcgaggaagtcagcggtcgcgccctttaacacgcgacctggtttcgtaccagccgtttgcaggtgttaagagaggaacaacggcgggttgttgccgaggctaatccccgctgccgccggccggagccccttcttccgctaattaagttccgccgaagctgttccaaacaataaaaggcatgacctttggccttaatcaaacaatattggggttgtggaacaggacctgattcgaatccttgccagcgttaggccacaagtgaggacctggtttgacc

SEQ ID NO: 74866 - DNA, 855 bp, Oryza sativa
  Clone ID: PAT_MRT4530_75009C.1
atggatcgagagaacaatttacatggcggcttcttgatcaactcattgggttctttcctgctcctcctcttagcgttgctgccggaggcggaggtggccgacgacgacgacgacgaggaggaggtcgagagcgagctgaaccacaacccgatccacgtcgcgcagtacgcgcccggcatgggccggcaagacgagaagggcggctcgaagatcctcgcgctcaccgtcgacaccaagggaagcgtcgccttcgacgccgtcgtgaagcaggatgagaatgcccccggagctctcgctcggcctccttgcgctccgccgtggcgtgccgctccccgagacggcgttcgaccggccgtggacgcggggccgacggccgacgggaggcggccgtggaccgccaaggacgcaaggtggcgaggcggccaacgcccggcggcgacaccggctgacgagggcaggagccaggaggcggcgtggcccgtggccccgtgggcgtgcggcgagcggcaagcaggcgggactcgggagtcggcggcggccggcgagccacgagcgggcgagggccccggagggtgggaagggaggcggtcaggcggcggtcgagcgccggcgcgccgccggggaggtggcgagacgcgagccgtgccagggcgccaggcggcggtccagcgctgccgcgccggcgccccactactattttttactggatccgcccctggtttcagcgtgatgagctaccggaaggggtcgaaggtgtgggtggaggagaaaggggaggggtgggtggaggcggaggtggtggaggtgaaggacagggccatcgtcatgctcaccagccatcggaagaagaactag

SEQ ID NO: 74867 - DNA, 700 bp, Oryza sativa
  Clone ID: PAT_MRT4530_7500C.1
aaccattacaaccgatcaaggttcaattttcgtgtccgatgagtttgttcagtttgccgatagcatgggtattaaattgttgaactcttcaccatattatgcacaagctaatgggcaggccgaagcatctaacaagagcttgatcaaattgattaagagaaagatttttgattatcctcggcaatggcatactagattagccgaagcattgtggtcttatcggatggcttgtcatggattgatccaagttcctccttataagcttgtttatggacatgaggctgttttgccatgggaagttagaatcggctcaaggagaacggagttgcaaaataatttaacagccgatgagtattataaccttatggccgatgagagagaagatctggttcaatcacggttgcgagcccttgcaaaggttaccaaggataaagagcgagttgctcggcattacaataagaaagtggtgcccaaagatttttcggaaggtgaacttgtatggaagttgattttgccgattgggactcgggatagcaaatttggcaagtggtcgccgaaatgggaaggaccgttccaaatctataaagttgtgtctaagggagcttacatgttgcaaggactcgatggagaagtttatggaagagcactaaatggcaagtacttgaagaaatattacccaagtgtttgggttaacgcatga

SEQ ID NO: 74868 - DNA, 766 bp, Oryza sativa
  Clone ID: PAT_MRT4530_75010C.1
agcaacatgacactatcaaggtaatatggacaatgcaacgtaatattttgatgaaaaacagttgccggaaaatcaatatatttgtctagattcgttcagttgcattacacccagtcaacccccaacaaatgagtttcagttgttaaagagaacatttgctaaattcctgcaaaaacatatttcactacccctcaatttctatatacgctccactacccctcaattgatatttcacatatttgcaagttatgaagacaaatgcttctccacatgcctgctggtacatggcagcatgcactatactaaacatccaaaaagtagtccaatgtgatcatgttcagaaaataagtatggattatgaatctaccgcagtgcaaatatacaataattatcgcaatgcctttcaaaacaaatcaatcattcagccatacaagggagagatcagagatttataagcatgatttcttcacgtagtatatctattccatttttaactgaagaaaaattcatggttcagagagaccatttgtgtactgaagttctttttttaggaattgatttgtaaatctaaaaaaggaatatagcaaaggtacttgtcgctccacagatggaggaagatgagcatagggcagtcccataggatctatccgacaagacaaccgttggcccatccatcccgccccctagtcctgcagcccggcgccgctctagagtatccctcgagggcccaagcttacgcgtacccagctttctgtacaagtgtccc

SEQ ID NO: 74869 - DNA, 506 bp, Oryza sativa
  Clone ID: PAT_MRT4530_75011C.1
gtgatgccaaatttatgtctaaattgtgataggctgacgacaaaatatttgctactgaaattccaaattgacagacaatgttgcttccacatttgctttgaggggctcgaaattcttagattggtcaaatgaataaaaaggttgatgtcaagttgttttatggtcccaaattataacgtgtggggtctccctaggagcctagaaattcttgcattaagcacaaaaagacggaagatctatgttgcttcttttggtggacgttggcccttgattgtaaaggctcaaattaatctcaaataggttgaattagatttacagatatattacagttggttgcttgtgtactgtcatattaggaacataaaaaaatgcctcactttctttagaactcaactcctatagtcacattgcttcattcatgggatttttcagttgcacgctactccaaaggttgtaattttaagaagaaatggcaactgctgtgagtatagcgatcatcattagtt

SEQ ID NO: 74870 - DNA, 408 bp, Oryza sativa
  Clone ID: PAT_MRT4530_75012C.1
atggcgaccggcggcgacacgcgcgcggcggccgaggtgcgggcgggctcggtgagcgcgacggcggcgactgcgtggcgcggcggtggctatagtggcggcggcgcgtggccggagacggcgcttggtttaacagcgaccaaaagactgtggaagtcaaaaaccacccgcatcagccatcaagaattcaacttaaacttgttgctgcttggatcagtgcttgctgacgcaatttgtgggaaggaagccccagaagagggagggccactgaaggttgcggccataggccgcccgtatcgagtcttcttcaatccgactataacaattgcttgcaagttccatgacctccaaggtcctttcagggaaggaagcctcaaaggaggaagggccgctgaacaatgtggttga

SEQ ID NO: 74871 - DNA, 353 bp, Oryza sativa
  Clone ID: PAT_MRT4530_75013C.1
ttaggattatggatatcattcgttctaggtttcttgcaaattggagcaccagaaatatcttcccaaaacctattttcgttctgcaggatcagcctgtcacgactagaaataacccaacgggcgttccttacgtgcgtgtattattccttgtcccaggaggcgaggcccagcacacacgaagacaaacgaaaaacaacggaagactagggcgacgaccacaggcgcttgatggcaggcacgagctagacaccaaagccttcatcttctaggaactcctcttctaggattgggaaaaattgagcaagactgagtacaaccaccgtactcaacaagacacaccaataagtgcagaa

SEQ ID NO: 74872 - DNA, 331 bp, Oryza sativa
  Clone ID: PAT_MRT4530_75014C.1
cccaccgaaaaaaatgggggggatcaccaccccaggagtcctgttcaacattgctaaatttacgagctactacaactaaattgggatgctgccacagttgttccattttacaacagggggacaggccattcctagagatagcccccagcagggcaagattgtccaaaaaaggtttaaccatggctaattgattacagatcttacaaaccaaagggcttgcatttttgggagcttccagttttccctaggggggctaaaaagggcaatggctggaaaaaaaacccctgggcgggatttccattaagttaaaaccaccctgttttttaaaagc

SEQ ID NO: 74873 - DNA, 1115 bp, Oryza sativa
  Clone ID: PAT_MRT4530_75015C.1
tggccgcccgcccggccgcgtacccggccggccgggttcctgtcttcttcttcctctccctcttccctaccaagcgagaccactcggcccccacaaaatctccgcttcttctccgagaccgagatggcactcgactctgttccatcctaccccagcgatcttggatccagcagggccaggacgccgcagcagcaaagggtcagccccaggaaggaggagcggacatggacgaccgacacctacgcgccgtacgacgacggccaccagtggaggaagtacggcgagaagaaactctccaattccaacttcccaaggttctattacagatgcacctacaagaatgacatgaagtgccctgctacgaagcaagtccagcagaaggacactaatgatccaccattgttctcagtcacttacttcaaccaccacacctgcaacagcagctcaaagatcgtaggcagcactcctgattctactgtgcagtcgaggaaagccatttcgatctgcttcaattcacatggccaaaccggtgaacagcccacattcttgtcatcatcagcttccttgttgtcaccgagcatgcagtcgtacagttccaaccagcaacctgacatgaacacctacagtcgccagtttcagtgggcagacacatcgtcatctacaagcaatgctccggttaagatggaggcggacgattatgcagaagcaagtgcttcacccagtaccactggtgctctgtcgaggacattgctgccgatcggtcagtcaagatgcatcgagtatttccatttcttgtgatgatttttatggaaagtgaaggagatgcatatacattctgaggagcctcttggatggttccagatagggttttatattgggaggtgaggatgttgtgctgatgagattccatatactatagtggcattatgttgttttctttgcatgtagattcaagccagatttttgtgcttgaatgatgtaaagaactgaattggcgtttctctatctagtaggaaggagtacgtgatacagaaaaaggaaaaaaaagcagaacctgttaaattatactagtataaaattaaggaaaaatctgacagtaaatctgcctggctgtt

SEQ ID NO: 74874 - DNA, 354 bp, Oryza sativa
  Clone ID: PAT_MRT4530_75016C.1
atggatggtggacagaaccaagcgggagatgaagcttcggaggatccctatgcctactaccaggagggagatgaagacgaaggcgcccaggaaatggtactgtttacacgattgattcctgttataaaaacgggggtccacacgctgctaccgccacctcccgccgtcgcccatgggagcccactgccactgcctcccctcttgccggatctggcggaggggagcccgtcgctgccgctgcctcccccgctggatctggcggaggggagggcaccgcctgccgctgccgcctctcctcccgtcgtcgcccgctactgctgccgccgccgctgcctcccctcgcgccgaatctag

SEQ ID NO: 74875 - DNA, 710 bp, Oryza sativa
  unsure (1)..(710): unsure at all n locations
  Clone ID: PAT_MRT4530_75017C.1
ntccgtgcttgaagccacccnccaagccntgcatngaaccggagttcaccagatgcccggttgcagcacccgtctgccgtccaccgaatctgctgcgcagctgccggacgaccccaagttctaccaagacctgctgccggactacagctaccagacatcgacccgatggacttccgcgcgtggcctggacgccttggatctctccgaggtgcccttcggcttggatgacgaacaggacctgctgcttggagagttcatggacatcggggacgatgacctggacgacatcgacctcgacgacatcaacgatgtgttcccggagatgcctggctgcgacctcggccgtggcatggacgacttccttcagaccgtggatttctgcgtgtgaattaagaagtgccttagtgttattgatgttggtgtgataatgagcctatgagtgtgcttgggaggagatttcttgggttttttccccgggcaacaccatctgctcgtgcccaagaaattatctgctcccctagcgaagcacattattgtttggagtaattttggtaggttaaaactatgttaagttatagtggctatgtcatgttcccagttctatttggtaatgcttgtcaagacattatagtggacaagtcattgagctgttactgttaagctatgaaaggaaaataagttttgcataaaaaaaaaaaaaaaaaaaaaaa

SEQ ID NO: 74876 - DNA, 397 bp, Oryza sativa
  Clone ID: PAT_MRT4530_75018C.1
ggtaccgaatcgcaatgtgcggggtagacctacgcgtacgcctacgcttgcgaccactatgaagataccagctacatccgcgacaagcacactcacggcgccgaaacctcatcagagagcttgatgttcaaggtgcctagataggcataggcgggaagctaataaaaactcacggacctacaaaacctacacattaaaggaactgattcatgagaatgggcacatctcacactgctgcaaggccatgtgcagcacgaactcctcgatgcacgccgtgtatgagtatcctagacgaggacgcctctacacgatccaagctataacacgaatccctgcatacaccatacgtgtgatatagacctacctacaattaattctctgccgcgagctttacaac

SEQ ID NO: 74877 - DNA, 499 bp, Oryza sativa
  Clone ID: PAT_MRT4530_75019C.1
cagcgtctcatcttcgccggcaagcagctggaggatggccgcaccttggctgactacaacatccagaaggagtccacccttcacctggttctcaggctcaggggtgggatgcagatcttcgtgaagaccctgactggcaagaccattacccttgaggttgagtcgtccgacaaggagggcatccccccggaccagcagcgtctgatctttgctggtaagcagcttgaggatggccgcacccttgcggattacaacatccagaaggagtccacactccacctggtgctccgcctccgtggtggccagtaagtcctcagccatggagctgctgctgttctagggttcacaagtctgcctattgtcttccccaatggagctatggttgtctggtctggtccttggtcgtgtcccgtttcattgtgtactatttacctgtaatgtgtatccttaagtctggtttgatggtgtctgaaacgttttgctgtggtagagcagcatg

SEQ ID NO: 74878 - DNA, 318 bp, Oryza sativa
  Clone ID: PAT_MRT4530_7501C.1
atggagatcgaggcggcgaagtgcgagtgctgcgggctgagggaggactgcacggtggagtacatcgccggggtgaaggccgacttcggcgggaggtggctgtgcgggctgtgctcggaggcggtgagggacgaggtggccaagaagggcggcggcggcggcggcggcgggcggcagctggaggacgccgtcagggaccacatgtccttctgcggcaagttctgccggaagaaccccgccttccgcgtcgccgacggcatgcgccagatgctccgccgccgctccagcgacatctccgccccctccggcgcctcctga

SEQ ID NO: 74879 - DNA, 390 bp, Oryza sativa
  unsure (1)..(390): unsure at all n locations
  Clone ID: PAT_MRT4530_75020C.1
tatcccccccgnaccagcagcgcttcatctncgccggcaagcagctggaggatggccgcaccttggctgactacaacatccagaaggagtccacccttcacctggttctcaggctcaggggtgggatgcagatcttcgtgaagaccctgactggcaagaccattacccttgaggttgagtcgtccgacactatttgtcttccccaatggagctatggttgtctggtctggtccttggtcgtgtcccgtttcattgtgtactatttacctgtaatgtgtatccttaagtctggtttgatggtgtctgaaacgttttgctgtggtagagcagcatggaagaactataatgaataagtgatccctaatcattgtgtccaaaaaaaaaaaaaaa

SEQ ID NO: 74880 - DNA, 278 bp, Oryza sativa
  Clone ID: PAT_MRT4530_75021C.1
gagggacccgaaaggcatctgatttttatttcagaaaaagtagcccaacacaagatagcttgagaccaggcattattgctccagaccctcggagatttagggttcaacaaagggatttatgaccgagtctacaaacaaacaaaaagggccgatttttcgtttcccaccgatgataaggatcgatttttctaagcggctgaaaggaaggccctgctgcttgatcctaaaaagcctctcattttccaaaggggggacctggcccaaaatgtacacaacct

SEQ ID NO: 74881 - DNA, 265 bp, Oryza sativa
  unsure (1)..(265): unsure at all n locations
  Clone ID: PAT_MRT4530_75022C.1
atgcgttgggtgcaggctgtttgtgtggacgctatgttgaaatgaggacctaagtgctctggggcggcggcggcggcatgctatgctgccatgtgtgttggagaaacttgaaatgtgtgtgaccatgttgggaaatgtgcagatggcccatgatttgatgtattcattaccagaaactgtgtatcggttgaacattacaggcgatcttgcctaatgacataaacggagcaattcctttatgttntaaaaaaaaaaaaaaaaaaaa

SEQ ID NO: 74882 - DNA, 399 bp, Oryza sativa
  Clone ID: PAT_MRT4530_75023C.1
atggatcatctcggcggcatcaggctgcggaggccggtgctgtcgattgacaacgcggagcccgcgggggagacggggatgagcgagacgaagaagaaggcggcggcggtggcggaggaggaggaggagttgctggaggagccggtgagcccggcggggcggctgttccgggagccgcacttcagctgctacatcgtgtgcacgttgggcgtcgccgagccggtcgacctgcccgccgtccgcgccggcatcgaggccaccctcgcgcgccacccgcgcttctgcagcatccagggagactgcatgcgtatggtacgcagcgtacactattatcctctggacgaagaatatctccacgggaagcataatatcttacgctatcatggcaatacgccatga

SEQ ID NO: 74883 - DNA, 810 bp, Oryza sativa
  Clone ID: PAT_MRT4530_75024C.1
accacacactcactttcgttactactactataccttgacttttagtcaatttcactctttacagtacatcatcaactacaaactttcgagttaccaataatctaatacccaacccccaaaacccaaccgtcaaaatgaagttcgctgccgccctcgctttcgctgccggcgtcgctgcccacgccaagaacgttacctacaccaccgaggtcgttactgcttacaccacctactgccccggtcccactgagatcgtccacggcgacaagacttacaccatcactgaggccaccaccctgaccatcactgactgcccttgcaccgtcaccaagcccgtcatcatgacctccgctgttgtctgccacgactgccccactggcgagaagcctggcaagcccaaccaccccggtatgggccacaactctaccatggtccccgtctaccctaccggcaagcctacccacggtggtgagcaccccgtcggtcccggtgccacccctaccgctggctctccttctgaggtccctaccgccggtgccggcaaggtcgccgctctctccggtgccggtctcgctgccgtcgtcggtcttgctgctttcctgtaaatcagctgctagcatacaatgcctacgatgttttacgcccggtagataccctatttacgctgggagtgcaatgtgggaaggctagcaatggtttcgattcgatttgggatacgcaagcgatctttcagggaactgtataggaactttttttatatatctttttttgagttacgaacatacgatacgggagaaccggtataccact

SEQ ID NO: 74884 - DNA, 300 bp, Oryza sativa
  Clone ID: PAT_MRT4530_75025C.1
atgtcgccatgtcggatttatgttgtactcctctcctctgggcagaaacgtgggtggtttactactttggcagttggcatagggaagtggactgaactgggtgggtggagattggagaatggcgatatcatgccggagttcagaacccgcggcttgggcttggccatgtcgctgtccgtgtgggtaggtggcagtgaagagagggagatgaagatgcgtagatgggccgtggatggattggcaggaaattttggggtcaaactttactcgtcgattgtgatcattacgacagggatgtga

SEQ ID NO: 74885 - DNA, 462 bp, Oryza sativa
  unsure (1)..(462): unsure at all n locations
  Clone ID: PAT_MRT4530_75026C.1
acacattcgttgggtttttctgagattttatttagaatccaaacgcccccattccttctcgttgctccttgatgaaagcctcgtagaactggaagataatggttaccgacaacaaaataccagttccagtaccaatggcgcccatgaagtcagcaatgacggaaagggcaccgatgcacataccaccaaaggcagcagcagtgggaatgtaacggttgaggacatggatcaatgcagaatcacggtgtcctttcatgaccatttggttgtcacgaagctgtttggcaacgtcacgcgccgacgctccagagacttcgatccaagtcttactgaaaagagcacaggcagtgaggatgaaagtcaagtagaagacagcatggaaaggatcatagatgatttcgccgaacgaggagggtggggaaatgcagctagcaatccccccacccggaatattttctnagg

SEQ ID NO: 74886 - DNA, 402 bp, Oryza sativa
  Clone ID: PAT_MRT4530_75027C.1
atgcgggatcggaggaggaggtggtggtggcgcgcgtcggatcgcattaggcggaggaggaggcaagggcggaaggagagggagtggagggtgacgccagcgctgaccggacggatccaacacccgcgccacggccacgccaaggtgtggtgggagccaacagccaagcagccgcgcggcggatcgggcggatgctgcggggggctggagtggccgagtgggaaatgcgctgccgccgcgcagagagagtactggctgttgctgcgactgcgcgcggtggccggcggggcccgcgcctgggttgggttcccgttccctcgttttccacggcaggcacgagacagcaaggcaggcagtcgcggcgcccgcgacaccatcagcaaagctttatttcaagtttag

SEQ ID NO: 74887 - DNA, 539 bp, Oryza sativa
  Clone ID: PAT_MRT4530_75028C.1
cggaccaaaaccgggcctttaaacaaaccttggcaaaggggaaaccccaaaaaccccctcggggggaaaaaaccccgtttggtgggaaccaaaacccaaagggggggggcaaaaacccccccccggccggaacttaaagcaaaggggtgggttaaaaacccccccaggaaaagggggggcccccccccaggcggggggaaaggccttttggcccccccggccccggggggacccagggggaaaacccctagggacgggaacccccccatttttcaacgggggcccgcccggcccaaagaaaacagggcccccttccttgacccgaaaccagggggaaaccggccccgaaagggggaaacccccccccccaacccccggaaattcctggacaaaagggggggagccccggcaaacaaggaaagttcggtcaatctgggcccgggggcaggccccaccaaagatccgcccctggaaaaaaccagtcccggggaggggccccttttgggaaaggggggcccctaaaagggcccccggggggg

SEQ ID NO: 74888 - DNA, 527 bp, Oryza sativa
  unsure (1)..(527): unsure at all n locations
  Clone ID: PAT_MRT4530_75029C.1
ccaccagacagaatcagatttgaagtgaatctcagactgttcgttgtttggatctcactgcatcgcgtattcccttgccatgttgaatgaattccagtcaagaatctgctctaccacggtgctacctgctatgagctactgatctatagggaggctggtttggaaagaaacaaataattaagttgaagctggcagaggttcaaggaaggcaaatcagaaggttactactgttcgtgatagatccaccacccaaagtcgagtggcacccaaatctggcgcagaggacaacgatggatagattggccgctcagagttctctnaaaaaaaaaaaggttccaccgctcagcaatggagggcactaggagtaattgagaaatgacatagatgcaaaaatactacagtacttatctgtaatgtgtatgcaggagactcaacgagtatcagtaattcagtatcgaaagttgtcagctgatggaaatagtgattactccgtaataaacattattcacgctaaaaaaaaaaaaaaa

SEQ ID NO: 74889 - DNA, 1201 bp, Oryza sativa
  Clone ID: PAT_MRT4530_7502C.1
cagcgagcaggggctgggcctaaaaccctaacaacagaaccgccgccgccacggaacccacccacgccggaatgtcgccggcggagccccggccgcccgccgccgccacccgcaagcggaagaagccgcacaaacccaccaaaaccctcgccaagaaccccaccaatcccgtctccacgaaggcgaagaagaagaaaccgccgccgccctccaaggcggaccaatccgcctccgccgccgccgccggtggcgtcctcctgtcggccgagatgccccctgcgcggcagctcgagttcctcctccgcagcttcgagcgcgccgccaagatgcgcctctccccgctcgagctcgacgcctactccgagggatgcatggtgccgctcgcggagggggcgagccaggacgtggagggattcggtgaccatgtgaaaggggcctttggctcctcttggaaggaggagctttgtgagggggagctcgatggcggcgccgtggacgcgggcagcccggcgctcctggttatctgctcagctgctctgagatcgttggagcttcttaggggtttaaagatgtttactaaagagtgccgccctattaagctctttgctaagcacatgaaagtggaggagcaggttgcgttgcttaaaactcgagttaatattgcttgcggtacaccaagcagattgtatctagaaacatttggtgttcatgtcttatggatcaagaagctaattgacatggaagcattatctctgtcacgggtgaaactagttgtacttgacatgcagagagatgcaaagtcatttaccttattcacgttgccacaagtcagcaacgagttctgggacttatacaagggctatctcgatcagaaagttcgaggaggagatacaagattatgtttttatggtgctgtctctgagaaagatgtgaaaaaagcccttccatctgcggagtaaaaatggctgatacgatgaatttgtgtcatgtgcacattgtagtcaatgtactagatatgtatttttgacatactagaagtttgtagaagcaggctgggcaagaaaattttggaattttgagtgcatttttgtcaatcctaccaatttttgggttttgtcctcgcaaactcaggctgagttcgattcagccgtttggctgagattatggttgatgcgaaaattaattaagtataactattatg

SEQ ID NO: 74890 - DNA, 158 bp, Oryza sativa
  Clone ID: PAT_MRT4530_75030C.1
gcgacggagacagaggtggcagcaccggagcaactcacgagcaggatgtgacggtggcagcgctcgccggcgtgagcagcggctgctcggagcagcaacaaggacacacgacaagcaagctcatccacgaggccaatgcaagggatgctgcctcctga

SEQ ID NO: 74891 - DNA, 449 bp, Oryza sativa
  unsure (1)..(449): unsure at all n locations
  Clone ID: PAT_MRT4530_75031C.1
gttggggttacnactggtggtaaaaagtaaccttttggcacncngtgccccttgttttatgttccatatttggggttggaaatnctttgtnttatncncaaatntttgtgntcaattgctggaagganccctgaagngcataggggccctcgcnatgtgcncaattacaatcaagctaaaaaaacaaactgcnggtgtgaatactgngatactgtngtttgttncccctgattcttttgtatgtaatntgngngctctgttggattttnttgtgtgatcaaatcatctccngatggcnctngctgccttctcaatgnataataacngattgcgttcaacatagcgcntgttttgtntacaacctgaatgngctgattttgtaaaaaaaaaaaaaaaaaaaaaaaaaaaaaaaaaaaaaaaaaaaaaaaaaaaaaaaaaaaaaaaaaaaa

SEQ ID NO: 74892 - DNA, 282 bp, Oryza sativa
  Clone ID: PAT_MRT4530_75032C.1
atgtactgtcctaaggaaatcaagccggaggaggagcagaagggcgtccacggcggcggtggcgtcgccggagcgcaggtggaggcggcgctgaaccacaagaacgtggaggcactcccggaggacgagacggtggagggcggcccagaggacgcgtgggtgcccgaccacgagactggcgtcttcgtccccgccgacaaggccgccgtctccggcaccgaaaaccatgaccactgcggagcggcggcggcggccggtggctcgccgtcggtgcttgactag

SEQ ID NO: 74893 - DNA, 437 bp, Oryza sativa
  Clone ID: PAT_MRT4530_75033C.1
cgaagtggctccgtggaacagctacatataatgtgtatcggtcagattttgatggaatggatattgctacaactgttcccaaaggaacactaccagaatggattttgatgcaagagtttcatcaagcgattgaaatcctcagaaatatcagtcatccgaatgtggttcctttcttaggagcatgcatagagaaaagggcaatcgtttaccgattcagagaaaacaacacactggaaagtcacctcaagtatctcacatgggaaatcagagtgaaatccgccgccagtatatgctccggcctcatgttcctccatagcagaaagcccaagccgatcattcacggtgacctgaaaccaagcaacatcatattcaggccaggaaatgcatgcatgctcagcgatttcggaatgtgttatctgtattcgaaagaatttgga

SEQ ID NO: 74894 - DNA, 366 bp, Oryza sativa
  Clone ID: PAT_MRT4530_75034C.1
atggctggctgtcagtcgacagtatcttccactgaggacgtccttgtccgacctaaacggaggcatgagttttctatcatgtgggtgaaagaccctaccatgatcgcagtgagatggcgtagggctttcagatcagcaattcaaaaacacatggccctatgcaactgtcaatccaaatggccactttttcctcgactgaacaaagtcaatcgtccaaagcaacaatgcagatttgtgaactgcaaatggcgaataagttatctccagttgggtgttgggagcatcatcaacctagaaaaatatgatgacgcatatggaaaattcaagattgatacgaggtgcagacagtcgcacaccatgttttaa

SEQ ID NO: 74895 - DNA, 426 bp, Oryza sativa
  Clone ID: PAT_MRT4530_75035C.1
aacgaatgatcacaacgcacagcatatgaaagaaagccattgccagattcttctttacatgggaaagaaactctagtgctttacatgtctagaaagcagaattgtgtaattaagcaatcactaatcccatcttgggacactgatatgggagactgaaaaactgactctataaaaatggctgaaatctacagcatgcgaaaaggagctcctttgccaggcatgtaacttctgggagatcttgacctgactctactgtgggtgctgttagcgggtaaagtttgtgcaaacattatggatgtataacacggtttaacagctacagtgaagcaagcaccctctcttgcaaaactcagtcatagctaaggctatcgacaagcttacacgcatgaatggagcatgctaaaggctggaacgtgttgcacccgc

SEQ ID NO: 74896 - DNA, 497 bp, Oryza sativa
  Clone ID: PAT_MRT4530_75036C.1
accaggccaaaacaaaaattttttttttgttaaaaaaaaaaaaacattcggaaaattttggggtggggttaaaacccaggggaaaaacaaaaaaaatttagggccgggggttaaaaaaaattggttgttttggggggaaaaaaaaaatgagaaaaaggaaaaatgaaatgaatggccccccccccccgttaatttaaaaaaattcgcggcccgtaaaaattgttttaaaactccaaagggttttaaaaaaaaaaattgttaaaaaaaaaaaccacggaaaaaacggcatttttgagggtggggccctaaaaaaaaaaaacatttctttggtaagccaaaaaaagctttacaccccttttgaaaaaggccaaagggagtccttttgaaaaaacccaaggggggaatccgacaccaaaaaaagtttccctttttgtaaaaaaaaaattggggggaattccatcgaggggttaaccccccgaccaaaaaaaataattttt

SEQ ID NO: 74897 - DNA, 352 bp, Oryza sativa
  Clone ID: PAT_MRT4530_75037C.1
caaaaaaaccattgggccttttccccccaaagggaaaagggcccaacccctttttttttcgccccccaaacccggccaaaaaaaaaagaaaaaaaaaaaccccccggggggcccaaattaaataaattgggccctaactaaaaaattaacccccccaaaattcaaaaggcccgtttttaaaatggggccccaaatttttataccctccgggggaaaaaattggttacaccgggaaaaaaaacggatttgggggggggggaaaaattggaaacccgggcccccatgttttggggggaaaaaaattatttataccttaaggcccaaattttgtcacaaaatttggggggggggg

SEQ ID NO: 74898 - DNA, 908 bp, Oryza sativa
  Clone ID: PAT_MRT4530_75038C.1
cagcaaaagatagcgccttctctttcataacaagtaaattcaaaactttgcttccttccagtaatatcctcattcaaatggcatagacacacgaagaaggaagcaaacacatctcttggatctcgataacagtaatatcctcatgaggttggtacaaaactttgaagtggttacaattagcacagctcactacagcatttgtttcaaaaggctactacagcagtattcttggccagcaagttgaacagtgaaacattccccattttttatgtccgtgccgatcagattcttggtactcctccgattgtagcttcagggagtcgttctatcgagtacctgtgccgagtgatatacatgattggaacaccaggaacctttcttatcctccttttcaaatctctatcacatgttgcgacgatgtagcacttgtgctgagtaaccctctctacgatacagtcatcagcataagttcccttgtgtgtgcatgctaatctctggaacctagggtcctttgcaattctcaatgctacacgatacttttgtcccagcttttcaagctccgccataacacaatccgtgatacatggtgtgcattttgcataaaggcagtccatcattcctttctccaaatccaactgcataggtgtcaaagaagcatttagcttgttctggatggagaaattgatgaagtttgtatccacaataacccggtatggcggcccgagcgctgtgttgtagctgaagaacagcgccgaagagacctgaggcacattccgcccgagcttctccttctcgttatccttcttcttggggttcaacacatcctccttgtacttctggatggtcttcttggtgatgatcttcttgacggcggcgaacttagggcccttgctcttcgccctccccat

SEQ ID NO: 74899 - DNA, 648 bp, Oryza sativa
  Clone ID: PAT_MRT4530_75039C.1
accgcgctcggctgcgaggtctttgcatatggatcagttccattgaagacttaccttcctgatggggacgttgatctgactgtactcggcaatacatcttatggtagtactttaattgatgatatctaccacatccttcagtcagaagagcagaattgtgatgctgaatttgaagtaaaggacttgcaactgatcatgctgaggtcagacttattaaatgcactattgaaaatattgtcgttgacatctcattcaaccaaactggtggaatctgcgcactttgcttccttgagctggttgaccgtaaagttggaaaaaatcatctagtcaagaatagcattatattaatcaaggcatggtgttattatgaaagtcgtctactaggagctcatcatggactgatatcaacttacgcactggaaactcttattctttacatattcaatctattccacaaatctctccatggccctctggaggttttatataggtttctggagtatttcagcaagtttgactgggacaactattgcataagtttaaatggccctgttgcattatcgtctttgccaaatcaaattgtcgaagcaacaaatacacctggcagtgatttgctgtttgacaaagagtcctcaataactcggtgca

SEQ ID NO: 74900 - DNA, 4261 bp, Oryza sativa
  Clone ID: PAT_MRT4530_7503C.1
atggcggcgacggtggaggagcagatgatggtgaaggcgatcagggaggagctcccatgggagagcctccccaagcgcatccaggccgccctcgtctccaaggacgactggcaccgcagtacctttgatggaagccacacagggcccaactgcaccaattcagccatccaagggcatggacttttccacatatctgaattcacctccctcaagcccctaaagaagataatgtggaagctgagcaaatcaattgcgaaagagctgctgccagcactccctgcggacctagcaatagaaccatggtggggagttcggtttgtcaacttcacattggaagagtttaagaggctttcagaagcagaggcatcagcaatagataaaatatcaaaggacgaagataattcctatgttctatttgatccgaaggttataaatggtctttacaagagaggaatggtatacttcgatgtggctgtttatcctgaggaccgtttcagagtatcaaggcttgaaggttttgtgtcaaataaggatcagtcttacgaagatccaattgaagaactactatatgctgtatttgttgtatcaagtgaaaatgctacagttgctgaattggctaaaacgttgcaggctgacctgtatcagcttcaggcagctgcatcatttgcttgtcgactgggttgggctgtaaagcttatggatgcagactccattcttagagattcaaatggatctacaatacctagtaatattcttagtgatgatgacgaaggtctgaagtctcatgctgtgacactatacgaggccggaaagcttggtgattcttgcattgctgatctatgcaaggaccttgctagtttagaaggaaagaggtttgaaggtgtgctccaggaatttgcaaatcatgcttttagcctcagatgcttccttgagtgtttgctgtctggagggacatcaccagatgaagctattgaaccgaacagccaggaattctgcctgcaggagaatttctccaaaactttatccaaggaaagcattgatgagggcattagtaatgttgttaagagtaatggaggttcacttgaaaccgtcgacactgcagatactgatcatcataatgaactgtcacaagcagaccacccaatgccattgagcttaaatgatcttgatgaaactggaaaccttgtcaccgttgatgtcccgttacccctgaaaaatgctgatgggataagcaaatccaatgaaattttctcaaaggatgaaaattatgagtggatacctttgagcctggaatttggaattccactgttcaatccaaagttatgtgaaaaaatatgcgaaagggtcatcgagtcacacatgcttcaaaaagatgacctcactgaacattacgaggcaatgcagaatgtgagaaagaggctgagagaactttgtgctgagtaccaagcaactggtccaacagcaaggctattcaatcaaaggggcagttcaaagaactcgccgcgccaactaatcaacattgtcagtggcagatggagtccatttcatgacacagtggcgccaaccactggaggatccccccgtgagaatgacagactgaaagttgcaagacggcagaaatgcttcactgaagttctaagcttcgacgggagcatcctcagcggtggatcgaagttagatgtatgcgactactttgaagcagattgcaagaatgagaatatgtttgaaagcagaatggacacaagtggtgcagacaatcatgaagaaggagatgaagatgagcatggcatgtttataccatctccattgggcggtgaaatggttaatgtagaccctgatctgctgcaagacatgttacgtgacgtcgaggacccaacttacaacgagagagattccacgaagttcagcagcggaacagtggaagacgggagggaggaaggggaacaccaaaattccaccgacgcagtggcaggatccccgtccatggccgttaagcccaaacccaccacctacctcctcctcctcccctcctcctcctcctccgccgccgccgccgtccatggagacctccaagtcgccgccgccgccgcccttctccccgccgcggcaacccgggccggcgacggtgctcctgtgcccgtgcgcgacgctcctcctcctcgccctcatcgcctcctccatcgccctcaccgtctacttccgcctctactgccactcccccatcgcccacctcctcgcccctcaccgctgcccccaccgcatctgacctccgccgccgccgccgcctcgctccctctgctctcgccgctggcatgtggggcgaggtgcgtttccacctgctcggcatccgacggcgacgaggtggagggggagggggaggggggctcgccggcgcatgcggactcgagccacccggagcacgtggggcgggtgtgcgcggccatcgcggacgtcgtcgcggcgggcgcgggcgcgggcgctgacgcgagcctcgaggcggcgctcaccgcgctctcgccgccgctctccgagacgctcgtcctggcggtgctcgaccgcttcaagcacgcgcacaggccgtcccaccgcttcttccggtgggccgccgccgccgccgccgcctccggcggcttcgcgcacaccaccatcacgtactgcaagatggtccacatcctcggcaaggcgaggcagttccagtcgatggtggcgttgatccaagagatggggaaggagggcgccctctgcatggacgcgttcaagatcgccatcaagtcgtttgctgctgccggtgagatcaagaatgcggtcggcgtgtttgagatgatgaggacgcacggcttcgacgatggggtggagtccttcaattgcttgctagttgctttggcgcaggaggggctggggagggaggctaatcaggtgttcgacagaatgcgtgaccgctacgctccagacctacggtcgtataccgcgctgatgctggcatggtgcaacgcgaggaatctggtggaggctgggcgggtttggaatgagatgctggagaatgggttgaagcctgatgttgtcgtgcacaatacgatgattgaggggttgctacgcgggcagaggcggcccgaggctgtgaagatgtttgagctcatgaaggcaaaggggcctgctccaaatgtgtggacgtatacaatgttgattcgggaccactgtaagcgaggaaagatggacatggcaatgcggtgcttcgaggagatgcaggatgttgggtgccagccggatgtcgccacctatacatgcttgcttgtgggatatgggaatgcaaagaggatggatagagtgacagccctattggaggaaatgactcaaaaggggtgccctcctgatggacggacatacaatgctctcattaagctacttacgaataggaatatgccagatgatgcggcaagaatatataaaaagatgataaagaagggacttgagcctacgatccatacatacaacatgatgatgaagtcatatttccttggcgggaggaactacatgatgggttgtgcggtgtgggaggagatgcaccggaaggggatttgtccagatgtgaactcttacacagtgtttattaatgggcatatacgacatggtagacctgaggaggcatgtaaatacattgaagagatgatccaaaaagggatgaagactccacagatagactacaataagtttgctgcagatttctccaaggctgggaagcctgacatattgtatgaattggctcagaaggtgaagtttacaggtaaatttgatgcgtctaatgtgttccaccagtgggcagagagaatgaaaaaacgtgtcaagaggaatgtccctaatcagactgagagcaggacgttctaagattaccatttgccagcagaaatgtggatctctttgatggtggctgaaatttgaggtgttgctcctgctttttaggagaaaggtgctagttgttttctgtgttgtatagtaatggtccatgaaatattagtgtgttttcatgtgtgaacaaaatgattcagttaattatgatgtagcctatggtagttttattttagttcagtcatgtgttacgctaaatcttcattcaggagtgcctcttccatttctctcttgttccgttagtatatctcaataactcattatgctggattatgcatcgtaccatggcttagtctgtcagccatatctttgaattcaagtatgttcaggtgctcatgattaagcaatgctgatgtgt

SEQ ID NO: 74901 - DNA, 754 bp, Oryza sativa
  Clone ID: PAT_MRT4530_75040C.1
ctcgtgcgaaaagatgtgaattattcgtttttttttcttttagcgcgcgtgccccagagctagcgatcgagcacgcgatacgtacgatgccacgatggatcgatgcggacggatggatcgatgggcagagcagcactaatcctttgttgcggatagctttgcgggaacgcaacgtggagtagtctcaaatcaacgtacgtgtcgccccagcaaccaagatagtaccactactactccatttgtgtgctgtggctttcgctcgcgcggccggccgggtatcgcctttcgcctaattcaatgccctccatcgacagctgcacctgtcctctctctctctctctctcactccctcaccctctctcagccaataatcgatattatttactcggatatactccctccgtctcacagtatatcagtatatgttattttagcatttcccacattcatgttgatgttaatgaatctagacatatagcattttctacatttatattgatgttaatgaatctagacatatatacattaacatcaatataaatgtgggaaatgctataatgacttacgttgtgaagcggaggaagtatattttatttgctacaacataaaatgcttttcccagacggacaaaatcgctttttcggacagacgaaacggccatctatctggtatatgtaaaaataccgattattgcagggcgggtatcgcaacagaatggaaaaacttattttcgcccacggaaaacgcccacctg

SEQ ID NO: 74902 - DNA, 1707 bp, Oryza sativa
  Clone ID: PAT_MRT4530_75041C.1
atggacgagggatgtatattagactttctcgggcggcaagggcgtggcccgaggtttgaaggaggctcgaccgagccatttgggccggcgcgggcgcggggaaggcggcccattacggtgcgcggaagagagagggagcggtggggcccgcttgtcggtgacacggcccacggtgggatgggcgcacgcgagggcggcgctagggttcggtggggatggtgcacgagcggtgcgccggatggaccgagacgcgtcgggcccacgcgcagcctcacggctcgcggtggaccacgcgcgcgagcgggagacggagggagcggctgaccggggtcagcttgacccggtccggccgagctggcgccgacgtggcgccttcctggcagccacgcgggccggcgggaggaggaagaagaggggatgccgagatggacagcggacggcgacgcgcatcggcagaacggcggcgaggcgcggcgaaaggaagggggaccaccggagcgacgagcggagcgaggaggagcgagccaacgggacagattagaagaggaagggccgacgacgatgaatcgcggcggaggtcaccgccggtgagaggaagagggaaactcgccgggaggggagagggatcgattctcggcggggggagcacctccagcgttcaaggaatgcgtttccggcgccggatgggacggaggagcaccgaggagggccggcgacgagcggcggcctccgggagcggacggcaatggcagcgaggccatgcggggcggcagtggggctcggggcggtgtccacgcgcgttcggtagtgctacgggtgctagctcaaaagctaagggcacgagagagagcggggagggagaacggaggaggcactaccgagccgggcgcagtgatgggcggccgacggcgcggggtgagctctccggcctcgggccggggaaggggaaggagaagggtgcccggagtccccttctcgtgtccttcgcacgcaccggtctccctggtgcttcggcgatggacggagagggcgactgcagggcaggggcgatagtggcgcggcaatgtggagagtgaagaagagcggcggacggcgaggatgcaaggggcgacgaaggcggtggatcgagcggtggaaatcgaaccacgagcgcgggctggcagcgtggagcggtcaaggtgggggcggcgagctgctgcaacggcggtggaggtgacaatggcgccggtcatggaaaaagaagaaatggggagagaaagggagctctgcccatgccattttgggagaaaggaggagggagagagcgcgagctctagctctgtgttttggaagcatgcagcatgggggcatcgggaccgggcgatgacagcggcgacgactgcaaaaaggcgagcggggtcgggcggctgcgcggcgcaggcgcggcagggctgacgcggcggcaaccgggcggcatggcgcgcgcgcgcgagcgcgcgggaagggcgaaggcggcgcgatttcaaaggcagaggcgggaatcggcgctgggagggagtgaaacggggagagagatcgagagaacgagagagagagagagagaactcggctcggcgtcagctcagcacacgcgtgtgcggcgcacgtgcggagaagggaggggatggctgagagagagagatgggccgagggggacaaaatcggcccacaaaacttgaggaaggcgat

SEQ ID NO: 74903 - DNA, 342 bp, Oryza sativa
  Clone ID: PAT_MRT4530_75042C.1
atggggaaagagaggagaaactggaaaaatgagttcacctcggcgaggcaagcccgatggcgcaagggaattggaagagaggctacgggggaggagatcggccagtgggtagtggtggccggtcatgaggagagaaagggagaccaagctctaggagctcggtttatggggaggaatagggaacctcgttgtcctttttataggcagcgagaggcggtggagaacttcgcttgcaaaggcggtcggcgacttggccacaacgacggtggcgggcaggaggaagaaacgacgccggcctcgttcggtgattggctggccacgtcggtttgctttgcaggatga

SEQ ID NO: 74904 - DNA, 459 bp, Oryza sativa
  Clone ID: PAT_MRT4530_75043C.1
atgaccggcgccattgtcacctccaccgccgttgcagcagctcgccgcccccaccttgaccgctccacgctgccagcccgcgctcgtggttcgatttccaccgctcgatccaccgccttcgtcgccccttgcatcctcgccgtccgccgctcttcggtcgcctgtgaccaccagccgagctcccttgaccgccaatgtcggttccctctcccaaaccgacttcacgtgcctataaaactgcagccgagcccctcctctcaaccctacccacttcactctccacattgccgcgccactatcgcccctgccctgcagtcgccctctccgtccatcgccgaagcaccagggagaccggaaggcgccacgtcggcgccagctcggccggaccgggtcaagctgaccccggtcagccgctccctccgtctcccgctcgcgcgcgtggtccaccgcgagccgtga

SEQ ID NO: 74905 - DNA, 151 bp, Oryza sativa
  Clone ID: PAT_MRT4530_75044C.1
accacgcgtccgatttcacgtttttcactcacgctcgcaaaaaaccactcaacggctcggcgccttacgcaggacgacaactccgcgcgattgcccccagtgatgaggctgcccaccttggcgccatctcccaccggacccggctggcgcg

SEQ ID NO: 74906 - DNA, 274 bp, Oryza sativa
  Clone ID: PAT_MRT4530_75045C.1
cggacgtctgagcgagccagcatcgcctacaccaaaagcagtagccagacggcgatccatctcagcagcctagtcatattcgggtgagggcgtctccttcggtgacccttcgcacccgtaagttcatgacttaccttctcctctcttgtaagcagttcgtgcttgaggtgcttcacctgttccgctccttctttttcaatgtgtatctttatgagaagctgtcttagctgtactagatgaaggactacaactgcatttttttgtttaatttccg

SEQ ID NO: 74907 - DNA, 2058 bp, Oryza sativa
  Clone ID: PAT_MRT4530_75046C.1
atgccaagatcagactattccgatgatggagaagacgacgtcttcttcgacgcgtttgacgatgacgacgacgacgacgacgataagaacagaagctcaacggagattagtacaagtgaagctgggtacgagctgtgggcaggtgagccgatgagtgtcagagaaaggagacacagattcctgaaaggaatggggtttcttgagcccggtcctaccgggacggccttcccccagtggctggcagaaatcgcaacaacggattgctgctcatttcacgatttcgaggagaggatcagtagcatctgctcttccttccgttcttgcttctctgacagtattttggcagcaacagacaatactaatgatagtgctgataactgcacaagggatgtggattataacagtagtggaaggagaagcacaacatctcatgatcaaggccagcacgatgtcctctcggagattgttgaggaggctggaacatcatctgatgaaatggtgactccaaatgcgcctgagattgtgcctggattctctaaactaatgcgaaaactactgcgcattcgcttcggtcacggccctaagagaaacgaattcaagagcttgtgggaaatcttcatgaggaagaaggtttcagatagagtactttccatggatgatgtacatgtccaaccaagaggattgaactcaggcacattgtacaggacaaaagttcatcagcagaacaagaagtggatggacttcactgccgtctacatgtgccaggagatccaggcacacgagggattgatcagggtgatgaagttcagttcatccgggtggcatctagccagtggcggcgaggattgcgtcgtgcgcgtttggcagatcacagaggttgaatcttcgcctgatttgtacggcagagatgttcctgaagacatgaacaagaagaaggacgtgaaaattaagcccctcgcgatcataccaaagaaggttttcagtatcacagagacacctctgcatgagtttcaaggccatacaagtgatgtcctggatttggcatggtcaaagtcagattttctcttgagttcatcgaaagacacgacaatacgcatgtggaaagttggctgttatgactgccttgcagtattcagacatggagattatgttacatgtgttcaattcaatccagttgatgaaaggtacttcatcagtggctcaatagatggcaaagttcgtgtttgggatgtttcagacaagcgagtagttgattgggatgacacaaaatacatcataacagctataagtcaccgaccagatggaaagggtttcgttgtcggttctgtcaaagggagatgccgcttctatgatcaatctggtcttttcccattaggtcgaaacattgaaaggaacaaactgatgcgcataaagcggagacggtgtgctgccaacaagattaccaatattcagttctctcagggccatccatctaggatgataatcacatcgaaagatcacaaaatccgagtctctgaaggtcataagatcacccaaaagtttcaaggacaatggaggtccaaggtgttggtgcctccgtcgctgacgcccgacggcaggtacctgatatcggcggggagggactccaagatccgcatctggaacttcgacggcggcggcaggcggcggagggtggtgagctcgcgcgagctcttcttctccgagggcgtcacggcggtggcgccgtgggcgagggcgatgggcggcggcggcggcggagcggacgcgccgacgctgtgctacgaccgggagcggtgctcgttcggcacgtggttcgtcgtgcccgacggggcggcggcggcggcggctacgacgtggccggaggagaggctgctgccgtcgctgaggtacgtgaactgcgccgggatggacgactgccggtcccaggttccggcggcgtggaacatggtggtggtgacccggcagccgcggcggcgccatcagggccttccacaactacggcctgccggtcaggctgtagccttttttaaaagtcataccaactgtcaccctctttag

SEQ ID NO: 74908 - DNA, 1173 bp, Oryza sativa
  Clone ID: PAT_MRT4530_75047C.1
atgacggaggcctcaagagcggcggatcaagcgccaaggaggggcagtctcagaatcgacaaggtgtgcggtgagggatcggacggcaccggcgtcgggagcggcgggcctttggctgcgatgacggttgcagaagtgaaggacttggatcaccaccaccgctacccatgcatccaaatcaaaaatccaagatacaatccacaaatccccaaatcaaagtctgttcacccaaatcaaaatccccaaatcgccaaatcaccgcgcacgcctgtaactcatcaacttcccccaccctatgagctccgcgccgaggaagccgcgccctcagccacaggcttacggcagctcccccacctcctccagccgtggctgcagccgcctctctgccccaccgtggagccggcgggtaaagaagctgagaaggaagccctcccggctgtcaccggccctggcgacggcggcgaggtgaccacggaggagtggccacggtggggcacctcctcgcccctcccggtcacggtggccgccgtcgtccgcgagcttctcgagaggaggaggagtttatttgaatttaaggaggttatcacggatccttttaccgtacccccgcggccaaacacgccgccgtcccgagtctgtagcggcttggagcagcggtgtcggcggcaggtcggggtggttccggagatccgtacgtcggcgtcggacctagcccagttcctccgcgcgcatcgcatcagccacgtgtgcctccgtgccatcattggcgtccccaactacaagctcctcgccctgggctcctccctggcaaccgcctccgcctgggtcgcccgccacgtcttaccctatgccggcgccaactccagcaccccggcccatcaccgccatcgccgtcggcgacgaggtccccaccgctctcccctccgcgctccccatgctcctcctgggctcctggccatgcagtcctactccatgatgcagagcaatggcgtgatcccacttgacaatgcgctgttcaagacgctccctccgtcgttggagatggttgacttgcacacgctggcgctactccactacaccaacatgtttgacgtggtgcacgtcgccgtgaagaacctctacgtgagcggtgaccgcatcccgatgccggtgctggtgatggaagtgaggtga

SEQ ID NO: 74909 - DNA, 886 bp, Oryza sativa
  Clone ID: PAT_MRT4530_75048C.1
gggggctgtagtatactgatcatttcatataggttggatttgaactttggtgggctcacatcaacgccacctatcgtaattcagtcactctttgggaggacatgtggaatggaatagtcagatgtcagtattttgagagcctttacaatcagtgcctttataaaactgactctgtgaaaagctttgctcaaagggagtttgaagattgtttccaactgcccctctcatcgcagtcatatgaagagttttcggttttacaggaattattgcaaaggctgcttctgtctaatgcttcaggagatgcatgtctttcatttgggataacagtacatattcttcgcaaaggttttatggcctgaatttcattggtcgctctccacctagaccatttgtttggaattggaaaacgaactgtgtgaacaagatcaaagtctttatgtggcttctcttttgtgaccgtcttaacactagggacatgttggacaggagaaattgtgctcatgaggatgcagatctaacttgtgctctctgttctctgagtgtgagggaaactatagaacatctattcttttcttgcccattcagtgatacttgttggaggaagattggttttacttggaatcttaacatggaattttttttttcagatggtggttttggcaaggttgcgctttagaggaaaaagcttcttggaatttttttctattgaatgttggcatatttggaagcagagaaatgctttaatctttcaaaatgtgaatccccatccttcggattagttctcctgcatgggtgcagggccggctttaacccagagccgggcctgcatgggtgtaggatgaaggaacctcttttatcttcagtttttaattggttataaactttg

SEQ ID NO: 74910 - DNA, 282 bp, Oryza sativa
  Clone ID: PAT_MRT4530_75049C.1
gttcattcttgtgctaacaagcgactgtgatgggccagcggcagtcattcttctcctactgattgattaggcgatgcgctaaatgagatacatacgtgaggatgcaaagtatgtgacacctacgctggtgtgggagacatgccatttcaaaatccattgatgggacctagcgcatggctagggctcatgcagggtctgtctggacagacagcggagggtggcctatgaactgcggcagtatgagctctagggcacgcacaaaggccaaagggatcgaggact

SEQ ID NO: 74911 - DNA, 302 bp, Oryza sativa
  Clone ID: PAT_MRT4530_7504C.1
acaaataaataagtatatatggatttttgaatttatttaaaacagaagggaggaaaaaaaaaccacacatttgattgatacacagccttacagaggggctctgataaataacatagctacaagatgactaacaaagaacacaaactctctcaaaggagaggcacgctaggaacacacgccaaagtctagattgagcatagagatgcaatttatacgacaaattaaaaaaatttaaaaaagggcggtggaaaaaagatgaaacaaaacattaatagtaaaatcctcacaaaggaacaaaacac

SEQ ID NO: 74912 - DNA, 252 bp, Oryza sativa
  Clone ID: PAT_MRT4530_75050C.1
tttttttttttttttttattttttttaattaatcgtatttttgttaacattttacttaattcgtgtacactggtttatttacatgtttttgtgtaatttttatggtattctttggtttatgaatttgttgttttttcacgaacgcgggggtatccgcgggaatcttaaccggggactgggcgaattccgaattttgactatggggggattattcgaacattgggggaatgatgggaaaaaggggatttcggg

SEQ ID NO: 74913 - DNA, 4205 bp, Oryza sativa
  Clone ID: PAT_MRT4530_75051C.1
gtagtagaaatctgtgcattctgaggtagatgtttcctcttgagaggaaatgctgatttattacactctgattttctagctagggtactgtaagtactgtaccgtgtggactctgtggtttatgagctgttttaccatgttacaatttgtaatttactggacatgtgtaaagagacctggattactaaaaggttaagaaaaatctacaagccgtggattacatggtggagatgatttatggaggggggaaaaatgaacaaaagaagcatgtgtatttatatatgtattctcaacaggggaacaacaaaaatgaagcctccctgtggatcctcctatctacaagtgcgatcttgtccagcttcgccttgcaccactgcagctgctcgctggtgatcctcggcatccgcaggacccgtgccacgagccgcatgtcgacctgcgagaagaagaggctctggttcaaggtgtcctccttgggcttcttgaacttcttcactatgcagatgccggtcctcaggagatccttcagcctcttctctttcttatgtaacgtggagtcgatgtgcatcataagatcatggtctattttttttttttttttaaattaattacttgttcaagtaagtaaaattcattcgcaattcagagaagtgaacaaaagagcggatcaaatatgtctcagcaacatttgacatcaagtgcatcacaatggtagacggatttcaagtactccaaactcagacagttatactaaaacattcagctagaagaggctagaccattgatcatcaccatcaacaaaaatgttttccttgtttatagcacatcgccttgcttccacttccaagagttgtctactttgaggctgacttgtccttggttttctgtattttcaagactttcttcacaatcttctgctcttcaaccaagaaagcacgaatgatcctttccctaactgcagttccagagagcactccaccatagggacggttcacagttctgcggttcctagacaacctggatctcttgtactcagcaggcctgagatggggaattccctggatcttcttcccggtcacggggcacttgggcccgctcgccctcttcttggtgtactggtacacgagcttgccacctggagtcttgacgacccgcgtctgattagacttcgtggcatagctgtgccttttgcggtacgtcaggcgctgcaccatctcgccgtcgccgccgccgccgccgccgcgtagtcgccgatggataaaccctagaggaggaggaggaggaggaggaggaaatggtcgcgcccggagctcaacatgagagctcaacaagcccttgaggtcagcgatcgtctcgaccaggaaattctctctccgaatccagaaggcttctatgcactccagcatcttcccctcgtgctccttgatcgttatcccaaagttccccttacgttgctcctccatcttctcctgcaagctgttctatcggtcatagatgtactttggcaacctcggcatcttgaaggactcattctccacattcctctgcagaacttgctgaaattgtcggaattcccatgccacatggatgtacttatggatgttgtagggatcggatgcctgcaggtcctgaaccttctcatcctgtcaccgaaggagctcccatgacaggcacatttggttgtagtaatgtgtctgcaagtcataccggtgcgccatgtcaaacctttgcgacgggtcccccggtgattttcgacgtgacgaccacatattgcgcgacaggattgacgtcacctctggtgagaacgactttagagaatttgccgattgttgaggggcctccggcaccacatgtcctcggggtacttgccggggtcgtcggcggcgccgatgatgtcccggcgaggcctggccgacgacggagcccggcttcagctcgtccattgggtcctcgcgaaggaacttggcgtcgatcctccatggcttgagatcctccatcggtgccttcggcgtctccgactcctccaagatcgtcggtagcccgatcgaccgcaccttcttcagctccagcttcagctgctcgatcagatcctggtgctcccacagtgactccagctcgtcctcctcctcttccgtcaaatccttccacttgtcctcttgatcctcctccaccacgtccaacaccttccccttctcggcgacggagaaggtgacatgccgagtggcgttccctggacgctcatttgggatatcatcttcttctgcacgctctgaaatgatccttgcatcggcaactagttcatatggatcatcatttccactgaattcctgctctgcagtctctggggtgctcttatgatcagaaacttctccatttgaggaatcattcgtagcactgacaattgctttgtgatcatcagaaataatcgcaaccgattgatcaggacttctttcttcatcgtgagctgatgctaatgactgatcatttgcaccgacaatatctttccaaacatcagaaatgagttcgtgtgagcgatcgtctgtaccagcaaattctctctccgaatgcggtgtgcttctcttctcatcagaaactgccgcttgtgattgatcatttgagacctcatgttcttcgtaattgtcaaagatgggttcagatgaatgaacgtccgggcttcttaccttggcatcaagaacagcagcatggcgagacgaggcatcatccaattctgcgtcagagattgcttctgggctcctcctcttgacatcggagacagattcgtacgaatgatcatgtatcgtgatggtttccttctccgaatgatccaagctgttctcatcttcagattcggcgtcgtgcaccggtgatgatgatgatgatgatgctgccatcgccgtcgtcttcttgccgccggaggcgggcggccgctcgtcgtcgctcatgtcgaagctcacctcctccgccatgttcgtcgcctcgtttcccttgtgctcgtcttcgttgtactcgacgtccggcgaggggctccgggaccacatgtcctcggggtacttggcggggtcgtcggcggcgccgatgatgtccggcgaggcctggccgacgaccgagcccggcgacaccgtcgtcgccgagtcctggaacgaacgttccaggttggaggccgacgcgtcgagggcttccagggccttgagcaccttggccttgtaatagcccctgaggctgccggcgtcgtgcccggccaccgccgccgccgggaagtccttctccgagaggaaccagtcgctgtcggagtcgacgacgaggtccttcaccgagtacccgtcgctggcggttgactccgagtcggagtcgccgccgaagccggagaactccgacgcgaagctcgtcctcccgctcacggcggcggcggcgctgcccctcgacgcggcggacggggagctcgccgccggcttccgccccagctgcgacgccacgctctggcgcgcgctatccggctcgttcgccgggcggaagtcgttggtcgtgaggaagccgcgccgtggcgccccgtcgaccactcgccgctcctccggctgcgccgctgccgccaccgccaccgcctccagctccggcgatggcacgaaggattcctggacgcgcaccgtgatggcctccggctccttgacgaaccctcggaagtcacgctccgtcaagaaccggtagttgtgcgtggtcgacacgatcatcggcgccgccgccgccgcctccacgacctctctactctgctcctcttcttcctcctcctccatgaccacctctctctcctctgcatcgcgctcgcgttcttgcttcgattccatcgcaatcgccggcttcttctccggctcgtgttcttccaatacttgcacaggtatttcacccgagaccacggccgtctcccggagaatctcgggcaactggtgctggaacctgaagctgaacgtcgacggcggcggcgcggccggcggcgtcagcggcagcggctccggcgccatcctggcgacgacgtggtcgtacgtagccatcccctccatgaaatcctcctcgctcgcatgcatgaagctgaagctccgcatcattccattgaccattacatcagaccccattaactctcattacattacacagtaccagtcttctactcctcgctatcccaaaacctgcttgccataatctacacctcctac

SEQ ID NO: 74914 - DNA, 3069 bp, Oryza sativa
  Clone ID: PAT_MRT4530_75052C.1
atgccgacgcccgaccgtgccggtgccgtcggcgccaccgcgcggggtggtggtggtggtggcgggcacctccgcggccacgcgcacctgaccaactgcatccacttacgccaccaccacgcgcacgggggcggcggtggaggcggaggggcgtcgtcgtcggggaggaggaggagccccacgtccgtcgcgtcggcggcgctgatgcgcgacctcctcgcgctgcagcgctcgcggtcgctccgtgacccgtccacgcgccgctccgttgagtcatcctccaaggtggcagccgacccggacgccgacaccgacgaagacgacgccgatctcccgccgaagtcccggcgcagcgcctcgacgaccggggcgctcaagacgctcctcgaccagctcgctgagaaccctcaacccaagcaggttcgtcgcccgccgcgccgctttaaacgcggcgctggccgccgcgctggcgccgccagtaaggccccagatcgctcggcagccgccgccgccgccgcggcggcgctctcagtcaactccagctcccaggaggccgtctgcggcaacaagtacctcttccgcgatggcgaggacggcctcgacgagctgcagcagcatgtgccgccgcaggactcgcgcaacgtctgcggcattccgtggaactggtcgcgcctccaccaccgcggcaagtctattctcgacatggccggccgcagcctcgcctgcggcctatccgatcccaagtcagcggcgggccgcaaatccgaagccggcgccggcgcctcgcgtggccacctcaacggctcgcactcgcttttcccagtcaagtccgagaggctggcctcctcgaccagctcggactccgacgcgttgcctctgctcgtcgaggcggccgccaccggtgcgcgtaacggcggcatcggtgggagctactcgggcgagcttggaattttctccaaccagaccagcgagatggagtccgacctcctgtcggaggggcggtcggggcacaagtctcgtggctcgcagcacggccgcggacggcaccggagcctgacgcagaagttcgcgcccaagaccttcaaggacgtggtcgggcagagcttggtggtgcaggcgctgtcgaacgccgtcctgaggaggaagatcgggctggtatacgtcttctacggcccgcacggcacagggaagacgtcgtgcgcgcgcgtcttcgccaaggcgctcaactgccactcccccgagcacccgaggccctgtgactcgtgcacctcgtgcatcgcgcacaatctcggcaagagcaggagcgtgatggagattggccccgtcggcaacatcgacatggacggcatcgttgatgtcctcgacaacgtcatgctttcgccggcgccttcgcactacagggtgtttatatttgatgactgcgatacgctgccagccgacacttggagcttaatctcgaaagtggtggaccgggcgccccgccgcgtggtgttcatcctcgtcagtcccaacctcgaccttcctcatataatcctatcgagatgtcagaagttcttctttcccaagttgaaggagtgcgacattgttaacactttgcaatggatttcgaccagcgaaagtttagatgttgatagggatgcactgaagttaattgcatcccgttcagatggatcattgagggatgctgagatgactcttgatcagctgagtttgctggggcagagaatttccttatctcttgtccaagaacttgttggtctggtgtctgatgataaactggtagatttgcttgatttggcactttctgctgacactgtaaatacagtaaagactctaagagacattacagaaactggggtcgatcctttggcattgatgtctcaacttgccactataattacggacatccttgctggttcttatacattcacacgagaaagactacggagaaaattcttcaaacgtccaaccttgtccaaagatgacatggaaaaactacgccaggctttgaaaacactatctgaagctgaaaagcagttgagggtctctaatgacaagacaacctggcttacagctgctctgcttcagcttgctcctgacaaacagtatgtgctgccaagttcatcgagtacgagtttaaaccatggtgtgttagccggttcctttcccgatagggatatggcaatacactcggctctcgagcataacggtaacatggcaagcacttcttatagggaaaggagacctgttgaacatacatcaaatagccatttgttatcaaccagtgctcccagagcaaatgaacaatctagaaatagtaaaatcgaaaatgaactgatttggcatgctgtgcttgagagtattcagtcagatacactgaggaaaattatggctaaagagggaaggctaagctccgtcagcctaggcacagcaccaacagtgcagctgatattcagctcacgtgtcaacaagtccaaagctgaaaactaccgaggacaaatcctgcaggcatttgagtctgttctgcgttctgccataattcttgaaattcgatatgaatcaaagaatgatgtgagggccagtcatgctccagctgtattttctcacggggagaacgagtcttccaacacgacattaaggaggtctttcactaaacatagtccactctcttctggaggtgagaatctccgtaggaggcttaaaaaagacagagcaagctctagtaagaccacatggatgcaatctgatcctcatatattgacagaaggagaaatcattgaagttgggccttcacacatgcattggcatgacgaaacaaataatgatgtgcataatgtaaatcaaagaagaaaggacaatgtatgggaagaagaatctttggcatcaccaaatagcaaggctaatcaaggaagaaatgggaataaacagcgtcgacagaacagcatagtcaaaggaaaggtatctcttgctcatgttattggcaaggcagaagcttgttctcaacgaggaggctggtctagacaaaaagctttgtcaattgcagaaaaactggaacaagagaatttgtaa

SEQ ID NO: 74915 - DNA, 333 bp, Oryza sativa
  Clone ID: PAT_MRT4530_75053C.1
ccgccgcccacttcgaggactgcggaggaatcgcctgctaagatacgaggccggagcctattcttatacgtctacaacgtgcgggaggtatcatcgcgttctggcatggattctgacttagaggcgttcagccattatccagcagatggtagcttcgcggcactgcccggtcggacaaccgcaaaaaccaattatctgaatgagcggttcctctcgtactgagctcaattaccattgcgatgagttcatcagtagggtaaaactaacctgtctcacgacggtctaaacccagctcacgttccctattagtgggtgaacaatccaacgcttacc

SEQ ID NO: 74916 - DNA, 261 bp, Oryza sativa
  Clone ID: PAT_MRT4530_75054C.1
gttcagggacatcaaagaatacattacacttacacggggcttcacataatgtacacacctctcacatcaaacacatataacaactctccaacttaattatgaaaaacaattcagccacaagtactgcttggagttgcttaacaatcaagttttaccctagatattgcatgccaagcttaatataggaggatgcttactgtctttaaacatttcaaagattctcctgccatcacctgtggagattctaatctcatcatcaaa

SEQ ID NO: 74917 - DNA, 594 bp, Oryza sativa
  Clone ID: PAT_MRT4530_75055C.1
atggagaagaagtacaagggtgtgcggcggcggaagtgggggaagtgggtgtcggagatccggctgcccaatagccgcgaccgcatctggctgggctcctacgactcgccggagaaggcggcgcgggcgttcgacgccgccttcgtcacgctccgcggccacggcgccgccggcgccgacctcaacttcccggactcgccgccgtcgtgcgacgcccgcagcagcgacccgcggcaggtgcaggccgccgcgctctcccacgccaaccgcgcccacgtcacgccgcagcaggcggccgcggcgctcatgtcgccgccctcgctgtcgccgccgccggggttcgccaccggcagcgaggtggtggcgcccgccgtgcgcgccgacggcagcatcgactggcgcccggtcatggcgcacccgccgccgctgtactcgccgcccggctggggcggcggccatgcctacgacttcttgcagccgccgccgccgtcgccgccgttgccgtcgtgcgacgacgacatggtcgacgtcgtagatgagagcagcgcttcgctttggagctttgacacgcgagactcctacttccgatactaa

SEQ ID NO: 74918 - DNA, 801 bp, Oryza sativa
  Clone ID: PAT_MRT4530_75056C.1
atggagtggagggacagcttcttggacctgatcttgatccctctcagcctcctcgtccccatggcgtaccacgtctggctgtggcgcgccgtccgcctcaccccgctccgcaccgccgccggcattaactccgccacccgccgcctctgggccatcagcatgaccaaggacaacgagaagaaggcggtgctggtggtgcagtcgctgcggaacgtgatcatggggtcgacgctggtggcgacgacggcgatcctcttctgcacggggatcgcggcggtgctgagcagcacgtacaccatcaagaagccgctcagcgacgccgtcttcggcgcccacggcgagtacatgatggcgctcaagtacgtggcgctgctgctcctcttcctcgtcgccttcctctcccactccctcgccatctgcttcctcaacgaggccagcttcctcatcaacacctcccccaccctcctcgccggcggcgatggcgccggtgacgacggcggccgccgcctcctcggccttccgtcgacgagggactacatggaggaggcgctggagaaggggttcacgctcaacttcgtcggcaaccgcatcttcttcgccggcgtcccgctcctcctctggatcttcggcccgctcctcgccttcctctcctccctcgtcatgatccccatcctctacaacctcgacgtcgtcaacgtcaaatcacatcgcggcggcgactgcggctgcggctgcggcaatgggaaatcatcggtggacaagaacggcgccgcagccgccatggattgcacgcttgtctga

SEQ ID NO: 74919 - DNA, 609 bp, Oryza sativa
  Clone ID: PAT_MRT4530_75057C.1
atgatgacgccaggctccaacaccggtcttggcctgcttgttgagctatgccaaaggtcccggagcaaggcatgcacgaccgtcgccatgtccatccttgttagcctcgccgtcaccgtatccatcttccatgagcgcggatcggtccaagccagagggagggagggtagaggtcagctccccatccatgggaatcgatgccctcggagtctccgccaccagatccaccttcaaacagggtggctgccaatggatccgctgccaaacggggttgccgcctccggatccgcctctgaacggggtcgccgctaccggatctgcctccgaacagagttgcggccgccggatccatcgccgctgaacggagtcgcccaatctccgttgctgcctgtggacgccgccaccgtggggaagggtgatggagggcgtgcctgtggggaatggggtcacccaagcttttctcgtggacgctgccgcccatgtgaaaggaggagacgggcccacccgtggggaaggaggaggagcccaagctccgagcggcgccaatggggaaggaggcagaagaagggagagggaggaagaaatggtgagggaggaaaggggacttag

SEQ ID NO: 74920 - DNA, 360 bp, Oryza sativa
  Clone ID: PAT_MRT4530_75058C.1
atggaattgcgcagctgcaacggcgagggaaagaggaaggggccgccccgagcctccctcgctgcccacgacccttcttccttctccccgcttttcgccacccgtcgcgcacctctcaccacgctcgccgctgccatgcccctagccgccgcacgcctctcccaccatcctcttccaccgaccgctacgagcctctcctaccagtacgcgctgcttgatgccggctgcctctcccgccagttgccaagatggagagctgattttgagctgatccagcagcagcagcagcagcagcagcagcagctagcatccttcgagaacgacgctgccgtgtatggcaaactgaagctcgcgagctga

SEQ ID NO: 74921 - DNA, 325 bp, Oryza sativa
  Clone ID: PAT_MRT4530_75059C.1
acccttccacccgcctacccatattgcataggcctccgcacctaatcctagggggggctaccttgggtattaggcaagctgctcctattctcttcgctggatgccgtctgcatgtctacttctagatcatgtatataatgtgaccctacgttgtcagagacatcggatcgaccttgggtatagtcgatgttagcgtctgtctctaccactgtatcatggcggggcgatatgagaacacgttcaccctcataactcaggatgaccagaccttgctcgcaattaacgatatctggccggcttgttaaatcaagaggccgtgaaacgg

SEQ ID NO: 74922 - DNA, 357 bp, Oryza sativa
  Clone ID: PAT_MRT4530_7505C.1
atggcgagcgacctcggccgaagcaccgcgtccggcaggaggatgagcgccctgaccatcagcaagcacgaaaagaccctcaatggtcatgccaccgctgacatccatgttcgccatagaatcaatggtgacttcgtcacactcgccaaccccacggtgtgcaatcctcacactcctgttgttgcagagttcaaacctgtcatagtatccggccttgacctccatgatatcctcgtggtcgccaactctgccgacgccatcaccggcgtctccacgactgcctccgatttcgacctcaagattgtcatcgctgccggtacagtcgctgtgctgctggcaatgtttccatgctcgtga

SEQ ID NO: 74923 - DNA, 219 bp, Oryza sativa
  Clone ID: PAT_MRT4530_75060C.1
atgaatgggatctttggcaaaggggaaggcctgtacaacatctttggagctcatgagctcctcatctttggagctgtattggcatcaaatctagatcaaaatgagggcttgatgacagaagctaggtccatgggacatggtacaaagggccccattcccaagggcatctctggaaagaaagaatcctctcccttacactggaaaatacttccagtttag

SEQ ID NO: 74924 - DNA, 1064 bp, Oryza sativa
  Clone ID: PAT_MRT4530_75061C.1
ctcttgcatgtgtaccttatggccttatatttgcctcattcattccattctttcttgacattcctgtcacatcacgatttcgtatttttggtgttaacttcagtgataaatcattcatatacctagctggcctgcagctgcttttatcttctgggaagcgttctcttattcctggtatttgtggtctgattgctggttctctctatcgtctgaacgtgcttggcatccgcaggatgaagatgccacaggttattgcatcatttttcgcaagaattttcgcaccttcttcgggaggttcatctaggccctccaagagtctggtcggaaacatgagttctcgtcacgccgtgctgtgcagaacaatcagccatctggattcgctcctgtcgtggagcccccagaatcttcaatcgctatgctggtttcgatgggctttgatggaaatgctgcaagacaggcgctaatgcgagccagaaatgacatcaacacggccacgaacatcctccttgaagcgcagactcgttgagctaacttaatgcgacttccctggaaacattgcgggcagaattggtgatatttctaagatgaggcaacatgctgaggtccattaggcagcagattggcgacgaaatggtgcgctgctaattttattcacttgccactggtaccatgatttgatgagaagttccactcggctcttgctagctgtcaggcgtctgcttaggaagtcagcaaacatttgccgtagttaacgggttatctatgtcaatatttaaatttctctcaccttacagatgatgtataattccaaattcagcttgtaggatagatgatatataaacattggaatcatagtgtaaaattctttagaaatttgtgcctcgtgatcagttctagcatcgattcatggataagtactctaatcatgtttcggtcaggaaaactgaaaccggataaaattgaacaaaaataactaaatttttgttcaaaaaaaaaaaaaaaaaaaaaaaaaaaaaaaaaaaaaaaaaaaaaaaaaaaaaaaaaaaaaactcgagggggggccc

SEQ ID NO: 74925 - DNA, 323 bp, Oryza sativa
  Clone ID: PAT_MRT4530_75062C.1
ttttgtgttttttttttttttttgggtttttgttttttagggaaacaaaaaaaaagaggaaccatctttttttttaaattctttaggcgaagtttcctgaacctttgcatgcatgaccggcacaaaaccaatatgggtacttgaggggaccaatgacgtaaaaggtctggaggatgcaaaccaatggttcgatctcaattcgtttaaaaaaaggattgcacacgggtggttgggggaacctggacggggaaggtgcccataaggattttgaacaagccccctgctagggctcgtcggaatccacagcgccggtgttacaaaag

SEQ ID NO: 74926 - DNA, 230 bp, Oryza sativa
  Clone ID: PAT_MRT4530_75063C.1
aataccaacatcgatcgatcgatgttcaagtggatgcattaatacatgatcttgcgcatacattatattacggcatcacctaccatgcgagatcgtcatataaccaccaaacccaactagttataatcaacagattgcaatcaacacaagggatgacacactgctttttctataccctaaaacattgttagtgatcacaaaactaaacatctacgcgcgaacgcacacca

SEQ ID NO: 74927 - DNA, 381 bp, Oryza sativa
  Clone ID: PAT_MRT4530_75064C.1
atgagcgagcggacgattcctcctcctgtgtcgtcgcatggcgaggacttcgccgaggttgtggtggtgcgccatggggagacatcggcgaacgccttgtgcatcattcagggtggcggggagagccttgaccaactatctgagcggtgtgtttcgtacttgaacacaatagctgggaagcacaagggggagcgagtgattgtggtctcccatggagcgagcatcgaggaactctgcagacacgccgatccaaccagctcagttcgcaggagaatcccaaacacttcgatctgcgtcttcaacatttctggctccaccggccattggattctcgagaggtttggagatgtcgcccatctcaacgaagacgacttcccgtag

SEQ ID NO: 74928 - DNA, 684 bp, Oryza sativa
  Clone ID: PAT_MRT4530_75065C.1
atggcatggaggcaaaataccatacgggtgtgcagatgcgggcatggcggcatgcagctgaccctggctggtaaggagttcttgctctcgttctctgccacagtcaatctattttttgatatatatgagatcattatggtagtgtccagactcgtgaaattacaagtgaaaatatccaaactgaatgaagtttgttttgctataagtgttcatgctgatttaggagcttcacaattgattgatcaagatcagcgggatgcctcacccggcccccgtagtccatcaatcctgcccacaggcaaggcggtcctcaactccggtgacaagttcgccggcgttcagggtcacgacacacaggcgaatatgatgtcctcctccaccgctcgccatagtcaccatcttgtatgcgtgtggagcaggtgcaggatgtgggagatgccctggatcagcggcaaagacgaggtgctcgatgatgaagcagtgcagcggtctccgggctccgactgctccggcagtcaccggcggaggtcggagacggaaacgatgcagagaagctcgtggcagagcgacgctagatccggaccgcttctagcagaagcagcttttgggaaaacttgtagctgggacaagctctcccaaacagggccttcatcttcatcttcagcacattcaaacaccacctaa

SEQ ID NO: 74929 - DNA, 844 bp, Oryza sativa
  unsure (1)..(844): unsure at all n locations
  Clone ID: PAT_MRT4530_75066C.1
ctacgcgtccgcccttgcgtgccagctgctactacaccacgcgtccgcggacacgtgggctcgcctcacactcactcgctcagcactacttgcaccccctagctgagatcagtagtaaacggtcagtcaattgttgcaaagcgatcagctactggcgatggctcagggaaggggcagtgctgcaggacgacgcaacgccgccgtgctggcgatggtcctcctctgcgtgctcctccacggcgagctcgccgagtcggccgtgtacaccgtcggcgaccgcggcggctggggcttcaactccggcggctggctcaggggcaagcgcttccgcgccggcgacgtgctcgtgttcaagtacagcccgtcggcgcacaacgtggtggcggtgaacgcggcggggtacaagtcgtgcagcgcgccgaggggtgccaaggtgtacaagtcgggcagcgaccgcgtcaccctggcgcgcggcaccaactacttcatctgcagcttccccggccactgccaggccggcatgaagatcgccgtcaccgccgcctgatccaccggccggtcgccggagtccggcgggatcgaatgtagtagtggcaatctctaaatatccgggaagtagatcctaataattctgtcagtgtcctacgttgctgaatgaccgtcttcgtgtttaggcctctgctttgttgcaggttagttgattgttggcaagtatagagaggaatatatgatttatgtgatgtgtattttgagaagaatttaataaaagccnaacagctgcgttctggcccaaccgtatatatgtagtacaaggttttnnaaaaaaaaaaaaaaaaaaaaaaaa

SEQ ID NO: 74930 - DNA, 675 bp, Oryza sativa
  Clone ID: PAT_MRT4530_75067C.1
atgagcgagcggacgattcctcctcctgtgtcgtcgcatggcgaggacttcgccgaggttgtggtggtgcgccatggggagacatcggcgaacgccttgtgcatcattcagggacaaacggatatagagttgaatgaggctggcagacagcaagctgttatggttgctcgtcggttggctaaagaagctaagccagttgccgtgtactcctctgatctgaagcgtgctgccgaaacggctcaaactatagctacagcttgcaatgtgtccaacctggtgttgagtcctgcactgagagaaaggcacatgggagatctccatggtttgaagtttgaagatgccgtcagaagcaagcctgacgcttacaaggctttctcatctgaagacagaagccaagaaatccctggtggcggggagagccttgaccaactatctgagcggtgtgtttcgtacttgaacacaatagctgggaagcacaagggggagcgagtgattgtggtctcccatggagcgagcatcgaggaactctgcagacacgccgatccaaccagctcagttcgcaggagaatcccaaacacttcgatctgcgtcttcaacatttctggctccaccggccattggattctcgagaggtttggagatgtcgcccatctcaacgaagacgacttcccgtag

SEQ ID NO: 74931 - DNA, 468 bp, Oryza sativa
  Clone ID: PAT_MRT4530_75068C.1
tcactgattagaatagtgaatctgtgttgaagtgtaatgtggtaggaaatcacattcacaggcgaaatttctgctcgaaaaataattcacaaggaggcactcttgcctgaccattctgcttacactagagttatcaaagatttgcacaagattggcaagggcgatctggatgctgaattgaagttgatttttcagaagctcactggctcgcatccacgggtgcaggcctttggtgtttggttgcctgcacggccacccgagcctggctccacgcgtgcaaatcgggcttccgagccaggtccgagagaaacggtcgatctgagcttcgctcctcatccgggctgagcgcgtgcaggcgggggacgcgtgggtgcaagctcggggacgcgcaggtgcaggaggcgagaggggttccagcttctgctcaccttcccatctcatttgtcgctcggtgcctcccgtctccat

SEQ ID NO: 74932 - DNA, 406 bp, Oryza sativa
  Clone ID: PAT_MRT4530_75069C.1
gggaaaaaaaaattcccccaaattccattttgttaaaaccatggttctacaagggtcaaacccaagacccaccttagattccccccctcctgggtttccccgggctttccgggggaatatatccaaacccccctgcctgggggggggggggaaaatctaaaagggggggataagggggggcccatccacatccaaccttatttaaaggggggtaatcagggctttccccataatacgggccggggccaaacccaaacaggcgggcggacagaccacggtaattatgcccaaagataaaggggcttcccgcagggtgggcttgataagggattttttgggcttggggggtggggcccccccatgaattgaggcatgtgggtgggcccccccccaattttcccctaca

SEQ ID NO: 74933 - DNA, 117 bp, Oryza sativa
  Clone ID: PAT_MRT4530_7506C.1
gccggccagttaatgaccgagctacgccttcgcccgcgtgataaattgctcgaggggggcctgggccggtttttgtgctctaaccacaatggcgggcagaattccttgctgtagaag

SEQ ID NO: 74934 - DNA, 380 bp, Oryza sativa
  Clone ID: PAT_MRT4530_75070C.1
gacagcacagctcaggtgccaggtttgtttacctatggatctcaaattgcagaacaaaagtgagattcaggagttactctctggcgctgtcattccatcctcatctgatgggaccataaaataagtaagatgttttgatggtcagtacacagttcttgatatttccaaacttaaatgcagcatggacatgtacatgaaacctccctatagatgcacttgcacaacaatatgaggtatataaatcagagaatacatggtatatcatttttttgcgcttaaccgcactaatttgtgtactgaaactagttgattgtcgtcatttgatctaattccatcttctgatagatcagttttggacacttcagttctgctttgggcat

SEQ ID NO: 74935 - DNA, 273 bp, Oryza sativa
  Clone ID: PAT_MRT4530_75071C.1
atgatgataacagcaactacctatgacaacaacaggatgccagtacgaaacatcccaaaggttgccgaccctttcgattatggagcaggttttattaatccaaacatggcagctgatctagggctcatctatgacatcgctgcatctaactatctcaagttcttcaactgcatcggaggattagccacaggggacaactgcacaacggcgaaaagatcacttgctgacctaaacctcccgtccattgccatccccaacctcaagacgttctag

SEQ ID NO: 74936 - DNA, 281 bp, Oryza sativa
  unsure (1)..(281): unsure at all n locations
  Clone ID: PAT_MRT4530_75072C.1
tgctcctcctgcctaacccaccaccgctttggtcctcctacacgcttcgtccgccgccgccgccgccgnagaagnagttgttgacggcgaatatgatgtctgacagtggctactacgacctcgacgaccacaaggtctccggattctttctgaaggagacggggccagatcagatgaccatcaagttcgacgactataacctacagatcttaccgccttccgagggcaagtgaaagatttgcggcgaatatcgaccgaacactgacgaggatgatacgtta

SEQ ID NO: 74937 - DNA, 366 bp, Oryza sativa
  Clone ID: PAT_MRT4530_75073C.1
atgggaggggagagggaggggaggagccgcggccgcccatcgtcgccgccgcctgcgcccgccgccgcctcctcacgtccgctcgccgcgagcccgctgccacgagctcgttgccgcacgcacgccgctcctgcccgcctctcccgccagccgccgtcgagcccgctgtgtggagaaggaggcgtcggccatatgggttcggcgctcggcgaagcccgtgtctccgtgctaaggctttcgcctcaccatcttcgcccgcggaacccttcgacaaggtctttgcctggcgaagcccacgttaacccaagccacagccttcgccaatacggtttcctcttcggccttggccctttgctttcggactga

SEQ ID NO: 74938 - DNA, 168 bp, Oryza sativa
  Clone ID: PAT_MRT4530_75074C.1
atgcgcctgcgctactctgcacacaggacacagcgcacctctgattccgtcatggagaccagaactactctcgacctcaagccagggtgcttcttcctgtacgcggggtcagccacgatgtatgggcgctccggccctgtggcgaagcatgcggcgggggttcggtga

SEQ ID NO: 74939 - DNA, 627 bp, Oryza sativa
  Clone ID: PAT_MRT4530_75075C.1
atgccggtccccttaccctccgccggatctgcaagggaggataggagagccgtgtggcaccggcgtctcgtgccacctcccccgaatctgcaaggggaaggaggggagggggcgggcgccgccggatccgcggcccccaagcctcccctccgccgaatctgcacggggagggaggggagggtgcgcgctccgcccccgctgttgcctgtgaccgccgccaccgccgcgtgctctcctcccgccgcgcgccgccccctcccccggatatgcaaggggaaggaggggagggggcaggcgccgccagatccgccacccccaagcccccccccttcgccggatctgcacgggaacggaggggagggggcgcgcgccgccgccgctgtcacccgtggccgccgcgtgctctcctcccgccatgtgccgcccgatccaccgccccctcccccggatctgcaaggggaaggaggggagggggcgagcgccgccggatccactgcccccaacccccctccgctggatctgcactatcggatgtacgggagcaatgagccgggaggggagtacaatctgagcatacaggatccggactcccgaacggacgcgcccgcgaggagcgacacgctgtag

SEQ ID NO: 74940 - DNA, 1723 bp, Oryza sativa
  Clone ID: PAT_MRT4530_75076C.1
atggccactggtgtttctgttgagaacataaaccccaaggttatactagggccatcatcgatcgctgagtgcatagtcattcgtggagaggttgccatccatgctcaggtttcgtggtttagtccatccatgttctggaagtcaatttcaatttattctttttcagcaaatgctagaagagaaattaatagatatctcacatttttcttccagcacctacaacagcagctacagacacaacctggttctcttccatttgatgagatcgtgtattgcaacatcgggaaccctcagtccttgggtcaaaaaccaatcacattcttcagggaggttcttgcactttgcaatcatccaaatctgctggagagagaggaaattaaatcattgttcagcactgatgctattgctcgggcaaagaaaattctttccatgattcctggaagagccaccggggcatatagtcatagccagttgtgtgaaatattcaacaaaagatgcagatttaaatcaaacactgcagtttttgtggaatttactcttctttatcctaggggtatcaagggactgcgtgatgagattgctgctgggattgcctcccgtgatggtttccctgcaaatgcagatgatatattcctaactaatggagcaagtcctggtgtacacatgatgatgcagttgctgataaggaacaacagagatggcattatgtgtccaattcctcaatactcattgtactcagcatccctagcacttcatggcggagctcttgtgccatattatcttgatgaatcctcaggatggggtttggaggtttctaagcttaagaatcaacttgaagatgccaggtcaaaaggcataactgttagggcgttggtggtgatcaatcctggaaatcctactggacagattcttgatgagcaacagcaatatgagctagtaaagttctgcaaggacgaggaacttgttcttctggcggatgaggtataccaagagaacatttatgttaccaacaagaagatcaactctttcaagaagatagcaagatccatgggatacaatggagacgatttacaattagtatcattgcattctgtttctaaaggatattacggagagtgtggcaagagaggcggttacatggaggtcactggcttcagcactccagttagagaacaactctacaaaattgcatctgttaacttgtgttcaaatatcaccggccagatccttgcgagcctcataatggatccaccaaaggctggggacgcatcttatgacctctacgaggaagagaaagacaacatcctaaaatctttatctcgtcgtgcaaaggcaatggagtctgcatttaacagtattgatggaattacatgcaacaagacggaaggggcgatgtatctgttcccacggatttatctaccacagaaggcaattgaggctgccagggctgtcaacaaagcacctgatgtattctacgctctacgtcttcttgataccaccggcatcgttgtgactcctggatctggttttggacaaatcatcagatgttatctgttcacctgcaattctgaattcctgaccactcaagtttggtcctttgtgaaaggttgcagggacatggcacgtgagatgcacgatcctgccgcaggaggagaagataccttcgatgatctcccgcttcagggaattccatgaggagttcatgtcacagtatcgcgactga

SEQ ID NO: 74941 - DNA, 409 bp, Oryza sativa
  Clone ID: PAT_MRT4530_75077C.1
tcacccctcctcttcttcctcctcactccccacctcccatctcctctcctctcctctcctcaggcgacggagaggcagcggcacacggtggcggtgcggtcggacagtggtgcctatgcggaggagctccgacgagcgacggcggcgccggtgcagcggggcgcggctgagcggcggcttggtgcgagcgtggccgtgcggcggcgccggccccggcgcgggcacagcgcgggtcgcggcctcaatggtgcggaagggcaacggtgccgatgtggaggagctcggccgagcgacggcggcgccgatgcggtggggcgcatggccggaggagccgcgccgcccgagcagccgcgagcgccactccacggcgaccggcgccataggaagaagaagagaaccgaggaaagaa

SEQ ID NO: 74942 - DNA, 429 bp, Oryza sativa
  Clone ID: PAT_MRT4530_75078C.1
atggcgacggcgaccggagacttcaaggagaagacgttggcgcgacagctcggcttggtttggtctactgtctacagtggtcggaacgacgacgatgtcggctgcggcagcgcttggagcgcgctccggagtgccgtgggcacgacggcgttcccgtcgatctgctgcacgatagaggatgaaattaaaaggataaatcctcggcatgggaaggagcggaggagctccggcgaacccccgcaggcggccaaggcactcggcggcgcggggacgaacgacgcggcatggccgtcatggccaagcccttggttgcaaccggctagggcgaacgggatggtctacgaccgattcgacaagggaggccagaggagtgaggagttaccgagggatggaggaacgacgaagttcgatgtcgcgggggtggagtag

SEQ ID NO: 74943 - DNA, 367 bp, Oryza sativa
  Clone ID: PAT_MRT4530_75079C.1
tgccctctgcccgaaactccacccatacaccaccaccgcaacgggggcggacaccaggcaacttcccatgctgtgcaaagaatgcggccattggtctccacccgtcaacatcggcgcgaggagaacccaccgacaatgtaatcattacccgttccagtccccaatatggcggcgggtcatagacaacggaggttaccccggcgaccatcggggcgcgggcgccccgcctcccgtcggccgtgccggagaggccgccttcgggcgcgccccgcggctgccagacgctacagcttcggaagatccactcttcgtggaagttgaagccgacgtttgggaaagcgagcaaggcaagtcacatcatctttga

SEQ ID NO: 74944 - DNA, 896 bp, Oryza sativa
  Clone ID: PAT_MRT4530_7507C.1
ataatcgctgagcgtgagcgtgccaagagtggcaggaagcattcaagggatgaagagaagaagacaagccgccataggagcagcagcaggggaaggtccaagcacaggaggagcaccaagaggagtgataccgaggacgacttagaggaagagaggagcaaggacaagaagaagaagagtaggcgcaagaggcatgaaagatcagatgaggacagcgagagtgattctgacaagaagaggcataggaagagcaggaaggacaggaagaggcgtaggagccatcgcaggagtgatgacacatcggatgaggatgagtctggaggtgaagacaggaggcgtcgtcgccatcgcaagcgccagcaccaccacaggaagggtgcatccgacggtgattctggaagtggtgccagtgactctgcagatgataggaagcgatctagcaggcggagaaggcaccgtaagtcagaaagtagtggatcagatggtgatgaacgacatggtcagggggcaaagcggagcaaggaaaagaggggcaaagaagagtgctgaagtggtaatttgctctcaagtgatattatttacaccctctattttaccgacaatgcttatctttgtcctctgtcctggtgtatgttgttatttcaagcatcatgattgatatgtataagtgtagtactttgttccagtgagtgaacttcaaacttaatatgcatagaacgttttaccttgaacttgatagtttgtctgtattttaatgaattggctttgtttcttgatgaaactgcaaaattggatttgcatggcaccaactgtaataatgtagtaatggagcccttaaagcggccaggataccgaatgaaccttgttaaaacttagaacctctttcacaattgctg

SEQ ID NO: 74945 - DNA, 355 bp, Oryza sativa
  Clone ID: PAT_MRT4530_75080C.1
attcagaaaaacattggaggtcatcatttattcaccaaatgtatatatgcttcccggcaaaggaaagcccctgtttttggggggccgcccagagtcatacccccaggtggctttagtggcctagggaccagttttggggggcctagggtaacccagccgggggcagacaccccctggcccatggggggtgtccacgttgcaaaaccccgggggggtccccgccccgcgctccaagtcccctctccgggagccggggaacaccttggccatggggggcccaacattgggggggccgagctccccgtggatgcccccaaccatgggggtgagcgccgagcacctgcaccagttgtgg

SEQ ID NO: 74946 - DNA, 359 bp, Oryza sativa
  Clone ID: PAT_MRT4530_75081C.1
aaaaaaaaaaagggcatttggggaaggttttaaattcccaaaggaaaaaaagaaaagggccaccgcccaaaaaaaaaggggggaacaccccatactccccctgtcccaaggcaaaagcaaccccgccaaggggggaaaaccacccggtaacacaccaggttggccggagaacaagcccccaagggggggggggccccccccacagggggggaaacccgccccccaaggaaaaaaaaggcccccagtaaaaaagcaaaaggcggcccgatcaaaaacccccgggggaccacaaccacgccccccctgggggaaaacctgggagacccaaaggtccaaacaacggagggcaaagggcccca

SEQ ID NO: 74947 - DNA, 475 bp, Oryza sativa
  Clone ID: PAT_MRT4530_75082C.1
tttttctctccgcgtcacttctcttccacctcttgtagtagctgcttctcctcccgatcgagcagaggcagtagtagcttagctagcagatatatactgtagcgatggagtaatatgatcgtcgatcgagccgatccgcgcgatgcagattcgccacgccctcgtccacctcattaccctggggatggttatcagctcggcattgatgatatggaagggattgattatcatgacagggagtgagtcgccactagttgtggttctatctgaaagcatggagcttggatttgaaaggggggatatcctgtttttgcaaatgagcaaacaccctatacgaacaggagatatagttgttttcaatgatggccgtgaaattccaatcgtccatcgcgttattgaggtcgttaagctatgtaatatccacaccaatcagtctccccttacatttgatctcaggtattatgtctgaaaattt

SEQ ID NO: 74948 - DNA, 105 bp, Oryza sativa
  Clone ID: PAT_MRT4530_75083C.1
atgaaggaggaggagcctatggagcctctaccagatccgatcatcgcaaggccaccggctggtggacaaggagctgaggcgcacgtcggccgctctcatcgctag

SEQ ID NO: 74949 - DNA, 836 bp, Oryza sativa
  unsure (1)..(836): unsure at all n locations
  Clone ID: PAT_MRT4530_75084C.1
cccccggggggggggggggggggaanaatcgcggggnaaaaaaacacccnaaantccggagaaattttnntagnatttnggggggncccccccncccccccaaatttnccncanggggggngnaagagnggggttccccccccnccccccccanaaagggngtttttntttnnttttcccctaaaaaacaaaattttttttttncggggaattnttcccgggaaaagggggggttncnccccccnttgaanccaannnnccnnnaaatagaaanacccccctcttggggaaannttaaacccnnccccccctttttctggccaaaanattgggggggtngcccnttaaacctnnaatcccccctttggcttatccccccccnccccnttaaggaaattcttggtttttatcctttgggnngttcccccccnccccccnaaaaaattnnccccaaaggtttgttggcnttatttccncaaaatttaantttnggttttcctgggccccccccccccaaanttnccccnaaaaaagnccaacccttccctcccggggtttccttccngttnnnccttcccnggggggaaaaaaaaccctnnngggttggttcnannntccctttcccccccngggcccccnattcttttttaaaaacttttccaaagggggtttttcccngaaaaaccanccttggggggngnanntggaaatnccccccnnaaaaagggnaaaaaaccnccntttttnggggnnnaaantggggtggtttttttnccncngggggggggggncccccccccnntggntttggggaaaaaaaannnannnaaaaancc

SEQ ID NO: 74950 - DNA, 688 bp, Oryza sativa
  Clone ID: PAT_MRT4530_75085C.1
gatggtagtgtgcgtatggcacactggagcatatcaaaatcaaaacccatggattatgaagcaacagaagcaaattcatgtgcgaggccagttcatcgaattatttggatacaaaaaatagggtgccccttcagggcttcaggagttaggatagggcaaaagagaatcacttaacaattgaccaatcatcatggtatgattgataaaaaaaccacgcatactttctcttttgaaaaatcataatcacacgttgcgtttactaaagtatcccctacctgcagaatttgaagacttttttacatgatagctgatggccggcaaaacatgcaccatgcaattttcacagcccctctgtcctccagactacagagggacccctcttctgaagttcacatggccggagcttgttcattacacgccccatcatcgccattgctgcgatgcttggaaactgaccttcaagatcatccgatggcatgccagacttggcttcctgtctttctagatttgaagttccatgaaaaacaggggtgcctcctctgcaccatcttcctatccaacgattaagactttttgctgacataggagaaccttcttggctttgttgatcagtgagtcctttacatattaatttgttcttcacatggttgatcatgccagtactgtcgctgtcacagtcaaacacttg

SEQ ID NO: 74951 - DNA, 2616 bp, Oryza sativa
  Clone ID: PAT_MRT4530_75086C.1
atgaagcaacagaagcaaattcatgtgcgaggccagttcatcgaattatttggatacaaaaaatagggtgccccttcagggcttcaggagttaggaaccatacaactccatcacaatttctatcaataccctcgtcagcttcaactctggccaacgcctctgtttcttctccaactcgagcgaatctacgatggcgatcacgaggactcgtggacgacaacgcagagggggtgggctcagcacccaaagggcaaaagagaatcacttaacaattgaccaatcatcatggtatgattgataaaaaaaccacgcatactttctcttttgaaaaatcataatcacacgttgcgtttactaaagtatcccctacctgcagaatttgaagacttttttacatgatagctgatggccggcaaaacatgcaccattgcaattttcacagcccctctgtcctccagactacagagggacccctcttctgaagttcacatggccggagcttgttcattacacgccccatcatcgccattgctgcgatgcttggaaactgaccttcaagatcatccgatggcatgccagacttggcttcctgtctttctagatttgaagttccattgaaaaacaggggtgcctcctgtcaaccatcttcctatccaacgattaagacttttcgctgacataggagaaccctccagccaatggaccatctccaacctttggtttcttggaacaaggaacatgagagtctgaggtatcatgttgcaggcgtttcagccacttctcacttggatctggacatgctggcgactcatttaaagcattaggaattggatttttcagtctgcttatttggaaaagaactaaatctaagttcatgcttgatgtctttgacatgctccattcttgattgttggcacaagttgcttttggatagaagtcgcggtgttctgcactcgtgttgactgcttcatttcctttactgccgcttgatactcctttaactgatgaagtcactaactgttcagtttttgcagaggatggataacccaagtccttttgcattgatgctgaagcaaatcctgctgtagattttgatgcatggtgagcttcactgtaaaaggtatcagttttagttgaaaactgtttctgtgctcccaataaaccactggtcatgttaccacaagatttccctgaagatgttcgatctatggaacatttgacatttgatttcgtaggctgtgtaaacatttcaaataagcagggacccttccgtttgttatctatcaatttgttgtttgttctcttttcttgggccagggattcgtccttgctcttcagtatcattgcactatcaattgcatcaggtgtcttgcaggattctgtcaaattcactgcagaatcttctgtgtgtttattcagatactgctgatcactttgtaacaaattaccaaagtccacatgatggccattagtgtccatatcaccctcgttggtaatggcagtagttttaactgacttgatttgatattctctatgcagtgcagactcatggaaagcaactccctctaaatgctgtttctttttgcatgctccatacacttctgatttatgttccaacaaagaaccttcaacaaattgattttccattttgctcgctgaatacacagaactgttcttgcaagaccgatgaggtgacttctttgaatttgggatataatggcgagcatggtgctcgtctgctaatgaacatgatgagtcagtgtcatccttgctgcaagagcatggttcttcaattgataaatggcctttcagctttttccctgcatggtcagaattgaggccagtgtaattatcaagatgagatagcatgccccttgcagatttgcattgcctattctcatcagttacctgatgtgtgtgcagctgatattcctttgatgaaaatgacatcacattagacgtagacatatttatcttcactgatttttgtggtacaaaaatcttttcagatgatgtgaccaacgcagaccgccttgggttaagaatactgtcgattttcctgttgatttcaaacattggaaagtgattccactctgaactcagattttcagtgccacaaagtttacgagaatccaccaatatatcagatatcttatgaacagaatatctttcagataccaccgtcttagcagcatataagttcacatttttctgcatcacagaactttcaaaggagctacccatctgatcaacattcttgcattgaacttcttggcaaacatcacgtgctacacccctcatattagtactgaattgccgagtatttcctgcagagacacctccatggctcactcccaccatcaacctttcagctactctagctttcatgagctcaaaaggtaaagccccgcaatcttttgaatagccaacatcatcaatttccttaagtgggctacagctctggccattttgaggttctggactgatgcttgatctggcccaatgtgccatccatagggagtgcttgtggtaagatgattctccaacgtcacttctgcttggcagaacttctaaatctaccttcttacaaaatctgttggtagaagactctggcat

SEQ ID NO: 74952 - DNA, 936 bp, Oryza sativa
  Clone ID: PAT_MRT4530_75087C.1
atgggcgaccacacggacatccacggccctgccgctggcgcctccaccgtccatggctcagcgtccaaagccaccagcaaccacgtcttctcctccgctggcactgctgccatcaaaactttcaagacaaatgatgggactgcatactacgaggtccagcctaagattgagtcatccgctgaggaggatctacctcgtgggagtgacaagactgtatttgttgagatagttgcacctgatggagatggagcagatcctaggctggccttactcaaatgtctatgtccaccacctgccacatcttcttgctggggtgctgcttatggctcactcacaccaaggcatgatggaaccaataatgtgtttttgtattgcatgaattgtggcagagatacctggattccacctctctctgatggcatgactccaatggggatctactttgatgaatacccaactcaacttcgagcaattattgtgtgtgatgattatccgaggctttattttgagaggattaatatggatgcacttccaagatgggatgagtaccctggcactggacaataccatatgagttcagtgggttttcatagtggaactcattttgttggagctactgctagtaatatagttgtcattgatgttgtgggaggagaacctgggcatgatttgttgatcctgcgtgcttttattgttgagaatggtggattttacctttggaacttgaacaataatcacatcttcgtatgctcagaaaagatctacttatgtgtgttctttcggtctggacaggacatgagctctgtgagatcatctgtatttgttctcgagcagattgatggtgagaatgcttttgttccaacaaatgatgttggggactttgctatctatctaggtagcaatcagcctctggtgttgcctgctgaggataattaa

SEQ ID NO: 74953 - DNA, 1104 bp, Oryza sativa
  Clone ID: PAT_MRT4530_75088C.1
tgttggagttacaagaaaaaaatgttctctgaaacccgatgaatccctcagggatatctggtggctacaacaacacattcttcgtatgaaagaccgcgcatcagcacttacggcaagatcatgaacggctcttgttcacaccatccaaattccaagcaagcggtgaaggattgtttcatatacaagcagtttgctgaacaatacgcctcacaattgaagaagccgactgatggagaagctggcacatcaactcagaagaaggatgacatagatccgggaccccccggttttcacgatcaccgaaaagagctcaatcacatctttgaagggccacaagcttacgagtccaagaggaagcaaaagctgactgatagggagatcaacaccatccagccagaaacaccacaatatctttgatggtcagaagttacaatcaagtttgaccgctcggatcatcccgactgagtggtccacctagggcggtaccccctggtactagacctagtgattcgcaatgtcaagctcaagcgttccctcatcgatggtgacaacgcactcaatatcctcttcgctaagactctggacgagatgcaaatcctaaggattgagttgcggccgagtagtgcaccctttcatggagttatccctaggctgtcatctacaccactcggccaaatcactctgtcggttactttcggcacttgggaaaacatccgtacagagaacatttgtttcgaggttgctgacttcgagacgacttaccatgctatacttaggcgtccggcgttagccaaatttatggccatcccacactacacgtacatgatgatgaagatgccaggaccacaaggagtcatctctctgtgaagcgacatcaagcaagctgctacctgcgacaaggagagttgcaacatggtccaaactcacgagacagcactcggccgtgaagaaatccgactggctgcatcgacattggctgagggtgaagtgcctgctaccaagttacctaagaccagagagggtgacgtgaaaactaagaagattccccttgatccgtccgatcctgccaaaactgttgtaataggcgctgagttagattataaa

SEQ ID NO: 74954 - DNA, 463 bp, Oryza sativa
  Clone ID: PAT_MRT4530_75089C.1
cttccccttcccctttcttccagatcgcgcgcttgtctgtcggggagagtagaagcggggaccttggggggccgccgaggccgaagaccaaggcgctggtttagggttttcaccaccttttcaattgccccggcgggtgcttccgtccgttccttcggtggggcttctttggttaagatttttgattcctttgaaaaggatagggcgtcgaatttcattcctgggccttattaagaacttggggatgcccaaccaattaaaacggtagcttctatggtccctggacccttgggaattaatggcaaccaagcaagccccccggctttgggatggggcaattccggtgggccatttcctggccggtttgggtctggaattccttcttactttgggttaactaccggctttacttacacaagaaatgggggttcttattccagcttccacaattatggaacttttg

SEQ ID NO: 74955 - DNA, 305 bp, Oryza sativa
  Clone ID: PAT_MRT4530_7508C.1
aaaaaggaaagggcctgggccctgctccggaaggccaccaacctttttaaaaatttttggcccctaaacagttttgggcaaaaggaaaaactggcccaaaagcccccgggggggtttttcccctaaaaacccccacctttttaaggggggggtcaaaaggaaacctggttaaaggggagaaaccccttttggggggggaaaacaataaaaaggggttttggttattggggggccccccaagggggggggaaatcataattttaaaaaaaaccggggtcctccaaaattgggggcccggtcccttt

SEQ ID NO: 74956 - DNA, 276 bp, Oryza sativa
  Clone ID: PAT_MRT4530_75090C.1
atggtcatcgcctcgaaggtccttggtagctcggacaactatcccgcgaagcgcaactctgacgcctcggcctcctcccccttcgccttcacctccacgccatgcagccgcggtggcaacaacgacgacaacaaggacacgcaccgctcctaccctctcctccatctcctcgctcggagctcgctcaaccattgtcgccgtgcgcggccaagggagagggaggggttgtgctggatggtgacggtgacgatgctcgagattgacatccgctgctga

SEQ ID NO: 74957 - DNA, 231 bp, Oryza sativa
  Clone ID: PAT_MRT4530_75091C.1
atgggtgactgtcggcgaggagaatggcgcgacgggcggcgactggcggggagaaggggcgccgggatgggcgcacggccgtgggcggcggcggaggctactgctgacgacgacgtctacgtcttcctcaccgccgtcgcgctcctcgccgtcgtcggctacggggtcaagaaccgacgccgtcgaagcgccaagctcctgccatcgccgccgtgtgctctgcccctctga

SEQ ID NO: 74958 - DNA, 363 bp, Oryza sativa
  Clone ID: PAT_MRT4530_75092C.1
ttgtgattgcgttcgtaaaccctactagctggtgttctagatcttctcttcctccttaatttgatagccttaaacctctcttaaataaataattcaagtaataacagtttggtggttcacccaaaagtttgggggttcaactgaacccccatgtgccaaggtggatccgcccctgtgtcgaggtcttggtggtggtgggtaccatttcagaatcaaacctcatttcccatgcataaagtagtatgtatagtggtgtttacttaattttaggagaggttgtcttccatgttattatcttatatgatttgaggcatattattccagattcaccagtcttcactgttggctgaaagaacaaccatt

SEQ ID NO: 74959 - DNA, 968 bp, Oryza sativa
  unsure (1)..(968): unsure at all n locations
  Clone ID: PAT_MRT4530_75093C.1
cagccggagcaggccaccgaaccaccaaccaagaacgtctctcgctcaanacccccatccaacngcncagcgcaacaacacaatgcaaatccagacgaacagctagcaaaagatcctactaatgcagaaggcgcccgggcggcctagttgtcgtcgtactcgccctcctccccgccctcttcctccgcctcctcgtgctcgccgccggccgccgccgcgccctcgcccgacgggccgacgcccatcgccctcccgaacttctgcagcgcttcagggtcgttccaatacttcatcatggcggcggggccgccgttctcgatctcgtcgaggatgggcttgagggaggggtcgtccttcatgcgggcgatgcgggcctcgagctgctccttgtgggcggggttggtgaggccgccaagcatggacgacatggccgggtcctgcatcagcgcgctgcccagccgctccgccatcgccacgaactgcgggttctgcatcagctgctgcatcgtcgacacgtacttgctcgggtccagcgccggcgccgccgccgccgcagcctcctgcgccgccccccgcgccggcggcgactgcaccgtcttctgcagctgctccgccatctccgtgaacgccgggtccttggcgatctgctccgccatctcctttatgctcggatcattgagcaagttcatcatggttgagaagtcgaaggggttggccggcggcacacccctgcgcggcggcggagctgcagcttgaggtggctgctcctccgccgccgacgaggcctcctccgacttgacgctcgtcttctcttcttgagaagccatgtcgtgtggaggagggcagtgttcttggttcaggcagtggcgttgttgttagtggtggtgatgatgataaggtggaggagtatttgagaggagaggatgcgagtgagtgagtgcgaccccacgcgtccgcccacgcgtccg

SEQ ID NO: 74960 - DNA, 1230 bp, Oryza sativa
  Clone ID: PAT_MRT4530_75094C.1
atggggaactactcaccctcaaaaccagttgccttcctcctcctcctcctcctcttcggttgcctgcattacgctcaggcgaaccccggccatcgtcgtcccaagatcgactccgtcttcagcttcggcaactcgttcgccgacaccggcaacttcgtcgagctggccgcgccgctgcttcccatcatgcctttcaacaacctcccctacggcgagaccttcttcggccaccccaccggccgtgctaccaatggccgcatcatcatggacttcatcgctgacgagtttcatgtgccgttcgtaccaccgtttcttggccaaggtcgtcagaacttcacccatggcgctaacttcgccgtcgtcggtgccagcgctcttgatctcgccttcttcctcaagaacaacatcaccaacgtgcccccgttgaacatctccctgagcgtgcagctggagtggttccagaagctcaagccaaccttgtgccaaacagcccaagaatgcagagagtacttcaagagatcactcttcttcatgggagagtttggtggcaacgactacgtcttcatcttggccgccggaaaaaccctcgaggaacttgtcccctacgtgccaaaagtcgtccaagccatctctgcgggcatcgaggccgccgtaaaattttctcttacaatttacacagagctaacacttccgctgtcgcgtacgaataatattgtcattcaggcggtgataaaggaaggagcgagatacgtggtggtgccgggggagctgcccaacggctgcgtgcccatcatcctgacgctgtacgcgagcaagagcagaggcgactacgacgcgcgcggctgcctgaagaagcagaacgcgctcgcgcgctaccacaactcggcgctgttcgaggcggtgtcgcggctgaggcacaggtacccttgggtgaagatcgtctacgccgactactacaagccggtgatcgacttcatcaagaaaccggccagattcggattcaacggctcgtcgacgctacgcgcgtgctgcggcgccggcggcgggccgtacaactacgacgcgacggcggcgtgcgggctccccggcgcggcagcgtgcccggacccggcggcgttcatcagctgggacggcatccacctcacggaggcggcctacgcccgcatctccgccggctggctgcacggcccgtacgcgcatccgcccatcctctcggccttgcgccattag

SEQ ID NO: 74961 - DNA, 304 bp, Oryza sativa
  Clone ID: PAT_MRT4530_75095C.1
gcgagttcgaatcgaataagcgagcactctattcgactgagagggcaccccactcttcccagatccacagaccccggtaggccggttgcggaggaggcacgcggacgtagatgctgcagttcccgtcgctgatgcagcagtggacgacgccgacgctgatcccggcgtgcacgctgctccccgtccacggcgccacccaagacgacgagctcctactcgtcatgggcgagtactacctcgaggacatgctgaacgagatccgcaggaccaacagttacctgacgatcataggtactactaccgg

SEQ ID NO: 74962 - DNA, 1971 bp, Oryza sativa
  Clone ID: PAT_MRT4530_75096C.1
tttttttttttttttttttttttttttgttgatcaagacatccttaatacaatctagaagttcgtatggtaatcacagtatggtacatatgaaagaaatcaactgacctaactcgatacaaacccaacaaaagaacaagggggtcccaaagtggcacccgatcacatcaaacatctctgcctcgaaggacccagtattgtcaagaataacatcagccaagtgtaaaataataatacacaaggaaaagaagagccgcgatgagaaatgtgtacattacaaaggcagctgggttctgcttttaacaaccatgtccgtgccctactgaaatctcagttttctccttatacttcatggttgctaatttacatggataaactctccagctctttgagaaagcggtttcaaagatcatatacattgctaaccaatctatcactcgtgaacaaatatgtttgtagttcaattcgtcaggcttccttacagaacaaaccacaaatcaatttgagagctggaatcttcctgtcggtttcctctttcgccatccaaatattgcatagtaaaagagtgtgagtatcgcaagagccacaaagccatactggaaaacattgtacttgtagagatacttaattccacggagagattgcagtgtgtggccaaagatctcctgagctgcagttgcttgcgcataataagcaaaagctgtggcacagaactgaatcacactgatggagcaaagtaggatgagtccaacattaaacaggaacgagttcatcaaagttcctccccatttcattgggtgaatggtgatgaaaactaatttcaaacccagcatcatttccccagcaatcactgctatgaggagatagaaacagaagaatgcaaaggcagcagtcccaagcagaccgacagcaccaaataaaagttttccaatgtaaccaagaactgtcaaagcccaggtagcctcagcctgttctccttgagggtacatctcttcaagagccttcatgtcatcttctaaaagtactaattccttcccaagggccttgacatttttgcgccattttctgcccttcttcccacttttctcttcttggtgaagggcttcagctgctttcttcaattcccgagccttcttacctagttcagttgcttctgtgaagagaacagatccaacgatggtagcaagagcaaccacatattcagggaaggtagcgcgcattgtccaagttgtttgagagttagcaggtgcagtgtaagctgcgcactgcttgggcgatgtactgatgcaaggttgaccagttgagaaactagtgaatgaatttggaaatgtctcaactgctgaagaaagatgcctgacagtgaagtccactttgccaacaagtccgtataggatgccgaggatgaggccgcaaaccaccgcggagacggcgacccacaggagagcggaggtgagcctcttccccactgacttgtcctggtcgccctcgtagtagaacatggcgaaggggatgacgaggaagacgaggacggcgtcggcgatgtagacggcgagccagagggtcttcatggggagggtgagggagcaggcgccgctgtagatggcgcggcggcaggcctggcggttggcgacgtcggcggggagcatgaggatggagaggagggcgacggtgatgccgaggacgacgacgagcttggggaagtaggcctggttggcgtcgtcggggtgctggtagttgatgagcaggtagacgctgacgagcaggacgaggacgctcaccaccgccgccacgatcaccagcgccacgttgaagtcccccatcgcggcacggtaccagatctccgctactgcgcccgcccgccggctagggtttgggcggcggcggcgctgcggccaccggcggcgtgcgggatctgggggatttgggggggaggaggagtggggttgggggttggggccaaatcccgccgccc

SEQ ID NO: 74963 - DNA, 950 bp, Oryza sativa
  Clone ID: PAT_MRT4530_75097C.1
agaactagtggatccccgggctgcaggcttttttaggtggaaccgtacctggagctccgacctcctaagctgaaataatcaaagaattaatcaggataggatggcacgaatcttatagcatcgaagcacgaatcttgtgcagccgggatagtccgctcgcgcccaagcggatagagcagttgctacaggctagttcgtcagtcttttcctcctcaaatcctccatggcggaggagagggattagccacagtgcggcgcggaggacgacggcgatgtcgatgcccaccttccacctcgcccccgacctcgccgtctcccgcctctgcttcgggacgatgacgatgggggagcagagccggctgccggagtcgctccgcctcctcgacgccgcattcgacgccggcgtcaacttcttcgactccgccgagatgtactcggtcccacagcgcagtgagacgcacgggcgcagcgaggagatcctcggccgctggctgcgggcccgccgggccccacgtgacagcgtcgtgctcgccactaaggtcgccgggccgtccggggagatgacgtggatccgcggcgggccggcgtcgctcgattcgcggaacatcgcggaggcgattgatggaagtttgcgcaggctgggagtggattacattgatctttaccagatacattggcctgatcgctatgtcccgatgtttggagagacagaatatgatccaagccatcagtatatgtctgttccaatggaagagcagctactggctcttggaagagccctagacgctggcaggattaggtacattggccttagcaatgaaacaccatatgggttgatgaagttccttccactgagtagagattcccagctgcactcccagatactgaccgtgcaaactcatataacctggttttgtcaaattttcattcctggcttgctgatgctgcca

SEQ ID NO: 74964 - DNA, 246 bp, Oryza sativa
  Clone ID: PAT_MRT4530_75098C.1
atgaccaggcccaaatacggatctacacgaattggcccattaggcccatttggaccttcctgtgaagaaattaatccaagagagaatgacacaggtggggtccactcgaaagaacccacgtgggagaggagaacaaaaacagagagagagggggaggcggtccaaggcggcggcgcggccggcggcgacgggatggaggccaccggcggcggcgatgccgcggcggaagggaagaagggggaaagg

SEQ ID NO: 74965 - DNA, 436 bp, Oryza sativa
  Clone ID: PAT_MRT4530_75099C.1
aagcagaataaccaactatttaaattacagaatgtagcacatacatggaaggcattcgctcaacattcgtatgacgtacgagccacatccaccgctagttccaaattcaagctatctaacaggtgcacgagagctagctcattacagaatcaaggagttctagatggcatcctgctgatctctccagttttctagataaggagacaccctagaccttgactggagacaggcgatagcttctcttcctctacttgctggagcacgaactagcagttcaacctcagtcaagctctgcagcttaaagctgcaagacctgcttgtcataaggcgtgagctgctgacagtaagtgatgtgctcgtactgcaccctgaacatgtacgaaacgagccacgccagctgcattcatagcacgatcaacagctggacggaggttgc

SEQ ID NO: 74966 - DNA, 639 bp, Oryza sativa
  unsure (1)..(639): unsure at all n locations
  Clone ID: PAT_MRT4530_7509C.1
aataatccttcctcccagccaagatctttcttcctcctcctcgtcttcaggactcaattcgtcttctggtacgcccgaattctcctcatcgtagaaatcatctgtgttgggtgttgctgtgcgttttattattaattggtcgaaagaaattggggatacagactgatgtggggaattgatctgagaaataatccatccattcattcatcagggatcatatatggcctggtgttcgtttgatcttgtaagcttgtttgttccggattttagtgctaccagagatccggaaaacatcgtagtttcggcttgtttcctggtgaaataatctggtagtatatgaatcaagttggcaacacttctctaaaaagaaaatcaagctggcaaccattctctcgtgtgttgagatatgattagttattagttgtcacgcgttgaatgccttgtttctgttcaagtatttgcacgttagtcatgttctagagtcagaattttgcaacgaggattggtatgggtaggtacaactacttttatatttcccagtaggatatggctaagatggggagctgtccttttcggtactatattnagatgcctccacggcctgttcattgcacaacatcaatgggtttggtttttctg

SEQ ID NO: 74967 - DNA, 626 bp, Oryza sativa
  Clone ID: PAT_MRT4530_750C.1
aacctagggctatcactggctacagaagtagctacggaactgcaacgtccaagcttgccaaagagacgacacaacaacatacacatattatcattgccgagcttgccacccaagcgccacagcagcttcgacttcattgcgatgctactccaacgccaaaatgaacaaataaaaatgatacccacgaaggacatcagcctaaactactaaagaaccaatcctactcacaactagcatcaataatccaataaagagattgcattgtgtcatcattgccaagcttcgtcgcacccctacagcgaagcagctccgactctactcaacaataaccagataagagtgatgaacacccatcagcttcggagacattgcaggaatccaccaatgacccattgcaagcaaagggttcttggtgctaggagaggtcaacgccggaacgacgcctccaaggaggggaacaacgcctaaagacgtcgttgtcgtcatgccggcccgtggcctagcaaggctatcgccagcgattcccaatcaaagctccacacaaccatcccgtacaacgaccatcgccggaccaccacgctatccttcaacacccaagctcagcccaccatcccatagctcgagct

SEQ ID NO: 74968 - DNA, 968 bp, Oryza sativa
  unsure (1)..(968): unsure at all n locations
  Clone ID: PAT_MRT4530_75100C.1
agagatgcangtgtgtggccaaagatctccttgagcntgcagttgcttgcgcataataagcaaaaagctgtggcacagaacttgaattcccactgatggagcaaagtaggatgagtccaacattaaacaggaacgagttcatcaaagttcctccccatttcattgggtgaatggtgatgaaaactaatttcaaacccagcatcatttccccagcaatcactgctatgaggagatagaaacagaagaatgcaaaggcagcagtcccaagcagaccccaaacaccatccaattttacgaagatttcattcaggaaggaggacaaaggagggtcaatcaacaagtatatgacgatatgtgcaacccaagcaatcgatataattaacccgacagcaccaaataaaagttttccaatgtaaccaagaactgtcaaagcccaggtagcctcagcctgttctccttgagggtacatctcttcaagagccttcatgtcatcttctaaaagtactaattccttcccaagggccttgacatttttgcgccattttctgcccttcttcccacttttctcttcttggtgaagggcttcagctgctttcttcaattcccgagccttcttacctagttcagttgcttcctttatatattgtgagcgtgtaatgacagcttttgggcgccggacaaatgagaatataagcggacgtggaaggcaagcaattccaacaccaccaaatattgtgaagagaacagatccaacgatggtagcaagagcaaccacatattcagggaaggtagcgcgcattgtccaagttgtttgagagttagcaggtgcagtgtaagctgcgcactgcttgggcgatgtactgatgcaaggttgaccagttgagaaactagtgaatgaatttggaaatgtctcaactgctgaagaaagatgcctgacagtgaagtccactttgccaacaagtacgaat

SEQ ID NO: 74969 - DNA, 1264 bp, Oryza sativa
  Clone ID: PAT_MRT4530_75101C.1
gatcactaattacagtttattctctttccatcgtttgtacacgcttgtttttgtgtctctaagcattagaagaagaaaacacacgaggtaagcaaatgacaatacattctttactgaagatactggcagcataatgctatacgactgctacttatttcagtttcttgcaagaactactaatggaaggatgtgcatccagtaaaaataaactcaatggagtagaccatgaacatgattacatgaatggagtcagaggtggagacaccgcttggcaacttcgggcagccaccaacaaagattgtttcatctgtgattttacattgacaaccaaatcccttgagacctcattctttgaagaggatatatgccttcgtccattctttaagccttctaactccatttccaagtctaattgcatccccttcactgagtagaacatatatattatcagtaatcagggttttagctaaaagggagtcagtatagatcaaaatcgaaccaattgaaatatatccaatctgatgcagagaagtggagaatcaaccttgtgcaatcgctgagcattgccacacacctatgaattcctacttcaacaggaaagaccataaacacagtagagctacctgtttttctttcagttcaagaatttctggtttcattaatcaaaacaaaaagaagaaccgaaaaatttggaaggagaggaactaaagattttctttagcacaagagccttcctcctcgggatgtcgctttcaaaataaaggatatcgagcagtgcaaacagatactttcacaggttaatcacaaaccaacccggccgacagcagaaaaaaaagagatactccaatcatgatcaaacatgaaaaaaaaaacatatttcaacaattagatcccatttcaaagaagcggtttcagttctctcaaatatgacaggaaatttgttaatattaatactggtggctgaccatatcaaggctaacatgggaatgaagcacatcagttgaacttcagattcagtagtggtagaaaattggcatatttagccattttattataggagtagttttttgagcaagaagaaactttcacttcatagagcaatatattagtaactccacttcatgtagccagaaagtaacaaaggagcttgatgaaatacatgtgcaacactgattagaaatagcagtatgatgcttgatgataactcatccagataatgcaatgttgtatgcagtggttttttaatattccactccaagattca

SEQ ID NO: 74970 - DNA, 1501 bp, Oryza sativa
  Clone ID: PAT_MRT4530_75102C.1
ggggcctatttccccctacgatcaagctgaagaaatcatcaaagtttggaattagcaaggtaattgcacatttgtactctagccaagggcatttctacaaatacaagaatcaaaaacagcaattggacatttcaaactaatgagaatatttcggacagcaaagtggattctactttagccaagggcatttttgcaaattaccgtgtatgcaggaacagggtgcaaggatggacatctcaatcacaaacctggcgaccttacaatacaagcatttcacacgtaagaaataatagtcatgcccatgagcatttcgcacgtactccagacacgaacatgcaacatattgctaatagattgctaatgctaccgaataaaacacaataccaatagccagtttgaacatgaacacaaggtttatgtaggagcattcattacacaactcaattcaggcgctgctcaatttagtacatatttctgaattttcatccatcaaattaaattggatcaaaagggaatccagagtcagcgttgccctcctcgtagccaccgtctgaaggatgcttaagatcaattccagagttttggcatccgtgacaatgaccgtcgtcatcaggttgtaggggacagcaaaaatagtgtttctctccatccacaactttaacttcagcaaaaaagagacaagaaccctccaaatgagaatcaggacacttcgacttcattatgaaattgtaatgatgataagacttggcacaatcatcaaaaatcaaacactggtgagaaatatcttcaagctcatattcaaccacattagccccactgtgtgtactgaatgcctcaacaacctccgcccgcatccactctaaacctctctcaatagttgcttcttcagatattgcattgaattcttcatcccaaaactgtttcatttgtgcccgagtttcttcatctgtgttggcatagaaagacaaacgtagttgctccgtagcctcacgcagttcagccattaatgtgccttcacccctcctaatggtgttgtaggatggtggtggctcatcagtttgctggtgatgcacagaagtgtcttcgggaatctcttcaatgccgctgacaaatagatcctccattattggtgtaagtgggataaaccttgcgtctgcagtgcgctcctccaattcgcctcgtagcaaagccctgattagaaattggcctgaacgcgtagggcgatcggaaggatccctgcgactgcgagtgcgaccggcaccggcatcgtccgccatcgacaccggcgcttccggctgggagtcggagtagtgcgaagaggggaagcgaaacgcgaggaggatggagggggagggaggggcaccggcgcgaggagtgtgggggtggagagattcctcctcgcgccgtccggccggcgaggaggtgagcgggcgccgccgccgcaaaccctagacagcgaaaaaaagggggaaaggcagggagaaggacctgtcccggccgg

SEQ ID NO: 74971 - DNA, 268 bp, Oryza sativa
  Clone ID: PAT_MRT4530_75103C.1
ggatcaaagaatacaatgggggacacagattccataaccatgtgtgtgacaggggtgtttcataacaaatatataattgtttgaaaaaattaacagttttgggatttttttattttccactgatacaaaaaattgttgcagcttgttgatttataaccaattaaccatgcaggttacacatccttgatctacatccggcgtatgatatgaacctgggcagaggtcagtccacttttaacaaagaaggggaccacatttttgaccaggg

SEQ ID NO: 74972 - DNA, 520 bp, Oryza sativa
  Clone ID: PAT_MRT4530_75104C.1
cgcctctgtcgccatggtggcgatccatggacacctccacttacgtgaggccatgccagacccgttcggcgtcgacgagggcttcccgctccccgtgaagctccgcggggtgcaggtcaacgaggaggccctcgttcacctccccctcttccgcgccgccgaggccgagagcttcgccgtcgtcttcaacagcttcgcggcgctcgaggccgacttcgccgagtactaccgtagcctggacgggtctcccaagaaggtgttcctcgtcggcccagcgcgcgccgccgtctccaaactcagcaaaggcatcgctgccgacggcgtcgaccgggaccctatcctgcaatggctcgatggccaaccggcagtgccgttgttgtacgcgtgcttcgggagcacatgctggatgggcgcgagccagctcacggaactcgctgctggcctgcgcgcgtcgggccggccattcctctgggtcatcccgacgaccgcggcggaggtaacagaacaggaggagcgcgcg

SEQ ID NO: 74973 - DNA, 437 bp, Oryza sativa
  unsure (1)..(437): unsure at all n locations
  Clone ID: PAT_MRT4530_75105C.1
actgagccgccgcagcccccgacanacgtgantacnnncgtggcgtagcatntcgnctgtggatancntncatnctattatcctatgagggacnctcnnatttattcntntaattgancananacatagcacccgatccccccctgaccgcgtcgncngagcggagcgggccggaagctnaagtcttcatcctcccgcgcgcgtgatctactnagagacccgcggcgtgctcaanatcttcctcgagggggggcccggtacccaattcgccctataatgagtctattacaattcactggccgtcgttttacaacgtcgtgactgggaaaaccctggcgttacccaacttaatcgccttgcancacatccctttcgcactgcgtatacganagcccgcacgatcgcctccacatgccactgatgcatgcattactatt

SEQ ID NO: 74974 - DNA, 406 bp, Oryza sativa
  Clone ID: PAT_MRT4530_75106C.1
ttatctctctcaaagcatgactgctgcacgagctccggcgtagcatggggtgtggatggtaggggacgcagtctcaagcgatgagctcccggcgtggcatggttgtggacgacggaggatgcaacctccgacgatgagctccggcgcatggctatggacggcggaggatgcagcctccagtgacgagctccggcgtggccgccggcgacgagcttcgacgcgacgcgatgcatggacaacggaggacgtggccgctagcgacgagcccggcgtggcgcatggcggcggaggacgctaccaccagcaacaagcctggtgtgggcgtggtggcgaaggacgtggccccggcgacgacctccgacgtggggcgtggacaacagaggacgcaaccaccggcgacgacctt

SEQ ID NO: 74975 - DNA, 210 bp, Oryza sativa
  Clone ID: PAT_MRT4530_75107C.1
atgacggtgccctcgctggcccacgtctcctatctgcgccggaggagctcgctggagaggggagaggccatgcatcaacgctgccagatccgtccctacctcaggcggtcgtcggttcgatctgcccctcgtggccgcgacgccggggagctcgtcgcccgcgctgccatagggctcctcgacagccgcccctgtgtggattcggggtag

SEQ ID NO: 74976 - DNA, 1894 bp, Oryza sativa
  Clone ID: PAT_MRT4530_75108C.1
tatgacgtttttgcacgcgtctattcagttaagtccattccttttttttttttttttttttgtctgaatattcagttaagaccattccaaggctccttttcgccatgcataaactaaaccaacaactaggataagcacgaaaatgaaagcttcgataaaaacggatatacccaatacgtcgaaactcattgcccaagggtagagaaagaccgtttccacatcaaaaacaacaaaaactagcgcaaacatgtaatagcgtattcggaattgtaaccaagccccccccatgggttctatacccgattcataactagaaagcttctctggtccttcacgaaccggagctaaaagtgctgaaatccaaaatgctaaaataggaataaggcttgctattattagaaatgcccaaaaaatatcatattcgtaaagcagaaacataaatgtactcccattaatgtggaataggcggaactgaattagtcaattcaagtcagcattgtcaatttatacagaatttctctcttttcctcggtgaaacaaggatcggtttttctcaaaccaaagggcttagtttagcctttgtttcctctttgccacgtcttctttaaagattcatccaatggaatcccgaccccctttctttttgatttcctttctatttaggtatggtggagacataattcttatagaaacaaaactctctcgcttcactttgtctcattttctctagaatctctagaaaaaggaataaaaacgaaaatactacgaattagagcctaattaagataggatgactaatgtatgcagcctaatgaggagtaattctataaaaataaagaactctatttcagaacgtagattgatttagatttaggtaatctatagatatagataagcaaagtaatatacttcaaacaaagtaggaatttgcaagatggagaacatcttgcagttgatttgatagaaattcatttttcttttcctgtctctataattttcgatgaatgagcctctggtaatccttttatctctattttatggcgcaggcgcctgtccagtctataaacaagtactaatagggaaatgaaaactatactaaaggaaacgtaggatatctctcctaaaatctaaaaaaggacatattagggctatacggattcgaaccgtagaccttctcggtaaaacagatcaaacggattattatcgaaatgattcgaactgtttcaaagacccaacatgcatttttttgcattgggctcttttatcaactgatagaaagatcagttagtccaccatagtttttctttacggaaagataatgagatggctccctgcgctctgattgattatttgtattatgatctatctaagagcaataccaaagtgtttcaaaggaggattaccttgacttaggtctgcctccggcctaaattaaatcaacctaagtgaaatagagtctctatcgttccgctacaagagttgactatgagacttcatacaccttaaagttcatagaacgaaaagaatttttttggaggcccttatcctcattaagcctagcatttagtgggctggatatttaccttatcaactagcaaatcaataaaggttctatttgtttaggcacctggattggtacctgaatcggactgaaccaactatttgtcaggcgactgttctcctattctctcgaatccatgaagtaagacattgattttgcaagaagatccactatgttcattgcataataagctcccttgaaaagcattggcgcacgtgtaaacgagttgctctaccgaactgagccatcgcccttgtcagagatatcttaatatatagagaatttcttgtcaagatgaatattctctaatagtagaggatatccgcagcccgg

SEQ ID NO: 74977 - DNA, 809 bp, Oryza sativa
  unsure (1)..(809): unsure at all n locations
  Clone ID: PAT_MRT4530_75109C.1
atggcgatggtgcggtcggcgttggggaagatctcccgccgcctctcgggatcctcggcggtgatctgccaagccccgccgctgccctccctccaccctgccgcccagctgatgacgacggccttctcgtctccggccgccgccgccgctgcgcgtgtccgccgtatccctaacctgcagggtctgcaacatccccctttcatctgcaaaggaactgagcgtatgcagtgggcaggacaaaagaggttcttctcagtggaggcgaaagctaaagatgctaagcttatggaatcagcacggtcgtctgtgaagaggctcatggcttggatgaatgaacaggctaacccacgcaatacagccatagttttaacaatcatcaatgtggtatatcttggtatctttattagagagtgcctaagatcggatgaacatgcaaaagactgcactgctgatgataacggggaccgtaattcaagctacaggatagttaaatatggatgtcatgacccttatgcatgtccttggtaccgtgccctagttgctcagtatgctgtgatgttagtactagttctttttacaatgtagttagtggcaatgtcatntatcaggatttcnctatcagactttttgtagtaatntgctgtntggttgtaactgaatcatggccttaagtgtttgtaatttgctacctctggttgtagctgaatcatggccttaagtgggcccaacnctggatggatcgaattgagctaaggctatgggttgggctttaaaaaaaaaaaaaaaaaaaaaaaaaaaaaaaaaaaaaa

SEQ ID NO: 74978 - DNA, 137 bp, Oryza sativa
  Clone ID: PAT_MRT4530_7510C.1
atgcgggccggaaaggggagaactattttattgggccgtgtgctcataaattgggccgcgtcagaaggtgaagcccacgcgcgtcgtactgcgggggtggcgctggccacctgggtccgttggatggggatccgatg

SEQ ID NO: 74979 - DNA, 137 bp, Oryza sativa
  Clone ID: PAT_MRT4530_75110C.1
cagacccaacgttcgtttgcttattcatgacacacatgagggaattatgctctgatgatggctactcagaatgttgaacatgctctggctgctgggtgtacagatgtattaaagtatctgaattgttacatgacatg

SEQ ID NO: 74980 - DNA, 2190 bp, Oryza sativa
  Clone ID: PAT_MRT4530_75111C.1
gcacgaggcacctctatgcagaattgcagatatacttatactagtcagaggccaacttgtgctgcgtcatttctaagcattgggatgcaaaggataaggggggagagattagattagagagatagccatggagggaggtgttcatgagttcgatggctcaaccttcagagagtgcttctccctctcatggaggaacccttatgtccttaggctcgccttctccgccggcatcggtggcctcctcttcggctacgacaccggtgtgatttcaggagctctgctttacatccgtgacgatttcccttcagttgacaagaacacatggcttcaggagatgatcgtgagcatggcggtggccggcgcgatcatcggggcggcgatcggcgggtgggcgaacgaccggtacggccgccggacgtcgatcctggtggccgacgcgctcttcttcgccggcgcggcggtgatggcgtcggcgacggggccggcgcagctggtggtggggcgggtgttcgtcgggctcggcgtcgggacggcgtccatgacgtcgccgctgtacatctcggaggcgtcgccggcgaggatacgcggcgcgctggtgagcaccaacggcctcctcatcaccggcgggcagttcttgtcgtacctcatcaacctcgccttcaccaaggcccccgggacgtggcggtggatgctcggcgtcgccgccatccccgccgtcgtccagttcttcctcatgctcttcctccccgagtcgccgagatggctctaccgaaaggggagggaggaggaagcagaggcgatcttgaggaagatatactcggcggaggaggtggagagggagaaggaggagttgaaggagtcggtggaggcggaggcgcgggagaggagctcgtcggagaagacgagcctggtggcgctgctgatgacgacggcgacggtgcggcgggggctggtcgccggcgtcgggctgcaggtgttccagcagctggtggggatcaacacggtgatgtactacagccccaccatcgtgcagctcgccgggttcgcctccaaccagacggcgctcgcgctgtccctcgtcaccgccggcctcaacgccgccggctccctcgtcagcatctacttcatcgaccgcaccgggcggcgcaagctgctcgtcatcagcctcgccggcgtcatcctctccctcgccctcctctccgccgtgttccacgaggccacctcccactccccgcccgtcggcgccgccgagaccgcccacttccacggcggcgcgctcacatgcccggactactcctcccgctcgtcgtcgtcgttctgggactgcacgaggtgtctcaaggcagcggcggcgtcggcggggtgtgggttctgcgcggcgggcggcggcgacaagctgcgcgccggggcgtgcctggcggcggcggcggcggcgtcgaacgccacggctcgcgacgcgtgccgcggcgaggggagggagtggtacacgcgggggtgcccgagcaggtacgggtggctggcgatggcggggctggcgctgtacatcgccgccttctcgccggggatggggacggtgccgtggatcgtgaactcggaggtctacccgctgcggcaccgcggcgtgtgcggcggcgcggcggcgacggcgaactgggtgtcgaacctggcggtggcgcagtcgttcctgtcgctgacggacgccatcggggcggcgtggacgttcctcatcttcggcgggctgtccgtggcggcactcgcgttcgtgctcgtctgcgtgccggagaccaagggcctccccatcgaggaggtggagaagatgctcgagggaagggagctccgcctcaggttctgggccaagcgccgccaccaccacggcggcgacggcgacggcggcggagaaaagaccggcggcgtgtgacacgacacgaggcctgtttatttagcgttttgatgactgattcgttgcaaatgaacgaaggagtgtggatttggtccgatcacgcacaaacatgtagtcataaatatttaagtttattaaggtaaaatttagataaacttttgaaactttgatcactgatttcatatcagatcaagtttataaaatcgatggcgtttgcgtttggtgatttgtgaacggagccccattgactggcctaataaatcaaagcaaaagccaacatttaaattttt

SEQ ID NO: 74981 - DNA, 3681 bp, Oryza sativa
  Clone ID: PAT_MRT4530_75112C.1
atggactcggcggcgctctcgctcacctgcgccggcctcggtggcgccgaggaggacgacggcggcgccgtcgtgggctacgccaagggcgagcactgcctcgataatctgaaggatctgcagagattcctgcggcgggatgacccgcagcggcgggaggttttcaagcaggtttgcaagtggaaaatcgcatctagagatctggtgcccatcattgagaattaccaggctgatcgcaacctggtgatcacggcagtgaaagtgctggtattccttacaatgcctgtggagccgtcatcagagaatgttgcacaacagatagagtatctttgggatctgaaggcagcactgacgcgcaatgttgctatggctgtcattgtgtctcttcttgaagatccactggaccatttggaaagagcttcattcacagaagatgactggaaactagttcagttggtgcttactttgttccgcaacatcttggctattcaagaaatcacattgggtcagaaggcatctggagaagctacccagttgctctgtctagctgacagctttttagagctcatgtttcaagagaatgtgatggatctaatattagtgctgactcaacatatggatgagccatctggttatctccagcaggaaaaccttcttcttttggaaatctttcattaccttttcttaggccgggatccagaattgattgctagagcttctactgcaggttcaaaggacggatctaaatccttgtgcaaagggaaccccaactccgcatctgcaaatagcctaaggaaaatacgtaatgtccaaagagggccccagaaaaggattgcctgggataatgagcttctctacacaccgagagagggcacaatggagatgataagaaatttcctggaacaatttttatctggaggatacaatggtgaaactactattttccattttcatgtaaagcttgggataacacagtgcttgccagtcctcatgcagtctgtctgtgatgatatcgtaaaggagcatcattctatccagaaatctgacatcactacattcttcaaagttgctcgctttgtcttagcttttcaacacgagaaggcatcaaatgctcagaaatctaatgctgcggtccaactgcctgaggcttctcctagcgatcatcttgatgataatctgccgtttcttggtgacatatgcggacctgttgcagccacattgaatgaaggtatgtttaacttggtcatctccaggtggcgtgaggcctatgatagcctgaaggaaacacatgattacaagactctttcagcagctgggtctctaatgaagaacatgattgacatggtatatttggtgcttaaagtacttcctgatgattcaagagaatctcaaacagctcgtgttttactgtataagctgttttatgatcagacagaacaagggctcactcaatttctgctgaacttattcagatcatttgatactcataagcaaccaaaaagtgatcttgcagatttactaggaacaatccatatcatgctacagctcatggagaagcttcaagcacgtggtgcattaagggttgcaaaaaggacaagaaaaggaagaaaaaagaaggcttcaaagaacaaaattgagaacacaaatctcaatgcagagaaaatggaacagagcaatgttgattcaacagatgggactaaatctgcacttgaatcacttccagatttgaaaaatgtggattctgtagcagagcctcctctcacagagcaagaaaaagttgtctccaacggcatggatgcaccagatgaacttgctggcacatcagttaatctggatagcacctcgcattgtgaaggcgagccatctcgtgcagacaatggtgaactgaaaggaaatctaattgatgaagaggatgggacttcagactcttcacttgatgatcaaccccctgctactagtgaagttgatttcaatgtatcccgactaatatctactcttgcgaacaattctgttgtccaaaatatatgttggttgttgaagcattacaagagtaactcctttcgaacaaatcactacataatatgcatgctgcggagattttgcgaagacctggaattggcaccaatgctctatcagctgtcccttctaactaccttctatgatatattagctgacgagaaatcatcaaattcaaaggagtatacgaacattgtaaattttctttctaaaattgtaagaaagatgctgagggtaatgaagaaacaaccattgctatttgttgatgtactcttttggaaaacacgcaaggagtgccattgcattgatgctgatgctcttctgagtgatatcacaaaagatgctacaaacaagggtggcgaaattggttcaagtaagggatggagaggttcaataaacatagcagattctcttggtgatgacgaagtggacttggttataccacatgaaccatataatgctgataaggatgatgattcatcgtctggcgaacatgaagatgtttctaagagaagcatgggtgccacaaataaaagtaacaggatattgtcattttcagacagtgaagctgacgataatgatagttcaattcaaattgaaaaaaataggaacactgtatcaagaggttctcagaattctgaagcccccaaaaggcgaggtcgttccatttttagtgaagagcaagagaagcttatgagagatctttatgaaaaatacaaagatgaccgcaaatgcactcatctcattgctgaagctttagaccccagtggaaagatttcttctgttcaagtttatcgaaagctcacacagctaggcctgaggaatgccatgaagaggaggacaaaagttccagaggcacctctttcagctcaagaattggctacacagacggaccagatgctaggtgaacacaactgtgatcccaagccagaaacgacccggcgcagaaggaaaaggcaaaatgtgtcgcatgctagctatgaggacaacactaccgatggaaaatcatctgatgaagaaacattacaagcaattaaaagcagaacaaaaaataagaaggtaccacttgtgggtttctcacctagtacatcacagcatcaagatggtttggcagacccggattctgatgatgagaccataggatctatgctcagaagtggaaaaaagaagaggctgttgacgccggacaatgcaatgaatatagagaaacatcaggagtcaccagacagtacaaacaccagtaattattcaccggaaatatctcaaaaacaagaagccctgcaagacacttattctggtgatgagatcatagactctatgcatagaagtgggaaaaagaagaggttattgaagtcaggttttgcagcaaatacacaagaacatgaagagcctttgaaaaacataggtcaagacgatgaaactatcagttctaaggataatctgcaccatggattaaattcgtctaataacagtggcggtgctggtgaaacagaacttttggatgacttcattgagcctgagctagataacgttgaaaatactgagcaaagggtaatcgatgatataaatatcaccgaatctggggacatggaaagctcttttgctgatcaaaagcctggtctgaaaagaagacacaagttggtaattgatgatgatgatgattaa

SEQ ID NO: 74982 - DNA, 279 bp, Oryza sativa
  Clone ID: PAT_MRT4530_75113C.1
attcgcacgaatttgctttcgagccgggaggaccaagttggccacaatcaggaagccaacgttgggctggagactacaggtcagggacatcgggcgggtcacgtaggagcgcgcccgcatctaggagcacgcgcagaggcgagctgccgtcggaggagacaaggaggccgacctccccatatggggccggttcccatcacccgtggataagggagcaccggtgcccccaacggggcacacagccctgtccagccttagtctaagatgcccttggaacaa

SEQ ID NO: 74983 - DNA, 407 bp, Oryza sativa
  Clone ID: PAT_MRT4530_75114C.1
cggacgcgtggggcagcatctagttgccgtggacctgcagatggttaaggtttcagaggaagatggtgttgagccttgcagcaccagccatgttcttgcttgggagctctcaccgtccctaagaaccactttgttaggttcatcgccaggacaagatacaaattccacctcccattttgatagtgttgccaattctttccttgaggcatacagctctgcactagttgacatggagttccaccagttagcaacaactgcacttgcatctcttaacaaagaaaagaaaagaacggtggaaaacatattcaagctattttaaccccttctcctgtaaacctttttggaccaacctgaaacaagcttgacgaaatatgcccatctgaacttcccttctggccctcccttcc

SEQ ID NO: 74984 - DNA, 394 bp, Oryza sativa
  Clone ID: PAT_MRT4530_75115C.1
ggccgtggccgtcagcgccatgctcccctcaagccccacggggcgtgatgtgcacatacttacaagtgattacaggctgaacttcgagccacacggacgtgtataaacctgagcaggtacctctacaacatgatcatggcctgctgtatttaacacgtgacacaagacgtgaaggcattttggagcacaagcacaacaaagcagacctacaactacgagcaacaacagcagcgggtgatgacgtaatcattgagaagtatgagcactagctcgcgctgcagctgctgctagcgaagcaccatatccatggccatttgcaggggccggatgaccataaataggtttaccctcaactggaacaggcccttctttgaccaactcaaaagcttgagct

SEQ ID NO: 74985 - DNA, 1664 bp, Oryza sativa
  unsure (1)..(1664): unsure at all n locations
  Clone ID: PAT_MRT4530_75116C.1
ggccgcctttttttttnngggatttttgatttttgggggtttttcttttttttgggaatggaaaccacaattcgatacagacatacagtacatttcactcaagtacaaaggggcaggtagcaactacaaatgacacaaaaacagaatgacagaaatgcatgccagaactcctagacacactgaattacttttaaccaatctttttaatttccaaggacaagaaatacatttgatgggaatcgttcttaaccaggcctttttcaaggacgtgtaatacatttgggggacaattaacacatgtttactcatcgcagatcacctaagcaattctcagcaaagcatttttttttcttgggaactaaacttgaattcctggatctcaacaatgcaacatttgcaaaattctcatggcatttttttttcttgtgaactaaacttgaattctcctggatctcaacaagcaacatttgcaaaattctcatggcagattcctacagtggaggcagtggaagcttaacaatggcgaagaagaagaaggaggtgtcgcgagggatggcggatcagtacaagctaaagccgagagactggctgatgaggatgccgaggcccatggagatggccacgagcgaggcagcccatgtcagcttctccgtgatcctgggaaccctctccttgagcgcctccgtacaagagccgatcaggacggtgtagctgcccatggcgaccacggtgccgacgaggaacatgccaaggaacgccgcgccggcgacgcgcgacgggagggcgagcgccggcaggaccatcatgagcgcgtcgggctgcagcccgtgcacgatcccggtggcgaacgtggcgaaggtgatcttcttcctggtggctggtagagcatcgagcgggccacggtgcgcgccgccgccgccgccgccgttctccagcgcgacgcacggcgtgggcacctcggtggcctccctgatgccgagggcgccgatgacgagcagcgtgaggccgacgacgcgggtcccccacgttcggatgacctcgatgtggaggcggtccttgaggctgaggaacaggaggccgaagatgacctggccggcgtcgtggccgcagccccagagcgcgcccacggcggcgctctccacccgcgacctcccgatggacagcggcgccagcgcggcgaggtggtccggcccggagagcgtgtgcaggcagccggccaggaaccccgtccacgcgctgctgagcagctccgacttgaagatgccacctcccgccttcgccgccgagtggaacgacgccaacgccggcggcgcccacgccggctggatcagcgtcagtgcaatcgtcgccaacagagtggcagccgcagccgacgccaccttctggaggaagcgccggctggcggtggcggtggcgggagggacagcctcgccggcggccacatcggcagcaggattggccgcgaggaccggaggctggtggtggtggtggtgcctggagaggaggagcgaggcgagaggcggcctggagccgtacccggaggccgcaccgccggcgcggtggtggggtggcgcggcggcgagggagggcggcgggcgggagaaggcggcgcggggaggccggcgcgggaggagcggcgaagagataagcctctccattgccat

SEQ ID NO: 74986 - DNA, 198 bp, Oryza sativa
  unsure (1)..(198): unsure at all n locations
  Clone ID: PAT_MRT4530_75117C.1
agaaaactntgtctctntctntctctctctctctctctctctctcatgcttgtacatggagggatcaagatcaagggagtgcattnctgtggcaagtggccatgaagcagcagcagcgccacaggntacggnctnttcatcagaacagcagattnttccatggctgaagcagctncacaacaagaagccncagnagca

SEQ ID NO: 74987 - DNA, 525 bp, Oryza sativa
  Clone ID: PAT_MRT4530_75118C.1
acttcagacaactactgaagggaactctcagttacatcaaacctatcttcatgtcagagttaagtggctggtgcactgcttgttgtaaagcttattctgtccagttaccttgcttcttgtgacgacttgtgaggcttggcacatgcacacaacaactacttgtgaagctaatccaactctacttagctggttattaccatcgacttgccttgagctgttcaccaaagtttgcctttggcagatggaatggcctataaatcgcaactaactgcagcagcagcaacaactgtagatcaagaaagagagacaatcaaacatgctcatccgttatcttccttcagtgattggtaacacacaccccaacttttaaattccttgcagttaaggtagctagtgttaggatttgcgcgtaattctggcttacaaagttcttgtgttatagttgtagaatgtggctatccttgaaaatacaagttgcagcttagcagccaggcttctcctttttgtttgccagtgaacaattta

SEQ ID NO: 74988 - DNA, 579 bp, Oryza sativa
  Clone ID: PAT_MRT4530_75119C.1
atgtcagtgaaacaacttagtctacccttttcacccttttcccccttcccccttgcttacgacgctgggtggcgcatcgacgcgacgccgcttggctcgccgggaggtcgaggcaagcctccaacgctagatgcctcgagttcctacgagctcactggcgacgatgagggccaacgctgcccttcttgcggagtcggaggtcgagaggaagctagaggccacgcgggcgagcttagggtcagacaggcttgggaggacgtagcacaacagcggcacgacagagctggcatgaggcgtgtcggcggtgtcagctcgtccgcttcccccgccggccacagccgcgcgtcgccatcgccgacggctgatggcggcgtcgtcgagtcgatctcggtgcgggcctttcgtggcttcggcttcgaccatcgaggtcctgcgtggctgtgcccggctcgccgccgccgtgtcgccatgccaccccgccgcccatcgctagccgccctactgccccgagttgacccaccctccccgggccgcccgcacgaggggggcggggaggtcggcgagctcggccagcactga

SEQ ID NO: 74989 - DNA, 2952 bp, Oryza sativa
  unsure (1)..(2952): unsure at all n locations
  Clone ID: PAT_MRT4530_7511C.1
gacggcgacggcgacggcgaaccgctcctccgctccgccgctgctgagccagccagccattggagtggaggatccggcctctgctcccctcgcaaacccccgccactcctcacccgcacccgatccgatccaaccccgcatcccccgatccctcccacgggaccaagattcggatccgcctcgccgtgatggatcccgacgagaaccccacgccgccgccgccataccaggaagcggaggctgcggtgccggtcgacgagcagcctccgccccccgtagaggaagagcaggcggaggcggcacgccaggagtcagctgcgccggttgaacaagatgcggcggcggcagagggaggaggaggcgatcgcgccgcgggcggggagcggagccgcgaggagctggagcgggtggtgatggagctcggcttccagaacgactacctcaagtcccagatcgcggccgccgagggtgggagtggggcggcggagtcggagctcgtgaaggggttgaaggagcaggtggagaggctgaggaaggaggtggaggagcacaagcagacgcagaaggccaccgaggccgccctcgagcacgtcaatgtcgcctacgccgaggcggacgccaaggtccaggacctcaccgccaagctcacccaagctcagcagaaaatggataaagaactaaaagaaagagatgaaaaatatgttgagctggataccaagttccagaggcttcacaagcgtgctaaacaacgcatacaggatatacagaaggaaaaagatgacatggaagctcgctttaatgaaattaaccagaaggctgagcaggcttcttctctgcagtcagcagcacaacaggaactggaacgtgctcgtcagcaggctagtgaggctttacggtcaatggatgctgaaaggcagcaattgcgaacggtgaacagcaagttaagaactaatcttgatgaggcacgtgttgccttggaggccaggaataatgtccttgagaagttgcgacaatcgatgtttgaaaaagaacagttgttagagcaaacccaagcatcacttcaatctgcagaagaaaagagaaatgcatcaattgcggagcttactgctaagcatcagaagcaattagaaagcttggaggcacagctaactgaggtttctgcggagaggacaaaagcatctgaaacgatccaatctcttcagatgttgcttgtggagaaagattcagaaatagctgaaattgaagcagcttctactggggaagctgctcgaattagagctgccatggaggagcttaaaggcgagcttgctcatctgaaggaccaacatgaaaaagaaaggcaaaattgggaaactacttgtgaatcgcttaggacaaaattggaagcatcagaaagtgcatgccatatatctgtgatagaatctactaaagttaaaagtcaactggagttggagttatcaaagcaaaaccaattactacaaaccaaagactctgatctattggctgcaaaagacgagattagtcggctggaaagcgagttttctgcatataaggtccgcgcacatgcacttctgcaaaagaaggatgctgagctgaacacagctaaaaactcagatttgattaaagcacatgaagaagcaataagggaagctgaaaaggaaatttcagctgccttggcagaaagagataaagccatccatgaccttcaaattgctcaatccaaatatggtgaagagattgaagcaagggatttggctctcgctgattctgacaaaaagttaaagaatgtcatggcaaaattggattctcttacttctaaattcctttccgaaaaagaatcatgggagaaaaacgtggcaagtgtagaggaaagctggagattgaaatgtgagtctgtgaaggctgagagcaatgggcatgctggagatgaacttaagaagaatttagtggagttgacagtaaaacatgagaaactaaaggaagagcatgattctttccgtgatattgctgatagaatgcttgaagagaaggaccgggaggtggctaagctcctcagggaaaacaaggatctacataactctttagaggctaaagcggcatttggggtagatttggttagcatcaatggtaatcaaaatccaggacctgctaaacaggatgcaatggacattgaactggctgagcagcaaattctgctccttgcacggcaacaggcacaaagagaagaggaattggctcaatcacagaggcatatattagcacttcaacaagaaattgaggagcttgagcgtgagaaccgccttcatgatcaacaggaagcaatgttgaagactgagctccgcaatatggagagatcacaaaaacgagaaggaatagatatgacatatctaaaaaatgttatcctaaagcttctggaaacaggggaagtgggagcattgctgcctgtggttgcaacattactgcaatttagccccgaagagctaacgaaatgtcagcatggcgtcctttcagctgtggcttcatcgccagcaactgccggtaccagacggtggatccacgccaaattcattcttctcaagattcacattctagcagaggtacatagatttgacattctagctgggggtagccggagaggatgctgtttgcacgaaatcccagcggtttttctggccatagatgattctatttgtttattatttctaggtcgccacttcctctcgtcacattttgtaaaactagtgtatataaaattatgaacattataagcaattttatgcctaaagtggaagggataatgaaaaaaaaaaaaaaaaagaaatatgttatgtatttgcaacacttacttcaaaggcaaatgaaatgcgccaattttgccttcaaggatgttaattttgtgcttacaggtggtcagcgttaattttgatgtgtgtgcagtgtgcttnccctgct

SEQ ID NO: 74990 - DNA, 975 bp, Oryza sativa
  Clone ID: PAT_MRT4530_75120C.1
atggtcgaagccgaagccacgaaaggcccgcaccgagatcgactcgacgacgccgccatcagccgtcggcgatggcgacgcgcggctgtggccggcgggggaagcggacgagctgacaccgccgacacgcctcatgccagctctgtcgtgccgctgttgtgctacgtcctcccaagcctgtctgaccctaagctcgcccgcgtggcctctagcttcctctcgacctccgactccgcaagaagggcagcgttggccctcatcgtcgccacggcgtcttccccattggagcaatggatgaagcggttcgaggaggcggagaggctcgtggccgacgtcgtcgagaggatcgcggagagggagtccgtctcgccgtcgctgccgcaggagctgcagcggcgaaccgccgaaatcaggaggaaagtcgcgattctcgagaccaggcttgacatgatgcaggaagacctttctcaactcccaaacaagcaacgcataagcctgaaagagttgaacaagctagcagccaagcactccactctgagctccaaggtgaaggaggttggcgctccgttcacccggaagcgcttctccaataggagcgacctgcttggaccggacgacaaccacgcaaagatcgatgtaagcagcattgccaatatggacaaccgtgagatcattgagttgcagaggaacgttattaaagagcaagacgacgaattggacaagctggaggagacgatagtcagcaccaagcacattgcgctggcgatcaacgaagagttggatctgcacactaggttgattgatgacttagacgagaaaacagaagagacaagcaaccagcttcagcgtgcgcagaaaaagttgaaatctgtaacaacacgcatgaggaaaagcgcttcctgctcatgccttctcctgtcggttattgcagttgtaattcttgtagctctattatgggctctcatcatgtactag

SEQ ID NO: 74991 - DNA, 795 bp, Oryza sativa
  Clone ID: PAT_MRT4530_75121C.1
atgcccaaaccgcctctctcgcctgaggaggaggctaagttcgaggctgcggattgcttgttctgtggagcattgatcagtgtgctcaccgataacatagtggacgtctatatgcacatgcctttggggaagaacatgtgggatgctcttgaggccaagttcggactttccgatgccggcagcgagctatatatcatggagcagttctatgactacaagatgatgctggcaaaggaacttgagaataacaactgcgagttgccggacaagtttgtggcggaaggcattattgccaaattgccaccttcttgttcggactttgctacttctctaaaacataaaagacaagggttcagtgttactgacctcattggctttttgggtgttgaggagaaggggagggcaaaggacaatcggggcaaagtgatcgagggaggttctaccgccaatttggtgcaaaagacgaaccctcatgcatcctacaacaacaagaagaaagtcaaacctgacgtcaaacccaaggctacaactaattttaagaagaaaggcaagggaaaggcaaagagcgactgctttgtgtgcggtaagcctgggcattgggtcaagaattgtcctgagcgtaaggacaagaagtctgcaaacatggttattagcgagggcggagaaacattggggtatggtgcgtgcttggcaacaatgactcaagtaggaccttaccctttgagtttttctctagggctgggtagcaagcttgttagtcgacagggctttcctaaccctggtgttcgcacatga

SEQ ID NO: 74992 - DNA, 210 bp, Oryza sativa
  Clone ID: PAT_MRT4530_75122C.1
atgacccgcatcctgccgtcctcgccgatctccgcatccacctgcagctccgctcccgtggcggcgagcgaggcgatctcggagtcgaccacccagaaggagatgagtatgactagtatccgcgcgtaccatctccgtacgcgttacgtggacctactgtatcaccatacggcgcagctgcccctatacatccacgacgattatgaatta

SEQ ID NO: 74993 - DNA, 514 bp, Oryza sativa
  Clone ID: PAT_MRT4530_75123C.1
aagtaaggaattttatttaggggccttgcgggaacatgacatacgtgaaaccctaaggtagctacctacctagctcccaccaaattaaggacttgcctgcaacctaggtggcaaaaacaaggcatttgtacctggtgctgggagctcggggaccaagggaaaaattggatggaaataatttccttttggtcgcaaaaacaacaagacccgccccccctgggaccacacttgcaggggttgcatccaaagctgccgttctccaacccaaactttgatcctccggaaacaaaaccaaaccccttgttggccccaaaaaaaaggaataggggcccgcggtccggggaaaaaaaaaacagaacttgcatcccccccaaccgggggcctacttgcaaatagagccttattcccacttcccaccccttcccaacatggggaagaccatgaaatcttctttttccttaaaaggccttgggggaaacaaaaaacctgcttacttgaatggagccaaaagccc

SEQ ID NO: 74994 - DNA, 364 bp, Oryza sativa
  Clone ID: PAT_MRT4530_75124C.1
gcagtactggagggtactcgactttttgtaccatcaccccgagagcctacacaccttcttgttcctggttagacgacctgtgcatccccaccgatcaccgccacatggacggcgtttgagtcaacacctacacctttgtcagcccgatactcacaaggcctggttcgtcaagttccactggtagcccacctgcggtgtatgctggtttgcggacgaccaggccacgcgtcgaaaggggatgatccacacgcaccgcaccaagtagctatgctgctccatgtgccacgggaactttcgcgagtgcgagctgttactacaggtgatcaaccccgaggaggaggagtggttcgacttttaccgggtg

SEQ ID NO: 74995 - DNA, 1107 bp, Oryza sativa
  Clone ID: PAT_MRT4530_75125C.1
taccctcactaaatgctggtggcgacaatggacttcaaaggaggagaaatgtgactgtggatctaggtttttgactgggagaagaagggtagagagaagggttttgtccccttttagcccgtgcaatccattttttctagcctattgtgcgctcgacttggtgagctaatctaaatttctgcccccgtgatgtaccctttgccgactgttggcgtgaaggcaattgttttgtcgacagataatacgttgcccatgaatcaccgacattttgtttgtctcaaaagactagaatcgccgacacataatacgttggcagtgctatatacatatttgcctacaaatgatgtgttctgtgtaccgacgttttgccaacagtagtagtcagttggtgaagatgggccatcatgtagtgattgtctaaaataaatataaataagtttacctatttaagtacagttatggatttccgtatccaacgtttgattgtccgttttatttaaaaagtttataaaaaattaaaaaaatagccatacataaagtactatttatgttttatcatctaataaaaaaaatattaatcatcaaaattttaaataagacagacggtcaaatattgaatataattggatataaacagtttaaaactatactcttctaggatagagccacggaggtaatattaaacttgctcctaggagagtatagtaccactacccacctcaccaaacagacccccatcataaatggctgatttaattgggctgtactccctccgtcccaaaaaaagataaaccctggtatccgcgcccaatgtttgaccgtccgttttatttgaaaaaattataaaaaaaataaaaagacaagtcatgcacaaagtattaatcatgttttatcatctaacaacaataaaaatacgaattataaaaaaatttcatataagacggatagttaaagttggacacgcaaatccagagtttaactttttttagggcggagggagtatatatggggcaatctagttctcttctcccctcaatcaaacgagccagaggtaggtcgggagaccactctacagtctaccctccagcatttagtgagggttaataa

SEQ ID NO: 74996 - DNA, 231 bp, Oryza sativa
  Clone ID: PAT_MRT4530_75126C.1
atggcgatggctacggctgctcccatcctcgacgtggctgcggtggcggctgctgctccgtgcatgacctcctcctcggtgtggcaacggctgctgccgctcccatccccgacgtggtggcagcggctgctgctcacctccccggacagctgcagggcaaagctcctcgctgactggccgatcgaggcgcggccacttgtcgatcgctccgtacgcgtgacgagactgtag

SEQ ID NO: 74997 - DNA, 807 bp, Oryza sativa
  Clone ID: PAT_MRT4530_75127C.1
atggtcaccgcgctagcccacgtcatccgcgccgcccccgacctgcacctcccccaccacccatcctcctccgcctccgccgccgcccacccgcagcaggcttcttccttctacccgaccgccgccgccgccgcctcctcgccgtccgaccagctcgccgccgccgccgctgccgaagagcaagggaggaggcggcactacagaggtgttcgacagcggccatgggggaagtgggcggcggagataagggacccgaagaaggcggcgagggtgtggctggggacgttcgacacggcggaggacgccgccatcgcctacgacgaggcggcgctccggttcaaggggaccaaggccaagctcaacttccccgagcgcgtccagggccgcaccgacctcggcttcctcgtcacccgtggcatcccccccgccgccacccacggtggcggctactacccctcgtcgtcgccggcggcgggggcatgccccccgccgcggcagcagcagacggtcgtgccgtacccggacctcatgcggtacgcgcagctgctgcagggcggcgtcggcggcagttacatgccgttcggcggcgccgcgacgatgtcgtcgtcgacggtgtcgtcctcgtcggcgccgcagatactcgacttctcgacgcagcagctcatccgggccggcccgccgtcaccaatgccatcgtcgggctccggctcggcgaccgcggcggcgtcgtccacgacgtcggcgtcgtcgcccggtgcatggccgtacggcggctcggagcgcaagaagaaggattcgtcgtcgtga

SEQ ID NO: 74998 - DNA, 390 bp, Oryza sativa
  Clone ID: PAT_MRT4530_75128C.1
cggacgcagtgggctgacgcgtgggcggacacgtggggcggtgttagtgccgatatatgttactatacatgagtatatgtcaatcaaaactaggactagtgctggtgattccgttcgatatcagtactaaataaaggttacaaacttcttaaaaaaaaaaaaaataaaaaaaaaaaaaaaagaagaaaaaaaaaactctatagaaaaaagggaaggcgaagatccaggacaaggagggcatacccccggaccagcagcgtctgatctttgctgaaaatatagaaaatagatgaaagtaaaaaaacaggggggggcccctttaaaggaccaaagtttaaatcccgcggcttggaaactattactttttttaagggggccccaaaataaaat

SEQ ID NO: 74999 - DNA, 636 bp, Oryza sativa
  Clone ID: PAT_MRT4530_75129C.1
atggcgctctccgcgctgttcctgctcaagcccttcgccgcccaccgcgcccgcgcgggggcgccgccgccgccggggcctcccggcgacgcgttcgcggctgacatagtggcgagctttatgctacagaagacagtttctgagttgagtggaagtacttctaagcttgaatttgacatctacggggaaattggcattcctaactctactgtggctgtaaatttcctacaaccaataggtgcaccaaactggacaaatgtcattttcagcattgtgccttatccaaaatactcaagtatatcttccatgtacttgagcattcttagggcttcttttatgtccctggttgtagagcagtcaacactccacttgacagagtctctgtttggggacacatcgttattcgaggttcttaagttccctggtggaataaccattatccctccacaagctgcttttcttctgcagaagccttacgcatccttcaacttcactctgaacttcccaatctataaagtgcaaggtagaatgaatgagttgaaagaccaaatgaaggcaggactacagctcgatccctatgagctctgtaaaaagtccatttttttgttccatggtgatgaggagctaaaagattga

SEQ ID NO: 75000 - DNA, 557 bp, Oryza sativa
  Clone ID: PAT_MRT4530_7512C.1
gcacgaggccactcccccctccagatccacccacaggcgtcggtgggcggcggctcgcgtcggcgggaggcggctcgcggcggcgggcggcgcctcacagcggcggcgcttctcgggcagctcctcgcgtcggcggcggcgggcggcagctcgcgtcggcggctcttcacgggcagcggggcgcggcggcaaccgcgacgggaggcaggcgcacggcagcaaacgacgacgggaggcgtgcgcgcggcggcaacggcgacgggaggcgtgcgcgcggcggcaacggcgacgggaggcaggcgcgcggcgtcggcggccaccggccgcggccgcgcccccgtcgcctccacccgcacgctcgccgatgacaccgccgcgcctcgctggtatgagtccttccacgtctaccgcgcccacctcaccacccacgtcgccttcactctcaaagccgagaaccccatcggtatctccctcgtcggtttcggctacctctccccgtcgaggacatcctgcatctgtgaattaattgcttgatttggtgcattagctgcttgatt

SEQ ID NO: 75001 - DNA, 1551 bp, Oryza sativa
  Clone ID: PAT_MRT4530_75130C.1
caaagtttttgcctaggacatacagactttgtatcgtgcattgccttcacatgcctttcagaacctcccagctttcttttctcgcgctcgattcgaatccccacaaaagcccacgcgcgaagcaaaagctcgccgcaaatggaggacgccgcggtcgaggaggccgaggtgagcggcggcgcggcggagttcgcgccggctctcgtcgccgcccacccgctcggccgctccgtcgccgtcgccgtcgggcccgagctccgcgtgttcgatctcaaggccagcagtgcagtttcattgtcagacaattctggcggtggttctcattcggatgctataagagctatctcgtttagtgcaaacggtgctctgttcgcatccgctggtgatgacaagcttgttaaggtctggaagactgattcatggtgctgcattcggaccataacttctgaaaagagggtcagtgcagttgctattagcaatgatggcacatatgtaacttttgcagataaatttggtgttatttggttagttaccatgggggaaagtggtggagagcaggagccaactgataataaacctgtgtcaatttttggtcactactgcagtattattactagcatggttcgtctatgggactacataaacggctgcctccttgatacatgtcaagtccgagacaaggtgggagaactcttagagccaaatgaaactgaagacaacaatctatctgttgcagatatatgcccgactaatgatggtttgttggttgctgtagccattcagagtttaaatggagtaatgcttttagcatgtgaccttattgcaaagaagttatcttttctaaaggtggttacaacggaaaagtgctatattcctactagcctgtcttccagcttctcagcagatcttctatggaccgtcatgggcgcatcgaatatgcctaatcaggctacttcccagttatgtacccgtttgaaaatcatcccacacttcaaaaaggatccgctagccggatgtgatcatgttcctacagtcttggaagacagtgaggtgccacatggtgagaagctccttctggcgctgcaaggaagtcttgacattgcaaagcaagaagaggtgttagcttcagttctagctgcactgaaagtatcaatgcacaagatgctggtaaagaagcactactcggaggaaaggagagagcagaggaaaaggggcagaaacgataagaagatcaagaagtagatcggcctacagcctcagcaaaaccagttctttgtttctcattgtaccattagaggcttggaaaacaaaaggcattttgacattcacaactgtaagattaaatctactagcaaacacttttctcattatccataggccacagcataacggcttctgaattctgatgcctgttgtttcagtcgaaatgcccgcagttcttgttgtctgctctacctgtagcagctgttatctgtgatttgaaatgttacttaccctatattaaccatgctgctatccaatgataattgcacgctataatatcatttttgc

SEQ ID NO: 75002 - DNA, 636 bp, Oryza sativa
  Clone ID: PAT_MRT4530_75131C.1
atgtcgccgaagttcggcgatggccccttctcccacgccaggatgaagttcggccggcagcttcacgcgacgaggttgctccgtcgtcccggcgaccgcctcctcctgatccgtcttcttctccttgccctccgccgccgccgccgggttcaggatcgtcgcgtcgtcggcgttggcatcggcatccatgtgcttggagatgtcgacgaggtgatgaggattgtggaaggaagagattgtggagctgagaacacactgaagccaggagatgtgatccagtgccgtgaatgtggctatcgcatcctctacaagaagcgcacccgccggacaaaaagtctgacaagcaaagtacactatgctcaaattgaaaatgctatagctaaaccaagttcaacgtcatcagtcaccaccacagattgcttgtcttggatattgttcaatatgaagcgcgctgaagatatgggaacgtcatgtgacatcagtctttctaaagcaatgtgtgatgacagaattttggttaagctgacagatttcaacagcttacattttcttgtagcatcttctccaggtcactgctgctcaacatcatctgcatttaaggtaatgccagttgtcctcttctgcactctgccttaa

SEQ ID NO: 75003 - DNA, 722 bp, Oryza sativa
  Clone ID: PAT_MRT4530_75132C.1
ggtggaggtgggggagggggagggggaggcaccacccatgggaggaagaaggaagctttttttgctggtgcgacaagaatgaggtagatatagagagaaaaggaaaggcgagcgggtaagacgattaaaaaaataaaattaagtttggtggggtagtagaatttttttttatgttgaacaattagtattggatattattggttttgatatttgaaatttatttacgaagtggttttggagattattggaatttgcaggtgaataggaactgctgcttgtgatttgggtccggtcagaccggacaggtgctgccatctagagttcaatgcacgtggttgatgaagattttatatggcatacgatggaggtattgtgtgcgtataggatgcggagttgaatttggaaggagtccaaatttggtatgattggttatgcaaagtttgtttcttgtacgagaaggtttcctaggggattaggactttagtatgagtttggttcgtggctttaggctgtctacctcatatataaatagagagggagcgtctaaccggcgacacaccggcggtcggactagcggcaaggcagcggtcagaccggcagcgaacctgcggtcagaccggcggcggcttcaggcgacggcagctgatctcggcggtccaaccgggcgatcaactccggtcagaccgacggctatcaagcggtcagaccgtgatccgtcgaat

SEQ ID NO: 75004 - DNA, 543 bp, Oryza sativa
  Clone ID: PAT_MRT4530_75133C.1
atggcgggaggacgcgggctggagctgtcgctggcctgcgcggcgccgagcccggcggcggatttcggggaggaggaggaggaggagctccggcgcccgcctccgccgcggcgtcggcggcagcagccgaccatggccgcgctctacgccgagctggcctcgctgctccccggcctccgctcccgggcgagcagggaggagatcgtggaggcggcggcgaagcaggtgaaggtgctggaggacacggtggccgtgctggaggcgtaccgggcggtgcaggttggcggcgccgccgcccgccgaggaggtgtccgtgtcgtaccgggagacggtctgcttcgccgcccggctgccggcggcgcggcggccaggcgcgctgacgcgcgtgctggaggtgttcgaccggcgcggcgtggaggtcctggcagcgacgctggcgggcggcggccgcgcggccatggtcacggtcaccgcggccgccgcggcgccggacatcgcggagatgatcaaggcggacatcgccagcatcgagtgactccgtga

SEQ ID NO: 75005 - DNA, 1992 bp, Oryza sativa
  Clone ID: PAT_MRT4530_75134C.1
tagtggatccccgggctgcaggctgcttcatgcaaatcaagacgagaagtttgggatgctaaaaactatgttcagtgcattctcatcttcatatgatcgcgcttgtgactaccatatgatctggcatcagtgttccattctgagaagctatcggtgctttcagttcaaatgatcttcatgtgctagatttgagttttgtttaccaattattgtgtctggggaagtgccattgggctatctatgtcattctacatatgcctcatcttgatgacgccccatacatccatgagaagttgatcagggaaattttgtcacaatattgcgaatcatggagcaaggatgaaactcagagagtttatattgcagaacttggtattccagtagaatggatgcatgacgctctggctctttacaatgaatactatggagatcagcaaagcgcactggagaattatattctgtgtggcaactggaagaaagcccatacaattttcatgacatccattgctcattctttgtttctgtcatctaagcatcaagagatctgggacattacaagctctttggaggttcacaagtctgaaattgctgactgggaacttagtgctggaatatacatagacttcttcattctaagaaattctatgcaagaaaaaagtaccatggatgatccagatcaacttgagaagaaaaatgaatcatgcagcactttctttggccggttaaatgattcattgatagtctggggaagtaaattacctgttgaggcaagggcatgcttctcgaagatggcagaggagctgtgcgagctactaatgaactcccccggcgagggcttgacgccagatctctacatgggctgctttcagacgatgcttaacgctcctgtgcccgacgaccacaggtcatcctacctgcaagaggcggtctctgttttcaccgacatactttgcagggactgatgcatgattgcttgaagatccatggcattctatgatatctgcagaattgttggaagtttccctgatctatctattgggttttaacctattggttattctgatcatacacgggatctgggtgcacaagaagctcccggctgccaagtcgcaagtcagtaatacagtgaagagctccaaaagttcgtcccttgcccgagtgcagtgaggaaatgtagatcagctattgatggtgcagataactgccatgctcatcaaactcctgaagaatgtataagctgtgtgctaagctgtaccaatcaactttcagatgtgagctgtacccgtcatctttgttcgtttttgtactgtaatactgttacaacggaaagcagcaaatcgtgtacggtgtatgttgtgctgaagagctcgacgaagataaagcatccagctgggcccaattctcggcaatacatgcacgattccacccttccatggacgtgggagcaagctgcatatttctcttcttcagtcgaggtactttttcacagcttatgatgaggttatcccgaaaatactgtggtgtactttttcagagcttatgggattattccgaaaatactgaggttttacggagctgtaggcctgtaacaattgcaaggggatatttgttttttctcatcacacggaaaatgcacaaagcaacaaccccacacttgcacactcgtaaattggactgtgtcagtgtggcatagatttgagagcttaggtagaatatttcttctgtcgtgcacgcgatgtcgcgatgaaatgaaaaatcacaatgttggagtgagcccaaactgcttttgcagaaccatgtgaagctgtggtttgtctgaggagaaacatcctcggggcccgttccctcggcagctaacgtgggttccttgtattcttctgttttattttcccctgcttaatttttggttttctcatatatatgtaccttttattccgttatattgagcggcgttcctggttttgtaggacccaaaaaaaaaaaaaaaaaaaa

SEQ ID NO: 75006 - DNA, 891 bp, Oryza sativa
  Clone ID: PAT_MRT4530_75135C.1
atggaagaagttgagagtagttatcgatcggagatgatggatggcgaggggtggaagatgatgcagcctaatactaataagcagctggtgcagatcaagacgaggtcgtcgtcgatgcaggtggtgaaggaggagatcgaggaggaggaggtggcgggaggaagaggccggagaagaggagggctgaggcggtcggtatcggggaggggttataattcaagtaatcagaaggtgattgcaaatgctaacacaaatagagataccaacaacttggcaatgcaaacacaagttcctactcatactagagagggaccaactttcacacaactactacttggagaggaagattttgaccttcctccgtatgttccggatgatgctaaagagagcaatcagttctatcaacaaacaacgaatgagttccttaacatgaaccaattggataacaatggtataggaactgctcagttggaatctcgggagcatatgatgacatatggcttaagttctggtataagttcacagcttttaggttctcaagcaatagacgtagttgatgttgtaggatgcctaacttcaccacggggtacccagctgcatgagggtcatcttgcacatctaatgtcatatatccgtgcatgtcgtgatctagagcaacatacccctcccaactttgtcatgcatcaatctattgggccagtgttgaaccactatgcccttagtgcagagatgtcatattccatgagatatccagaaaatgcagctactcgtggacctcaaaatattcttgggtttcctataaaaaatgcagacacacgcacagagagagacacacacaaacacatgtacacacacccaaacacagacacatgcatgtacacacacacataa

SEQ ID NO: 75007 - DNA, 4210 bp, Oryza sativa
  Clone ID: PAT_MRT4530_75136C.1
atgctccgcctcagggcgttccggccgacgagcgacaaggtggtgaagatccagctccaccccacgcacccctggctcgtcaccgccgacgccaacgaccgcgtctccgtctgggactgggagcaccgccaggtgatctacgagctgaaggcgggtggcgtggacgagcggcggttggttggagttaagcttgagaagctcgccgagggagacactgattcaaaaggaaagcccactgaagccatccgaggtggaaggtcatcttctagtgacgctcctctggttgcatttggatcttctgatggagtgataagagttctttcaatgctgacatggaagcttgtgcgaaggtatacaggtggacacaaaggagcaatatcttgcttaatgacattcatgtctgcagcaggcgaggtacatctagtttctggtggtagtgatggtctacttatattatggagcgctgaccatatccatgactctcgtgaacttgtccctaagattagtttgaaggctcatgatggaggtgtagttgcagttgaactttcacgggtaatgggaagtgctccacaactcattacaataggggctgacaaaactttagccatatgggatactgttacatttaaggaaataagacgcattaaaccagtacctaaacttgcttgccatagtgttgcatcgtggtgtcatcctcgtgcaccaaaccttgatattctgacttgtgtcaaggactcccatatatgggccatagaacatccaacctattctgctttaacaagaccactctgtgaactgtcctctcttgttcctccacaagtccttacacaacataagaaattgagggtttactgcatggtggcacaccccttacaaccacatcttgttgctactggaactaatattggtattattttaagcgagttcgatccaagagcacttccagctgttgctcctctaccaacaccagcagaaagcaaggaacactctgctgtttacattgttgaaagagaacttaagctgctgaatttccaattgtcaaacacagcaaatccctcccttggaaatgctggtgtcacatctgaaacgggaaggtcaaggaatgaccctttagaacagctggtagtaaagcagaccaagaagcatatcagcacgccagctcctcatgattcatattcgattctttcagttagcagctctggaaagtatgttgcagttatatggccagacatcccttcatttgctgtatacaaagcaagtgattggtcagtcgttgattctggtacagggaaactctttgcttgggacacctgtcgtgacagatatgctttggtagagagtgccttgcctccaaggatgccacttattgtgaagggcggttcttctaaaaaagcaaaggaggcagctgccgttgcagctcaagctgcagctgcagcagctagtgctgcttctgcagccacagtacaagtgcgcatcttattagatgatggaacagcacatgttttgcagcgatccattgatggccgcagtgaaccggtaattggattgcatggtggtgctttgcttggtgtcacataccgtacatctcgtagaatcagtcctgtgacagcaacagctatatcaactgttcaatctatgcccttatcaggttttggaggaagtggatcatcatttgcttcagatgatccattttcctccaaagaagggcctcctcaaaatttccagttatacagctgggagacctaccaacctgttagcggcctacttgcacagcctgagtggaccgtgtgggaccaaaccgttgagtattgtgcattcgcttatcagcagtatattgtaatttcttccttgcggccccaatttagatatcttggagatgtttcgattcccttcgctacaggtgccgtttggcatcgtaggcagttgtttgtggctacgcccaccaccatcgagtgtgtctttgttgatgcgggtgtggctgccattgacattgaaacaaaaaagaggaaagaagaaatgaaagcaagagaagctcagagtcgggcggctgcagagcatggagatttggctcttattacagttgaaggccccaagactaccacttctgagaaaatagctttaagacctccaatgttgcaggttgttcggttagcctcctttcagtatgctccatctatacccccatttatagtgccaaagcaatcaaagttagatggagaagattcagtgtttcagaaagaattggatgatagaagatatgctgaagttgctgttgctggaggaggggtatctgttgcagtaacccgcttccctcctgagcagaaaagacctattggaccccttgttgtggttggtgtcagagatggagttctatggctcgttgacaggtatatgtgtgcacatgccttatctctaagccatcctggtatcagatgtcggtgccttgcagcatatggagatccagttagtgccgtgaaatgggccactagacttggtcgggagcatcatgatgacctggctcagtttatgctgggaatgggctatgctactgaagcacttcatttacctggaatatcaaagaggttagagtttgatctcgcaatgcaaagtaatgacttgaaaagagcacttgcatgcttgttgacaatgagcaacagccgagatgtgggacaagaaactactgctactgatgttacacagattcttaatttagcagtagctaagcaagctaagcaagaaagtctggcagatgccgtgcaagggatagtgaagtttgtcaaggaattttttgaccttatcgatgctgcagatgccactggacaggctgacattgctcgtgaagttctaaagagattggctgctgcagcttctgtaaagggtgctctgcatgggcaaatgctacgaggtctggcactccgtcttgcgaaccatggagagcttaccaggctgtcgggtttggtaactaatttgatcatagctggccatgggcgcgaagcagcatttgcagctgcagttcttggagataacgccctcatggaaaaagcatggcaagacacaggaatgttggccgaggctgttttgcattctcaaaatgtgtgtgattatcaaacgcttacaaggatcttctactttcaggcccatggtcgtccatcattaaggaacttagtcatagcatggaacaagatgctacagaaggagctggatcacacacccactgtaaaaactgatgctgccgcagcgtttttggcctctcttgaggatccgaagcttaccagtttgggagaaacagagaaaaagccacccattgaaatacttcctcctgggatgccgcctctgtctgcacctcccattgtaattaagaagtctggtgcgaaacctggcctgccaaatgcagcgcaggccccgaccgcagctattggtgctcccatggctcaagacactcctatggttcaaggcaccccaatggtgcagggcactcccatggctgaaggcactactggagctcaggcagctcctactgctcaaggtgctccagctcaaacacagaacccggaagaagcaaaaccatcagagagtacagcagctcctgacaatgcagagaaaacagcaacgcctgacaatgccgaacggatggcagcccctggcaacgtggaagctactacagaaccagcagcagcccctggtaatgtggaaggtacagcagcggcggcaacggacgcaacaagtaatgctgatgctacttctggtgctccagctccggcagctgattctaatggcgccgatccacctgctgttactcctggtcaagttacaaatggtgcaccttctaccgagacaccggagacagcagataagccatcttcaactgagccatcaccagcaccacctataccaaatgtgcctgctgtataaaatttgtcggattcgattcgattcttttagcagtgtgccagttttttcgtatgctgatgtattcattccactgtaatttttccatactggtatagttttctgtattcagagaccgtgggcagtatgtgagtagccctgtacatcgactgtccgcgttccaaagagaactaccatatgcattgtgtgacatacttagcgttttgctgtccgtgattaatcgagaggacatactaaagttttgcttgaaaaaaaaaaaaaaaaaaaaaaaaaactgagactagttctctccctcgtgccg

SEQ ID NO: 75008 - DNA, 1569 bp, Oryza sativa
  Clone ID: PAT_MRT4530_75137C.1
atggcgtttctcaacatcaaggacactaacagggtcatgtttttggcgtctcttttactcatggccatggtctattcatgtgctgcacaaggatattggtatagctatttggtggatgtggatgccgatgtagatgatgatatgatgccgcttcgggtgctcccgaacgcccgcgcggccctcatccgcgcggtggcggatgcccccggccgccgcgaggagcaggccctccactgcctcgcctgcaagctgggcctcgccggcgatgcggtgctggccaccgcactgctcacccgctacgccaggcgcggcctcctggatcccgcccggaggctgttcgacgaaatgcctcgcagggatgcggtcgcgttcaacgccatgctggccgcgctcgtcgcgtcccggaggatggccgacgcacgggagctgttcgagcggatgccggacaggacccccgcctcgtggaacaccatggttacgtgttactgcaaggccggcgacctcggctccgccagggaggtgttcgaggcgagcctcggggcgacggcgagcaatgtcgtgtcgtggaacacgatgatcgatgggtactgcaaggccgggagaatggacgctgcgcaggagcttttcgattgtatgggctgctctttctcctcttccccgtcgccggacgttgtcacatggaacacgatgatggccgggtatttgcgccgaggtgaccccgctaccgccatcgccatgttccgccggttgatgcgacagacagtgcagcaacagacgctcatgatgcccaccacggtcaccatagccaccgtggtgaccgcgtgcacgcaggcaggggactttgcctttggccggcgagtccatcactacatccgtcagctcgggacaaggatcgacgccgtgctaagcaacgccctcatcgacatgtacttcaagtgcgggagcgtggaccgcgcgctcgacgtcttcgccaccatgcccgacggccccaacctcttctgctggaacacggtgatcgcggggctaggcatgaacggccgcggcgaggacgccgtcagggcgttccacgacatggtcgggaggagtcgaacgtgccgcgggatcatccggcccgacggggtgacgttcgtggcgctcctgtcggcgtgcagccactccggcctggtagcggagggccggaggttcttcgccgagatggtgccggtccatggcgtcgagccccgggaggagcactacggctgcatggtcgacctcctctgccgcgccggactcctcggcgacgccgtgcgcgtcgtgcgggcgatgcccgtcaggccgaacgccaagattctcgggtgtctcctgcttcacgcccgccgcttgtcgtcggcgtcggaggaggacggcgtcagggtgggcgagtgggtggcggaccggatatcggagctggacctggacgacggcgctgcctatggcctgtccaacatgtacgcctcgttgcagaggtgggatcatgtggagatgcaccggatcaaggtgaacgcggcggtgcgccataagcagcctggtcagagcagctgcatgatctag

SEQ ID NO: 75009 - DNA, 1098 bp, Oryza sativa
  Clone ID: PAT_MRT4530_75138C.1
atggagaagaggaggaatcatggcggtggcctcaccctgctgtttcactttcacctcgccgtcttggttgtcttgccgtctttgctgccccgagctcgagctgccgccgcggctgattcctcgtggcacccgaatcatcctcctacacgacgaggccaccacgtcggcggcggcaatgcctcgcctagcgccgccgccggccacggcctcccgccactctccgctcccgctccggcgcccatcgccggcgccgacgacctgccggcctttggccgcgctcccaagcaggcacccccgcacttcggcttcccgctccagccgaccttcggcgtcgcggcgccacctgtcgccccgaccgccgccggcgagggctacccgttcatcggcagcaacccgacggtgccgctgcccaccggcatgaccgacacctccaccgtgctcccgctcccggaccgaggcgacggcaacgacaagcaacagcgactacggcggtgacagactctgtcgatggtgacagcgacggtggcggcggtcggggacgagcgcggcggaattggacgcggacgagggcggctgcggcggacgcggaagagggaggcggcagcggtcgagggcggcagtggacgaggacgaggcggctgtactcgacggtggcggcggcggacacggatgagggcggtggcagcggtcgagggcggcggtagtgacgacgacggcggccacggacaagggcagcagcacctttgcttctgttgctcgtgctgctatcatcggttcctctctcttggaagctcgcccactctactgctgcagctattcaaggatggtgtgctgcagacgaagattagggacaaagacgatccccgcctgtccaagatgcggaaagaggtggtggctgggggaaaggatgctatggaggtggacaatgacttcttcctggtgcctgtcaagatctctgatcaccagtggcgaaggccaaagttttatggcaattatgtcagaaagaagatggacattgccattgattccacgaatcggataccccggatacgaaaacggaatcaaatattgtcgaaaccgaaaacggcgctgatacgg

SEQ ID NO: 75010 - DNA, 562 bp, Oryza sativa
  Clone ID: PAT_MRT4530_75139C.1
ccgggctgcaggaatcggcacgaggacttgtacttataattgacataaatgagctcaaatataaattatctcaatcatgagatggcttctctcattatggttaaagaagaggaagatatctacatcagctcagaagtggaggacaatgatagtttggaggataagacttactttcattccctcaaattctttgatgatgttagcttggagaagatgaatgttctgtctgaaggaatcttctgaccaagatgatgacattccttctttggcagaggatcataaggcaaaagcagagtttgatgatcttcctccattggtagactctgatgaagatgatatgcctccattaacagattcatcagaagaggataatccaaaaccatcaaaagtaaccaaaacagagccacctaaaaagcaagcagtcaagaaaggagccattaaaaaagaacagcccaaaaaaattcctccaaccaaagagatatttgatgatcttcctccattggtagactctgatgaagatgatatgcctccattaacagattcatcaggagaggatgatcca

SEQ ID NO: 75011 - DNA, 246 bp, Oryza sativa
  Clone ID: PAT_MRT4530_7513C.1
ttattcgatgcttgacttcattccaagcagtattgttgggcagctaggtgtacttgtcttctcctttccggggtccttctcaagctccttcagcacatgaacagcgatgttaaagttgccggcgagcaccgttcgtcccttcttcaggtggtcagcattgttccggcccttgcagggagtgatcgtcttgaggcagccactccggtgccaatcttgaggggagtcaggccagttccaggtcggcat

SEQ ID NO: 75012 - DNA, 799 bp, Oryza sativa
  Clone ID: PAT_MRT4530_75140C.1
caccagacagcgcggaatttatattgatagagtagaaaaaattacaggattacaattaagggagattgtaacaaggaaagagaagaaaaaatagccaccacttatgggtgtatgattacatccattaaggtttaaatcttaatattcataaatatagctgtatatattcttagatggtatcaagatggtagttatatgtatatatgctttccttgtaaaagaaggaaaagtatttcgcatatatataaggctgttattgcgggaactatcgcggtcagccgaatttccccctaaacccgaaaaccagacatgactaaccctgaactttcaataccggacaaattacccccctcgacctaattcagagcagttttatcctacgtggcgtacacgtggcaacccggtcagcattttctttttttaaaacatggtggggcctacctattatatatactctctctcctcttccccccttcacccctctctctctccctctctctcggcgcgcactctctctctctcgtcttcgttgtcgagcagcgggtggcggcgcgggacacagagataggagcggacacggacgcgacagcggcgcgacacacgaaggcggcggtagggcgggacgcgggacaacccagtcccctccgggcggtccgcatcccacgccgccaccgccttcatattccaggtcatgggctccgctggctctgtgtcccatgatgacgatgacgtagtagccgccgcgagttgtgccgtgctcaccgagagagggagagagagaggggaagaggagagagag

SEQ ID NO: 75013 - DNA, 280 bp, Oryza sativa
  Clone ID: PAT_MRT4530_75141C.1
ggaaaaatggggggaaagggagaggggatcacggggagtgattgcccccagtttattgcacgcggggacgacgggaggcggcgggattcgtggcggcggcggcgctagggcacgggcgaggcggcgggagcagcgggaggtcggggatgacggtgaagagatgagatgggatgaggacgggtcgggtagaaggaggaggaggaagaaaggacaaagtcctgggccctccatccctggccagtcagaccgccagggtgcagccggtcagaccgggccctag

SEQ ID NO: 75014 - DNA, 386 bp, Oryza sativa
  Clone ID: PAT_MRT4530_75142C.1
atacccccgtgttataacccccggggagggataacaactcggggcgggtactgatctacagtgaacatataccaagcttaactcataaatttcgagcttagttccccaaatattaaacccaacccacaaaaattgtggggccgttatccaccccaaattcacattatttttcgagtcctatgtgaagagactcttgcatacatttactctctgcgatctcacctgcaagaactgcatggcatttgagaacaaatcatgtcacacccatttttttgaaggggaaactacatcagggaaatcatcctgttcaaacaaactgaacatatgctactacaggttgtgtcaagtcaacaggttattgacctcctataccaaaaagggctcaa

SEQ ID NO: 75015 - DNA, 502 bp, Oryza sativa
  unsure (1)..(502): unsure at all n locations
  Clone ID: PAT_MRT4530_75143C.1
cagaaaaataggcagccgtagcgatcgaccttctccgacgagttctctctttcttctccttcccccggcaacgagcctgacgccgctcgcgcccgcggaggggaggggaggggaagatctagaaccgcggggaagacgacggctgatggctagctatagctgattgatttagcggctcaacatatataccaaggcggcgcggccggccggcacgccggcagggtggtcgccggcgaacctcgcgtagagctcaccctcccctcctccggtggtctgcctccccctgcattggcggatcgaggacgcacgcacgtacgactcgttcgttcgttcactgccatgccggcccgtgccctcgccgtcgaatcgtcgtcgtcgtcgtcgtccctgcgcgtctgtgacgtctgctgctgactcgtggatgtagcttgattgctcgccgtacgtcgtcgacatgttgctgtaacgagccgaaaacaccagcgaagtccgttgcgtancg

SEQ ID NO: 75016 - DNA, 240 bp, Oryza sativa
  Clone ID: PAT_MRT4530_75144C.1
atgggtgttgagattcttcttagatggctggccaacggcgaggtgtcggcgcagtggctgtgcatcgaaggtggattagcgggtggttttgctgaagctgacatgcactctttggcgcgggagagtataacaatgggtgaaggcctagccttcgggccggcaatggcgatgactgtgggcgcgttttccccttggggtgttgtcgtgttttctgtcctctcccatgggttcttcaggtga

SEQ ID NO: 75017 - DNA, 267 bp, Oryza sativa
  Clone ID: PAT_MRT4530_75145C.1
aaaagaaaactgtaaccggggggtgcccccgttttatttaattcccaaagagcaaaaataattttatttatacatcatgcatattaaggacaagaagttttttttttccttcagtaaatcgagttacaaattgttgcaacaaataattagcctttcgattggttggttaattaattaattaacagggccttttaattataactgctcgatcagccacgctgaggcaaatttttttttttttcttctggggtagggctcattttgttt

SEQ ID NO: 75018 - DNA, 447 bp, Oryza sativa
  unsure (1)..(447): unsure at all n locations
  Clone ID: PAT_MRT4530_75146C.1
gtagacagggttgcacctctaccacatggacgccatggacacccatgataatgtatgataatgatcacttaactgaaaggttaagatctataccacaggaaatgacagtccatgatagaaatggaccgatgcatgagcctatttctgactgacatcgatcacgaaaaaaataatattttcagatttctgagggcagagacataaaagaaaagaaacaggatcaatgtgaaggcttgctcgtaacaccctctgcttatcacaggtgatttttctttactttgtacatgtgaatccatgatgcccggcttcggcctacgattcatgaatcaccttcanaggttaagaacgaacgaaactcaaaanaataggaacacattcaaactaatttttgagacataggtcccctacagacttgatcagaaattttcgagacctatgacagatgac

SEQ ID NO: 75019 - DNA, 718 bp, Oryza sativa
  unsure (1)..(718): unsure at all n locations
  Clone ID: PAT_MRT4530_75147C.1
cactacaggagtgctttggtcatggtaaggcgagcgttatcaaagaagntcacaagagttttccgagtgnccatacttcttggtcttttgctggccttggtttcctgtcatggtatctggctggtaaaataaaagtttttgacagaagaggccatgttgcaaaactctgcattattattctccctctgctccttgcagccttggttgctgtttctcgggtagatgactattggcatcattggcaagatgtgttcaccggtggaattttggggttggtggtttcttcattttgctacctccaattttttccaatgccatctgatgaaaacggattatggcctcacgcatacgcccggcacattctcaaccctgatcagctggagaacaacgcgcaacccacgtccgtggatcgccctaactctctgccgaacgggtcctttagaagccctaatggattggaaatgggaaacacgggccaaggccaagcattagatttcatggaagctggtcgtagatatcaataacgagataaaaacctgctactgttgtagcagacatacctgacgtactttttgatagactgagaattatacggagactttcaggttcactttggtacatataccgtgtagaattgttacttgtacatttcaacatgatgatgttagctatttctcatgtaaatctataccagattaaaataaaaaaaaaaaaaaaa

SEQ ID NO: 75020 - DNA, 3921 bp, Oryza sativa
  Clone ID: PAT_MRT4530_75148C.1
actaaaatgttagctaagatgccttctagaatccaatttgacttgaagagaaattgattgaaatatttatgcttgcagtattcgactgttgcttctctacagaaaccatggaacaatttgaatacaagaattatctggacaacattgttttgcaacttcgtgagcagtttgtagattcttcattgatggtatttaacttcagagatgaaggaaaaagtctggtttcaggcttgttctccctttacggtatcacagttaaagactatccctgccagtacctaggatgcccattgcttcctttggagatggtcctccacttcctaaggttgagcgagaggtggcttatgctggaagggcagcaaaactttctactcatgcattgtgagaaaggcggttggccggttttggcatttatgcttgcaggtctccttctatatatgaagcagtataatggggaagaaagaactctagtcatggtttataagcaagcgccaaaggaacttcttcagatgttaacaacactaaatccacaaccttcccatcttcggtatctacagtacatatgcaaaatggatgatgagcttgaatggcctatacaaccaattccttttactttggattgtgtaattcttagggaagtacccaattttgatggtgtaggtggttgtaggccaatagttcgtgtatatgggcaggattttctaactgttgataaaagatgcaatgttatgttgccaccatcaaagcctaggaaacacgctaggcgttacaaacaggcagacaatatatcagtgaagttaaatgttggatcctgcgtgcaaggagatgttgtccttgaatgcttgcatattgatgatagcctagaagatgaaaggttgatgtttcgggtgatgttcaatacctattttatccaatctcacattctaccgttgaactttgaaaacattgatgtgtcatgggatgctgaacaacggttcacaaaaaaattcaaggcagaggtactcttttcagagtttgatggtgagtctgatgcatccatagaagttgcatctgactatgatgacgaggtggaagttggctctatcgacgtgttctttgaagcagtagaaattttcagcaatcttgactcacaagaggggcagagggatgctgaaagatctagttttcaagctaatggggatccaacttgtgccaacacaagtacagatgcaaatgaatcaactcaactggaactcaagagaaaatcttttcatgattttgcttcatcttacggaccaccaccaaacataccatgtacatcacttcgaacatcaaaagtatcatcgctagtacacccctctctacgaccacttagaactgtttcatctctatctcaatcttcatttgaagaatatctagatatctcccctccttctccaacttttcatgaaaaacatcaacaacattttaaccttgatcctccctcattaataccaccttggcagcttcggctagcaaagacaaaggaaaatgagatatatccatgtactctatcttttctccctttgtctccttccaacaagtatgcccatcaccctccattcccaccaccgccaccaccaccaccaaattctttatcttcgaaaatacctcaacatggcacaccaccaccaccaccaccaccaccaccacgtgcatcacatccttcaagttcaaattatgtcgaggaagtaccaatggaaacaattttgaatcaaccaacattatccattcctttggaagcatgcaaggatgagctattgcattgtaaagaaaatggaggcattccaattccaccacctccacctcctctttgtggtaagtgtgtacaaatttcaacagaaaaattccttgtggggtgtgaaatgtttttgattccatcattgatacctcaatcaccaccctcacccccaccctcaataccattgtcttttccatcagctttaccttcaacctcaacatcatttacagctttacatcaactatcccatataaaaaccgcacctcctcctccaccaccaccacctagaggacttctagaaacttcatgtttatctccaatcacatcctccctaagagaacattcaaaaatattacctccccctcctccacctctcccaaaagaatgtttgccaactccatctccacctcaatcccctgattgtccatcttttcctacaaaatatgcaactacatctcctcttccatcaccaccaccacctccatcgccaccatcaccacctcctcctcagagagaaaatacatcagtaggaattcaaggtggcattccacctctgccaccacctctgccaccaactctgggagattatggagtggctccacctcctcctagcattcctcctccacctcctgttggagggctaggagggcctccagctccaccacctccacctggtgtgcctggtggtcctcctccaccccctggtggaaggggtttgcctgctccacctggtggcagaggtgtagtaggacatggacttactcgttccttggggctgaactcagctgccacagcaagaaggtcaactctaaaaccactacattgggttaaagtaacaagagcaatgcaagggagtttatgggcagaaatacaaaagcaagcagatgctaataggtaccctcttgttttttagctttttgattactagaaaatataacttctctacctctttcaccatagttacaacaaaaaatacttatcatgtatgtagccattctgaatttgatgtgaaagaattggagtctctttttgctattgctccaaagacaaaaggtggttcaaaatcagatggagctagcaaatctcttggatcaaaacctgacaaagttcatctgattgatttaagacgagccaataacacagagatcatgttaactaagatcaaaatgccactacctgatatgatgagtgctgctctagctttggatgattcagttctagacgctgatcaactggaaaatctcataaaattttgcccaacaaaagaggagatggaacttctaaagaactacactggagacaaggaaactcttggaaagtgtgagcagttttttctagagcttatgaaggtgccgagggttgaatctaagtttaggatatttgctttcaagattcaatttcaatcacagctcagaggctctgagaagttaaaggtgatcatggagaaaattctgtttctaggaaataaattaaatcagggaacaccaagaggccaggctcttggttttcgcttggacagcctattaaaacttacagacactcgtgcaaacaacagtagaatgacactaatgcactttctttgtaaggtatggagatatatagctgtcgtacactagttgttcatataaaatcaagcatgagtatgaaagataatgttgatccctgtttatcagggccttgcggacaaatcaccacatttactggatttttatgaggaatttgtcaacctagaagctgcttctaagttgcaactgaaagcattggctgaggagcagcaagcagttgtgaaagggctgcagaaggttgaacaagaactagctgcttcagaaagtgatgggcccgtttctgaggttttccgcaagactttgaaggagttcactgatgcttctggagctgatgtaaggtccttgtcagcactatatgctgaagtaggtaaaagtgcggatgcactagcctattattttggagaggatcctgcaaaatgtccttttgaacaagtcacgtctactcttctgaactttgtggggttatttcggaaagcacatgaggagaacataaagcagattgaggctgacaagaagaaagcacagaaggaggctgagaaggaggcaaaccagggcttagaaagaattgttacaaaattcttggcaaataggctgctc

SEQ ID NO: 75021 - DNA, 144 bp, Oryza sativa
  Clone ID: PAT_MRT4530_75149C.1
ctacatttttgtgcacccactgacctcgtcgtacttgccgtgcccggtggtatcctctcccggcccacggcgcgggatcaccgccgccacagaaacctccatagagatctccgagcagccgtcctccgccacaactttcgccat

SEQ ID NO: 75022 - DNA, 236 bp, Oryza sativa
  Clone ID: PAT_MRT4530_7514C.1
ccacgcgtccgccccagggcacctgtggcctcgccacctccccattctaccccacggtttaatccgcgttcgtgtgcccggctttgcttaagtatacagtgctagtgtctaatctgtccgtggatgaaggctcggacggctgagattgatggactgttgatagtttctaccacctgttgtgagagtgtaatcatgaaagacaataaatcaataatacaaattcattccgctttgat

SEQ ID NO: 75023 - DNA, 429 bp, Oryza sativa
  Clone ID: PAT_MRT4530_75150C.1
tgtcaaagattgaagtcgtcgaaattgttgagattaatcccagttgattccatcgcacttcctgacaggtaaactcaacgcaacccctacctagctgttaacaatgaaatttgcctgcttcttgattgccaataagggttccatcggggtttcagccgatgagttatctggacgttgcatcggcttacaaggattgcatccgattggtttctattcgattatattgttattttattacatcagtcgattgcctttatatcatcatctacattggacatatagccgattgcttaaaccctatcgctatcggttggatcaaactgactggcatgcccgcatctcatcaatctttggacttgcacaggagctaagcagatctcccaggccagtgtgttcgattttttcatcaacactagcgcaccaactgtc

SEQ ID NO: 75024 - DNA, 399 bp, Oryza sativa
  Clone ID: PAT_MRT4530_75151C.1
cacttcaaactacacaagcatactgatgtgaccatggttaccatagatacaaccatagttcacatcatagctcaactagaagacatcgccgtagaagttctaaaatccaattcggtcacctgcaacagtgctgatttcaaatggccgccaaatgtgcatacaagctccgtttttggcccatgagtacttgatggaaagctcttggagtcttatttccaactaatctagtctcatctccaaattccatctcggtcgaccgcaatcacagaaactaggtgttgcgtcatctataatggacgtataggcttgtaacttcatttagggcctcgacccaagtgggatgtgcccaacctggtggagcacgactctagagaccccatggtcgtcctcccacctctt

SEQ ID NO: 75025 - DNA, 188 bp, Oryza sativa
  Clone ID: PAT_MRT4530_75152C.1
agtacgtcccgtccggtcccagtatagtagtatagcgagtttttagagggtatggtgaatacgtgtccgtagtgatatgaatctgaacaagatagaaagtgtcacgtccctctaaaatcccttatattattggaccggagggagtaatgaattgaaagagaaatttaacacatcgatgtaatataatt

SEQ ID NO: 75026 - DNA, 936 bp, Oryza sativa
  unsure (1)..(936): unsure at all n locations
  Clone ID: PAT_MRT4530_75153C.1
ttaaagtacttaattaataaagcactaataagccacncgtttttccatgcacggggaagaggttcttaaaacccttctcccgaacnacaccatttactngtcataattcaagcaaaggcataaaaaaaatatttcaaaatcacttgtcatgtcaaagcatggccattttttagaccacaatcgtagaagtgatcaaaaagctcattctaaggtgactactggttctcattgaactcatgcctgcagtttgcgcacttatagaaaacagtttgcccctcatctgctgaccgtaactgcttggtgtaatactgaagttcaggatttttgcatttttcacactctttatttactgtagctctttcgacaattacgtcttcctccttcagtgttgtttcaagaatcacatatggatcaagttttagctctcttctaatatcctcagccgtgaccgtgtaccgcgtctccttcccttcgatatctttggccttgcgcttgaagccgcagagggggcaggaggcggagcggacggagtcgaatttgaggagggtgccgcacacgccgcagaagaggaagtcccgcgcctgccagaaggccatgccgccgccgccgccgtcgccggcgaagtgttccttctcctctagtctgtggttggctggcgatggtggtcttctctccgacggccgacgatgcagcacgggagaaggggagggtggcggaagggcgaggcggcggcggcgggtgaacgcggtggcgggctcgtcctccccgatcacactctccggcatggggaaaggatggcgcaggcggcggaccgcgcgggagaccagcggcaggcggtcgtggatgcggcgctcacgcggggctgggctggccgcgcggtcgtggttggcggcgggtgaggtgttggcggcgagtgcacccgggaatcgatggagc

SEQ ID NO: 75027 - DNA, 471 bp, Oryza sativa
  Clone ID: PAT_MRT4530_75154C.1
atggccttctggcaggcgcgggacttcctcttctgcggcgtgtgcggcaccctcctcaaattcgactccgtccgctccgcctcctgccccctctgcggcttcaagcgcaaggccaaaggtcgtcgtcttccccatctctctccctgcaaagccctgggctgtgttcttcttgcggctgatgccttcgttctctttttttacggcgcagatatcgaagggaaggagacgcggtacacggtcacggctgaggatattagaagagagctaaaacttgatccatatgtgattcttgaaacaacactgaaggaggaagacgtaattgtcgaaagagctacagtaaataaagagtgtgaaaaatgcaaaaatcctgaacttcagtattacaccaagcagttacggtcagcagatgaggggcaaactgttttctataagtgcgcaaactgcaggcatgagttcaatgagaaccagtag

SEQ ID NO: 75028 - DNA, 1602 bp, Oryza sativa
  Clone ID: PAT_MRT4530_75155C.1
atggcggggaaaatggacaagacgacgatcatcgcctccgcggttgtcgggtccctggggttgctgagcgccatcctggggttctccgccgaggttacaaagatcactgcgaccgatgtactggtcggcgcgcgcggcgagtgcctgtacccgcagaaccccgcagccgagctgggggtctgcgcggccgtcttcctgctgttagtgcagatcaccgtgtcggccgtcggcggctgctgcggctgctgcatgtccggccggtccatcccgtcggagaccaagcggatcatcggcgtcgtctgcgccgtcatgtcatggttagtcaccaccgatatcaccgcaggtacggatagcgggatcgcgtggtttctgttcggggtgggcgcggtggtgaacatagagggcaagggggcaaccatgccggactgctacgtcgtcaagcgcggaatctttgctggcgcggccgtgctggccctcgctgccacggcgttcgggatcacgtcctacgtcatgctccgaacgcaagccgacgaggcgccggccaagaagccgccgctggccggggtcgcgatgggccaaccgcagttcctgccgccgcaggcttcacatgagccgccgctcgcccgccactccgccacgcgggtccgtggcccgcctgcaaaaataaagcaggggaacaaaaaaaaatccgctttgggagtggagcggccggtgctgtctgcgctgccgccactgtcggcttctcctccgccgccggcgtctggggggaaggaagttggtgcccagagccgccgccgctcctcttggccgtttgctcctcttggccggctgctcctctccttgcgcgctgaccaggccatcggttcctcctctactgacatcgtcatggcccccttcctcccgccgccgccaacctcccgctgccgccgccgccgcacgcgtggccaccgccctcctcccgccccctctcaggccaaatctgggagggagcgagggaggggagcatcgccggccaccgcccttcccccacccccctcaggccagatctgggagggagggagggaccgagagccgctgccgcccacctccgccactgcccgccaccaccttccgcctcccgccggccagatctgggagggagcaagggaggggagcgccgccggccgccgtccaccgccctccgccgccgccttcaacggtagccgccgtgcaccctacgctgccgtcagcgccggggagaggaggagaggtggaccacataagagatccgcttgcataaatgaaatcggtcaagctgggcatctgcgcggtcatcttcctaatgataacacacgtcgccatggctgccgcagctgctgcatcctctccgagacggtgcaggtcgtctgcgccatcacctcatggatagtgccggtgattgtgtttgtgttgctcctgcacgccgcggtcgaggattcggattgcgacaagatccacgagggcgtctacgctggtcctcatctccatggtgctcgggggaatcggtgccagtcaagcgccgccgccgaaccagctgccgttcgctcatccggctactttgccgccacaaggtgggtggtgtag

SEQ ID NO: 75029 - DNA, 716 bp, Oryza sativa
  Clone ID: PAT_MRT4530_75156C.1
aaggcttggtaagacttgggagaagaatggccgggaaaatggacaagacgacgatcatcgtctccgcggttgtcgggtccctggggttgctgagcgccatcctggggttctccgccgagggcacaaagatcactgtgaccgatatactggtcggcggcaagtgcctgtacccggagaaccccgcgaccgcgctgggggtctgcgcggccgtcttcctgctgttagcgcagatcaccgtgtcggccgtcggcggctgctgcggctgctgcaagtcccggtccatcccgtcggagaccaagcggataatcggcgtcatctgcgctgtcatgtcatggatagcggcggggatcgcgtggtttctgttcgggatgggcgcggtggtgaacaacgactgctacgtcgtcaaggacggaatctttgctggcgcggccgtgctggcactcgctgccacggcttccgggatcacgtcctacgtcatgctccgcaggcaggccgacgaggcgccggccaagcagccgccgctggccggggtcgcgatgggccaaccgcagttcccgccgccgccagattcacaagtatagacagccaaatgatgcagaagagaatcaatccctggttatattggtcaccagtgacgacacaactttgtttgtttggactaaaatttctctgtaaactgcgggtgtgttcagctcatatactttgactgtttccat

SEQ ID NO: 75030 - DNA, 295 bp, Oryza sativa
  unsure (1)..(295): unsure at all n locations
  Clone ID: PAT_MRT4530_75157C.1
aagttattcacacacagcgcgctcacagtgatcggagatggcgaaggacattgaggcggcggtggctgttgttggcccggagtacatttctaacgacttctntgaccagctttcggacgccgctgatcgacatttactgagatcatccacaacgtccctgtcacctaacggtaaccatcagtttttgtgcgtacctctgctttttctatacataacgaaatccacatggaaatcgtacaatttctaatcatacccgctggaggacgcagaagacgaagaagaagaagcttctatt

SEQ ID NO: 75031 - DNA, 183 bp, Oryza sativa
  Clone ID: PAT_MRT4530_75158C.1
atggctatgccgcataattttgcaactatctgtggccactattatacatcttaccaaaacaggatagagaatctaaacaagagtgttcataacagtccgagacaattcaacagttcagttgacaatgaaagaagtcatacttttgatccgcaaatggatggatccagaactggtcaggcttaa

SEQ ID NO: 75032 - DNA, 1664 bp, Oryza sativa
  Clone ID: PAT_MRT4530_75159C.1
gctctggccggagcgaatcagacccatgcgggtactttattaacagactgattttcaatgtcgtaacatgtttcaagctttggaacattttttagtcccttcagctttgagcaattcagttttttttcaccagggtaaacagaaataatgtaaactgaattatcaaattattggattgacaaacgtagaacggtgtcatcactcatcacgggatggttacaaaacctcttgtgttcttgagtaaactagctgattgctatgtcaatccctgtaaccacaaaagcaaatagcagaaagaaaaaaaaaagatcatgccgggcagtgggatacatgtttgttcaacagaatacccaactaacgaacttccattgccatctcttgctgatatcgatattgccttttcttttcatttctttctgttttccattcttggagacaggcattgcgctactgactataccccaattgctcgtcggggtacgtgggacaccctttaagaggagaaagtcgaaaggatgttcttcttgatgacgaattcatcggctttggaaggactgatcgacttctccaacatgcgttgaagcctctcagattccttcttagtgtattcagagcccttctccatgatcttctttgcagagttcacatagatctttccgtacttggcagcagggccagtgagcttcgcaacatcctcttccattttggagagggcttctttccgcttatcatttgctgcaccaaggaactccttcacaagaggagccaagctttcgacaatgccagcctctgaagtaagctgaccctttgaatcacggctggttccacatttctcattaataaacttgacgaagtcatccaactcgcgaccgccatcataatcttcaccagctttgtttccctttgggaagaatttcaatgtggggaaaccagaaactccatacttctctgccaaggcagtgtgtttgtcagcatcaagattggcaataacaacaccctcatcttgcttataaacagaagctagcttctcataaatcggagcaagatgcttgcagtgaccgcaccatggggcatagaactctacaaggacatctttggtttcatcaaggacaacagagtcgaaggtctctggggtaagaaccacgacactagaaggaactgcagctatctttacattggtggctgcttcagagttaacatattctgcaagggcttccgcggtacgttgaccttcatacttcttgggctccaaggaacctttggggaaccattggattgtggggtacccagaaactccatacttgctgcacacactcttgtgctcatcacagtcaaccttcgcaattaggactgatttggctttcttgaaacttgcaccgagtttttcatattcaggggcaagcttcttgcagtgaccacaccatggcgcgtagaactcgacgagggcggcgcggtcctggccgacctccttctcgaaggtggactcggtgagggcgagcacgtcgtcggcggacgcggtggagaccgcggcggcggcggcgacgaggaggaggagggaggcgagggctttgcgcgagatctgaggagtcgccatggctgggtgcgcttgagctgcgagctcgtgagaggagaagagaagccggaggccgaggagccgctgcccg

SEQ ID NO: 75033 - DNA, 460 bp, Oryza sativa
  Clone ID: PAT_MRT4530_7515C.1
attatccttattttttttatttatttctggggtttttttaaattactgtggggggccaaaccaatttgacgcgagaaaacttacctactggcaacaacagaagctccattttggttcctccaaacaaaatggaccccaaaaacaaactagccttgctaaaaaaaaattcaaaaaaggggactgcccccggaaaatccgaaaaacaaacagatgggtttttttggaagtgaggtcaaaactgattcccccctgtttaaaccccgcaaaaaaagctcgcccaatttataggaaaggatgcttcccagttaaagaaagatcccccaccccccccccaaacaattaatgttatgtatggaccacctttaaattataaccataaggggatgtcttgcattcgccttcaagagcttttttccatattaccccagcaaaaaaaaaaaattgaggcccactggataaa

SEQ ID NO: 75034 - DNA, 913 bp, Oryza sativa
  Clone ID: PAT_MRT4530_75160C.1
acttcattctactgaattttggcactatcaaattttgacaaattttggtattgccaaattttgaaagggttaattttagtattaaagtggatagacccttcaaatatcctgtgttattcaccttagaaggatacgtagaatatattgtctcccttctcatcagactctttagctcaattgcagggaaactgtcgttcgtttggactggcccaaagccattcgtgattatcagagaccctggcttagcgagggagattttgtccaacaagtctggcaatttcgccaagcaaacgaccgcgggtattgctaagttcgtagttggcggagttgtaacgtatgaaggtgagaaatgggcaaaacatcggagaattctcaaccctgccttccaccaggagaaaataaagcggatgctgccagtgtttttagcatgttgcaccaaaatgatcactagatgggtgaattcaatgtcttcagaaggaatatctgagttagacgtttgggatgaatttcaaaatcttactggagatgtcatctcaagaacggcatttgggagcagctaccaggaggggtggagaatttttcagttacaagaagagcaagctaaacgcgtacttaaagcttttcagagaatctttatcccaggctactggtacttaccaatcgaaaacaacagaaggatcagggaaattgatcaagaaatccgcacaattctgcgaggaataatagtaaaaagagacaaggcagttagaaatggtgaaggtagcaatgatgatttgttgggattattggtggaatcgaatatgaggcaatcaaatgaaaaagaagatgtgggaatgagtatagaagatatgattgaggaatgcaagttattttacgctgctggttcggagacaacatcaatgttgctcacttg

SEQ ID NO: 75035 - DNA, 138 bp, Oryza sativa
  Clone ID: PAT_MRT4530_75161C.1
atggccgccggccgtgttcgctgcatcccccgtacgcgaggactgtggacgaggaaggacgaggacgcggcgcggccgcttccaccaagtcgccggcgttttccacgatcatggattggaagggataagtacggctag

SEQ ID NO: 75036 - DNA, 223 bp, Oryza sativa
  unsure (1)..(223): unsure at all n locations
  Clone ID: PAT_MRT4530_75162C.1
gttatcatagtgatcaaaacatgccgcctcgaacgcnnccctggcaccctatagatcaggacctgttatcccaggacgctgtaaaacctctggacgttgaggcctggagctcgatgcagggagcacaggcagagcacaagcggatcaaaagttacataccagaagggtgccacaggagctcttttcccagtgtgattgagattgatactcagggggtataccg

SEQ ID NO: 75037 - DNA, 361 bp, Oryza sativa
  Clone ID: PAT_MRT4530_75163C.1
tcccggtcacccacgcgtcgcagtattttaatctttttcatgtttgcatggtcagttagttgttatatgttgaacggtgtctaggacaatatttttaaaagaaactctaattccttttgcatacttctgttaaaaacaaaagatattgtgcaaccttctttatatttagtaacttctcttttgatttcctatgattttatcgttcattaattctcaaatttactcctattttccagtctctttttttttttattcacttcctcattctttttttttttacaccatttatctttacttttccctatttactttttctcctttttatgcttttttttgttatattctctttctttttcatttc

SEQ ID NO: 75038 - DNA, 1290 bp, Oryza sativa
  Clone ID: PAT_MRT4530_75164C.1
tcattcttcatctggtttcttgaagaagtctggtttcttgaagaagtcgcagtacacagaaagaaacactgtcacatccatgctgtccaagccagctcgtcgaccagagccactgccagaattagtcctgctaacctcagcttcatattttgatgttggggggccttctttccttaaatctggagattgttggtgatttggtgagtgaagacgacgctggtcaaaattcgcaccaacacggtttctggccctaggggtagatgcattgctccgactgtgctgaacaggtgcatttggatcatatgtctgggaagcaagatatgaaagagcagtgaccacatctcctataaaaggcctagtggcagcttgctcctgcaaacacattgcagcaactgctaaagcctgatacaggccccgcataggaaatcggcccgcaagtaatggatcagccattttaggaaatttcctgcggtctttaaacaggggacgggcccatgccactaggttctgctctccaagtggtttggtgttgtcgattgctttgcggccagtaatcagttcaaggaacacaacaccaaaactatacacatcagatttaacagtaagctgcccagtcatcgcatattctggggcacagtagccataagttcccataacacgtgtcgaaacatgagttttgtcaccaacagggccaagttttgccaggccaaagtctgatagttttggatggtatccctcaccaagaagaatgttcgatgacttgaaatccctgtaaataacaggaggatttgccttgtcatgcaagaattccaagcccttggctgcaccagcagcaatcttcatccgtgtattccagtcgagaggttccttgtcaggtggaatatcatgcaaatgatcctcaagtgatcccaatggcataaactcatatacaaggagacgttgatccccatcagcacagtatccaattaggttaaccaggttatcatggtgcaatagactgagcataaggacttcaaccagaaactctctatttccttgaagtccattgcgatcaagttgcttcactgcaacagcccccaccacaagaaccgcacctgatccgacccgggcgacgcggcgatccgccgagccgccgtccttgcgcccgccgccgcccttcttcgcctcccccttgccgcccgacccgaagcacggaaagcagcccatccaagaaccctcctcccctcccctctcccggaggggaaacgcaaaaaaatcaaaaaaaagaaaaaaaaactcgagactagttcc

SEQ ID NO: 75039 - DNA, 354 bp, Oryza sativa
  Clone ID: PAT_MRT4530_75165C.1
atggcggttatggaggtcggtgcgcccacaaccattattgagaggctatcaggaactttggaaggccaggaggagcggagccagtggcgagttgatggttcaagtttgcacctaaggaccatcaaccaggagccgctgtatacggggaagacgacgggacgggctcactcggcggcaccgtgggaagataaggtggtagggggagatgccaaccgggagggcctcgccagcgtcgctgaccccttctggccatccagagaccatgtggcggtgaagcgacggtggcacaggaggtggaggagcatactttcgcatgcacgagcacgtgaaactggtggcagcgggcaagactga

SEQ ID NO: 75040 - DNA, 423 bp, Oryza sativa
  Clone ID: PAT_MRT4530_75166C.1
atggacttgtgcctcttggattcattgggcctatcattcccctatgacttcattgcttataggagaactagagatgagaagaaagtcgagagcttgttaactgaccagccggcgctccctatccgtgaagcagaccagcagggtgcgggaggagcggcatggtcggtgtcgtcggcatggcgctgcggctgcgggaggagcggcgtcgtcggcgtggccctgcgggcctgcggctgcgacctgcgggagaagcggccggcatcgtcggcgtggccctgcggcggcagaaggagcggccggcgtggtcggcgtggccctgcggctgcgtggccctgtgtcgtcggcgtcgttggtgttgatggtggctgcgacttgccgcctgcgagcttgcgacctgccacggtgccgcctgggattcagtga

SEQ ID NO: 75041 - DNA, 828 bp, Oryza sativa
  Clone ID: PAT_MRT4530_75167C.1
atgagtgagtttgaggaggaggagaagtcaaaatgcagaatgcaggcaaaggaaaggggaagagaggttgtggtggagtgtggggctggtagcatgcaggcagaggggatcacaagaaatggtatcaaggtgtttgatggtcaagcccatccgttaacattacatgatggagggacggaaccacccatgggtaggattctatccataagcatcctacaagtgaccagcccatcaagtattcacgctgtaggtggaaggccacaagcgacgaaagaaaatagaaatgctgacgtctcgtctctcctcgatcagtcccatcgatcattaagtcttggattgaacggttcgtcttttattcatgccaccaaggcgtcggcaccgctagggccaaagccatcccgattcccacccgcttcactgaatcccaggcggcaccgtggcaggtcgcaagctcgcaggcggcaagtcgcagccaccatcaacaccaacgacgccgacgacacagggccacgcagccgcagggccacgccgaccacgccggccgctccttctgccgccgcagggccacgccgacgatgccggccgcttctcccgcaggtcgcagccgcaggcccgcagggccacgccgacgacgccgctcctcccgcagccgcagcgccatgccgacgacaccgaccatgccgctcctcccgcaccctgctggtctgcttcacggatagggagcgccggctgttttcgcgtatggtcgccagagaaaataataaggtgatgtcaagaaaaatcgattttgtggtagtgctatatgcaatttttcaagtacagaattta

SEQ ID NO: 75042 - DNA, 2288 bp, Oryza sativa
  Clone ID: PAT_MRT4530_75168C.1
ttttttttttttttttttaacaccaaaaaaataccacatttttttcattctgaatcagtataacggcacacttgacaatggcagcattaaaccaccctcttggacatcaggatccttacttccttaacagcaggcgacttcgccccagttccagaggaaccagggaattttacaacacaactgggacagtcccaacaactgaacaggatggctatcctaaagactgttagagacatcacatgttgcagacatggggtgaggtttttcatttttcctatcaactaaaatggtggtgatcagtaggcaggcgacaacaaactgaactctatactcaaattagtgagaaaacaaggactgctagcacaagctgttatcttcggtcggtggactccgatcgatgatcgatgtttccttgtaaacttgtctggaccgattcagctcgcgctagggcagcataaatttgtgctgtcgttagagagtatcaacagctatcaatcgttgtagcccaatctgctggacatgccatgcaataacttgacaaatccaaggaaactcaatttcccgtcggtgtgcctgatccaatcttgcagaacaacatgcaatggcactgaagggctgagacccagttcagaagctagttcatcaattacgatagctcgattgccatccttctcaaagaaatcataagcggaacgggcatgttgctcccatctatctaatgcttcaagctggtgcacactaactgctgctgcacagaactcttgaaagtccattcttctgtactgaagagcgcttaacgagacaagaatctcctgaactcgtgattccttcatagcataagtggcttctcttgttaaggccattctgatattatctagagtgatgcatccatttctgtctggttccaacagagaaaactgtcctttcagatagaaaagctcatcaacagtcaaagtcttcgatagagcccttagagcagcttttcgcaatgatgaggaacgaatataagctttgataagtcggaatataaggatgtccagtggcagcttaatgtcattgtaatttctgatccatggatgacttaaagcctgtgctgcagtcattcttctacgtggatccttgcaaagcaagcgcttaacaaaatccattgcttccagagtaagagaaggccaaggtgcctcattataactggggtcagctttgagaacggaacggaatatgccagattcagtgcgtgcccaaaatggacgactgccacaaaggagaatatatgcaattacacctatactccagacatcagcttctgtgctatagcatctgtgcagaacttcaggagcaacataataagcacttccaacaatatcatttagcctctcatctggttttacaaaatctgataagccaaaatcaatagccttaagttgagagttctcatcttttgaagtaaatagaaaattctctggcttgagatcccgatgaaccactccttgaatgtggcaaaatgaaacgacatttaatatttgcaccagaaccgcttttgcatcatcctcagagtacttcccacctctggaaagtattctatccagaagctctcctccttcacacaactccattactatgtacacattgtcattgtcctcataggcatcataaaattgaaccaagttcttgtgtcccgccaaagctttcaatattttcacctcccttcggacatcctctatagcaatggatgttgtcatcttggccttggggatgaccttgacggcgaccgcgtcccccttgcgcgcccccttcttgatcttcgcggcgcaggtgtagccgaagtggcctctccccacctcgtcccccatgtcgtacttcgccgcgaaccccttgttgaacccgaaccccttgtcgagcccgcggccgccctccccttccacgtcgccgccctcctcggggatcggcggccgcgggggcccgtggcgccgcgcgagcgcctgccggatgtgcttggcgggcgacggcggcgggaacggcagccgcagcaaccgcctcgcgggcgtggtgggcgcggacggggcgggggacctccgcggggaggaggccgagaagaggtggtgcgcagggctcgggctgggcgtggagaacccgaagaagggcgacgcccacggcttcgtcttccacgcgggggtggccgcgccggacccccgcggcggcgtggccggcggctgcggccgctcgcgcgggggcgagcaggcgccgtcggcctcctcgtgcgtcagcggcttcgcgtggcatccccccat

SEQ ID NO: 75043 - DNA, 588 bp, Oryza sativa
  unsure (1)..(588): unsure at all n locations
  Clone ID: PAT_MRT4530_75169C.1
acggacgtgttacgacnngncagncctcctctttatgcaagaacccaagaacgaagaagaagaagaagaagaagacgcgaagctcggggcgcggccattctccgatccccagctcgccttccaagccgccgcattcccccgccgttgatgcgggtggaggccgggggcctcccggagcttgggtcgggggcgagggaccccgccggcgcgcggcggcagcggcggcggcgtcagcagcggaggccggcgatgccgtcggcgggggcggcggcgcaaccagccccgtcgcccgcggtgcaggggctcttcgaggcgtgccgcgaggtcttcggtgcctccgccggcgcggtgccctcgcccgccggggtcgagaggatcaagtccgttcttggtaatccgtaatccctccccccgttaagtctcgagcacccgatggggggtctcgaaagattcgatgttcgtcttaaatagatacagcatgtgcgcgcctgcctttttttcgatgctattcctgcctgtcttctccacggcggacgcttggtagagaatcgaaatcattggttgggtacttggggtggtggcattcgt

SEQ ID NO: 75044 - DNA, 637 bp, Oryza sativa
  Clone ID: PAT_MRT4530_7516C.1
ggggaaatgctagaatgacttatattgtgaaaaaggaagtatttagaacaagatagagcttgcaccaatccaaatcaaagttataaagtaagattttgaattcagtcctcaaaatagttgtcttactgacatacaaaaatgatgtatttatttggagatcatttgaaggcttgaaaattgaaaattgttctttttagttaagttatactactaggtgttataatttgagaggtttgtactggtgccttaatttgattccttaagaagaaagtgatgtatgacttaatatggtgggggtacttttacctgaaaatgacttttcggactgataaggacaattaaggttccttttttagtaatgattgagtccattaagattgttgttttctctctcgtaatgacaacacatgtttgaatcgatcttggaagtgatcctgttaggtaagaagaggcaatgctgacaagaccgataacgccttttgcaattagttattgccaggcaaagttctaagctggaactgtgctggttcttttaaaaagtcctgaggccacacaggaatatattttttggtgttttaattagagagaaaaaaagcgaattttgctttaaaatgagatgtatatcgtattaacatgt

SEQ ID NO: 75045 - DNA, 459 bp, Oryza sativa
  Clone ID: PAT_MRT4530_75170C.1
atgtgcctcccatcgtacaggctcaaggttgccgcgtcgtgtacagaagatgactcaacggtgatcacctgcttcagtttagtgatctccattgagacccgagacgctgaatttagacacctcagcgccacgtcaactggtgctgaatgtcgtgtcatcgcggatgagaagctgagtcggcgtgccaatgtcagcgccggctatttggcgctgagacagagacaggagtgcgtgctccaaatgatttggagcgtccaagtccaggagtcacctcccctggatggcaaccggtcggctcgcgacgcggcaagccaagccgccggcaggcggcagttcagagcaccccagataccacctgcatctgcatctatcgtgtacgtgaccgatctgcccgtagttcgtcgttggattcgcactttgcagcacccgatgcttccatgcatccccgcctccccatag

SEQ ID NO: 75046 - DNA, 1287 bp, Oryza sativa
  Clone ID: PAT_MRT4530_75171C.1
atggagtctatcgcgcggtacttatcgcgagacttgccatatgagctatcagctgatgatgtgtacctgacaagtggctgtgctcaagcgattgagatcatctgctctgtcctagctcgccctggtgccaacatcctgtgcccaaggccagggtacctgttccacgaggcacgcgcagtgttcaatggcatggaggtcaggtactttgatcttctcccagagagtggctgggaggttgatcttgatggagtgcaggaacttgctgacaagaacacggttgcaatggtcattatcaatccaggaaatccctgtggcaatgtctacacttctgagcatttggccaaggcaaatgaagtgtatgcacatttgacgtttgggcagaataaatttgtgccgatgggggtgtttggctcagtagctccagttcttacgttaggatcgatatcgaagagatgggttgtgcctggatggcgacttggatggattgtgacgagcgatcctaatggcgtatttcaaaggaccaaggtagtggaaagcatccagagttaccttgatatctcggctgatcctgcaacatttatccagggagcaattccacaactcatagagaacacaaaggaagaattcttcgaaaagaccgtcgatgtcctaaggcagaccgcagatatttgttgggagaagctgaagggcatcagttgcatcacttgcccaagcaaacctgagggttccatgtttgtcatggtgaaactggatctgtcctgcctgcaaggcatcaaagatgacatggacttctgctgccagctagcaaaggaagaattggtgattcttttgccaggatgtgctgttggatacaagaattggctccgaatcaccttcgccatcgaaccgtcttctcttgaagatggtattgataggctcaagtccttctgctcgcgacatagcaagccgaaagttcaccggtctcttgaaacatgaggcacctgctttcagataaggtcagcaggagttgcttgatggatcaaaaactgttatcaacttaccatgatgtatgttgttcttatgttctatcatcttcactcggaggtgatatgcttgatcgatgcaataagtccttgataggctgtgggctatgattgatgttacaattcttgttgtaatttccaagtactgcgcagtatgtgtaagtgtaaatttttggttgtctgaagtgcagaacactgttcttgaataaagaaggggttatactagaacagcctctttggtaatattaaaattatcttcttattc

SEQ ID NO: 75047 - DNA, 317 bp, Oryza sativa
  Clone ID: PAT_MRT4530_75172C.1
aattcattgttttctatccaggctatgctcgacacaaggtccacgcaaccattcaaaagtgccttatgaccccatccatcgaactaaaccctacaccttacgtgaagaaatcacatgggcggccatcaccacaggactttgatgacaccttgcccacccacctaggagcccgctgcgatgaacagagctaaacccacggagtcaacttaccgctgtcctaacccgtagtagcccatatgggcaactccttaaggtgttgaccaatcaagtacttgaaatgccaccctgcatggagaaaggagggggcctcaatttta

SEQ ID NO: 75048 - DNA, 485 bp, Oryza sativa
  Clone ID: PAT_MRT4530_75173C.1
acccaccaaacccaccgcccttctacacttaaacttctcagaagaacattgaagtccaccattcattcaccatatgaatatacgcttcctgacgaacgaacgcactagctatggagcaaccccacagagtcatccacacagctagctatagtagcctactgaccagttctcggggaacctaggataacctatccagcagcaaacaccacctgccccattggggatgtccacgatgcaaaacgccgagaggctcgccgccgcgcgctccaagtcccctctccggcagccggggaacacctccgccatggtgtgcccaacattcccggcgccgagctccctgtagatgcctacaaccatggaaaagagcaccaagcacctgcaccaactgtcgccgaccgcggaaagctgccggaagcagacctgccggagttgctcgtccacaacgccgccggatgcccactgccccacgcactggcgcttcacca

SEQ ID NO: 75049 - DNA, 210 bp, Oryza sativa
  unsure (1)..(210): unsure at all n locations
  Clone ID: PAT_MRT4530_75174C.1
tgctatgtgcttatatcagttagcgttntaagtntgaccgttgtacaatggtttcggccagagaaatatttccccccgtntcatgttggcctcgttctggtccgtccaanatctatttgtctctttgtaaccncatttnttntgnaaaaaaaaanaaaacaaaaaaaaaaaaaaaaaaaaaaaaaaaaaaannnnnnnttntnnnnanaa

SEQ ID NO: 75050 - DNA, 3024 bp, Oryza sativa
  Clone ID: PAT_MRT4530_75175C.1
atggacttctcgtggaccacgggctgggagaaggcggccgccgacgacgatgaggcggagtcggcgcccgcgcccgcaccgccggccccttcgccgcaggaggcggcggagtccatgatcctggtgcccgggccacgcgtggttctgtccgggctgatgcggggcgactgccgtgcagatgactctgttctgttcattaatgccggtggcagtgcaactgaaggttgtgaaccctcttcaaagctttctgaggattctttctttgaaggaggggatgcaatagagacatctgaggatatagttgaaggtggtgactatccttcactttaccactcagctcgatatggaaatttcagctacaaaatcgatggtcttgctcctggagactatttcttagatctgcattttgctgagatagtgaacacttatgggccaaaaggaattagagcatttgatgtccttgtccaagaagaaaaggcaaacacactgactcatattttgtctgaacttgatgtgtacgcggtggttggaggtaacagaccccttcaggtgcgtgatattagagtgacagttgagagtgacagtgccattgtcataaacttcaaaggagtaaggggaagtcccatggtttgtggcatctgtattcgaaaaagggtagcaatggcagtgacagacatggttacagaagggaatgtcttatgcaaaagatgttcagctcatacagggaattcacctttacagaccaggacaagtaaattaatctcaaagtatgagaaacagattgaggagctaaccaaccagtgcaacatgaagtctgatgaatgttatatggcgtggtcttcagtggaatctaccaatcaggagcttgagagacttaagatagagcttcatcagaaggtcatgcaaagtgataatattgaacaagtcgttgatagacaagctgatcaactgagaagtgtttcccagaagtatgaaaatgccaagaaattatgggcagctgccatatctaacttggaaaataaaatcaaggctatgaaacaagagcaaacactgttatctcttgaagcacatgactgtgcaaacgctgttcctgatctgagtaagatgataggagctgttcaaacattagttgcacagtgtgaagatcttaaactgaagtactatgaagagatggccaagagaaagaaacttcataatattgttgaggagaccaaaggaaatatcagggttttctgtcgttgccgcccattaagtaaagatgagacatcatcaggttacaaatgtgcagtggattttgatggagcaaaagatggagacattgctattgtgaacggtggagcagctaagaagacattcaagtttgacagagtctacatgccgacagacaatcaagctgatgtgtatgccgatgcatctccactggttacttcggtcttggatggctacaatgtgtgcatatttgcgtacggacaaacaggaacagggaagacttttaccatggaaggaactgagaggaacaggggagtaaattatagaactctggaggagttgttcaaaatcgcagaagagagaaaagagactgtcacatacagcatttctgtcagcgtgcttgaggtctacaatgagcaaatcagagacctgcttgcatcatccccttcgtctaagaagttggaaatcaaacaggcaagtgaagggtcccatcatgtccctggcattgtggaggccaaagttgagaacatcaaggagtatgctttgcatcatggtgagagcggagaacctgatgaatggagaatgtacaagaatgaacgattagctaagaccgatgtgcaaggtgaaaggcttaaggaagcacaaaacattaacagatcactttctgctttgggtgatgtgatttcagctcttgcaacgaaaaattcccacattccctacaggaattcaaagttgacgcacttgctgcaagattctctagaattgggtccagcaaagaagcaggttgacactgcagaacttcaaaaggtcaaacagatgcttgaaagggctaaacaggatatcagacttaaggatgattccttgagaaagctggaagataactgccaaaatctagagaacaaagccaaagggaaagaacaattctacaaaaatttacaagaaaaggtaaaagagcttgaaagccagctggattctaagatgcattctcaaattacatcagagaaacagcagaatgagctttttgggaaactcaaggagaaagaagaaatgtgtactacccttcagcagaagatagcggaggaatcagagcataaacttagactccagcagcaatcagaatctgagataaaggagctggagctcaagttgaaggaacaagaacaccatcgatcagttgcagaatctaagataaaggagctggagctcaagttgaaggaacaagaacaccatcgatcagttgcagaatctaaggcaatggaaataggacaggagctcctggaaacacagagaacagaggctatgcttcagatcaagccaagagatcttgagaataacttgcaagaaaggacaacacttcaggacacaaacatgatacttgactcgaccaactgtatgagagttgctagtactcctggagaggcaaaggcgcacctcttgacaagagaggaagcaatgagcgagaaggagcagcacattctgagaagctcagattctatgaacaagaaagtcaccaacaattcttccattgttggggctccagaagttgtcaatgagaagaagaggaaaggagatgcaaggaattcatcgattggtggggaattggagaaccagcctgttggaagccagaatgcttcaaggaagaggagcctgcaaggtgagccaaggctgaagagaaaatcgaccgagccgctgaagaacccaggacgggtgacggcaacttcaaagacggccgctgccacacacaagacgggtcctgttaccagagccacaaggcagcaaccagccgtgaacaagacgagaggttgggtcaggtag

SEQ ID NO: 75051 - DNA, 522 bp, Oryza sativa
  Clone ID: PAT_MRT4530_75176C.1
atggcggttctagccgctagaggaaatttaggaggttggatgtacccagatttgattttgtctgaatttgatgtgtatgcagtggttggaggtaacagaccccttcatatgcgtgatattagggtaacagttgagagtgacggtgcctttgtcataaacttcaaaggagtaaggggaagtcccatggtttgtgccatttgtattcgaaaaacggtagcaatagcagaacaagtccttgatagacaagctgatcaactgagaagtgtttcccaaaagtacgaatatgccaataaattatgggcagctgccatatctaacttggaaaataaaatcaagtgtgaagatcttaaactgaagtactatgaagagatggccaagagaaagaaacttcataatattgtcgaggagaccaaaggtgcctcttctgatcttctcctctgtattatgatgctttcacttagtactatggatgttggtcgtcatgtactaccgactgtttcccatgtgcttgcattgtgctaa

SEQ ID NO: 75052 - DNA, 585 bp, Oryza sativa
  Clone ID: PAT_MRT4530_75177C.1
ttttttttttttttttgcaacacaatttcatatgaatgattaagcactcgaatttggggttctacaaaccgatctagcggcgaaactgttcttgacagaataatctaagcaaaacccgactctaaacaatgacggctactgattaagtatgattagggacgtcctaaggttttcctagggggcataccccctgggctaagcccatgacacaattacaaggcccaaaacccaaatcagattcggactagatgaggtgtgtggcttgttttgcagattctcggcagctcggtagaaattttgacgtggaaccaaaacgatatgaaagtagacttcataagctttccaacaagtactcatagacccccgtaattccttctagatcagtggctaggtcaagagccccgaagtttgaagttgatgttgtcaggaggcctgaatccaaatccaaaacgtgtaaaactttatctcttgtcttctatggaccaaaagtgatgtcgatggggtagaagtatacttggagaaggtcttggtatggtccccaatcaacctcttggatcatggttgcacttcgttatgctcgccctc

SEQ ID NO: 75053 - DNA, 3455 bp, Oryza sativa
  Clone ID: PAT_MRT4530_75178C.1
atggacttctcgtggaccacgggctgggagaaggcggccgccgacgacgatgaggcggagtcggcgcccgcgcccgcaccgccggccccttcgccgcaggaggcggcggagtccatgatcctggtgcccgggccacgcgtggttctgtccgggctgatgcggggcgactgccgtgcagatgactctgttctgttcattaatgccggtggcagtgcaactgaaggttgtgaaccctcttcaaagctttctgaggattctttctttgaaggaggggatgcaatagagacatctgaggatatagttgaaggtggtgactatccttcactttaccactcagctcgatatggaaatttcagctacaaaatcgatggtcttgctcctggagactatttcttagatctgcattttgctgagatagtgaacacttatgggccaaaaggaattagagcatttgatgtccttgtccaagaagaaaaggcaaacacactgactcatattttgtctgaacttgatgtgtacgcggtggttggaggtaacagaccccttcaggtgcgtgatattagagtgacagttgagagtgacagtgccattgtcataaacttcaaaggagtaaggggaagtcccatggtttgtggcatctgtattcgaaaaagggtagcaatggcagtgacagacatggttacagaagggaatgtcttatgcaaaagatgttcagctcatacagggaattcacctttacagaccaggacaagtaaattaatctcaaagtatgagaaacagattgaggagctaaccaaccagtgcaacatgaagtctgatgaatgttatatggcgtggtcttcagtggaatctaccaatcaggagcttgagagacttaagatagagcttcatcagaaggtcatgcaaagtgataatattgaacaagtcgttgatagacaagctgatcaactgagaagtgtttcccagaagtatgaaaatgccaagaaattatgggcagctgccatatctaacttggaaaataaaatcaaggctatgaaacaagagcaaacactgttatctcttgaagcacatgactgtgcaaacgctgttcctgatctgagtaagatgataggagctgttcaaacattagttgcacagtgtgaagatcttaaactgaagtactatgaagagatggccaagagaaagaaacttcataatattgttgaggagaccaaaggaaatatcagggttttctgtcgttgccgcccattaagtaaagatgagacatcatcaggttacaaatgtgcagtggattttgatggagcaaaagatggagacattgctattgtgaacggtggagcagctaagaagacattcaagtttgacagagtctacatgccgacagacaatcaagctgatgtgtatgccgatgcatctccactggttacttcggtcttggatggctacaatgtgtgcatatttgcgtacggacaaacaggaacagggaagacttttaccatggaaggaactgagaggaacaggggagtaaattatagaactctggaggagttgttcaaaatcgcagaagagagaaaagagactgtcacatacagcatttctgtcagcgtgcttgaggtctacaatgagcaaatcagagacctgcttgcatcatccccttcgtctaagaagttggaaatcaaacaggcaagtgaagggtcccatcatgtccctggcattgtggaggccaaagttgagaacatcaaggaggtttgggatgtcttgcaagctggaagcaatgcaagggctgtaggatcaaacaatgtgaatgagcacagcagtcgctcccactgtatgctttgcatcatggtgagagcggagaacctgatgaatggagaatgtacaagaagtaagctttggcttgtagatttggctggaagtgaacgattagctaagaccgatgtgcaaggtgaaaggcttaaggaagcacaaaacattaacagatcactttctgctttgggtgatgtgatttcagctcttgcaacgaaaaattcccacattccctacaggaattcaaagttgacgcacttgctgcaagattctctagaattgggtccagcaaagaagcaggttgacactgcagaacttcaaaaggtcaaacagatgcttgaaagggctaaacaggatatcagacttaaggatgattccttgagaaagctggaagataactgccaaaatctagagaacaaagccaaagggaaagaacaattctacaaaaatttacaagaaaaggtaaaagagcttgaaagccagctggattctaagatgcattctcaaattacatcagagaaacagcagaatgagctttttgggaaactcaaggagaaagaagaaatgtgtactacccttcagcagaagatagcggaggaatcagagcataaacttagactccagcagcaatcagaatctgagataaaggagctggagctcaagttgaaggaacaagaacaccatcgatcagttgcagaatctaagataaaggagctggagctcaagttgaaggaacaagaacaccatcgatcagttgcagaatctaaggcaatggaaataggacaggagctcctggaaacacagagaacagaggctatgcttcagatcaagccaagagatcttgagaataacttgcaagaaaggacaacacttcaggacacaaacatgatacttgactcgaccaactgtatgagagttgctagtactcctggagaggcaaaggcgcacctcttgacaagagaggaagcaatgagcgagaaggagcagcacattctgagaagctcagattctatgaacaagaaagtcaccaacaattcttccattgttggggctccagaagttgtcaatgagaagaagaggaaaggagatgcaaggaattcatcgattggtggggaattggagaaccagcctgttggaagccagaatgcttcaaggaagaggagcctgcaaggtgagccaaggctgaagagaaaatcgaccgagccgctgaagaacccaggacgggtgacggcaacttcaaagacggccgctgccacacacaagacgggtcctgttaccagagccacaaggcagcaaccagccgtgaacaagacgagaggttgggtcaggtaggcagctgcttttgaacctgacattgccattgcacccaatatggcttgtagtatggtaaaggctcaaacttttagctgagtcgcgctgcgtccttcgcagtggatagtagagcacgcattgtaacgtggagtgctgcgctcctgtgtaatctattattgactactatactatcttgcagattcaacaggaatcgcactgttgactgcaaaaaaaaaaaaaaaaaaaaaaaaaaaaaaaaaaaaaacaaaaaaaaaaaaaaaaaaaaaaactcgagactagttctctctctccctcgtgccgaattcctgcagcccggg

SEQ ID NO: 75054 - DNA, 303 bp, Oryza sativa
  Clone ID: PAT_MRT4530_75179C.1
ctaaattgaatgatttttgcccacctcttaagattaactgtgaaaataattttttgaagacacaagccttaagagtactctgttgaagagaagggaagaaatagagtataagagatatgcaagttatgaagagtttcaagtctatctttaaactctgatgagtacaaggtcagcagcctagtgcttgctttatctgttgaaaaatttgtgtatcaacatccagggaaaggaatcaaggttcaaggatatgaataatcaattgttcctttacttgactaaagtcaagtatccttttaaggattt

SEQ ID NO: 75055 - DNA, 379 bp, Oryza sativa
  Clone ID: PAT_MRT4530_7517C.1
aaggaattcttaccctcctcggtttattccaattgggggccggcttgatccgttctagggaacagagcccaaaaaggaacccccccccgggggaaaaaccaccccccgggggggtcggcccccacaggcccccaaacaaaaaccccgaggacccaaaccccggggagaaatctcccccccgggggaaaaaaagagagaaggggcccaggcgccagctaacccctcctgagcaagacccctaccggcggaggccgggtgagaaccccacccaaaggggccgccttggggggcgccccccccgggggggacggccccagaccaaccaccgaccaggagggggggggcccttgggcaaccccccccacggggacccccgggg

SEQ ID NO: 75056 - DNA, 503 bp, Oryza sativa
  Clone ID: PAT_MRT4530_75180C.1
atataaaaacggagtgaggggggcaggaagggtgcgcggccgcgagatggaggcgatcgcgcacccgagtcgcgatagcgggggcgcgcccgaccgtggggtcgcagtcaacaggggaccaggtccaaagcacgctaaggcggcaggggggcaggaagagttcccggggctgttagggggcgtgggatgggggggtgccgttatggccccccaacagggggaccggcgcacgacagcagaatggtggcgcagcttggcggcagggtgttgggggcggtggcgtcgactgccggcgtcggcgctttgtggcagcgcctggctgcgggggcgtcgagtgccggcggcggcgcttggtggcggcgcccggcggcggggttggcagcgcccggcggcgaacggcggcgacgaggttggtgctcacggccaagccgagcgaagacggagacgagactcgccgtcgtcaagtagacgtcgccgtcttccgcagccagcctctcccccat

SEQ ID NO: 75057 - DNA, 1510 bp, Oryza sativa
  Clone ID: PAT_MRT4530_75181C.1
atgaggagtggatctgaggatatttgctatgcgtggttttttaatgcaccacggccgattttaaaggcggtgctctttagtgaccgccagcgctggcagtcgcttaagagatccgcttgtaaaaatatcttaagtggccgccagcgaaagttggtgaccgcaatccgtcttaagtatatttacaagcgcgcatttattaaatccgccagtacgaataaaagggtgttgctacgaaagatggtttctattgtagcgacgtatcaaacaccagtcgagtccctcgcaaaccgcagccctgctcaatcagttccccgcatatccgcttacatcacccacgtcgagtggcctaggagatccgtgcggtgcacctcgctgatgatggcgctactagcacgactgccatgggcctgcgatagcggtggtgtggtccaatttgctgacaaattaaagttctttcaccttcgtgctcaagttgagaatttcggaatgaggaaatttaggaggttggatgtacccagatttggtattttctggtgctttacctacatcggttccaaagttgtaatcccaattttgaggccttcaggtgttgtgattttgtctgaatttgatgtgtatgcagtggtgggagaacaagtccttgatagacaagctgatcaactgagaagtgtttcccaaaagtacgaatatgccaataaattatgggcagctgccatatctaacttggaaaataaaatcaaggtcatgaaacaagagcaaacattgctatctcttgaagcaagatggccatgcaaacgctgttcctgaactgagtaagatggtaggggctgttcaagcattagttgtgcagtgtgaagatcttaaactgaagtactatgaagagatggccaagagaaagaaacttcataatattgtcgaggagaccaaaggtgcaggactgcagggagctgttgtaccgtccaactccacaaatatgggctgcttgcatggtcctcctgtgctggcaagggcatcggctggtactgcaggcttggccgctgcaaggggtgctggcgccgtcggcagggcccagctgttcctgctcccaagggacgaccatgactgttgcagccatagtggtggccacgctttgcaaggcagtgaatgtgaattaacgacatggtcagccacaaagcaggtctgcttggggattgccagattagcaaggtcaatttcattggtaacttcttgcagcccctcctctgaccacaacctgtactgactataattctcaacctgtggtggcctcaccgatctgttccacctggtgcacttcgtcattggatcttcctcctcaactccgtcatgtgcagatccagcgcacggtgcgccaccgttgtgaatgtcaaaccggttcagcttgcgatcatccatcggcttcctcgacgtcgtccttgaaagcgaccctgtgcaggtttgccgaatgcactcccggaaaacgttgattcgctgaaaacttcagcaaaggagc

SEQ ID NO: 75058 - DNA, 1692 bp, Oryza sativa
  Clone ID: PAT_MRT4530_75182C.1
acggggagcaaacagtagactcttgtcgtacgaaaagagcggcgacaaggaaacttcagatcaaacacagtggttgtagtacgtaccttgggttataacagcacgcccagagggctctatgtacaggcagagaggtcaataatacagatgtagtcgccatcagcattaacacgagctgaggcattgccctatcattacggctctaagcagggtatcccagactgagcaagtttgggggttcatcacttcatgggcctaataataacaaagtaatgatcccttaatgcgtatctgccgctactgaaatgaagccagcatgtgcttatgggactgtcggaaagtgatgattgcactgggagtctgggaccataccttgagcccgcctagctacttcgctatccctttattgccatcgtcatcgtcatcctccagatcactgaacgatacatcttcctcctgtcccagtgaagttctgttaccttctgtgccaaccacctcttctgcatcgtcgtcatcatcaggccattcatcaacttcatcttcatcagtctcggaatgaattttgggctcgatggctaaactcttggtttcatttttcactgacaactcttcttcaattaccgacttgtctactatttccatctctgtaattgcaatggggaacttttcagcctcgacatctggcgagatatcagcccacgcgtccgcgaacgatgaaacctctggttttccagctttgttttcaatgcttgaaggttgtatcactttctcttcagcaggggcagaggacataatcacagtttttgatgattcctcttcctccggaacctcagatcctcgcttattcttagtctgtaaactttgcagcaattcctcccttgcttgtaggatctgtggtgttgaaagaagttcagcgtcttgcttgttgagtttcgagtgcagaagcacaaaatatatcttccagaaacatgcttcactcatatcagtagagcaaatggcagcttttatatctgacaggcttggcacaaggtgctccatggataatgcatgcacatactgagcatccgaaagttcaaagtcatctgcatagcgctcactgatgaacagtgggaaatcgagccaagtctcgggcctggtcgagatgtgccgcacgaacaccacaacctcctcagtgacgccagccacgggctccccctcgtccgcatccccctgcccaaatggcaggagggaggacgcgatcttggatatctccgccaccgccttgttgctctgcagcatcgagatgccgctcctcaccctccccccaatctccgccagatcgctccggatccccgcgatccgcggcgactgcgctgactcctcttccccatccctaccctcctcctcctcctccccgcgcggggtggaggactccggcgggggcgggggcgcgaggaaggaggcgacgccccagagccggcgggtgagggtctcggtgagctcggagatgtcgtccttgacgccgcggcggctcggggtgtcgggctgctcgacctcgtcggagtcggggtcacgcggggaggaaccctccggggaggacgccctgtcgccggcgtggtcgggctcgtcggcgtcggggtccggctcgccgcgcggcgaggagagcgtcgccgcgatggagcgcgcgagccacgacattggcgcgtgcgtgca

SEQ ID NO: 75059 - DNA, 1806 bp, Oryza sativa
  Clone ID: PAT_MRT4530_75183C.1
atgactgagactgagcccgacggcgacggcaatggcgacgaggagaaagaagagcttggagatgatgcttcatcaccttcggttgatagtgttacacaagaaaatggatctgcagaaagtgagactaatgcagataattttcccatgcctcgccagacgaaagacgaaactgtaaatacagaaccactcagctccagtgacacagttcagaacattgatggagatgctactccagccagtgatgcacaggaaaatgtggaagtagttgatgttgctgtcggttcacctttgccaggaatgaagcaacaacttgatgaatctgtcaggatccccaaggctacaatagacattctcaaggatcaagtttttggttttgacacgtttttcgtgaccagccaggagccttatgagggtggaatactgtttaagggaaatttacgtggtcagccagcaaaaagttatgagaagatcacaaatcggctgcagaacaaatttggtgatcaatataagctttttcttctcattaacccagaggatgataagccagttgcagtagttgtacctaggcaaacattgcagcctgaaactacagctgtcccagagtggtttgctgctgcttcatttggagtagttaccatcttcacccttttgctccgaaatgtacctttgctacaggacaacttgctatcaacatttgataaccttgagctattaaaagatggagtttatggcgccctagtaactgcggccataataggtgttcatgagattgcacatatccttgctgctagggatactggaatcaagcttgccgtaccatattttgttcctagctggcagataggatcttttggtgctattaccagaattgtcaatatagtccgcaatcgtgaggacctactgaaggtagcagctgctggaccattggcagggttctcccttggatttgttcttttgctgctaggcttcatcttacctccaagtgatggccttggccttgtgatagatccagcagtatttcatgaatcatttcttgttggtggtcttgcaaagcttattcttggagatgctctaaaagaaggaacaaaactatccataaatccactggtcttatgggcctgggctggtctcctgatcaatgccatcaatagcatccctgcaggagagcttgatggcggccgcatagcatttgccatgtggggaagaaagatatcgtctcgaatcagcagcttggccattggacttcttggaatttcagctctcttcaacgacgtcgcgttctactgggtggtgctgatcttcttcttgcagagaggaccgatttcccctctctctgaagaaataacagaacctgagaacaattacatcagcattggtgtagccatcttgctctttggacttcttgtctgcctaccctacccattcccctttgatccatcacaactaactgattttgacttgtgaaacaaaatcagtcacaggtcacaagctttcttcctcccaaatttatgttagatgctgagatgtatgtaacctgtcggctccctgttttatttatcttagccttggtcataaagatttggagtctatgagctccattgctccttgcagtagcaaaataaaatgcaggagcattcctgtggtagttcagttgttgtagtagtattttggtaggatgcatcagtgtagaacagcatatgagcagttgagcacatgattctggatgtaattttatcagtgcagtagttttttgcattaaaaaaaaaaaaaaaaaagaaaaactcgagggggggcccggtacccaat

SEQ ID NO: 75060 - DNA, 198 bp, Oryza sativa
  Clone ID: PAT_MRT4530_75184C.1
atggcgcagtcgtcggctgttcaccatgttcgtgtgcagcagagagggcaccagcctctcgtgcatacaaagaattacactttggactacctcgactctcttctcaagcgcatcgacgactttgagtacaacagctcctacataccgctgaaatcccgcacaccgatgaactccaataccgcagctagtttgaaatag

SEQ ID NO: 75061 - DNA, 391 bp, Oryza sativa
  Clone ID: PAT_MRT4530_75185C.1
gttatatacacccatttctctctccgagacctgctgtggccactacccaactaccatggatccatgcacatcacagccgtaatgatggatagactcgacgaccacatcggacaaaacggtatctcatgtgtgaacctaccatgagggccttacagtgtggaccatggggcccatactcatggaggactaccatgtgatcaagacggtggcgcacttcaatctgaagcgcatacctgagcgcgtggtacacgcccacggagccatccacaaggatgttttagagtgcaaccacaacgtaaccgacatcacgtgtgtcgacttagtacggtcaaggggcgcccaaacccacgaaattgttcgtttctccaccgacattcatgagcgccgcagg

SEQ ID NO: 75062 - DNA, 260 bp, Oryza sativa
  unsure (1)..(260): unsure at all n locations
  Clone ID: PAT_MRT4530_75186C.1
tgtcacgcgaaatccctgtgcaacccccagtgagcgtgtacgctagcttgtcgcgggagaacgcacgcacggcggcgccatgagagctacagacgcaacggcaccggcgcacctcgccgaagtaattagtatcggattagcaattgtaacagtgtaagcttatcgagtcagggcgtcttnnncccctccccccccccccccaattctgaatctgtgcagaataaaaggccacttttatatgtatacatccgcttagtatc

SEQ ID NO: 75063 - DNA, 291 bp, Oryza sativa
  Clone ID: PAT_MRT4530_75187C.1
atgcgggaaatccgcgggggattgttgcgtctggccaagagaactcgcaggggcgaaagctaccggcgccgcgcgatccacggatgcatgtggtatctgctacgctactggtattcactgtcgagcaatggcgtcgctgttggtctcagtgattacgccatgaatcacacccagcaagagggatctagcgctatctctgatctcgacgagtccatgctcgagaaggaagactaccctgccgtcgagtatgagttggttatccatgtcggcaagacgacgatggctagatag

SEQ ID NO: 75064 - DNA, 222 bp, Oryza sativa
  Clone ID: PAT_MRT4530_75188C.1
atggccgtggcttttctcgtcacgctttgtcgccccggacactccgggcagtgggcaggcaggcagcgggcagctcctctcgtctcgccccatgtgcgcgcgacgtgctgggtgaccggccttttccctccggtgaacgtggaggcgaacgtgtccgactgttcgttggcgccagacagctcctcactccacaagaagtcaggaatgatctaccgaggctga

SEQ ID NO: 75065 - DNA, 144 bp, Oryza sativa
  Clone ID: PAT_MRT4530_75189C.1
atgtcgccgtctcttgaagactttgcagcgaggactccttcgagctgcaaacaaggaggtatcatgagctacaagctgagcacagaggtgaagatacagaaccagaagcttgaggagctgattgtccatcatgtatctggcgtg

SEQ ID NO: 75066 - DNA, 275 bp, Oryza sativa
  Clone ID: PAT_MRT4530_7518C.1
gtcagtagcctgcatggtggagcgacaccagaagatgggcatagttcagggtatcgatgctatcgatgcttctccagataaaggcgtgcgcgacggcaccaatgatggccataccatgctgacagctgcagcgcggcacgaaccagctgaggctgaccagaaaggggttgctatatggacaagggacagaattgcgcctaatgcgcaagaaagggacttccatcacaagatagactacccgaaagatattggctgcccaaacatttgcttggcac

SEQ ID NO: 75067 - DNA, 206 bp, Oryza sativa
  Clone ID: PAT_MRT4530_75190C.1
gctcccccgcaaatgcccctgggttgtcttggtgctgctggtgctgcacgaagccactagcgcctcgccacctcgggatcgccttcaagatccgattatgatcttcccgccggtgacaaattcgtccagaccggtcctgggcgtacctgccccacctgaccaggtcgtttcgaaggttttggttctggactgcaggaatataacaa

SEQ ID NO: 75068 - DNA, 462 bp, Oryza sativa
  Clone ID: PAT_MRT4530_75191C.1
atgcccactgctcatgccaaccctcaacaagcccaactctaccccactgcgtgccgccccacgcgctccgccaaagccgatctcgtcacgctacctgttggcggtggctgccgcgtcgccgacctcctccacctcatcctcgacgtcatcatcttcgttcacgtcattgaactactgctccctctctacgcaatgtgtctggtcatccactctcctgccatagcactcgacgtcgcccacccagggcgtggcggtgactgtggcttttggggcgtgacggtggccacgatgcacatcctcttggtgttgttccaaggggagtccttctaccagacgtcgcatgctccccaggccgcgttgtcggtgtcccagccgggaggcgtgggcccatgctggagcgatgaaagagcgtgtcatcaatgctggagctcgagaatatgtggtcacagcaccgatggctga

SEQ ID NO: 75069 - DNA, 1224 bp, Oryza sativa
  Clone ID: PAT_MRT4530_75192C.1
atggagcacgccgcttccgtggcgcgcctggtcgagctcctcggccatgggcagggggcggaggcggctctggaggcggccatggaggcgatggaggcagactatgagcgtctgctgcagcagcgcgacgccgccgaggcgtcggagctcgcggagatggcggccctggaggaaattccacagctgccgcgtgccaccgaagaagaagaccagctaacgctcgaagctgctggccgcttctgtgatgatactgctgcgcttacggtcgattgtattctgccgttacctccaatcgcttcccacgtctccgacgctcgtgcccctccatcgccgcctccaccgcccgtcctccttcctcttcacatttgccgcctccaccaccctcgcaggtcgcagcctccgacgcttctcccgctgccgccgccgccgctcgcctccgcattgcacaacgcctcctctgccggcaggtgcagcactgcctttaccgggccgtgtcgcagcccctccgccgtcgggcttaggggctaaggctggcagccaccgtcccccgatcccatagcagcgtgaaccctctgtggccggcactaaagcagcacttccgtcgctgagcagcgggcaaaatgcccatcaccacggagtaatttttccattcctgtcagtaaatcccctctttcaggctttctttttttttcttttcgaaaaccaatcctcttcttcaggctttccatgtttgatctgcattttatggtctggacatgtgtgatttgtgcatgggtattggctgaaccacgtatggtcaaagatctattaatttgtaatttgtttgctatatgtagtcttacacttatttatgccctgttttcacacttgttttctcacatccctagagttgtattagatgaaaagagatttgtaccgcaacaagcggttgaagaatcaaaggtatgaaacatccaaaagccctgtaataattattcctttcatatatctagtaatgtatgacttcagttgcgtttgcttcagcagtatatttgatgacctaggaatacaagcatgcaaataatatttatcttctctccggtattttgatcttatgtgctatctcttgattttgcaattagtttcagttctcttgcatgccaagctagtgtgcagtgtaccagcgatgccttatttgagttctgcttaatgaacaaatacttttgttaacggagattaatagat

SEQ ID NO: 75070 - DNA, 2049 bp, Oryza sativa
  Clone ID: PAT_MRT4530_75193C.1
atggcgaggtggttttaccacaccatccccttcgaggctggttctgactcagcgaaggccctccggtgccggcgcagggcgattgcgccgaaccgaaaacccaagatcgccgtggacgccgctatggaggcacgattcgctctgctgcgtaaggattgctcccgccttagctgtcgcgacttggtggaggaattttgtatgcttcgcatctttcccctctcccagtcgtggcaagtcgcagttgatcaaggcgaagaggttgatggtttgccgaagttggttctccctgagggaacgaacgtgttgaccctcgaccaggttgacgctgaagctcgtaggatgatcggcgacgtgtcggtcgtcgagtatagccagctgctaacacgacaaccagctggccaggcgaaccgagtttacaacggcgaattgcctccccgggcgaacccccacaaagccgacgacgatgcagggccttcgcgaaagcgaacacacggacaagtgaagcttgcccctaggaaacgaagggttcctacttcctccgattccgacgccgacgacgaggacgacgtcgaagagcgtgacggcgaggacgaaggagaggaagaagaggaggcggaggtcgcagccgaaaaggccgcggacgaggcggtcgaaaaccacgtcgacacccctggctatactcctactccaagtccaggtcacaacaagaccggggtggagtcgaacagctccccccttcgtcgaaaggatttggagggggcgaaagcgctagttgcattttcggcaggcaatgcggcgaagggaggtccgatcaaaaagatctccaaaaagaaaggactcgtcgacgtcgctcacgttttcagcgatgacgagtcctctaacgagactccgacttcgcccgctggccgcagcctggatctttcgaccgcccccattctttcactcggcgctgatggggcaggtggtagcgccgccgcctgggcttcggcctccgcagaacggatcgtgacagctgcggcgatggtcttcggtagccctcagcgtcagccggttgtttcgccgctagtcaaggcgaaggggaagggtgcggccgtcgaaacttctgcctcggaatattcccttgcggcgccccacttcgcccctggcgatttcgagacccgggcggaccttattccctttgtcgagggaattcttgcggctcactgttcgacagagcgaaccgtgcgggcccgtcttgacggatttaagaaccgtcttcgggccaaggatgacgaaataggccgcaagaacttggagatggaagccctcgccaacaccctgaaagaggcaaaagccgaaaacaagcagctccaatccgagttggagaaaggaaaagaggcgagggccgaggttgatcgcctcaaggccgagcgggagaaagaaaaggctcattccgccatgctgaccgattattataacctcactgagccgaagatggaggctcttcgcctggaggtcagcaaggctaaagcgagcgctgtggaagagtcgcagcggttttcgcgggagatggcaaaaaccaccgaatccgcgagaacggcgtgccaaactctccgcctcgccattactgacatgggtgcaaaggtgagcggggtccctgccgaagatgcctcggccttcgacttctccgagtggacccagcaggctggtggttcgatttcgaactgcgccactgtgtacagcgattgttgtgcgtgcatatcggcgacctttactatgggccttctacaacagtttggctgcgagcacgtcgccgagttccccaactatgcgaagggggactgggagatcagtgtgcagaacatttcgcgcgcgcttcgtgcgtggcgaaaacagttctggcagaaagacgccggtccgctgacaaggcgcaccttttggagcaactggcgaaggcagaggcggcagaccagtgcgaagaagaggacgcggcagccgaagggggtggaggcgatgcccaggatcacccagaggtgtgaggccatccgcccttttcttagattttcctag

SEQ ID NO: 75071 - DNA, 2607 bp, Oryza sativa
  Clone ID: PAT_MRT4530_75194C.1
atggctccccgcaagcctaacccctcttcggcgaaagggcttgaccccggccggattgacgacgacaccaccgcctacttagggatttctctcatagatgacagtgagctggcgaagttggtcagctctggggcgttagtcgagggacaggctttcgccccggggaaagccgttgtaccgaagcccgtcgacaactggacggtggtgttcgccgtgtttttcgaggcggggctccggtttccgtgcaacacgttgttgccggagattcttcgccttttccaggtagagctcccacagttaagcccatcgacgctggtccggatcgctatcttcgactgggcgtgccggacttccagttttgagcctagcgccgaactttttggcgccatatttttcgccaccgtgaattcgaagacggtgattaccccggctgggacgaagaaatcagtgttcgggagcgtaaactttaatgttcgccccgagcggtccgatctctggccagtgaatgccgccatgtcgaagtgggaccgccattggatggcgaggtggttttaccacaccatccccttcgaggctggttctgactcagcgaaggccctccggtgccggcgtagggcgattgcgccgaaccgaaaacccaagatcgctgtggacggcgctatggaggcttgccgcgacttggtggaggaattctgcatgcttcgcatctttcccctctctcaatcatggcaagtcgcagtagatcaaggcgaagaggttgatggtttgccgaagttggttctccccgagggaacgaacgtgttgaccctcgaccaggctgacgccgaagcccgtaggatgatcggcgacgtgtcagtcgtcgagtatagccagctgctgacgcgacaagcagctggccaggcgaaccgggtttacaacggcgaattgcctccacgggtgaacccccacaaggcggacgacgatgtaggaccttcgcgaaagcgaacgcgtgggcaagtgaagcttgcccctaggaagcgaagggttcctgcttcgtccgattccgacgccgatgatgaggaggacgtcgaagagcgtgacgacgaggaggaaggagaggaagatgaggaggcggaggtcgtggccgaaaaggccgcggacggggcagtcgaaaaccgcgtcgacacccctggctacactcctactccaagtccaggtcacaacgagaccggggtggagtcgaacagctccccccttcgccgaaaggatttggatggggcgaaggcgctaattgcgttttcggcaggccgggcggcgaagggaggtccggtcaaaaagatctccaaaaagaaaggactcgtcgatgtcgctcgcgtcttcagcgacgacgagtcttttgaagagactccgacttcgcccactggccgcagcctggacctttcgaccgcccccattctttccatcggcgctggtggggcaggcggtagcgccgccgccggggcttcagcctccgcggaacgaatcgtggcagctgcggcgaggatcttcggtagccctctgcgtcaaccggttgtttcaccactagtcaaagcgaaggggaagggttcggccgtcgaaacatctgcctcggagtattcccttgcggcgccccatttcgcccctggcgatttcgagacccgggcagaccttattccctttgtggagggagtaagcaatcttgtcttacctgccagcaccctgagcttattcaccgaattgaatgagttcgatgaggggtgttctgctattaaaagcttggcagttcggaaccgtcttcgggccaaggatgacgaaataggccgcaagaacttgcaggtggaggccctcgccaacaccctgaaagaggcgaaagccgaaaacaagcggctccaatccgagttagagaaaggaaaggaagctagggccgaggtcgatcgcctcaaggccgaactggagaaaggaagagaggccatagctgaggttgatcgcctccaggccaaattgaagaaagaaaaagcccattccgccgtgctgacggattattataatcttactgagccaaagatggaggctcttcgcctggaggtcagcaaggccgacgcgaacgctgcggcggagtcacagcagttttcgcgggagatggcgaaaactaccgaatccgcgagaacgacgtgccaaacgcttcgcctcgcccttactgacatgggtgcaaaggtgcgaggggtccctgccgaagatgcctcggccttcgacttctccgagtggactcagcaggccggtggttcggtttcggacttcaccactgcgtacggcgattgctgtgcgcgcgtatcggtggcctttactatgggccttctgcaacagttcggctgcgagcacgtcgccgagttccctaactatgcgaagggggactgggagatcagtgcgcagaacatttcgcccgcgcttcgtgcatggcgaaaacagttctggcagaaagacggccggtccaccgccaagacgcgccttttggagcaactcgcgaaggcaaaggcggcaaaccggtgcgaagaagaggatgcgacagccgaagggggtggaggcgatgcccaggatcacccagaggtgtga

SEQ ID NO: 75072 - DNA, 2661 bp, Oryza sativa
  Clone ID: PAT_MRT4530_75195C.1
atgctgatccttgcggtcctggacatctcgaggaagaggggcaaggccgccggcgccgaagaccgctgccgtcgaggccatagcccagtgttggtgcagcagatccgaccacgagaggctcaaattggagcatcgccagccggaaggagcctctaccaccggccgcaggggagggaggcgatgacgaggccgtgccgaggcccgctgccggcgccacagcgccggcctccgcaacaaccgccaccagcttccaccaccgcgtcctccgcgcacaccgtcctccttcacccggtgccaccagacgccaccactacctcccgtcgacgccgcccgggagcagcttgctccgcccagatccgggcgccatcgaggcttggccttgccgtcgccatcccggatggccgcacggtgctccggtgttggttccgggaggccgcccgaaaaagcgttcgtttggcgctatccggcgcgacggcgacggcgacgacggcgaccgccaagaccgcgacgcgcgagggcagcgagggcgagttttttggccaagaaaaaaggcaggaaatggaaaggtttggccgcgacatcgctgatcacatggaagcgattcgatttcaagcgattcgtggcctctgctgcgcttgccctcgcattcagggtccccaagccattgacttcgctgccaatctcttcacgcgcagtgcccaagctgtagctgtagctgtagctgctactgccttttgcgtttcaatgctgcactcggcctcataccataccgccaacaagcccctcatgggcaagggtgagattggagcttcggccgagactgtgcaaaccatgtggcgaaccgtcgccttgttgggctatatatgctcccccgttatcttttcaccgccagacttgccactttcaccgctcgcgctctcttcctccgttcttgctctcacggcaccccttggccctttagatttctcgctcactcctcttgttcgccactgcacacacccttcgccacttcatacgtccttcgtcatggctccccgcaagcctaacccctcttcggcgaaagggcccgaccccggccggattgacgacaacaccaccgcctatttggggatttctctcatagacgacggcgagctggcaaagttggtcagctctggggcgttagtcgagggacaggatttcgccccggggaaagccgttgtaccgaaacccgtcgacaaccagacagtgttgagcccgtcggcgttggtccagatcgctatctttgactgggcgtgccggacttcgtggtttgagccaggtgccgaactcatcggcgccatattcttcgccaccgtgaattcgaagacggtgattaccccagctagaacgaagaagacagtgttcgggagcgtaaactttaatgttcgccccgagcggtccgatctctggtgggtgaacgccgccatgtcgaagtgggaccgccattggatggcgagggcgattgcgccgaaccgaaagcccaagatcgccgtggacggcgctatggaggcgtggttcgctctactacgtaaggtctgctccggccttagctgccgcgacttggtggaggaattttgcatgcttcgcatctttcccctctcccagtcgtggcaagtcgcagttgagcaaggcgaagaggttgatggtttgccgaagttggttctccttgaagggacgaacgtgttgaccctcgaccaggctgatgccgaagcccgcagtatgatcggcgacgtgtcggtcgtcgagaagcgaagggttcctgttttgtccgattccgacgccgacgacgaggatgacgtcgaagagcgtgacggcgaggaggaaggggaggaagaggaggaggttgaggtcgtggtcgaaaaggccgcggacgaggcggtcgaaaaccgcgtcgacacccctggctatactcctactccaagcccgggtcacaatgagaccggggtggagtcgaacagctccccccttcgtcgaaaggagatggatggggcgaaggcgctaattgcgttttcggcaggcaaggcggcgaagggagttggagcaggcggtagcgccgccgccggggcttcagcctccgtggaacggattgtgacagctgcggcgagggtcttcggtagccctctgcgtcagccggttgtttcgccgctagtcaaggcgaaggggaagggtgcgaccgtcgaaacatctggttcggagtattctcttgcggcgccccatttcgcccctggcgatttcgagacccggacagaccttattccctttgtcgagggagtaagcaatcttgtcttacctgccagcaccccgagcctattcaccgaactgaatgagttcgatgaggggtgttctgctattaaaagcttggcggttcgggctcgtcttgacggatttaagaaccgtcttcgagccaaggatgacgaaataggccgcaagaacttggagatggaggccctcgccaacaccctgaaagagtcgaaagccgaaaacaagtggctccaatccgagttggagaaaggaagagaggctagggccgagtgtcgccagtcgaaaggattccatcctggatttgtgcttgatgaggtacggtccttcccacttcgattcaagcttgctaacggctatcgggttcgcctttttccttag

SEQ ID NO: 75073 - DNA, 2031 bp, Oryza sativa
  Clone ID: PAT_MRT4530_75196C.1
atgcggcgaggctacgaggagatcgacgacgacgagtggtcgaaccacagcttcaagccttcgcgcgtcctcaagcgaccaagccgaggcgcccagccggactcgcagcctcccccgcccatcgactccttccgttacaaccccaggccttcctcctcctccgccgccgccgccgccaccgccaccgtcgtcctctccgacgacgacgacgatttcgaacttggtgaggaggagcggttgcgccgcgccgggaagagcacccgcgtgctcaatcgtccgcagcggcagcacagcccccctgggcgggcccttccgccccgcgagtccttccgctacaaccctaaacccgccaaggccgccgccgcggtgtcggtttccgatgacgacgacgacggctttgatctcgaagacgatgatttcgacatcccttcttcgaggacctcgcgtccgcgccgtaccgctggtcggcgcttggcaaccgccgtcgccgacctctcggaggaagacgacgatttagagctcgctgatgatgattttgaccatccagacccaaggccaacgaggccgcgtcgagccaccgctcgccgtttcgtgattaaggacgatgatgacagcgacggggatgtgggtgcgtctgaggtggatggggtagaagcagaggaggatgatggtgtgaactggtcggagttggagaatgaggacgatgaagatggggactatggtgagacgaaggtggaggtggaggagggggatgtagtgggtaaggcattgcgcaagtgcgcgcgcatttcggctgatttgcgacaggagctgtatggctcatcgacaaggaattgtgagagttatgctgagatagatgattccagtgtccgaattgttacccaggtgtggagttttgattcaatggatgtgtcggagcaggatgatgtggatgctgcatgcacaagcgaggagtcggagtttgagcctattctgaagccctaccagcttgtgggggtcaattttcttcttctcttgcaccggaaaaatatcggtggagcaattttggctgatgaaatgggtcttggtaagacagttcaggccgtgacctatcttactctgttgcggcatctatataatgacccaggtccacatctaatagtttgcccagcttctgtgttggaaaattgggaaagggaacttaaaaaatggtgtccttcattttcaatcatcatgtttcatggtgctggaaggactgcctactcaaaggagttgagttcattgggcaaagctggttatccgcctccatttaatgtcctccttgtttgttactctctctttgagcggcggagtgctcagcaaaaggatgatcgcaaagcactcaaaagatggcgatggagttgtgtgttgatggatgaagcacatgtactgaaagataagggtagcttccgatggagaaaccttatggctgtcgcacaacatgcccgccaacggctaatgctgacaggaactcccctccaaaatgatttgcatgagctatggtcattgttggagtttatgatgcctgatatatttgccactggagatattgatctgaagaagctgttaaatgcagaagatcatgagctaatttcacgtataaagtccattttggggccatttattcttagacgtttgaaatcagatgttatgcagcaacttgttccaaagatacaacatgttaatttcgtaacaatggactcagagcagtttcaagcttataactatgccattgatgaataccgtggtgcttgtcaagctcgtagcgcaaaatccacatccaatttttctaataatgttgttgggttgattccaaaacgacaaatatcaaactatttcatgcagttccgtaagattgcgaaccatccattgcttataaggcgcatttacagtgacaaagatgttgatcgaattgcaaagttactgtaccctaaaggtgcattcggttttgaatgttcattggaaagagcaacccaagaacttaggaagtacaatgattttgctatccaccaa

SEQ ID NO: 75074 - DNA, 801 bp, Oryza sativa
  Clone ID: PAT_MRT4530_75197C.1
atgtcacaggaaggtagctccggtgcatctttgctccatgccatcgtcggcggcaggggcggcggaggcatcctgtctccagggaagattgggacgacaacaggggatcgacgacgacaagggcgaatccgaacaaatccacatatgctcgacccgatcgcacttagcatcgatgacgacgtggcgccgccagcctccgccttctgctgcgccgcgccactggacgtcctcgcccggacgagcaccgacaggtccccggcattgtcgtcgccatccgccaggctcatcatttgctgccttgagcaagacgcgtgcgtcgacttggccggcggcatcaggtcgtgtggcgcctcggacgctgcgcctggcccgccatgctcctcctccaccattgccgcgtcgtccttgcaaggctttccttcgccgccgcagccgccactaccggcgcggtcgccggggaaggggatgatgctgttggacatatatgaggtggagtggatcacgcgggagttggagagggtgctcgtgagggagagtgggtgccgcaacggtggtggtggcggacgagcgggtgatgggcaccgtagacggaaggggacgacgaggaaggcggcgaccagttcctacatgaggccgacgactgacaagggcggcttcatggggaggcacgccgtctccgtatgcggcgacaccgccaccgccgccgtctcagtcagcgaccgtttatgcccgtcgccgtcgctgtcggcgcctgggccagcagccgcagccgccaccaccgctgcgatgagcgcctcgtag

SEQ ID NO: 75075 - DNA, 2355 bp, Oryza sativa
  Clone ID: PAT_MRT4530_75198C.1
atgggggacttcgccctgactaaccttgacgtctcgggcttgaatccccactggtcgcatggtttcagcaggtttggtcaaagggcctcatgccatatcgccaacaagcccctcacgggcaagggtgagataggagcttcggccgagaccgtgcaaaccatgtggtatgacaacggcgagttggcaaagttggtcagctctagggcgttggttgagggacaggctttcgccctggggaaagccgttgtaccgaagcccgtcgacaaccggacggtggtggagctcccacagttgagcccgtcggcgctggtccggatcactatcttcgactgggcgtgccgaacttccgggtttgagcctaacgccgaactcttcgatgccatatttttcgccaccgtgaattcgaagacggtgattaccccggccgggatgaagaagacagtgttcgggagcgtgaactttaatgttcgccccgagcactccaatctctggccggtgaatgccgccatgtcgaagtgggaccgccattggatggcgaggtggtttttccacatcatccccttcgaggctggttccgagtcagcgaaggccctccggtgccggcgcaaggcgattgcacctaactggaaacccaagatcgccgtggacggtgctatgaaggcgtggttcgctctgctgcgtaagtcatggcaagtcgcggttgaccaaggcgaagaggttgatggtctgtcaaagttggttctccctaaggggacgaatgtgttgaccctcaatcaggccgacgccgaagcccggaagatgatcggcgacgaaggggaggaaaaagaggaggcggaggccgtggccgaaaaggccgcggacgaggcggtcgaaaaccgcgtcgacacccctggctacactcctactccaagtccaggtcacaacgagactggggtggaatcgaatagctcccttcttcatcgaaaggatttggagggggcgaaggcgctagtagcgttttcggcaggcaaggcggcgaagggaggcccagttaaaaagatctccaaaaagaaaggactcgtcgatgtcgctcgcgttttcagcgacgacgagtcttctgacgagactccgacttcgcccgctggccacagcttgtacctttcgaccgctcccattcttccgctcgacgctagtggggcaggtggtagcgccgccgctggggcttcaacctccgctgaccggatcgtgatggctgcggcgagggttttcggaagccctctgcgtcagccggttgtttcaccgctagtaaaggcgaaggggaagggggctgccgtcgaaacatctgcctcggagtactccctcgtggtgccccacttcgcccctggtgatttcgagacccgggcggatcttattcccttcgtcgagggagtaagcaatcttgtcttacctgcctgcacccagagcctattcaccgagttgaacgagttcgatgaagggtgttccgctattaaaagcttggcggttcggattcttgcggcccactgttcgacagagcgaactgtgcgggcccatcttgatggatttaagaaccgtcttcgggccaaggatgacgaaataggccgcaagagcttgaagatggaggccattgccaaaaccctcaaagaggcgaaggccgaaaacaagtggctccaaaccgaattggagaaaggaaaagaggctagggccgaggtcgatcgcctcaaggccgaactggagaaggggagagaggccagagctgaggttgatcgccttcaggctgaactgaagaaagaaaaagcccattccactatgctgaccgactattataacctcactaagccgaagatggaggctcttcgtctggaggtcagcaaggctgaggcgagcactgtggaggagtcacagcggttttcacgggagatggcgaaagccaccgaatccgcaagaacggcgtgccaaacgctccgccttgcccttactgacatgggtgcaagggtgcgaggagtccctgccgaagacgcctcagccttcaacttcttcgagtggactcagcaggctggtggtgcggtttcgaactgcgccactacatacagcgattgttgtgtgcaccagttcggctgtgagcacgtcaccgagttccctaactatacgaagggggactgggaggtaagtgcgcagaacgtttcgccgacgctccgtgtgtggcgaaagcagttctggcagaacgacggccgatccaccgccaaggcgcgcctgctggagcaattggcgaaggcagaggcggcagaccggtgtgaagaagaggacgcggcggccgaagggggtggaggcgatgcccaggatcacctagaggtgtga

SEQ ID NO: 75076 - DNA, 456 bp, Oryza sativa
  Clone ID: PAT_MRT4530_75199C.1
atggtggaggaggagcatggcgggccaggcgcagcgtccgaggcgccacacgacctgatgccgccggccaagtcgacgcacgcgtcttgctcaaggcagcaaatgatgagcctggcggatggcgacgacaatgccggggacctgtcggtgctcgtccgggcgaggacgtccagtggcgcggcgcagcagaaggcggaggctggcggcgccacgtcgtcatcgatgctaagtgcgatcgggtcgagcatatgtggatttgttcggattcgcccttgtcgtcgtcgatctgactcactcggacctccttgcctagttcgtcgtcgacgtttccctcgccgggaggtccaccgcggtggtcgggatgaggacgggaacggagacggcgtgagagaggaggacggagaaagtgactggagtggcatggttacaattttagaattttccagtggcatgtag

SEQ ID NO: 75077 - DNA, 330 bp, Oryza sativa
  Clone ID: PAT_MRT4530_7519C.1
atcgtttcaggacgcctgcgaaaccgcgtttgagaggtgtaggaatcccctaacatctcacatcggcagggagcagctcgccgatgtcctgcggtcaagcatgcttgagctgatgaccgataatgggatgatgaagctgttcaagacgttggacgtcgacgatgacgacggaatcagcaaggatgacctgatggcatcccttaggaagctccccttcatgatcgcgctcttcgcgggccggatcaacgtggaagtctacatcgagatagtttgatcgactggattgatcgcaagggagagcaaaaatggtgggtgggagtttgtaacgcg

SEQ ID NO: 75078 - DNA, 1880 bp, Oryza sativa
  Clone ID: PAT_MRT4530_751C.1
cacggtggaatcaagagaagatgcaagcgcaggacgtgaagaacgtcttctgcatgaagggtgggcaaggggagtccagttacctcaaaaacagtaaagctcagttgagagacctgcaaatgatgctgtatgccctggaggagacactggacaagatcgcgatccctccccgcgggccggggaggcttctgctgacggcggccgacctcggctgctcctgtggccgcagctcgctcgtcgtcgccgatgcgatcgtgcagcacatgaccaagctgtgtcgcggtcgcggcaagcatgtcgacgccgtcgcggctgctgatccggagttctggttctacttctccgacctcccgagcaacgacttcaacaccctcttcagcctcctcccgccgcacgccgcttcctccggcgacggcagtgggcggcgctacttcgccgccgccgtgcctggctcgttccatgaccgtctgttcccggagcgatctatcgacgtgttcacctccaccttctgtctgcactggctctctcaggtgccggacgaagtcgctgatacgcggtcaccggcttacaacaaggggaaggtgttcgtgcagggcagctcggaggagaccggcacggcgtaccggcggcagttccagtccgacatggcgcgcttcctgcgctgccgcgccgccgagctgaaacctggtggcgccatgttcctagtcttcgttggccgcccgtcgtccgccggccccaccgaccaaggccgcagcctcaacctgctgggcaccatgttcgaggagtcgtggcgtgacctcgtcgacgaggggttgatcgacggcgggaggatggacagcttcaacatcccgtcgtacgctgcgacgctggaggagttcagggagtccgtcgacgccgacggctcgttcgctgtcaaccggctggagcacgtgatgggaggccgtctcgccgtggacgacgacccccacgacgaccgctgcgcggtcgggcgcagggtggcgaacaaccagcgatcgatcttcgggccgctcgtcgaagcgcacattggcagggcgctcgcggacgagctgttcgtccggatggagaggcgcgcagaagagctctccgacgagcttgtggacgagatgggggtgccggacaaagtcgccgatacgcggtcgccggcttacaacaaggggaaggtgttcgtgcaaggcagctcggaggagaccgacacgtcgtaccggcggcagttccagtcagacatgacgcgcttcctgcgctgccgcgccgccgagttgaaacccggtcgcgccttgttcctggtcttcatcggccgctcgtcgtccgccggccccaccgacctaggccgcagcttcaacctactgggcgccatgttcgaggagtcgtggcgtgacctcgtcgacgaggggttgatcgacggcgggacgatggacagcttcaacatcccgtcgtacgccgcgacgctggaggtgttcagggaggccgccgatggctccttcgctgtcaaccggctggagcacgtcatgggaagccatctcgccatggacgatgacccccatgaccgccgcgtggtcgggcgcagggtggcgaacaagcagcgatcgatcttcgggccgctcgtcgaagcgcacatcggcagggcgctcgtggacgagctgttcgtccggatggagagtcccgtaggagagctcgccgatgagcttggggacgagatgggggtccacttccacatcggcttcatgcgtgaagttgaaggagagtatgcagatgcaaatcagagtgtcatttccttacttgcttgttctatcaatgtcgccgacgtggagcatctgcttgttgctgctactggctcaggtgaacacctctttgctggttaa

SEQ ID NO: 75079 - DNA, 771 bp, Oryza sativa
  Clone ID: PAT_MRT4530_75200C.1
atgggtgcaaagatgcgaggggtccctgccgaagttgcctcggccttcgacttctccgagtggacccagcagaccggtggttcggtttcggactgcgccactgcgtacggcgattgctgtgcgtgcgtatcggcggcctttactacgggccatctacaacagttcggctatgaacacgtcgccgagttccctaactatgcgaagggggactgggagatcagtgcgcagaacatttcgcccgcgctttgtgcgtggctaaaacagatatggcagaaagacggccggtccaccgccaaggcacgccttttggagcaactggcgaaggcagaggcggcagaccggtgcgaagaagaggacgcggcagccgaagggggtggaggcgatgcccaggatcacccagagaccggcgggagcacggcggtcagaccggcggcggcgacacagcgagcagcagctgatctcggcggtcggaccggagatataatcgcggtcagaccgacggcaaccaggctgtcagaccggcaggacaacttcgacgagagcgacgacaacgaccacgacgaggtcagctcggccggtcagactgggtgccaggccggtcggactgccggcacacctccgagattacaacttcgaccagtactgatacagaacgtggatcaacttcagaagtcgctgctcctttgcacatttagcgacgacatccgccggaacaaatcattggccgaaggtcgccgctgcttcttcctcgacgccatcgccgtccgttga

SEQ ID NO: 75080 - DNA, 782 bp, Oryza sativa
  Clone ID: PAT_MRT4530_75201C.1
atggttacccttatgaaagggacatttacatgggtatatagtgtaatagaggtttatggactcctgatgggccgttaggcgatcgccggcccaatggcctctaggcttgatgggccggaaaaggcttctctggccctcgcgggggcgcgcttgctttggcgaagtcgtctcccttcggcatgtactcttcgccctgcatcctttgcccaagaggcctccggcttagcagagtacccgcacgatccttcgcctctcgcgccgtccttgttccatagtcttcgccatgggttcggcagattttggtcgaagggcctcatgccataccgccaacaagcctctcacgggcaagggtgagattggagcttcggccgagaccattcaaaccatgtggtatgggaaagccgttgtaccgaaacccatcgacaaccggacagtggtgttcgccgtattttttgaggcggggctctggtttccgtgcaacacgttgttgccggagattcttcgccttttccaggttgagctcccgcagttgagcccgtcggcgctggtccggacgctatcttcgactgggcgtgccggacttccgggtttgagccaagtgccgaactcttcggcgccatattcttcgccaccgtgaattcgaagacggtgattaccgaagctggaacgatgaagacagtgttcgaaagcgtaaactttaatgttcaccccgagtggtccgatctctggccggtgaacgccgctatgtgaagtggatctccgtcccagaagtgtcaccgact

SEQ ID NO: 75081 - DNA, 644 bp, Oryza sativa
  Clone ID: PAT_MRT4530_75202C.1
caggatcagtgagtaaaactgtgtctatttgtactctgctatgtccctaacacttagcccagtgctggcacacagcaggagctcagaattactgagcgactcagtaatcatggaaataagatcctgcagacaagtaaacagatacctgtttcaggaacaagtcatagctcaagctgtgctttatccagtgcctaggagataatgtaaaatacttccatgaatgaatgaatccatgcatagaaacaaatagcagtagattacaactcattttgtgtacttcactttcaccttaaattatcgtaatggtcagtgtccacattatagatcattaaatagctctcaattcttcatgaaaactgagcaattcctttgatagattaactacttcctcttcaatggaaaatatctctcccagcagatgtttcttgaaatgaagccagtaataaggagacaagttcaaagattctagttccatttatgataccatcacttacttttttccactgtgaccttgaataacttatagggtataagatgtagaaaagaatttagagctaggcaagcctttctccaactccaataatgaagaggaacccagttcattgtcctcacaggtccgtgtcttctgctcgtggtaaaataaa

SEQ ID NO: 75082 - DNA, 665 bp, Oryza sativa
  Clone ID: PAT_MRT4530_75203C.1
ccggccgggactatagatctcaagttgtctactagtttactatctgcgccattttagccatgcatttctcaaccttcgctactatcctcgatgccgagcccgagcatactgctctgtaagggttacacccggtgtactccctaagcatactggtaccaagaccctcagcactcctctccatatcgccggaggtcagatgtttgtacgctagctgtatctggtatgaccgtggagcgtaatgtacccggacagtctgaatgagtagaaagggacagtgtcttcttactcgaagaacgtgacaagctacgcaatgccatcattgccgtgcttcaataagaaagatgatactgctaggactcatgcactcttgaatgcttgcggttggaatacgacggatacgactacgtctccatcaagggtggtggtacaatcaacatcatcaataagtgtcgcgtaccatgccgctagacaagatcatccagcacttcggatgttgtcacgtctggttatcaacttctacgccaatggctaccgctaggtgtaccgatcctgtggcaactgcagaggaaactggagacgctccgtgcacatggaggatacaactgctgtcgatggaggtgagatcatgctcattaacctcaactacggcgacaacgctacttact

SEQ ID NO: 75083 - DNA, 930 bp, Oryza sativa
  Clone ID: PAT_MRT4530_75204C.1
atggctcagtacgaaggaaagcacggcccagcacgatacggctatgggccgtgcctgggccaaggaatacgtcaagtaggcgatttggacgcagtaagtacgtccatgctttatctcatcttggacgactggatcttccgcaagattgatttgtcgtctaaccaacctgatgggcggcaggtacctggaggcatcgcgagggaagccgcctcctccctgccaccccccttcttccgctggaatgcacaacgtgggatgcccctgcacttcgtcgccatcggctccaagatcttggccatgcctcccatggaagaaaaaagggatactgatcacctcgacgttggcggcgcctgcttcgacgtccgcaccgggtgcgtcgtcttcgtccctcggcacggcggcgatcagcacggcgacccagtatacttccagatcggcagtaggctcttcacgctagggtgctcccgcttccagctccttgacctactgccgctggcgctggatggcgaccctagaagtacaaggcggcagcaatggtcatggcgcgatctcccgatgccgcccttcctccactccatgcgtgctctctctcacgtgcttctccctcaagaagaccagaccatcctcgtcggcgttgggttcctctccccaagttcttcctccacctacagctttcgcattgcggaggacgggagctcagcctggaaatgccttggtaactgggggctgcctttccatggccgcggttactttgaccctaagctgaatgccatgatcgggctctcgatggatggacgcatctgctccggccaattggtgtctgatcactgcccggacgtgaagtattgcagggagaatctgttcagccgagacgcgcgtaggcgccaccctcgtctacatgggacagagaagcagattttgcctggttga

SEQ ID NO: 75084 - DNA, 273 bp, Oryza sativa
  Clone ID: PAT_MRT4530_75205C.1
atgtgtcaagaggtcaagcgtgacctctcccacaccgtccatggcttccccgccgatgagcaccacgtccgggaggtgattgcgctcacgctccactcccgcgcctgcgtcgcgtcgctgtcacgctgcctgggcgtcacgctcaagatgctggtgctcgtccaccgcctcctcgccgacggcgacccggcgttcgagcaggagccagcctcctcgtcgctcggccgccgtgcgccgttccagccggcctcctcgtcgctccgccgcccatga

SEQ ID NO: 75085 - DNA, 462 bp, Oryza sativa
  Clone ID: PAT_MRT4530_75206C.1
atgtgtcaagaggtcaagcgtgacctctcccacaccgtccatggcttccccgccgatgagcaccacgtccgggaggtgattgcgctcacgctccactcccgcgcctgcgtcgcgtcgctgtcacgctgcctgggcgtcacgctcaagatgctggtgctcgtccaccgcctcctcgccgacggcgacccggcgttcgagcaggaggtgttctacgccatgcgccggggcacccgctccgtccacccccgcccccccagcgccgccacgccgtcgcccgctccagccagcctcctcgtcgctcggccgccgtgcgccgttccagccggcctcctcgtcgctccgccgcccatgagcgggagagagacaagagggagagagaggggacagagagaagagtcaaaagaagccacgtcggtgccacctcagccaaaaccagagtcaaatactgccgagggaatttaa

SEQ ID NO: 75086 - DNA, 1377 bp, Oryza sativa
  unsure (1)..(1377): unsure at all n locations
  Clone ID: PAT_MRT4530_75207C.1
cccggcctgagattagcttcgccgccgcgcccaatcgccccgccctgctgctccccgccgccgattccgtcccccgtccaccgccatggatcgcagcagcagcagcagcagcaacagcaacccgcatctcggggtcaacaagctcggccgcaacatccgcaaggccacgccaccgccgccgcagccgcagccgccgtcacgcccgccgcagccgcagccgcaggtctacaacatcagcaagaaccagttccgcgacatagtccagcagctcaccgcggggaccccctccccgcctccgccgccgcagccacagcaccagcaccacccgcaccgcccgctgccgccgcagcaccagcagcccaagcccccatccatgcgccttcagaagatccgcccgcctcccatctccacccccgtcgcgcggccccctcccgtccacaaccaccagatccccaaccctaaccacaaccccgccttccaccgcccaccgccgccgcagcccatgcccatgcctatgcctggtccccccgtctgggctgactcaccggtcaccgcctacatgcgcatcctcgagaactccctcttcagcgccaccccgccaggcgccgccgccgccgctgccgctgccgccgctgctgctacgggacaacaggcccctccgcaccaccctcatcccccacccccgccgccggtgccgtcgccagggatactcccctcgccgagcggctttctcaacctgctctcgcccacgcccaggtcgccctacccgctgctatcgccgggcttccagcacccggggccactcacgcccaacttccccgcgctgtcgccgctgccgggcactgggatcctgggtccagggcccatggctccgccgtcgcctggcctctggttcccgcagtcgccgtcagggctgctctcgccctccgggttcttgccaattctgagcccaaggctgcaggagaagaagagtgcagggagacggacaaccaaccatgtatctgcatctgtgtcattcccagtggcccagatctatcgatatgataatgatgatgatgatgatgatgggaaagacaaattaattattgacttttcaaagcacaccctcatccgcctcgctgaaatctttgaccaggacgacgactactggagcctgcagccgcctgatgcatccaatccaacggagtgggagtaggctgctgtataactgggaaagtttttanttcattcacttctcttagctgcanaaacctggacagcaaaaactggggcangttgtagttagactctttgagttattagggttgaaacangtaagttgtaaaactttaggtcagtaaaggttagccctttntcactgtaaaaaaaaaaaaaaaa

SEQ ID NO: 75087 - DNA, 3233 bp, Oryza sativa
  Clone ID: PAT_MRT4530_75208C.1
tttttttttttttttttttttggggccagtagcagtactaggcaaactgcagcacaccaataccagtattagattttatacaaaactgattgaaaatgtccaattcagcggcaggggtttccttaaaaatcttaattctattattgcgggtgtatatatataattacagatcacaaaccctttttcagttttcgacccagtcctacatgaaacaatcaaccaaaatcaccacttgaagcttgtagatcactttcagataattccatcaagaatgagatcaatgacatacacggccattttcctaacttatcatacaatttttcttttctcctttttcaggcaaactgctctccttcacacggtttgcagagctagcattcgctccatccagtcgatgatgtctgtggcgatctcatcacgctcaggctcaaagagcagatcgtgcaagaacccatcgtacagcctcagatccttgtgcctcgatgaggcctcgttgtagaggtcctgtgaagccagggggtcggtcacccggtctgcggttccatggaggaccatgaatgggacggtgaccttcttcaagttgtgcagcaggtaggaggagatgcgtaggatttcatggccggtccgaactctgatcggcccggtgtaaaccagcggatcggagtacttcgctagcagggcagccgggtcgcgggacaccgggatgcctctcttgttagctcccttgaactgaaactttggtgctaacagagagaatattggcgccacagccttcaaaacaacagctccaccagtggagtgaccaagaagaaaacaggggacccctggattctcaagcacaattttaccaagaagtacatctatatcttctacaacataatctagtgaaggcacataaccatgtagaccatcgcttccaccatggcctgacattgtatatgagttagagttagcactgtattttgttagtaagtgtgcactgcagagtcaatttgtgctatgagtgaacagaatgtggtaacattacaatcatgagctattctgaataaaatttcatgcttttgtccataacaaacggtaataccgcccgcgagtcccacccggtcattcgcttcgcccacgccgacgccaacctccgccgtctgccgcacgcccggtcatctgctgcacgcccgcgccccgtctgctccgccggccggccgctccccgcaccgtcgcctggtcctccggcaggcccgtgctgcgggtgcatctgccgcagccgctccgcccgccgcccgcccactccgcccgccgcgcgctgctcctccccattcaagcaagcagatgagatcgatgatgcgtctcatgatttgctgcctcctagtctctgcgggggccgggggaattgcaggcgagggcaacttggacgtggcgctcctcctgcagtgcgtgaagccagcgctgcggagggaaggcgggaacacgcagctggccacctggaccgcctccaccccgctctgcctgtggcgcggcctccgaagcacgatacagatggcgctctctcgctccgtcgaggtggccgtgcccgccgatccggccggcgatggcgatcgagataaaattcggctgcggcagctcggctacaagcaagagctgaagcgcggcctctctgttctctccaacttcgccttctccttctccatcatctccgtgatggccggtgtgacgacgacgtacagcacggggctccgctacggcgggccggtgtccatgacgctcgggtggctcgtcgtgtccgccttcaacggctgcatggccctgtccatggccgagatctgctccgcctacccgacctccggtggcctctactactggagtgccaagctcgccggcaacgactgggctccctttgcttcttggatcactggctggtttaacatcacgggacaggtaggtacattcggatttctgggcccgggcttctcgctaattgatgggcctttttattgggccatgagtacagaaaggaataagttcactttgggtccctttatttgttgcccagtccgattttcgtcccttaatcacaaaaccgggtacgacggatcccctaacttacgaaaccgtttaaattccctcggcagtatttgactctggttttggctgaggtggcaccgacgtggcttcttttgactagatttttgtccaacgtgttattgacgtggcgctgatggggcaattagatcccaaaaacataataaaacttatggggcccacatgtcagttgcacacacaaattaataaaaaaggtgggcccatgtggacccacacgtcatcctcacaacctcttctctctgtcccctctctctccctcttgtctctctcccgctcatgggcggcggagcgacgaggaggccggctggaacggcgcacggcggccgagcgacgaggaggctggctggagcgggcgacggcgtggcggcgctgggggggcgggggtggacggagcgggtgccccggcgcatggcgtagaacacctcctgctcgaacgccgggtcgccgtcggcgaggaggcggtggacgagcaccagcatcttgagcgtgacgcccaggcagcgtgacagcgacgcgacgcaggcgcgggagtggagcgtgagcgcaatcacctcccggacgtggtgctcatcggcggggaagccatggacggtgtgggagaggtcacgcttgaccttggtgtccgccttgccgctggtcgtcgagtcatcggtgctgccgccgtcggcgaccttgttgttcctcccctcggccatctccacgtcgtcgtcgccggcctgcttgctgcggttgctgcggcggcggcggcggcgaggaggaagacgaagatgtaggcggtgacggcggaggaggaagacgaagatgctggcggcagcggcagcggcggcggcgaggaggaagacgaagatgccggcggtggcggcgcgctgggggtggtgtcggtgtgggggatggtcccgtcgcctcgcctcgcctccttcccccaccgtgtcctgcttctgatcggtgacggtgacgccgccgccgccggccagctcgcggtacatcacggcgaccgctaggaagtaagtgatagacaggatcagcaggaggagcggcgtggtttccgcagccgcctgatcaggaagctcgtcgtcgtcgtggccggcgagaccggccgccgcagcccatatagcggcagtgaatgcgagggacat

SEQ ID NO: 75088 - DNA, 654 bp, Oryza sativa
  Clone ID: PAT_MRT4530_75209C.1
acggtaaactgcattgtatacatctggtgcaactggtaaaactttgttcctataattttttaccctaatggaaccctatacaaaatccaagaaagatgaattccttttgcagcatatacaactaatgtttgcaacggactgttactagcaatcttaacgaataaatcatcagggatgcctgtaagcctacccaatctggtactctatctacgaatggcgaaggaaaaccatggtgaaagggatcgcctcctcaatgctccacatcaacagcgcctgcttcgtcatccatcatctacttccttagaaatgttagtgcactgcaatggaaaaccagctggctcaattgtaagatatctcaattgacacaagaatctcagcaaagtacagatgaaatccaaattatgaccagaagagtggagcatggcaaggtatttgcaccccaaatgtttctctctgtcagccctaccgagaatgttataacttgaccatggtaaaagttgtaccagatatatgcttattgcatgtcattctcaataatttgaacgcttcacttgtcagatcagcataattccaaaaagaaaaccacaaaaaattgaataatccacaaaagtagcctttctccttttgtagatattattggggttgcacgactga

SEQ ID NO: 75089 - DNA, 2423 bp, Oryza sativa
  Clone ID: PAT_MRT4530_7520C.1
ttaagctttcgctttcataaaagccattactccctctcctccattgctggcctcccgcctccgcctcctctcgcctcgcctcgcctccgccacccatggcttctcgaaaccctagccccgcctccctctccacgccgctcctctccgactccatctcgcccacgcccaccaccaacggccacgcggggcaccataaccacgacgacgacgacgaggagtcgccaacggtgtgcggcggcgatggcggaggagggggggacccgttcgcgttcctatcggaggatcggccggcgtggtggtcgccgcggggggtgtccccggccgacccgttccgcaacgggacgccggggtggtgcggggcgtacgagctcgtgagggcgctcgtgtgcgcgccggtggcggcggcgaggctggtgctgttcgggctctccatcgcggtggggtacgccgccacgtgggtggcgctccgcgggtgggtcgacgtgcgggagcgggcggcgcaggagggcgccgggcccatgccggcgtggcgccgccgcctcatgtggatcacgcggatctccgcgcgctgcatcctcttctccttcggataccattggataaggaggaaaggaaaacccgcgcctagagagcttgcacctatagttgtctcaaatcatgtatcatacatagaacccatatacttcttctatgagctgttcccgacaatcgtttcttcagattctcatgattccataccatttgttggaacaattatccgagcaatgcaggttatatatgttgacagattctcgccagcttcaaggaagtctgctgtaaatgaaataaagagaaaggcggcttgcaatagcttcccacgtgtcttgttattcccggaaggcacgacaacaaatggaagatttctgatttctttccaacatggtgcattcatacctggctaccctgttcaacctgttattgtgcgctatccacatgtgcactttgatcaatcatggggaaatatatcattaggaaagctcatgttcaagatgtttacccagtttcacaatttcatggaggtgcacactctcattccattcagcctagaatgtaaaatcttcatgtctttggtaataactacttacacaataaggtccttacatgaaccatactttttacaggtagagtacctccctgttgtttacccacctgagatcaagcaagagaatgcccttcattttgcagagaacactagctatgctatggcacatgcacttaatgttattccaacctcttattcatatggggattcaatgatcatggctcgagcagtggaagatggaaaggtgaactgctcaaattatatggtggagatggcttgggtaaaagaaacatatggtgtgagcacatcagaagcaatggcactcttggaagactttttgtgtatgagcccagacaaggacggacgtgtgaatgcgcaagatttttgggctcattttggccttaattgcacccctctttgcaagaagatatttcagtacttcgattttgaagccaaggaatccatcacattccgtcagttcttgattggatgtgcgcacctcaggaagcagccatcgtttcaggacgcctgcgaaaccgcgtttgagaggtgtaggaatcccctaacatctcacatcggcagggagcagctcgccgatgtcctgcggtcaagcatgcttgagctgatgaccgataatggggtaagtcgccagtttgcttcatgcaacatatctaatcacctatcttccaacgccatcacccagtttcgactcatctgtcattgcctaccgtttacattacagatgatgaagctgttcaagacgttggacgtcgacgatgacgacggaatcagcaaggatgacctgatggcatcccttaggaagctccccttcatgatcgcgctcttcgcgggccggatcaacggggaagtctacatcgagatagtttgatcgactggattgatcgcaggggagagcaaaaatggtggatgggagtttgtaacgcggtgggagacgacagacctccgtctgtttttagagggatggtttccaaccgcttcaccgtccatgtagctttctcaggcgtgttggactaaagtggctaaccggtatagtgcgcaattttgtttcatatcgtaaaaatatatatttatatccatagaaaagctgtcgcgtgatggcacgctggattgtgcaatgtggatatgatactgtacaacattggtccaactgggcgtgcacatagaaactctttttttggtttggtttggtttggctaactggatggatgattacaaactcctttttggctaactggatggaagtatctgtttcgtatcgtccatcccaatatcaatcaatatacgtctttagtttcaaaaaaaaaaaaaaaaagggcgcccg

SEQ ID NO: 75090 - DNA, 199 bp, Oryza sativa
  Clone ID: PAT_MRT4530_75210C.1
gattaaggacctgatcgttgcccccatcgacaccctgcacaaggaggcgaggagctggctgatgaggtgcaggatggaagaggtcgcggaggggatcgcgtcttcgttgtaccgagtgacgtaccacccaaaccgcctcctagagaagcggatttggaagtttccgtggatctcctgctaaaacctgttggtgaacaag

SEQ ID NO: 75091 - DNA, 372 bp, Oryza sativa
  Clone ID: PAT_MRT4530_75211C.1
atggtggctagggatcgcttgatgccgcggtcactagccgcatgcgccctcctcctccaccgctgcccatatcaagagaagatcgggtggtcgccagcctctgcccatcgccagctttgcattgctggccgccctccgtcgtgggcctccactttgcttgtgagaaacttgagaggtgaaggatgggaggaggaggaggaggcagagtgtgccggcggctgctcagatgctcgatctggggttggcaaggttggtttgggaaagatccgggtgagtgtaagcgatagggaggttgaccggtcgcttttctcgccctttatccacgcacgcggatacatcgacaggatagggggagaaaacggcgagttctga

SEQ ID NO: 75092 - DNA, 1108 bp, Oryza sativa
  Clone ID: PAT_MRT4530_75212C.1
gggagcgaaaagtaaatttggggagtctatatttcacggtacaaagtagactctcttccttattcgttctttttttttttttttgcatcctgcaatttttcttgtcttgttgcactgctcttgatcactgtctactccttggggattttgagcagcttccccaccgtgaagccgccgtcgacgacgaggttatggccgttgatgtacctggcctcgtcggacgccaggaagacggccgccctcgccacgtcctcggggtcgatcaacgggccagcttccatctgctccatggacgccgccatggcgttcttgagctcctcgaagctcatcccggggtaggcctcaaggacctgcaccatggacagcggcgtcgcgacgccgcacggcgagacggcgttcgcccgcacgccgtggcgcgccagctccccggccacggcgcgcaccacgcccagcacggccgccttcgacacgccgtacgacgtcggccccgtgccgcccaccacgcccgacacgctccccgtgaagaggacgcacccgctccggcgcggcaccatggcgcgcgccgcgtgcttggcggcggcgacggcggcgcgggcgttcacggccatgacgcggtcgaactcgcccaggtccagggaggcgagcggcgccggcgcgatggagcccaggacgccggcgttgctgtagaacacgtcgagcgccccgtggcgcgccacggcgaggtccaccgccgcggcgacctgcgcctcgtccgtgacgtcgcaccgcgtgtacgtcgcgccagggccgagctcggcggcgacggcgcggccgaggtcgtcctggacgtcggcgagtataaccttggcgccattgccgatgaactccttcgccgacgccttgccgatgccgctggcggcgccggtgatgacggccaccttcccggccaacctctgcgagttcgccgcagtggagaattggtgtagtaaacccgacgatctcttcaccctgagaacgagctgcattgttctctgcatcataaggtcctcctgatccgataatggtcaattcagcattctagagtgtatttatgctctgaaactgagcatctctcgctgtggactttgag

SEQ ID NO: 75093 - DNA, 822 bp, Oryza sativa
  Clone ID: PAT_MRT4530_75213C.1
atgcctcctccgctcctcctcctccccgtcgtgctcgccctcttcgccgcggccgatgcctccccctccgcctgccgcaacgccacctgcggcgacgtgcccgtcgcctacccgttctggctgatcgacaactcatccgccttgggctgtggctaccccggccttggcctccgctgcgtggacaacaccactctgattctccccttccggacacaccagtacagggtcctggacatcgagtacgggaagcacaccatctccctcaccgacgccgacatgcaacactccgacacaaacaacagctgcccgcacctacacgccaacctcaccatcgacgacaactcctggctgcagctcgcgtcctctgactccaacatcaccttcctctacaactgcaagagcaactcctccttgctgtcctcgacctccgttgtgaagctaactggatgtggagctggaccagagcacatcggtagttcgtacgtgttcctggatggctggatcacgggtgaagcgtacgattacgagtgcgagacggtggtggtggcgccggtgatcgatgcgcacaagaaggccatggtggatgcgcacgggggtcttcctcccgcggacggatcatttggcgatgtgctgagcgctgggttcgagctgacatacagcgctcactccgacaagtgcggcaaatgcgagcgaaccaaggggtggtgcggctaccggcacaacgagacgtccaccaccatggatttcacctgtttctgcgacgaaggcccgaccaagagccattgcgaattggggccgtggatatcgaattcgaattactag

SEQ ID NO: 75094 - DNA, 497 bp, Oryza sativa
  Clone ID: PAT_MRT4530_75214C.1
cgaaaagaaagattagttcaaagtccacagcgagagatgctcagtttcagagcataaatacactctagaatgctgaattgaccattatcggatcaggaggaccttatgatgcagagaacaatgcagctcgttctcagggtgaagagatcgtcgggtttactacaccaattctccactgcggcgaactcgcagaggttaatttctttcatgattttctgatcattctgtgttcatgtgtgtagatcatggtgatcgattcgatgcaggttggccgggaaggtggccgtcatcaccggcgccgccagcggcatcggcaagggcgtccgcgaagagagttcatcggcaatggcgccaaaggttatactcgcccgacgtccaggacgacctcggctgcgccgtcgccgccgagctcggtcctgggcgacgtacacacagtgcgacgtcacggacgagcgcatgtcgcccggcggtggacctcccgtggcgcgcacgggcgc

SEQ ID NO: 75095 - DNA, 453 bp, Oryza sativa
  Clone ID: PAT_MRT4530_75215C.1
cttattctatatgaatactatagattctattaatacgtagattgaaataatacatagattgaaagattatacatataagtaggataagacagattgaataaagaaaaaagaatgggtgattcgaatactaaacaaaaagagatagggatctattcttcgttttttccaaataagccaagctgcccattgcatattggcacttatcgagtatagaatagatctgcttctctttcttcttacgaacagaattggcttcttatttttaatggaatgaaataaatattcacgctttctgacacagaatcccctagaagggttaggtacataggatatggatagtctttgccaatgcgataaaataaagtgacatcgtgtctatttttctttgctaaaggggtatttccatgggtttgccttggtatcgtgttcatactgccgattgatgatccggga

SEQ ID NO: 75096 - DNA, 381 bp, Oryza sativa
  Clone ID: PAT_MRT4530_75216C.1
atgatgttttttttctcttttgatattgttgaggagctgatgcaagatgaggatgatcatgatgctgctgctaatgagaatactgcaagcctgcaagcaacgaaaacaggcatccccagctccgagttcgtccaccacgcaaccgtcgaaagtcaactcgcaagatgtcgtccccaagatcccaacgccaacatcgttctatacaatccaacagaactcgcctgcacgattctgagagaggttgaacaccagagtgtaaatcggctcccgtgcagccccgactccgatggttgccgcgtggacaaccttaggatcgaacgtctcgctgtgcatagctccaagcgcagcgcaaacaggacggaggaatcgcgactcgcttga

SEQ ID NO: 75097 - DNA, 344 bp, Oryza sativa
  unsure (1)..(344): unsure at all n locations
  Clone ID: PAT_MRT4530_75217C.1
atggagctgctatcttattcctgcggcccccttgcgtcctcgccacttcacttcctctccacgagcaagaggagcaagaagaacgaggtcagtgtgacctgccggctgtcgaagaattgcggcgccatggatgcgggtgcaactgcaaggtcgtcgtcgtcgtcggcgatgatgatgaaccagaagaagcccttgctctcggatggcgagctggtggagctcctgtggcaggacgggggcgtnnnnnnncncncncanacnnnnccccnnncnnnccncnccctccccccgaacgccncctcctgcgacgacgagacggctcgcccactgctcgctggcacgct

SEQ ID NO: 75098 - DNA, 331 bp, Oryza sativa
  Clone ID: PAT_MRT4530_75218C.1
acacgcgttctcttcattcaggagggtgcactttctgagctgattgtttgcggctggggtgaaggaccagcgggagaatacgtgcattataatatgacagataatgcctcagaaatttggaacatcgtctcacaaggtggttgcatatttgtgtgctgtgatgccaatggtttggtaagagacgtacatatagctttttatacaattgtttaagagcatgtatctttggatagcctctaaatctttagctatttttagagccttcatatggacgtcaggttaccttcttgacgtatttttactccattttattcattatattttgttcgtt

SEQ ID NO: 75099 - DNA, 557 bp, Oryza sativa
  Clone ID: PAT_MRT4530_75219C.1
aggaattcggcacgagggctcgtcgctgacctccgccgccacttcgacgctcttcccaacagctatgcacaggctggatttgacatgaaagatgtgctcttgcatgcccgtcttgtagagcaggcagctggtgaggatcagcctgcagtgagtattgaggaagttcctggaagcaatggcagaggaggtgccaatgaaggaactgtttttcagctcacttttgcctgcagtgcaccactttcatggcagtcaatgtcaggctcacttgatagtccttcattttgctgcaagaggatccagatcttcgagaagagaggattgacgcttggtgttgtaatgatactcgtgcagcctgggaatgaggtgttcttcaagaaccgggtcgacgcagcactgaaatcagcaataaagaagcagcggaagaacagcggcggtgttaagctcccatttgggctctgtggttgtcaagaagaaggttcaagaaactttgatgaggaatctatgtttgatccagatgatggtcaggttcttgacaatgagccaacttgcaagccaca

SEQ ID NO: 75100 - DNA, 156 bp, Oryza sativa
  Clone ID: PAT_MRT4530_7521C.1
atggaggagagggtgaccaggctcgatcggctcctcgtcatggccgtcggaaccgctgcggcgctcgcgggctgctacgcgaagggcagcggtgtcagagacggtgaacagaccattctattgacctgcacattaatcggcttctattggctatga

SEQ ID NO: 75101 - DNA, 382 bp, Oryza sativa
  Clone ID: PAT_MRT4530_75220C.1
attgtgggtggttttttttttctttttttggttttgtttttttttttttttttgttttttaagttagaaaattttttttggggcttggggctgaccggattttccaggtcttgtatcagggacgctgttcacctttcttgagacatggaccacatcatgcggaatgggggtaacagtcttcatcgtagcagcgtgaaccttggaaccggtttcggttccctccggctgtctctgggggctgataacctgaccacgggccttggcatgagccttgacctaatctaatttgattttcctcacgcggcgctcctctttgcacatggatgactggacagtgctaatacggaaatggatcctcaccctgcggggcgggttccgacct

SEQ ID NO: 75102 - DNA, 372 bp, Oryza sativa
  Clone ID: PAT_MRT4530_75221C.1
atggccagtggcggcaccgtctgctccatgtgcggcgacgtggggttcccggacaagctcttccgctgcgcccgctgccgccgccgcttccagcactcctactgcaccaactactacggcgacggggcaccggtggaggcgggcgccggcgtgtgcgactggtgcctcagcgacgccgccgtcgtcgccgggaagaaggggccatcgtcggaagggaacgaggagccgttctccagggagtaccgtggcaggagcaagcaggcggcgtcgaccggcggaggcgagcaggagggcggcggcggcggcggccggagggtctccaaggccggcgctgtccgtaggtacaagcttctcaaggacgtcttgtgctaa

SEQ ID NO: 75103 - DNA, 273 bp, Oryza sativa
  Clone ID: PAT_MRT4530_75222C.1
atgatggggccggcgtgctatggctttggctgcaaggcgaagtgctggagtgcaatgcttggggataaagctcaccatgacatcgatggagcccgcctgcagccgtcgagcatgagcgatgccactcaggagagtagtcgctatcctaggaagggcccttctcctccttccgaagcttcaccaggttctgatgagctctgttgccgcccatctacacgggaagtcggcaatgtgatctctagcccaatagctccttcgttccctctgccttga

SEQ ID NO: 75104 - DNA, 837 bp, Oryza sativa
  Clone ID: PAT_MRT4530_75223C.1
ggttccagatagacagaagattttccactcatgtttggaaaactaggtaaatactgtatatctctacggggacaaggataagatgttatagttggcaaagacctgaaaactgcaaacccaaacatacaaatgttacattccgaatctaatcaacaacactaaaacaacaacgctaatatcctgtgcgacgacatcatcaatgaagttatacgcttccaagctgctgcgcaattatattccttgtatgataatagcacctgcgaatgttctgcctctttcactcataaatcaactccttttgtttttgttaactgtacaccggtaacagaaacacgatcatgtgacgagatcatcaacctcagaattgaatacaaaactgggaaatgtggttgttatgtccttgaggtacggaagagtcattatcttcaataaagagggattccttgagacaaaattctcccactctgttctatctattctcccatcctgattagtatcagcatctgaaaacgtcttgtcaaggattgtctcaataatctcatcagataatctcatttctgattcacctagaagagcaatcaacatctgttttacctcctttcgttcaataaacccagtgttgtccatatcatatagcttgaaggaaaaatcaattttctcttccattgggatgtttggatgagatacatttaaagctcgaacaaagtcaccaaagtcgatgaccccccttttcttcgcatcaaaaaggtcagatatccgattagcgaaaagattttccttcctttggtttttaaacaatgcaagttgcaactcttccttattcatgagcccatcaaa

SEQ ID NO: 75105 - DNA, 3852 bp, Oryza sativa
  Clone ID: PAT_MRT4530_75224C.1
tggttatatccctccccttgtctcctgcacacctgggtttgcacgccgccatcatggacgagacgaccaccgctctgcaagaagcagacgctcattaagctataggaggaggaggaggaggaaataccaagagcgatgtcgacggggccggggaagaaggcgatccggaacgccggcggtgtcggcggcggcgccgggccgtcggcgggcgggccgcgcgggccggcggggcaggcggtgaagttcgcgcggcggacgtcgagcgggcggtacgtgagcctgtcgcgggaggacatcgacatggagggcgagctggcggcggactacaccaactacacggtgcagatcccgccgacgcccgacaaccagccgatgctgaacggcgcggagccggcgtcggtggcgatgaaggccgaggagcagtacgtgtccaactccctcttcaccggcggcttcaacagcgccacccgcgcccacctcatggacaaggtcatcgagtcgtcggtctcccacccgcagatggccggcgccaaggggtcgcgctgcgccatgcccgcctgcgacggcagcgccatgcgcaacgagcgcggcgaggacgtcgacccctgcgagtgccacttcaagatctgccgcgactgctacctcgacgcccagaaggacggctgcatctgccccggatgcaaggagcactacaagatcggcgagtacgccgacgatgacccgcacgacggcaagctccacctgccgggccccggcggcggcggcaacaagtcgctgctggcgcgcaaccagaacggcgagttcgaccacaaccggtggctcttcgagagctccggcacctacggctacggcaacgcgttctggcccaagggcggcatgtacgacgacgacctggacgacgacgtcgacaagcttggcggcgacggcggcggcggcggcggcggcgggccgctccccgagcagaagccgttcaagccgctgacgcgcaagatcccgatgccgacgtcggtgatcagcccgtaccggatcttcatcgtgatccggatgttcgtgctcctcttctacctcacgtggcgcatccgcaacccaaacatggaggcgctctggctgtgggggatgtccatcgtctgcgagctctggttcgccttctcatggctgctcgacatgctccccaaggtgaacccggtcaaccggagcaccgacctagccgtgctcaaggagaagttcgagacgccgtcgccgtccaacccgcacggccgctccgacctcccgggcctcgacgtgttcgtctccaccgccgacccggagaaggagccggtgctcaccacggcgaccaccatcctctccatcctcgccgtggactaccccgtcgagaagctcgcctgctacgtgtccgacgacggcggcgcgctgctcacctttgaggccatggcggaggcggcgagcttcgccaacgtgtgggtgcccttctgcaagaagcacgacatcgagccccgcaacccggacagctacttcagcgtcaagggcgacccgacgaagggcaagcggcgcaacgacttcgtcaaggaccggcgcagggtgaagcgcgagttcgacgagttcaaggtgcgcatcaatggcctcccggactccatccggcggcgctccgacgcgttcaacgcgcgcgaggacatgaagatgctcaagcacctccgcgagacgggtgccgacccgtcggagcagcccaaggtgaagaaggcgacgtggatggcggacggctcgcactggccggggacatgggcggcgtcggcgcccgaccacgccaagggcaaccacgccgggatcctccaggtgatgctcaagccgccgtcgcccgacccgctctacgggatgcacgacgacgaccagatgatcgacttcagcgacgtcgacatccgcctcccgatgctcgtctacatgtcgcgggagaagcgcccgggctacgaccacaacaagaaggccggcgccatgaacgcgctcgtccgatgctccgccgtcatgtcgaacggccccttcatgctcaacttcgactgcgaccactacatcaacaacgcgcaggcggtgcgcgaggccatgtgcttcttcatggaccgcggcggcgagcgcatcgcctacatccagttcccgcagcgcttcgaggggatcgacccctccgaccgctacgccaacaacaacaccgtcttcttcgatggcaacatgcgcgcgctcgacggcctccagggccccatgtacgtcggcacgggctgcatgttccgccgcttcgccgtctacggcttcgacccgccgcgcaccgccgagtacacggggtggctcttcaccaagaagaaggtgaccacgttcaaggacccggagtcggacacccagacgctcaaggcggaggacttcgacgccgagctcacgtcgcacctcgtcccgcgccggttcggcaactcgtcgccgttcatggcgtcgatccccgtcgccgagttccaggcgcggcccctcgccgaccacccggcggtgctgcacggcaggccgtccggcgcgctcaccgtgccgcggccgccgctggacccgccgacggtggcggaggccgtgtcggtgatctcgtgctggtacgaggacaagacggagtggggcgaccgcgtggggtggatctacggctccgtcaccgaggacgtggtgaccggctaccggatgcacaaccgcgggtggcgctccgtctactgcatcaccaagcgcgacgcgttcctgggcacggcgccgatcaacctcaccgacaggctccaccaggtgctccggtgggcgacgggctccgtcgagatcttcttctcccggaacaacgcgttcctggcgtcgcgcaagctcatgctgctgcagcggatctcctacctcaacgtcggcatctaccccttcacctccatcttcctcctcgtctactgcttcatcccggcgctctccctcttctccggcttcttcatcgtccagaagctcgacatcgccttcctttgctacctcctcaccatgaccatcaccctcgtcgccctcggcatcacccggccgccgtgctgcagggcctactcaaggtgatcgccggcgtggacatctccttcacgctgacctccaagccggggaacggcggcggcgatggcggggtcggcggcgaggggaacgacgacgaggcgttcgcggacctgtacgaggtgaggtggagctacctgatggtgccgccggtgacgatcatgatggtgaacgcggtggcgatcgcggtggcggcggcgaggacgctgtacagcgagttcccgcagtggagcaagctgctcggcggcgccttcttcagcttctgggtgctgtgccacctctacccgttcgccaagggcctcctcggccgccgcggccagacgcccaccatcgtcttcgtctggtcgggcctcctctcaatcaccgtctccctgctctgggtcgccatcagcccgccggaggccaactccaacggcggcgcgcgcggcggcggcttccagttcccttgaccgaagaagaagaagaagaagaaagaagttatttatcagtagtgtagtggtgtccacgttcagtttcttgaagctctgaactttctgaagctcacatgaaggagtgcttgcttcatggggcgtgttgtcaaattcagttcagtaaaagtacttttaccgaagtattaggtgtgattaagcgattgtttgtgtatcaattaagttcacttgtgattaattgatactgattatgtatccaaatattggagacatgtcataaaaaaaaaaaggggggggggaaaaaaaaaaaaaaaggggggggcctcgtgccgattcctgcagcccg

SEQ ID NO: 75106 - DNA, 3183 bp, Oryza sativa
  Clone ID: PAT_MRT4530_75225C.1
ctatgggaagctgaatccgccgccgccgatgcgctcccgggcgccggcgggcgggttgatgtagacccagaggagggagatgatcatggagatgaggcccgaccagacgaagacgatggtgggcacgcggccgcggcggccgaggaggcccttggcgaacgggtagaggtggcacagcacccagaagctgaagaaggcgccgccgagcagcttgctccactgcgggaactcgctgtacagcgtcctcgccgccgccaccgcgatcgccaccgcgttcaccatcatgatcgtcaccggcggcaccatcaggtagctccacctcacctcgtacagctccgcgaacgcctcgtcgtcgttcccctcgccgccgaccccgccatcgccgccgccgttccccggcttggaggtcagcgtgaaggagatgtccacgccggcgatcaccttgagtaggccctgcagcacggcggccgggtgcgcgctggtgccgccgatcacccagaactgctcgttgcgccaccactcgtggagcgtgatcccggaccacttgatctcgagcagggcgaggaggcagagggtgagggtgatgacgaggaggaaggcgaggaaggtggcgctgagtcgctgcacgatgaacttgccggagaagagggagacggccgggaggaggcagtaggcgaggaggaacacggaggtgaaggggtacatcccggcgttgaagtaggcgacgcgctgcagcagcttcatccgcggcgaggcgaagagggcgttgttgcgggagaagaagatctcgacggagcccgtcgcccaccggagcacctggtggaggcggtcggtgaggttgatcggcgccgtgccgcggaacgcgtcgcgccgcggcgtcacgcagtagacggagcgccacccgcggttgtgcatccggtagccggtgaccacgtcctcggtgacggagccgtagatccacccgatgcgccgcccccactccgtcttctcctcgtagaagcaggagatcacgccgatggcctccgccaccgtcgccgcgtcgagcggctcgcgcggcacagcgagcgcgcccgcagggcggccgtggtggcacccgggggtgtcctgcagcagccgaccctggtactccgccacgggtatcgacgccacgaacgtcgccgacccgccgaaccgcttcggtagcatagccgaggcctcaatgtcggcgccgccgtcgtcgtcctcgatcggcggcagcatcatctcggtgtcgtcctcggccctgtccgtcttcttgcccatgctcttcttcttggtgaggaacagcttgacccacgcgcgggcgagccagccatggtgctcggtggcgcggggcgggctgaagccgtacagcgcggtgcggcggaagacgcagccggtgccgacgtacatggggccctgaagcccgtccatggcgcgcatggacacgtcgaagaagacgaggttgtggttggcgtaccggtcgctggggtcgacgccctcgaaccgctgcgggaactggacgaagcacacgcggtcgccgccgcggtcgagcatgaagcacatcccctcccggagcgccgacgagttgtgcacgtagtggtcgcagtcgaggttgaggatgaagggcccgttcgacatgatggcgctcgtccgcaccagcgcgttcatggcgccggccttcttgttgtgatcgtagcccgggcgcttctcccgcgacacgtacaccagcatcgggaggcggacgtccacgcccgtggtgtcgatcagcccgccgcactccgccgcctcgcctcccatcaccggctccgaggtcggcggcgccagcatcgcctggatgatcccggcgtggtcgccgcgggcgtggtccgccgcggggcacgtccacgtccccggccagtgcgagccgtccgacatccacgtggccttcacggcggcggtctcgaccgccgccgctccaagctcgccgttgccggcggcagccgcggcggcggcctcctcctgctgccgcctcctggcgcgcagttcctcgccggcgttgtacgcgtcggagcgccgccggatcgcctcggggagcgagttcacccgcaccttgaactcgtcgtactcgcgcttcaccttccgcctctcgcggacgaagtcgacgcgcaccttgttcttgaggaagtccctcttctggccgaaatacgcctcggggcaccgcggctcgacgccgtgcttgcggcagaatggcacccacgtgcgcgcgaagctggccgtctcggcgagcgcctcgaacgacagcagcgcgccgccgtcgtcggagaggtagcaagcgagcttctcgacggggtagtccgcggcgaggatggagaggatggtgttggcggtgaccagcggcggctccttctccgggtcggcgctggtgacgaacacgtcgatcccggggaggtcggagcggcccttggggttgcgcgccgtcggcgactcgaaccgctcggcgaggacggcgaggtcggcggcgcggtggacggggcagagcttggggaggctgtcgagcagccatgagaaggcgaaccacacctcgcacgccaccgacatcgcccacagccacaccgcctccggattcggatgccgaatcctccacgcgaggaagaaccccagcgccaccagccgaatcgcaatcaacaacctgtaggggctgagaatggcttgggagacgctggtttttctggtgagggggcggcggcagcgggcaccgaagttggggggctcgtcggcggcgacgaagccggcgccgctatgggcgtggccgtccttgggccagagagcgttgccgtagccataggtgcccttggtctcgaagagccagcgggcgtggtcgaactcggccggcttgccgttgccgttggcggcggcgccggggaccttcatggagtgcaccacggaaaatttcctcgccatggatgtcagcggcagctggtccctctcctcggaggaggagacggcctcgtcgtcgtcgtcgtcggtgacggagtcggattcgtcggtgtcggagcccgcggagaaggcctccttgcaaccggggcagttgcccgcggcgcactccgcgtagcactccttgcagatcatgaacccgcagtcgcacggcgggcggccgccgttgaggaacgcgggcatgtcgcacccgcgcatcttgcacgacat

SEQ ID NO: 75107 - DNA, 111 bp, Oryza sativa
  Clone ID: PAT_MRT4530_75226C.1
atggccggtgacttctacatcacgagaggcccgttgaactcgctgaaaatcccgagcttgtgggtagtcgaagcaaaagcacaaacggcaccgggagctccgtggaacaac

SEQ ID NO: 75108 - DNA, 1227 bp, Oryza sativa
  Clone ID: PAT_MRT4530_75227C.1
atggtgagagaacctcaggatcttcggctaggggagcgggacctccttgaagagatgtcgatgaacgaagaggttgaagatggcgaagtcaagccgctgggtagggtcgaatccatggacgaaactcctggagaggtggccaagctccggtgtcgacacggggctcggggagcggcggtggtggccagcgcgtggagagggagcaacaccggttcgtttgttcttgttcgatcctacattaccatcaccttccgcggcttccgtcctccccgtcttgctcgcctaatccgaagcccaagttctccttgctcgaaaacttgccgcctcatcacgccggagagtatcatcgccaccatctcccaccgcagcaccatgaacgggatcgagctctcatcggaggacaaggctatcctcgtggagacgctcaagaacaagctgcaggcgttggcggagcaacatgttgacgtgctcgagagcctggcaccctcggtcaggaagcgcgtcgatgtgctcatggagattcagagccaacatgatgaactagaagtgaagttcttcgaggaaaaagctgctctagaagctaaatatcagaagctttatggaccattgtactcaaaggaaaagggtgttccagatttctggctcaatgcaatgaagaacaatgagattcttgctgaggagatccatgagagcgatgaggaagctctaaagtaccttaaggacatcaaatggtgtagaattgatgatccaaagggttttaagttcgaattcttcttctatacaaatcccttctttaaaaatcaagtgctgactaaaacataccacatgatcgatgaagatgatgaacccatcctagagaaagcaattgggactgaaatcgaatggcatccaggatattgtttgacacaagaggtgctaacaaaggagagttcagagagcactaaacctataacaaagactgaagaatgtgagagcttctttaatttctttagcccccctcaagttccagatgatgatgcaaaaatagatgaaaataccgctgaagaattgcagaaccaaatggaacgagattatgacatcgcatctactctcagggataagattataccacacgctgtttcttggtttactagagaggctgttcaagacgaggattatggagcttcttgggtggatgatgaagaagaggatgacaataatgatgaatatagtgatgaagaagcataa

SEQ ID NO: 75109 - DNA, 1301 bp, Oryza sativa
  Clone ID: PAT_MRT4530_75228C.1
agttactgatggctccaaaaaggaaagtgaatgagtcaattgtggctaatctacctattcctgatccatcaatgccaattaaaatccctggagactctaagattgaaattcaaaaccgaagcagaaacttgacagtttatgccagcaaagttgttgatagtgtggcatataatgctatgttgtcatatccggaaggtcaacaagagaaatgtgtagcagtgtgtagaagattggaacatgctcatgcactttttgacatccttgcaagttgctcccacagcaacatcattgaacctattggaatttgggaagaaaaggggacgaagctggcatatattgtttttccatgctttgatggaccactgagtttaattccaacagaagaaatatttgatgtggaggatgccacgaatgacaaatcttatacatttggcttcactgaccaaggatgcaaaatttttgtagaaatgtttatggccgtcaaatatgtcaatgacctatatgatgatgaacaaatacctttgaaggcattgaattttgatgaaagtaaaatattttaccagttgaacgctcagcgggactaccgtgtcctgttaactgacttcaagttggagatttcaccaaccggtaatgcgagaaataaccggaaaggcaagggtaaagcttctagcacagtaccaactgttgatgagctaaaggttgcaaattggaatggtttggggcagcttcttcaaaagctccataaaaaccttggacttcacgcagaactaaaccattttgctgaacttcttgggaaaaaaacagtaaagtatgaagatctggtgtgggaagctggattatgggaacataacagcaaagtgcaatttatcagggagatatattggcactataacaacgatgaggcaaaaatatcccagcttaagcttagagcatctcttggtctcaaaagctgcattgacaagttggaggtgaacaaatcaagagagccaaacaaagaaatcaatgacaaaagcttgtataactccttattcttcctcagagtttacatggttgcacaccgagacgatttaatcaaaggatacagtggagcaaaggaaacagtggaggacaggaaagccgttgtgaggctgctgatgaaagagtgccctacatatatggtgaaactcattgcagaaatacgtcatttaggctggattaaggaatcaccatttttgcggactgctcttaggaaaagtgctgatgaaggaaactttggtacaaatgacatttcgtttttaacatggtctggaaagttgcactaa

SEQ ID NO: 75110 - DNA, 561 bp, Oryza sativa
  Clone ID: PAT_MRT4530_75229C.1
atgaacgggatcgagctctcatcaggggacaaggctaaactcgtggagacgctcaagaacaagctgcaggcattggcggagcaacatgttgacatgctcgagagcctggcgcccgcggtcaggaagcgcgtcgatgtgctcatggagattcagcgttctaaaattgtgagtggtgttcttgaagtagagggcgagaccgaagaaagagaggaaaagggtgttccagatttctggctcaatgcaatgaagaagaatgagattcttgctgaggaggtgctaacaaaggagagttcagagagcactaaacctataacaaagactgaagaatgtgagagcttctttaacttcttcagcccccctcaagttccagatgatgacgcaaaaaatgacgaatatacccttgcccatgttgccagatctactcttagggacaagattataccacacgctgtttcttggttcactagagaggctgttcaagacgaggattatggggcttcttgggtggatgatgaagaagaggatgacgacgatgatgaatatagtgatgaagaagcataa

SEQ ID NO: 75111 - DNA, 899 bp, Oryza sativa
  Clone ID: PAT_MRT4530_7522C.1
atttatcatttttttttttttttcccttttaaaaatatcattatatttatctctgaattatatcaaacttcaaaaaaatggggaaaaaatcaaaacgactagagagtacagcatacactgacacggctacatgattacattcatcgatataaggcgggccttttttttttttttcaaaaacacatgaaaacgaaagccctttcattgaacagaactacatcaagcatgttaattttacatctgacactttttattccagcacacgcatgtgcacacagcatacacgcgtgcgtacgaacacaagctaacacgatcagcggccgggctgggaccagatcactcgctacactgaaaaaaaacacactagcgatccagatcgatcaagcccgcccatgtccatctaccccaaatctagatgtacgatttgtcggacgccgcgtacgtgccggtgccggtgccggtgccggcggccgggtatgcagggtcgacggcggggccgccgaccggagcgtggtggtggcggttgccgccggccgtaagcggcacgcgcgtgccgtggcggcccgtggtggcgttggcgcggtgctccgccctctcctggtgctcgtcggccttggcctgtgccttgccggccttctcctcctgcttggccatctccttctcgccgtgcgtggccgccgtcgcctggccggccttgccgtgcgccttggccgtcccctccttcaccttctccttggcaccgctcaccatgtcctgcaccttcaccttcgccgtctgcatcttttcttttcttttgctcctacagtacagtagctacgtgcgttgcgtatcagtgtgagcctgtggattgagattcgttgcttgcgttttgtgcttcgacccggccggcccggcggacg

SEQ ID NO: 75112 - DNA, 906 bp, Oryza sativa
  Clone ID: PAT_MRT4530_75230C.1
atgagcaatcccgagctcttgtcagaggaaaaggccatcctcgtggagacgctgaagaacaagctgcaggcgttggcggagcaacatgttgacgtgctcgaaagcctggcgcccgtggtcaggaagcgcgtcgatgtgctcatagagattcagagccaacatgatgaactagaagcgaagttcttggaggaaaaagctgctctagaagctaattatcagaagctttatggaccattgtactcaaagcgttctgaaattgtgagtggtgttcttgaagtagagggcgagactgaagaaagagaggaaaagggtgttccagatttctggctcaaagcaatgaagaacaatgagattcttgctgaggagatccatgagagcgatgaggaagctctgaagtaccttaaggacatcaaatggtgcagaattgatgatccaaagggttttaagttcgaattctttttcgatacaaatcccttctttaaaaatcaagtgctgactaaaacataccacatgattgatgaagatgatgaacccatcctagagaaagcaattgggactgaaatcgaatggcatccaggaaattgtttgacacaggaggtgctaacaaaagagagttcagagagcactaaacctataacaaagactgaagaatatgagagcttctttaacttcttcagcccccctcaagttccagaggatgatgcaaaaattgacgaaaataccgctgaagaattgcagaaccaaatggaacgagattatgacattgcatctactctcagggacaagattataccacatgttgtttcttggttcactggagaggctgttcaagacgaggattatggtgcttcttgggtggatgatgaagaggatgatgacgatgaatatagtgatgaagaagcatag

SEQ ID NO: 75113 - DNA, 223 bp, Oryza sativa
  Clone ID: PAT_MRT4530_75231C.1
atggcttcgaggggaaagaagtgggcatggtggcataggggcggcgacagtggcatgagctcggctcacactttccgcgaggacgcggctagggcgaggtgtcgtgcggctacagtttgggcggcatcggagtggggccagcgtgatgatgccagccacatcagccaacatgagtggtgtactggaaggcgagaaagtcgttttttggggccggcaagtggag

SEQ ID NO: 75114 - DNA, 228 bp, Oryza sativa
  Clone ID: PAT_MRT4530_75232C.1
acgatttatatttgactgtaaggataggaagaagatcaagaaccgtttccgtctccgttaggttatttatttatatatctactcgaactgattcctaggaggagcgaatcgaacaagggcaagatgcattttacaaatctgctgctgtaggagcccatcatgatggctatcatcctggtgccatccaagctcagattcttcctggtgatgactaagatcgtggggacg

SEQ ID NO: 75115 - DNA, 336 bp, Oryza sativa
  Clone ID: PAT_MRT4530_75233C.1
atggttgttgttgaggtgctccttgaggttgttgtgacatgggctcgaattgattgtattgaggaacaaactggggttgagacgatgcttcctgctgatattgaacttgcggtgatggaggctgatactgataattcaaattgcccccctggtaattttgaaaatctggctgaatattgcgcaccaaatgctcgggaacaacttgaggtatcaccgtttgatctggttgtacctgatgaaccaagtgctctgggacaacttgatttgcagcatgctgcccaagctgactaccaggagccgatactggcgccgtcggctgagccgatggtgcattaa

SEQ ID NO: 75116 - DNA, 1347 bp, Oryza sativa
  unsure (1)..(1347): unsure at all n locations
  Clone ID: PAT_MRT4530_75234C.1
gttcttcgtcccggacaagagaaaacaacgatctcactcaatcatcggcgtgagggataaagacgatggcttttactctaacaatccctagattttctgcaatttctcgcaaacccatcacttgttcttcttcgaggacacagtgtcctgctccctttacccatggacgatcgatttctctcagacgaagacttaccttattgccccttaaagcttctactgatcaatcaggtcaggtgggtggggaagaagttgatagcaagattttaccttattgtagcatcaacaagaatgagaagagaactatcggtgaaatggaacaagagttcctccaagcgatgcaatcgttttattacgaaggcaaagcgattatgtctaatgaagagtttgataaccttaaagaagagttgatgtgggaaggaagcagtgttgtcatgctaagttctgatgaacaaagattccttgaagcttcaatggcttatgtctctggaaatccaatcttgagtgatgaagagtatgataagctcaaaatgaaactaaagatggacggcagtgagattgtgtgtgagggtccaagatgcagtcttcgtagtaaaaaggtttatagtgatcttgccattgattacttcaaaatgttcttgttgaatgtaccagcaactgttgttgctctcggactatttttctttcttgatgacattactgngtttgaaatcacgtacctgctcgagcttccggaaccattcagtttcattttcacatggttcgctgcggtgcctgcaattgtatatctggcgttatcactcaccaaactgatcctcaaagacttcttgatcttgaagggcccttgcccaaactgtggaacagagaatgtatctttctttggaacgatactatccatccccaatgatagtaacaccaacaatgtcaaatgctcaggctgtggaacggagatggtctatgactcaggttctcgtttgatcacattaccagaaggagggaaagcttaaatctaagagccaagggttatgtagaagtgtatgtaaaattaatactaacaaatgaagaaggtggagaaattgaagaagaaggagaaaaaccaaagtttgtatgctgttttgtataatcttcagatcttttcatgtagctctcattggcttgtgttgtgtttgtaagtaagtgtgaggcccctccaccaaaaacatcatatgattacttctttgagaaactttgctctcattaggaaagtaaaataattcaagaaataagcacaaccttgtgtagttttgaaataatacttgtattttttttgttgttataattttgaatgtgttccataaaaaaaaaaga

SEQ ID NO: 75117 - DNA, 940 bp, Oryza sativa
  Clone ID: PAT_MRT4530_75235C.1
gaaatccggcctgcctcgtcttcctccgctggggcggcgtgggtgagagagatcggaggagatcccgtggcctcctcgatgaggtcgccgacgccggccaggctggccctggccctcgtggccgccctcgccgcggcggcgctgctcggcggggcggcggcggcggcggcgacggaggaggcctacgtcacgctgctgtacggggacgagttcgtcctcggcgtgcgcgtcctgggcaagtccatccgcgacacgggcacgcgccgggacctggtcgtgctcgtctccgacggcgtctccgactactcgcggaagctcctccaggcagatggttggattgtgagtcatataacgttactggccaatcctaatcaagtgaggccaaagagattttggggcgtctacaccaagccggcgcgaggccacatgacaagctatagaaaagtcgtttatctcgatgctgatactgtggtcgtgaggagtattgaggatcttttccacgtgtgggaagttctgtggcaacctgaagcattctgaaagaatgaattctggagtgatggttgtagaaccatctgaaactgttttcaaggatatgatgcgccaaatagacactttgccttcttacacgggaggtgaccaaggctttctgaattcatattatgctgatttcgccaactcacatgtttatgagccagaaaagccttatacacctgaacctgagactcagcgcctttctaccttatataatgctgatgttggactttacatgctagccaacaagtggatggttgatgaaaaggaacttagagtcattcactacacgttgggtccccttaaaacctgggactggtggacagcttggcttgttaaacctgtgggagtgtggcaggatgttaggcaaacacttgaagagtctctcccaggaactggtggggggaga

SEQ ID NO: 75118 - DNA, 205 bp, Oryza sativa
  Clone ID: PAT_MRT4530_75236C.1
actaggcaaaccacccgaataccccattgattaatttcactgaaaatagcacgggtacatcacatcacacaaattcataccttgatacccccatagttgcccaaaccaccagtttttttattaatcgataacccccgggtttaattcagcaataatcagcacacccacaaaccacacttatatggggggtttttattttgggctg

SEQ ID NO: 75119 - DNA, 358 bp, Oryza sativa
  Clone ID: PAT_MRT4530_75237C.1
gaataccacgaactaagcttaaacgtagtgtttggcaagaccaactcctttacaaaggccaaggccaatctaaagtagtgaaattactaaagtttctccaatcctgattgtgccaggtcatcaattaaacacagaccgttggatacatataaggaaatcaatagctgccatcagatgcaaagtaaagttgagttgaaaaataaaatctggtcaatggtagaatcctccagattgtggcaaacggcctatgggccatggagccgaagcgtcgtgtacgtatataaagataaagagaaccacggagcaggtaagaggatacaaaaaagaaaaaaaatagcgcagaaaccatctcctcccg

SEQ ID NO: 75120 - DNA, 3196 bp, Oryza sativa
  unsure (1)..(3196): unsure at all n locations
  Clone ID: PAT_MRT4530_75238C.1
gactgaagtacacaatatccatctatttctatanagatattcaatctaattgtctcctaatcaaccactggctatcgtttttggggggtacgtttgactatggtgataaaatgattacgccgccgtgctgcttccagaacgcctccacctcctccctcgtctgcgacttgttcctcctcgcaagaactctgttctcatcgccaagaacgggtgaatcccatccagcctccagagaccccatcttttaatcccatactcccatataatttccccgaatttggatcgaccgacaaagttggtctgatttgttatccagtaggtactggaatggcaacaagagcatgcatactgatattttaagttagtacatactctgcatacatggagcaattaattaagtatagcatctctatgaactgaggtgacattgaacagactaattaattaataaacctaaagagagagagagagagagggctacaaatatttgtttgaacaagacatgctacatactctatacgattgatttgtgtagaaacattttttttccatgtattttgaggaacatgcacatatcaacatacatgtaatacgatgttgaattaagcaagcaaatttaagcatgcagagtgcactgcttagcacacactgcatgtgttgctagctagctagctccatctagttccctctcttctcatcatgattgacacttgataaaattaagcaagatttagctagctagctgagctgatctgatcaccatgcatgcatgcaagcaaggccaattcaatttcaagctcgccggccatacaccacacagcacatatacggtgggtaaaacaaaaacaaaaaggaaatcatacacaacattgattcattcatccattcttttgcacaaagccaaattaactttattaaaagttcaaaactgattgcaagtttggagcaatgaggtaatccggcatgcgtacttgagtcactagctcattcgctagtgctagctttgttgctatcaacttcattcaaacagagaccagctggcaacagggatacagtacatatatacatgcattctgctgttcatttgccttattaccatgcaccaatataatgcatcctcctctctagcttatcataagtactaattaactaattatcccagagcatggcaccaatataattgatccacttgagaccaagcatagtgtacacttgaacacatgcatgcattggcatgcacatagtacggcttggttcacaaacttaatcatcatactagcttccttggattaatatgatcatatcacatcccttgtaatttgcatgaattcttgcatgctcgatcattctgccttcttctgatcggtgtcgatagtagctagcccgattatattaatttattaattttatgaatactagatgttgatcttgccgatgagagggatgccgatggcggtgacgacgagggtggatgggagtccgaagatgacgtggttccagaaggtgaggtcgtaggcgttgcgcgtcgcccgcctcgcctgctcgcacacgatcaggttcgccgccgaccccagcagcgacaggttccccgccatcgtgctcacgcacggcagcagcagccacgaccgcgtctccgccgccggtgatatcgtcgccgccgccgccgccacctcatcccccatcaacaacacggtggggacgttggaggcgaggttggagaggaggaggatgatgacggagaggacggtgatgccggtgacgttgttgatctttgagtagggcgccatcacgtcccagatggcccccgggtagccccgtcttgttgaacccgctcaccgtgatgaacatccccgagaagaacaccagcagcgagtaggacacattgtccaggcacggctcggcgtcgcggaagtcgaccaccaccagcgccagcgccgtggtgatggccgtccacgacatgttgagccccaccatgtaggccaccaccatccccaccgtcaccacgtacgcgaagctcttgaggaacagcttccgccgcgcctccgtgcactgcatgaaccatcggtgcttcgtcgagatgttctccgacatcatcgacatcagcgtcgccgccgtcgtcgtcctccggcgatgcgggggtggcggcgtcgccgtcgtctttcttgttgttgttgagcgccgtgcggcggccctcctcgatggcctccatctgcttgccggcggcgacctcgtcggggctgcaggcgccgccgtcgagctccttccagtacatgcagagcagcatgagcatgttgatccccatgccggcgagcatggcggggaggatgccgaggaggaaggaaataaaggagatcttgctgttgaaggcgatgaccaggttctgcgggttgccgatgggggtcgcgctggagccgatgttggcgctggtggcgagcgcgagcaggaacggcttcgccgggaggttgcgctcggcggcgagctcgagcacgaactcggtgaggacgacgcagcaggtgtcgttggtgaagagcgcgctggcgagcgcggtgacgacgcagacgcggcacatgaggtcgcgcccgccctggctccgccacgccagcagccggcccaggtgcctgaacatgccggcgttcttgaggtagccgccgacgaccatggtggcgaagaggaggcccaggatggggaggtcgatggaggcgtaggcgtcgtcggcgctgatcacgtggaacacgatcatcagcaccgcgcccagcagcgcccccgccgtccgcccgatcggcaggaacggcaccgacgggaacaccgccagcatccagaacacaccgaacgccaccgaccccatcaccaccttcggcagcgacgccagcgccatggccgcctctctctctcactacaatgcagctagcgtcttggagtgggaggtggtggtcagcacgcgtgccgtccgcccgatcggcaggaacggcaccgacgggaacaccgccatcatccagaacaccgcgaacgcgatcgatccaagcgccaccttgggcgccgacgcaagctcactcatcttcttcctcttcgatcgaccaccacctagcaggtaattaagtgtctgatcgagctagcctgctcctctcagctagcttagctacttgagctgatgatctctctctggtacgcgcgcagtagctaagctgctagtgcatgc

SEQ ID NO: 75121 - DNA, 2226 bp, Oryza sativa
  Clone ID: PAT_MRT4530_75239C.1
gaacaagacatgctacatactctatacgattgatttttgtagaaacattttttttccatgtattttgaggaacatgcacatatcaacatacatgtaatacgatgttgaattaagcaagcaaatttaagcatgcagagtgcactgcttagcacacactgcatgtgttgctagctagctagctccatctagttccctctcttctcatcatgattgacacttgataaaattaagcaagatttagctagctagctgagctgatctgatcaccatgcatgcatgcaagcaaggccaattcaatttcaagctcgccggccatacaccacacagcacatatacggtgggtaaaacaaaaacaaaaaggaaatcatacacaacattgattcattcatccattctcttaattaattgacttgaggttgaggagcatatatatacgtgcgtggcatgcatgcatatatatggtacggtggtcgacgacgacgacgacgagcctagcaagcttggatgtttgtcgatctcataattaattaatttggatgggtcgatgagatgagatcagatcttgccgatgaggggtatgccgacggcggtgacgatgagggtggatgggacgccgaagacgatgtgctgccagaaggtgaggtcgtaggcgttcctgggcgccctcctcgcctgctcgcacactatcaggttcgccgccgaccccagcagcgacaggttccccgccaccgtgctcacccacgccagcagcagccacgacgtcgtcaccgccgccggcgatatcagcgccgccgccttcgccacctcatcacccataagaagcaccgttggtacgtttgatgcgaggttggagaggaggaggatgatgacggagaggacggagatgccgccgacgctgttgaccttggagtagggggccatgaagtcccagatggctcccgggaggcccgtcttgttgaagccgctgacggtgatgaacatcccggagaagaagacgagcagcgagtaggacacggtgtccaggcacggctcggcgtcgcggaagtcgaccaccaccagcgccagcgccgtggtgatggccgtccacgacatgttgagccccaccatgtaggccaccaccatccccaccgtcaccacgtacgcgaagctcttgaggaacagcttccgccgcgcctccgtgcactgcatgaaccatgggtgcttggtcgttatgttctccgacatctccagcgacatcatcgtgttgccgttgccgttcagctgcggcgtgctcttggccgacgccggcgacctgccttcctccaccgcctccatctgcttgccgtcgacgctgagctcggcccctccgcccagctccctccagtacatgcagagcagcatgaccatgttgacggccatcccgacgagcatggccgggaggattcccatgaggaacttggggaaggtgatcttgctattgaaggcgatgaccaggttctgggggttgccgatgggggtggcggcggagccgatgttggcgctggaggcgagggcgaggaggaagggcttggcggggaggttgcgctcggcggcgagctcgaggacgaactcggtgaggacgacgcagcaggtgtcgttggtgaagagggcgctggcgagggcggtgacgacgcagacgcggcacatgaggtcgcgcccgccctggctcttccacgccagcagacgccccaggtgcttgaacatcccggcgttccggaggtagctgcccaccaccatggtggcgaagaggaggcccaggattgggaggtcgatggaggcgtacgcgtcgtcggggctgatcacgtggaatatcaccatcagcaccgcgctcagcagcgaccccgccgtccgcccgatcggcaggaacggcaccgacgggaacaccgccatcatccagaacaccgcgaacgcgatcgatccaagcgccaccttgggcgccgacgcaagctcattgttcctcctcgcaagaactctgttctcttcgccaagatcgggtgaatcccatccagccatcagagaccccatcttttaattcgctactcagagataatttctctgaatttggatcgatcgacaaagttggtctgatttgttatccagaaagaactgaagatgaaatcaagctgaagctactagcttgtatgattagttatcaactttaatttgcagatgcaaattgtagcgaatggataaacaacggagagagaa

SEQ ID NO: 75122 - DNA, 439 bp, Oryza sativa
  Clone ID: PAT_MRT4530_7523C.1
gcagcaacagatcttagcccatgcggtgagttcgtaaggcaccagtgcagcacagtggcaaccccttcttccaatcacccgtgtttcaactgagaaactgccaagtcatgcagcacagtgctgccaacagctcaggatgatcgcgcaaacagtctcactgcaggccattacagtgttcaggcgattgcacagacagtacaacagttttggcgttattcgatcaggtcaagtcaagcccaagtatttgcctaaactccgtcaatatcggtattacccaagtacaacatgtccctgtagcattctaccgtcgtggtatctggtatgaattgtacagtatagtagtacaggagagaaaataaagtcagcatcatcgtgtgtgacaatgaaacatcgggtgacaaatcggaataaaatgtcagcaatttaaaaaaaaaaaaaa

SEQ ID NO: 75123 - DNA, 368 bp, Oryza sativa
  unsure (1)..(368): unsure at all n locations
  Clone ID: PAT_MRT4530_75240C.1
ccattccatcgcatccgcatacaaaccccaaccctagccgtctccgtgctagggccgccgccgccgccgcgcgccgcgancccgagcgtcgccgcatcgctcgcttcccacccactcccccgtcgaggctgctccggaggcggaagaggggagggaggaggagatcgaggtcgcggatttggggagggaaggcggcggagagaagaagatggaaggcccggacagcggggcgcgacggancagagcaggccgtcgaggacgaggggnataccactccagtaacttgatacggtccaggtgggcagtttcaccaaagtatanagtttgataaaanctttggtaaaggagatttttggcagtatatgttt

SEQ ID NO: 75124 - DNA, 276 bp, Oryza sativa
  Clone ID: PAT_MRT4530_75241C.1
tctctcgtcgccgcggcgcgtacgccacgcgtgcggagtaaatctcccgtcgcctccttccctgcgccaagaaagacgagccgcgggtcaacagcggagtggaggggcgctgatttccatcgccgaggagagcagagcaggggaggggaggggatccttgttagcgctttcggcgcgggactgatttctaaacgaattttgggtcgtgaagggaaggtcaaacatggcaggggctcttgccctcccagcattcttttgaggaccaggctcattttc

SEQ ID NO: 75125 - DNA, 690 bp, Oryza sativa
  Clone ID: PAT_MRT4530_75242C.1
ctatccacggacgacgggagaggatggaccggcgcctcctctctccctcccggccatccttcctcgccggccggcgagcgcgcgtcgagagggaaaaatgcggcggccgatgagtggggccgagacggtcgctggccgccgcccgctgcgcatctcttcctccgcaggggggcggagatggggcaggggggcggagacgggatggccccatggatagcccgagcgtggtgcgcccaacttcttcttgttggcggcctccgcctcaagcggatggaccatgccgaatccctcgaaagcgtacacagacacgccgatgctgtacaggatcgcgctcaggccaccgcaggcgaagacgagtggtggcttggtgagccagacggacatgtccttcctgagaatgacgcccacggcgccgaggtcaaccacatcggcgaatatgctgagtggcacgaggagcgtcagcgtcttgatggagttgagcctgagcttgagcaccagcatggtgtccacgacgagctcgcctcgttcaccaatcccatggcaagcaacccccaacgaaaaagcacgaatcaatcaaaattcagaaccaccaccaccccaagcgacgacatgccgatgctgattgactggatttcttctcctcttctccggacgcgactagcaagtacaaaaacgaatccggagatctag

SEQ ID NO: 75126 - DNA, 312 bp, Oryza sativa
  Clone ID: PAT_MRT4530_75243C.1
atgtggctgctgccacaggaggaggtggactggatccttgccgaatccaacgaacccgtctccaccgagttccatgagctcaagcgcgccagcccgtcgctggtgcccttgccggaggaggagaaggacgagggcggaggtggcggaggtgttcaggctgtacgacgaagcacgggaggaggcgtcccaacatatcagcccacgtcctccgatgtcgccgccgcgtcaccgtggccgcctcttcttcatcgtgctcgtagccagcctgcccacgagctcaaggagatcttcccgttcccgtcgccgccctga

SEQ ID NO: 75127 - DNA, 612 bp, Oryza sativa
  Clone ID: PAT_MRT4530_75244C.1
atgactgggttcctgcgtggaaagcgtctcgctcgcccgagcggatacgattgcgcggctgcgccccccgctaacgacaagcggcaatctctttggccgcggcaccccgtcaccgacgggtggtcccggctccggaacggcgtgaggagaatgggcggagatcagaagtacggccacgtcagaacaagcagagaaaggcccccaggtcactgcgtggtggatcccaccgtggcgccaccctattgggccctactcttcagcgtgacgtggatggggcgcgtaatatgtgtttcggcggtagtagtaggttctagattatttaaggcccctcggctgctatctctatctatctacacgacgcgagagaaaaaaaaaatctggctcccgagaagaaaacaaaagggtaaaaagagcagagcaaaagctctcttcagttctccacgcccaagggcagaagagagggagggagagaagggggggagacgaaggaagcacgaaaccctaatcccgaggcagcgcgcctctccgatcaactccggcgtgagtcctctaaccgctctccatccccgatcgctcgctcgctcgcgccgctcggtgcttcaatccggctag

SEQ ID NO: 75128 - DNA, 1887 bp, Oryza sativa
  Clone ID: PAT_MRT4530_75245C.1
accggggaaagaggttaatttggattgacagagattacatatgagaaagaaaactcggccatgcattttctataataaacacaatgactcggtgagattactttgacactaacactaatgaccgggtttgcagaaactacgtggacttaatacccactaattaaaaatctagctaaactaattgtttcatgacgagttcagtcaaaactgaaggacatgttgccttcagatgctcgaagccatcggtagccatggccgccttgaggttgcccggagaagacaagaactcgacgcaagcctccttgagcgcgcggcaatggtgctgctccgccagcgccagcgtcacggcgacgttgcccatggcgacgcggcggcgcagcctgtcctcgcagatcagcctcagcctctccatcccgtacgcgtccgccgcggcgagcagccgccgcgccatggcgtcgtcatcgtcgtcgtcgtcgggcagcgtgtcggtgtagatgaagtggagcagcgccctgaacgcgtcggcgtccatggcggcgagccgcagcgtcgccggcgacgacggcgaggcggagagcttggccttgagtacgggtgacctcgccgcgagcacccaccggtgcgcgtggaacgtcgtcgtctcgccgtcgccgccgtctagctcgatgacgacgtcggcgccttccttgctccagaggagctcagcgaggtgccggtgcaggtcggacggcggcacgacgacgccagcgtcggcgccggcggcgagagcctccgacgaggcgtcgtcggtgcggcgcgccggcgagccggcgtggtcgagcacgctgaaccgggcatggccggcgatgccgctccggccgcagccgccgccgccggcgacgtcgacgaagagggagatggagtcggcgcagccgtcgtcgaggccgttggggtagtatcgcatgacgaagctgtggccgccgacggcgaacctcctcgacgtggcggactcgccggtggcgaggatgctcttcgtgttggtgtacccgtcgatcctgaggatgtgggacccggtcgccggccgcgacacgatggcggaggcggacggcggcgaggcacggcagccggcgacgccgcggcggatggcggcggagagcagcgaagcacacgacatgagacgagagtttggaacgtacatcttctcttcattttctctgaagaaatgtggtgtcggatggttgggaagataatctttcaccatattttcttcattttctctgaagaaatgtggtgtcggatggttgggaagtagagcggttgcatctgcaatggcagcttccaacaccttcacctcttgaaccctagctccctcgcaattaatccatacattgagatccataagagaggtgaggttgcgaatgccaagatcaggatgatcagcgaatgcagattttgccttgtgtgctctaacaacaaccgagatttctctgaccttctgcatggatccatcctcgaagatcaggccgacgaacgatccatacagacggaagatcttcaggcatcggaatatgcatttgctgataatgagaatttccatgggatcatctgattctgaacgcagctccaggtctagcaatgcaggcaagtctccaaggatctggaggatttgctttgtcacttgcttagacctgatgcatagcctgtagagattattcattgaagccatccaatctgggatcctttggaaacagcatttcggaatgtataattcctgacagttcctgtagagattgcatttttccgactccgtcaggtaacttaactgaaatagatccaccacgttgttaagatcagagttttgcaatttcacactgctctctagatccaacactcttaaagctttgaatt

SEQ ID NO: 75129 - DNA, 151 bp, Oryza sativa
  Clone ID: PAT_MRT4530_75246C.1
atgggcgtgtacagcggacgcaatgcatccttcgtctccgcgaggagaagtatcgacgtgttccacggcgccgtgcctgcctctagcttctctacagctcatcagctctcatcatcatcagcagatcatctgctcagctcgagcgttgcaa

SEQ ID NO: 75130 - DNA, 334 bp, Oryza sativa
  Clone ID: PAT_MRT4530_75247C.1
ctcacgattaataaacttcgagatcaaatccaaataaaataggcgaataagagggtggggcgagcttgcaggcgcttgtccagcagcaacaagttaacaaccaaatttggtaacatcagtgtcaggaaagaagattggatcaaagcgaggtcggaagcggagatcgagttcggaaacagagcaggaatcggccggagtccagatcggctacggttaggatcggctaggtctgagtcaggctaaagataaatatgggcaaaagtctgccgcaaagacttatggtatcttagagtttgttagagataatagtcgtgtccggtatgggcatatcttg

SEQ ID NO: 75131 - DNA, 324 bp, Oryza sativa
  Clone ID: PAT_MRT4530_75248C.1
gatctaataacacacgaatcgggggctatatacatagatcaagatggactaagcacacagaaacctctgattacataaaatgcacataccttgggcacacatcatttgcatgcaaggcaaacactggaagggcccgcacacgcagaattcaatcgaggacacacagtacgcacgcacataaaaaccaccgatgaactttacggacgatcagacgcatacaacagttcgagccaagaacataggtggaaggtacatctgatgaaaatggacgctaactataggcgccactgagcctagagggggataactacgatctggaacgat

SEQ ID NO: 75132 - DNA, 443 bp, Oryza sativa
  Clone ID: PAT_MRT4530_75249C.1
accataaagttgctgcaggcatacacacataatacattagttaacacagagttggtcgccagcaagaatattgtaacatgcatgatctagctggatggaacttccagtcacgaaagtaaatcatctcagttttttcacagcgccaataagttagaacaagatgtgaaaaaaactgagcaaaagaaaaaaaatcgatgtagtagctaatttccaatgttacacatcagggcgcaggcagtgggttggccaccagttcggtcgttccgcaggaacatcatgaccgtccagtcagtgaagagcaagaaggaagaggaagctgacaagcagcagcagcagcccgctgccaatgccagcggcagcaacagctctgcctttgtgaaggtcagcatggacggggcaccctacctgcgcagggggacctgaagatgtcaacagctacagga

SEQ ID NO: 75133 - DNA, 171 bp, Oryza sativa
  Clone ID: PAT_MRT4530_7524C.1
atgggctcatggcactcaagtgagtcattaccacagtcactagatcatgatacaatactgtcgttcctgaacctgtcccagtttgctgtggccaggttcctcgccattcaggtggtgctggcatgtgtgaaggtgtgtggtggcacactgcaggggataatccagcagtag

SEQ ID NO: 75134 - DNA, 528 bp, Oryza sativa
  Clone ID: PAT_MRT4530_75250C.1
atgcggcggcagtccacgcggggaagaagcaccggctccggtggcggggaagaatcagaggctctggcggcggcagtccatgcggggaggatatccagcgaggatgcggcggcgcagcggcagaacatccggggaggaggaggagctagcgaggaggaggagaagcgaagtcttcgcgtgtggagcgatgtcttcgcgggtggaggaggaggagcgaaggcgagtagcatgatgaatgagatggctgtaacggaaggggagcagcagataacaaggaatgtggtgcggaagaaatggtcgcctcccgggctggagacgcaaaaaactggcggttggggatttatcttacgcaacagtgaaggccaagggctgcttgcgggtgctggacggctggcgttcgttcatgatgctgactctgcggaagctagggcttgccaggctgccttgcttgccgcttcggtgcagggcatcactgaggtggggatcgagactgattctcttatcctggtgtcggccttgaaatcctga

SEQ ID NO: 75135 - DNA, 483 bp, Oryza sativa
  Clone ID: PAT_MRT4530_75251C.1
cggacgcgtgggtcccatgagactacgggtgggacaccggggagctctctcgccgacccggagacgtctgccaagaaccgggagctggaggtgatccactccaggcgggcgatgctccgatgcgctgggctgcgggtgccacgagctccatcgccgcgaacggcgtcaagttcgcggaggcgtgttggttcaaggcaggaggacgatgatcttcagcgagggcggggtggactaccatcggcacgccgagcctgatccacgcggcagagcactgatccacatctggaccgggcacgtaggtgctgatcgccgccagcaaggagctcctcatgcacaaggcggcgcggtccacctaggtccacaagatcaatgttggcatgcggctgctgcaacccagatcaacgctgcaagagaagctgggaaatgagccctcatacagacagatggcgcattagctgaagatatcaccggccgagctacgat

SEQ ID NO: 75136 - DNA, 2129 bp, Oryza sativa
  Clone ID: PAT_MRT4530_75252C.1
atggcgttgtggtggccgctcctggtgctcgccgccgcctacgcgctctgccgcatcctcctctttctcatcccgcccaccgtcccctccatcgatgtcgacgcttccgacgctcatggctcatggggtttatgtgggatttactctaatggtatcggatcggatcgggttctattgtatgcagtgctcgaagacgccaaccagaacaaggaggatagctacatctacatttccaatgacataggatcgcacattgcgtctagctttcagataccaccaaggaaggggaaaggagctcagactgacaaggtccaatgctatgagccagcaactatgaaatacttgggatacttccctgcattgacgcctgatgaggttaaggagcatgttgcgcaagccaggaaagcacaaaagatatgggcaaaaagcagcttcaagcaaagacgccagtttcttcgaatccttctaaaatatatacttgaacatcaggatctgatatgcgagatatcatcccgggacactggaaagactatggttgatgcttcattaggtgagataatgaccacctgtgagaagattacctggcttttggatgagggtgagaagtggttaaaacctgaatacaggtcctgtgggagatcaatgcttcacaagaaagcaaaagttgagttctatccacttggagttattggtgcgattgtgtcttggaattaccccttccacaatgtattcaatccaatgctggctgcaatattctctggtaatgcagcagttataaagatcatgaacagagcatcggatacattaatacctgtaactcttgaacttggtggtaaagatgcatttattgtatgtgaagatgtagacttacccagtgttgttcaagttgctgtgagagctgccctgcaatctagcggacaaaactgtgctggtgctgaaagattttatgttcacaaggatatctattcaacatttgtttcccaagtggtgaagataatcaaatctatatctgtcggtcctccattatctggcagatacgatatgggtgctatctgtatgatagagcactctgagaaacttcagaatcttgttaatgatgctgttgacaaaggtgctgagattgctggcagagggagctttggccatctgggtgaagatgcagtagatcaattctttcctccaactgtcctggtgaatgttaatcacacaatgaaaattatgcaagaagaggcatttggacctattctgccaatcatgaaattcaattccgatgaagaagttgtcaaacttgccaatgactccaagtacggtcttggttgtgctgtcttttctggcaaccagaagcgtgccatcaaaatagcatcccagctacactgtggtgttgcggcaatcaatgattttgcttcaagttatatgtgtcagtctttgccattcggtggtgtcaaagatagtggatttggaagatttgctggtgtggaaggtttgcgggcttgctgccttgtcaaggcagttgtagaagatagatggtggccatatgttaaaaccatgatcccaaaacctattcagctaatgatctttattcagtatcctgtctccgagaatggatttgaattccaagagttgctcgttgaaactctctacggccttagtgtgtgggacagattgcggtcacttgtcaatctgttaaagatgatttcagagcagaataattctcctgctaacaccaggaagaaaagccgatgatcagatacggaagagtttagttgagacctctagcgatttgctcttatgatgtacccatcggtgatcgaccctttagaaagctatccccacgctgtgcatcgtggggattaggacaagtgcccggtagcatttgtgcggatgtaaaacgccctttagaattagcttgttgtttgctgaagagatgagagtggaattggcaatgtaattctagattctaaaaaaccttggaggaatgtcatcgtcttgtttcctctgccaaaaaaaaatgcaacctgtaattctgatttatgtcctgcgtgaaactgtgaacatcatcgggtttcagcggcatatgtcgataagatctgccctaatatgacatgctggcctgcaaggtgggtgtgctg

SEQ ID NO: 75137 - DNA, 974 bp, Oryza sativa
  Clone ID: PAT_MRT4530_75253C.1
atggccgtggcggcgccggcgaaggcggcgcacgcgctggcggccgccgcggcggggatggtgctcctgtggtgcgtgcactttcgcggcggcctcgcgctcagctcccccaccaacaagggcctcatcttcaacgttcatcctgtgcttatgctgatcgggttcatcattctaggaagtgaagccataatgggctacaaaatatggccatggggccatgacacaaataagatggtccatttgcttcttcatgctattgcacttttgctgggttcagttggaatatatgctgccttcaagtttcacaatgaaagtggaattgctaacctctacagcctgcactcctgggttggacttggaactatctgtttatatggtgtacagtggatatttggcttcgtcaccttcttcttccccggcgcttcgccgtcgctccgacgcgccgcgctcccatggcacgtccgctcgggccttctcgtctacatattagcgttgctcgcggcggagctggggttcctggagaagctcaccttccttgaggccggagggctcggcaggtacagctcggaggccctgcttgtgaacttcaccgccgtgctcgtcatactgctgggctcagccgtcgtgatgtatgttactgctccgatgcacaatgaacattctcatgggtattcagcagtgcgcaagccatgagccagatgagccattgatcgatccagcttcttcatcggctgtgtctgttgtataattgttttgctgaattattcccatagctgctgcctgctgcaaatgtggttcagatctatgggcatgtgatgtaactttgtaagtaactgacgatattaattacgagatgcgaaaattttgaactgtttgtttactgatgatatagagaggactgatataagatgagattgagacacatgaagttgcgccgtagtagcatttgcattcctgtggctcaaactacctac

SEQ ID NO: 75138 - DNA, 675 bp, Oryza sativa
  Clone ID: PAT_MRT4530_75254C.1
gggagatcaagcttcacaagaagcaaagttgagttctatccacttggagttattggtgcgattgtgtcttggaattaccccttccacaatgtattcaatccaatgctggctgcaatattctctggtaatgcagcagttataaaggtttcagagcatgcaagttggtcaggctgcttttattttcgtatcatacaagcagctcttgcagctgttggtgcaccagataatctggtgcatataataactggttttgcggaaacaggtcaagctcttgtatcttcagtcgacaaaataatatttgttggatcacctggtgttggaaggatgatcatgaacagagcatcggatacattaatacctgtaactcttgaacttggtggtaaagatgcatttattgtatgtgaagatgtagacttacccagtgttgttcaagttgctgtgagagctgccctgcaatctagcggacaaaactgtgctggtgctgaaagattttatgttcacaaggatatctattcaacatttgtttcccaagtggtgaagataatcaaatctatatctgtcggtccttcattatctggcagatacgatatgggtgctatctgtatgatagagcactctgagaaacttcagaatcttgttaatgatgctgttgacatagtgctgagattgcttgca

SEQ ID NO: 75139 - DNA, 557 bp, Oryza sativa
  Clone ID: PAT_MRT4530_75255C.1
aaatcagaattacaggttgcagcagaaacaagacgatgacattcctccaaggttttttagaatctagaattacattgccaattccactctcatcttttcagcaaacaacaagctaattttaaagggcgttttacatccgcacaaatgctaccgggcacttgtcctaatccccacgatgcacagcgtggggatagctttctaaagggtcgatcaccgatgggtacatcataagagcaaatcgctagaggtctcaactaaactcttccgtatctgatcatcggcttttcttcctggtgttagcaggagaattattctgctctgaaatcatctttaacagattgacaagtgaccgcaatctgtcccacacactaaggccgtagagagtttcaacgagcaactcttggaattcaaatccattctcggagacaggatactgaataggttttgggatcatggttttaacatatggccaccatctatcttctacaactgccttgacaaggcagcaagcccgcaaaccttccacaccagcaaatcttccaaatccactatctttg

SEQ ID NO: 75140 - DNA, 261 bp, Oryza sativa
  unsure (1)..(261): unsure at all n locations
  Clone ID: PAT_MRT4530_75256C.1
tggtgaggtaccatgtcgncaaggcgntcaaggcgaatcgcaaggaaggcgccgccctcgtccgcctcatcttccacgactgcttcgtcagngggtgcgacgcgtcggngntgctggacccgacggcggagaacccncacacggagaagacggcgncgatcaacatcggcctcgncgngttcgagctcatcgacgagatcaaggcgncgntggaggagcggtgcccgngcgtggtctcctgcgccgacatcgtcatctacg

SEQ ID NO: 75141 - DNA, 301 bp, Oryza sativa
  Clone ID: PAT_MRT4530_75257C.1
attctcagagaggattgggattcaaagaaggcggacaaattatgcgaaatacataagacagacagaaacaaatggctaggagaacaataggggaagtaagtttgaacaactaaaagggaataccagctggaacaaaggacatgacagagagttgggaaattgagggataaaaaaaccaaatatgaaagaaggagagagaccatagagagaaatggagttaaatgacaagataggttgagcttgaggcatattgcaatgggagcatagatcatataacggaaagacatgtagtgggggcgat

SEQ ID NO: 75142 - DNA, 373 bp, Oryza sativa
  Clone ID: PAT_MRT4530_75258C.1
agcacaagaactattttattattcagtgcatattgaaacaatattgtacatatgaaagatacgttacctgaacaaaattatatattccagggctaaggctgtaaaggcctaaggctaatagaagagtatttgatccaaacgtttgcacaattgaagagacacctatgaacagaagaacagagatgcgcacacagttatacatgctgtggtcaaaactgcactttggattcgcaaactcaccaccgcggggatagtcaatcatggccacaccgtgaccactgacactacatgccgatccttgccctcgtcaaagggcaggaagacatactagttggcgaaatttttgaagatctcccccgtgagctccccgtga

SEQ ID NO: 75143 - DNA, 387 bp, Oryza sativa
  Clone ID: PAT_MRT4530_75259C.1
atgcaggagttccaccccgtccccgggctggccggccggctgttcggcggcgcggcggcggcggcggctgtggcggcggtggaggaggtgcggtgcccgcggtgcgactcgtcgaacaccaagttctgctactacaacaactacaacctctcccagccccgccacttctgcaaggcgtgccgccgctactggaccaagggcggcctcctccgcaacgtccccgtcggcggcggctgcctcaagcccaaacgcccggcgccgccagagtttttctttcttcaccgggggggggggattagtctcttacttgccactcagactgattgcgtactttctgcttgtttgactgtatctggggacagttcacgattcgcattcgtgatgttg

SEQ ID NO: 75144 - DNA, 611 bp, Oryza sativa
  unsure (1)..(611): unsure at all n locations
  Clone ID: PAT_MRT4530_7525C.1
aatacgatctccactttcaggcaatgagctagcttaaccctgattgcttaaggtttaatacagtcatgttggatctgctactaagaaaggaagagaaagactgattgcgacagctcaaccggatgagacatctattatttacagaactgtgccaacgtgtgcctacattgtttgatttaccagttccgggtattggatttttgaatagaaagaatgaaactagtaccagcttatcgccaaccgtgctttctaccaactccgccaacccggaatattgatttagatttagccgcacctgagcccgcaaccgctgcctctactccgcctacttcttgtgccgacttcgccagcctcgcggggtaccgatttcctcctgctttgtgtgcgtgccattgactcctttaatgggtcgaaacctacttagttcttatttgtatttcgtctatacaagaaaagaaggattntgtgtttagcaagacagagaattgaaaaagtaaaaaaaaacacaaagtgtgtacccttttaccgaaaagcaaatatgacagatagggtacgacatattgcttattcctggaatggatctagttgacgaacagttgacttgttggaca

SEQ ID NO: 75145 - DNA, 311 bp, Oryza sativa
  Clone ID: PAT_MRT4530_75260C.1
tcgtttatatcaaaaacgctattttctattcggggggaattttaaacatctagatgtgtatcaatcctcaacaatatatcaaaaccttcttagactgactactactataactaagacatactaaacaatcttaagaaaatcccactcaatactaaacttctctggactaaagtagagctaggtcaccatgtgaaacatattatacagtatgaacatactataaactagtgctatgagaagcgtgcttacactgatctaacaaacttatttatgaacactaaggtttcaatatactagtcaacaaaatcttt

SEQ ID NO: 75146 - DNA, 318 bp, Oryza sativa
  Clone ID: PAT_MRT4530_75261C.1
atgggcgcctacttctccgtgctctacgcgaccacgtcctacgcgcagctgttcctgccgcggacgccggtgcgcgtctacgacaatatcttcgacgccgggacgtggggcggcttcttcatcatctgcatcatggtctgcgtcgtcctgggcctcagggtggacgacgcgcgcgtcttggtggcatgcacctgcgtcgtcgctgccttcgtcgttggggtcgtcgtggtctgggtgtggcttgctcgcacgtacggcggcgacgaagacgaagacgaggcgtcgtcggagtctacctctgcacgcttgactgtctaa

SEQ ID NO: 75147 - DNA, 449 bp, Oryza sativa
  Clone ID: PAT_MRT4530_75262C.1
gccggttattatcgagctggaagggaagaacaagggcgtaagaggaagaaatggccataatgattttcggttcgaggcagcctggctagaagaggagaaattcaaggaagtggtgaaagaagcatgggatgtgtcggctggtcttcagggactactggtccatgcatccttggcgggggtggcggctggcctatcgagctggagctcaaatgttcttggggatctggaaaaacgattgaagaaagtgaaaaaggagctggaaacctgccgtcgtcaaccaataagcagggaccaagttgtccgagaggaagtgcttcgttataggttggaaaagcttgagcaacagaacctcctggatgtggtggataggaaagtatcgggggccatgaatgagtcgctccgggcagagtttacaagagaagaagttaaagaagccctagatgccattg

SEQ ID NO: 75148 - DNA, 276 bp, Oryza sativa
  Clone ID: PAT_MRT4530_75263C.1
atgggaactgcgcacggtaaagtggtgaagccgccgtgtgttcgttaccgtgtgatggcacacggcagtgttgatttcatcatcatgtccattgcacaaccaacacgatatgtgtgcagcagaacattgcaaatactggtggtacaagtagaggaggaaaggcatctgccacatctctcgcctctgctgctcaaaaggctaaaatcatatgattttgtgcctctgctgggactacacaccagtaaacattgggaagttggaaggtggtcttcttga

SEQ ID NO: 75149 - DNA, 385 bp, Oryza sativa
  Clone ID: PAT_MRT4530_75264C.1
gatgaggacacgactagctcggatataaccatgattatcttatatattaatcaaccaaagcattaacttcaaatggacctagccgctgatctagaaggaatttagggacccatgagtacttattggaaagcttatggagtctacttttagatggtttttgtcccacgtcaaaattcctaccgagctaccgggaatctgcaaaacaagccattgattagccttctcggcgaggttaaccaggttttggcacgattgataaccaaaggagacgtggtgctgcgcttgcggggctcagtagcgtgttcgttcagaagtcggatcgagttgtgtagcgactccgcccaaatcgactgtttattaatacatttcgaaagatcaggaccta

SEQ ID NO: 75150 - DNA, 285 bp, Oryza sativa
  Clone ID: PAT_MRT4530_75265C.1
gtgttttatacgatcacgcgtacaggtgccacttccacgccgcaatcctgcgttccggcgacgaggcgtggatgctcatggataggcatctcattgtcaactttccccaccttttgagggatgactgccgtgtccctatatacccacgactgctaagatgctactgcacaatggtaaggattattggtgcgacgtgacgaccggagcagtcaccaccgtctgctaaggcaagtggaagttgcggtggccagatgagccaggtcaggagatccaatccagccacct

SEQ ID NO: 75151 - DNA, 1173 bp, Oryza sativa
  Clone ID: PAT_MRT4530_75266C.1
atgaagcagccgtacgccgacgacgacggcgaccgcctgagcgcgctgccggactgcctcctccacacggtcatgtccttcctctcggcgcggcaggccgtgcggacgtgcgtgctgtcgcggcggtggcgcgggctgtggctgtccatgccgtgcctcaacatcgacggcgacgagtaccggccggccacggccggcggcggcggcggcgccaccatcaccgagaggtgggagaggctggagaacttcaccaccagcctgctcttcgcccacaacgcgccgttcctggacaggttccgcctccatctcccaaacttccagcgcatcacggctactcagcagcatcacgggcggcagatggagagatggatcctccgcggcttccggtaccggcccgccgcgctggagatcgccgtcggagtcgccgccgtcgcgttcaagctgcctctcctcggcacctcctcggctagccgcctcaagagattgcatctttccggcgtggttttggacggcggcttcggcgagtgcatccgctcatggtgccccgtcttggaagccatggagctcaaggcttgcatcttcgaggatctgaaggagatcgtctccagcacgatcaagagtttggccattgttgactgcagaagtgggcaccatactgatgcattggtttgtcgaatggattccctcgttgaagcatcgattagtggaacacgtttcggatccgactttgacaagacgacatccactttaataggcagtctaatcaacgtgagggaacttaatgtgtcgtggtttcagccagtggagttgaaatatggtgaatctgcgaactttcaaacatttcacgagctcactacattgaacatatatgaatgtgatctgggtcaaaatttacatatattgctgagttttctgcagaacactcctaacctcaagaaagttatattgcagaactgcgagatttcaggtcattcgagaaagaggaaaagaacacccagggcaaacaggaaccagattcattccaagcgcagaagtctgataacttccaagtctgagatctcgaagataatgaagatgacatatgaagatgacggtgtcagtgaccttattgaacttttgttgcgcaattggagaaaacttgaggaccatactatcataatcaccaagatttga

SEQ ID NO: 75152 - DNA, 321 bp, Oryza sativa
  unsure (1)..(321): unsure at all n locations
  Clone ID: PAT_MRT4530_75267C.1
gcnggatccggttgaggnnagtcgcgtcgcacnaaacanaatatagnnggagatnacggagcccatcatgngtccgatcgatgangtgnccgctctcgctcnctccacctctgctggtgcngccgctgccgccgcggcgcgggcgctcgcggcgagggtgaccacnaccaggggttacgccgcgtcggcggcntcatctgnnatcntgcaggtggtnnccgnggtccacnggtctgactcatttnctnatnatntgnctcgtntctgaactccctgacnccnanttggtgcttgganntngatggcctncaccgccgtcnc

SEQ ID NO: 75153 - DNA, 860 bp, Oryza sativa
  unsure (1)..(860): unsure at all n locations
  Clone ID: PAT_MRT4530_75268C.1
agacaagctgagctcccgcggggcgccgcttagaacagtggatcccncggctgcaggaattcggcacgagtacttgcctgccnctatgccacgcaatngaatgacccgaacaacaattgcgccaccaccatgttcagctatatcaaactctacagcatatacccgcctggcctnttgctaacgagtgtcgtgacagcaagcgaggcctagagagctcccagtctcagtcctcccctgcagcttctacttccgcaactgctgccctatccttattccaccgtcaatctcaaccactgctcttcattctctcagcggccaccttccttcctatatcaagcacctgctttgacttcgttacagcttacacctcacattggcactcagttctcatttatcggtacatgctcgtgcaagttccacttcctgcagttcatcacanagtttaggatattgcnagcaactcgaggggggcccgtacccaattcgactataggagtcgtatacgccgctactggcgtgtttacaacgctgactggaaaccctgcgtaccaactatcgcctgagacatcacttcgcagtgcgtatacgaaagcccgaccacgcctccaacattgccagctgatgcaagggaggcctgtacgcgcatacgcgcggttgtggtacccacggacgtcactgccacgctacgccgtcttcgttcttgctacttctgcagtcgcgcttcccgcagcttaatagggttcttaggtcgatatgcttcgactgaccaaactgtagtgaggcataggcacgctgtacgttcgcctgactgacactctatggattgtcacgacactactacgcatttgtatagatgcacg

SEQ ID NO: 75154 - DNA, 339 bp, Oryza sativa
  unsure (1)..(339): unsure at all n locations
  Clone ID: PAT_MRT4530_75269C.1
nnttggtttttttggggnntttccctttttttccccatccaccactttctcctaggggggggtatatcttaggagggccaagaaggccttatgtggttggcccaggcttatttatcaaacgacccaacttagacattcactatttaatttaactgggccaaaatcccctaaaaggaacggtctcaccaaaaactacttagtttacagggggtttcatcactggcgccagaaggggacccttcttacgggggggcacactgtcctctgggggcatcctcctcctaatcttcgtcgaacgcttcctgcttccttggatactgctggcgcctcatctccttt

SEQ ID NO: 75155 - DNA, 481 bp, Oryza sativa
  unsure (1)..(481): unsure at all n locations
  Clone ID: PAT_MRT4530_7526C.1
ggcaccagtcctctcaactatcccatctcctttgcagatgaggaaggaaacgcgagcgagcaccggagcagaagccntaaggagagatggcaacggaacagaagcccgtcgcaccttgacgtacggcgggcggcggacgcagtcgcatgcgagctgctcatcgccgatggccggaaacgaaggccgccgcagccagccatccatccatccatcttttggtcatatagcaacactgcacaccaaccggcggtggtgcgttggttcgattcttcaccgccgctcctcgctgagtgacgcggtgttgaaaggttcggtttcctcaatcgagagaattccagatgttgaggttaattattccctttccgtttgattctcaaagctcccaatttgaaaatttctgtatgcaaaatatgtacgtatatatatacctgatctggtagttgagctaggagatcttgtgcttgtctcagttaaaaaaaaa

SEQ ID NO: 75156 - DNA, 5190 bp, Oryza sativa
  Clone ID: PAT_MRT4530_75270C.1
atgtcgttcgatgtgacgcagttgtcattcgacgacagctggcgtcgtccgtggggacctccgagcgaaccactgagagcaagagcgaagccactaatgccaccaaagataatcgctaaggagagagttgctaagcgaaaggagagcggcaacgaaggcgagatggccagcaaagagggagcagagccttcggcgttcgaggccgaagcaggagtcgcgtcactgctcccaccttcggcaccgaccgccccaacaagctacaagagccggggacgtcccaagtcaccgcctcgtcgcaacaagctacaacttcgaccgcactcaccgcctcgtaagccaacaccaaccatgaaggctagggcgaagctgacatgggggtcatgtgtcaaaacatggacaagccgcaagacacgcttcgtcaaatgcaagtgcagcagcaagcgtacgaagcggcaaggcaagccaaggcctatacccaacagttttcgacagtatacactcagccccaagctcttccatctcatgttgcacaagtcttacaagctccgatctttggctttgcaagcccagtttcaagcctttctgcaacaacagctcaatcaacccaacaacaacataccagctgagggaagcccaagtcaacgtgctccagctgggcagctgttgaaccagttcggcataccaagtcaggcgaaccagccagctcaaggggcttcgccacagacccaaccgacacagttcgaccccagcgccacgactcaagcgcccatgaccttcatacagcccaggcccgctgggttcggaacagctccaccgccgaatcaagcctggacccaaaccatgatcgacccaaccgtggcgacgcaagtcatcccggcgaaccagcaggcccaggcgttgctgttcggcgccggacaccagtcaacccctgtggcccaacctcatgtgcaagccatgacttcgccattcgcactttcatacccacaactcagttggccttcccgacaaggcgtcatggtcaagccgggtggcgaaaaggggttgccgttaagttgggggctcaagaatcactctattcccccccaattcaagttccctcccgtcccaaggtattcgggcgaaacaaatccaaaagagttcctatccatctacgaatccgcaatcgaagctgcccatggcgatgagaataccaaggcgaagttaatttacctcgcgcttgatagcatagcccgatcctggagttcgacgcttaacaaacaggcgaccaccagcaaccgtttcacaagaaagccaagaaagatctatgttgcgcctttcacggacactcttcccacaccactgagcagtgttgaaacatccgacaaaaagacaatacacaagctccaaggtagcagcaagttcaagccgaagagccgcctcgcgaagcagctcaggaccgtgcgcacccggctgagcagcgctaggatgtacaacgaagggcaaagggctccaaggtatttggcgcagcaaatatccttcggcccagaggatgccgagggggtcctgttcccacatcaagatccactggtggtatcggcagagattgccggctttgaagtccggcgcattctggtcgacggaggaagttcggcagatgtcatcttcgccgagacgtacgccaagatggggctggcactatctcaagcgccaacctcgctccatggattcaaaggcgaagctgtgcatgttctgggtcaagtacatatgacggtcgccttcggcacacaagaaaacaagagagaagaagaaatactattcgacgttgttgatatcccgtacaattacaacgccatcttcaaagccatctctcaccacaactatctcaagctcaaaatacctggcccagcgggtgtgattttcgtcaaggggctccaaccttccaccgcctcattgtcccccaccggcagggaggtgcataccgtcgaagttgaagggcaagaccgagccaggcttgtgctgaagcccgctccacacggcaaagtcacccagaacattgatatcttcacctggggaccggacgaagtgggaggtgtttcaccagacctcatcatgcatcacatggcagtcaagcctgacgctaagccgaggaagcaaaaattgaggaaaatgtcagcagatcgtcaagaggcggcgaaagcaaaagtacaaaaactgctcaaggtaggagtaattgaagaaatcgaccacccagagtggttagcaaatccggtactggtgaagaagtcaaacggcaagtggcgaatgcgcatcgacttcacagacttcaacaaagtgtgcccgaaagacgacatccccttaccacggatcgaccagctagtcgattcgactgccggttgtgagctcatgagcttcctggacgcacactccgggtatcaccaaattgacatgaacccagcagacatcgccatgacatccttcataacgcctttcggcactttctgccatctcaggatgcccttcggcctgaggaatgcaggggcaacattcgccaggctggtatacaaggtcttgggaccacagttggggcgaaacgtcgaagcctatttcgacgacattgtcgtaaaaagtcgcaaggctttcgaccatgcgtcagacctgcaagagacatttgacaacctccgcgcagctggcatgaaactcaatccggataagtgtgtgattggtgttcacgcgagtaagttattgggttttctggtgtccgaaagggggatcgaagcgaaccccgaaaagatcaatgccattcagcaaatgaagccaccatcaagcgcacgacaaaatgaagaagctgacgcgctagcaaagtcagcctcttgcggagggccacattcgcctggagtcttttttgatgtcttgtatgcaccaagtgtgccaaaagacggcctcgaaatcatggtgattgaccaagtcgaactggcgaagatccgaacgattggcgatcgccgttcgtctggtacatcaaagagggctggctgccagatgaggccgaagcaaaacaattgcagctccgagctgctagcccatgcttcgctgcgtctcttttgccaaaggcgaggaaatggtgaaagagatacatcaagggatgtgtggtgctcaccaagccacaagaacagaagcatccaagaattccaaataggaattctactagataagtggaaactaatattggcatggtaccttgttcttcttgatgacatctggaatgcaagagattgggatatattgaggtgttctctgcctaacaatcacttaggcagcagaataataacaacaacacgcattgtcgatgttgctagatcatgttgcagccacaaagaggatcacatctacaaaatgggtcctctgagtgatttggattcgcagagactattttttagaagaatattcggctcagatgatggttgtccgactcaacttaaaaggatttccatggacatattgaaaaggtgtcgaggtttgccattggctacacttactttagctagtattctagccgacgtacccatgttagcagaaaaatggaagcaagtgcataattctattggtttggcaactccaggggagaatatgaatcgtatattatctttgagtttccatgacctccctaatcatttaaagacatgtttattgtatttaagcatatttccagaagattatgtaattgagagagaacagttagtatggagatggatagctgaaggtttcattcctgaaacacgtggcattcctttagagggagtcggaagtgcatactttaatgagcttatcaatcgaagtatgattcagcctgctgatgttcaatatgatggaacagtgcaaagttgcagagttcatgacatgatacttgagcttattgtgtcaatatcaaccaagattaactttgttgccgtactacataaagatcaagatgaaacgagatttacagattacaagaccaaggttcgccggttagcccaccagtccaactgtattgagaaattattggaacggatgagcagggatgacttgtctcatattcgctctatcatctccttcgattatgtcaaaggaatacctcatcttggtgatttccaagcactgcgggtgttggatttaggatcttgtagatcaattgaaaaccaccatattgagaatctagagatgttgtaccaactcaagtatttggatctaagccgtacaagcatcagtgagcttccaatgcagatagataatctcaggtatttggaaacactagatcttcgagggtgtgccatagaaaaattgccagccagtactgttagattacaaaacatgcaacgcctgcttgttaacagaagtgtaaaatttcctgatgaaattggacacatgcaggccttacagacgttgttgtttgtctcaatgtcctgtaactccatcaaatttgtggaagagctcagcaagctgatcaaaatgagggtactcaacataactttctctaaacctgttgacatggttgatgaagtaaggaagtacacagattctttggtctcatcactcaacgagttgttcaaccttgaatctctaaagattgatcctgaagaaggttgttccctggactcactaatgggagtgtacctaacttttggctgtctcaaaaaacttgtcattggctacatttctaggatcccaaaatggatcaacccatctatgtacaatctagtccacctggaactgaaagttgacattgtgcgagaggaagatctccattctcttgaactcttgccctgcctgctatatcttcagctggaaatgacagatggctccagcaaaatgctcactgttggcagcgagggattccgatgcttaagagagtcgcaattcatatggaagaatgatgggatgggactagtgtttctagaaggtgccatgccagagcttcaaacattgcatctttacttcagaactcacgaaacaatagccaattattctggtgttgatggcaatggcatcgagaatctttcgcgcctcaaaaaactctgcgttgatgttgattgtagtggttcaactagggaggaggttgaggctgcggaggattccatcaggaaagcagcagataggcatagaaccaaactcactcttgaaatccgaagatggtgtgaagcatgcatgatagaggaagaagcacatgatgggtga

SEQ ID NO: 75157 - DNA, 351 bp, Oryza sativa
  Clone ID: PAT_MRT4530_75271C.1
aaaaccttcaattccacggggggtacaataaagactacatgcttacactcttcatagccagaaatggggatataccgggaccgacggagtacatgttaaacgacaaaaaaaaaggagaaagagcggtcaccatagtgccacggaaagataatatcctagaccggtggtcaggactcgaataaatccaatattgaacaaacctcaaaccatgctgcatccccgtgtagtacacaacaccaactcgatcatgcataataggccacataacgaaggaacaccgggaccaaatacaacgaacttgagggcgacaaatccattcaaccactatgaaccacagcttagcggccgtac

SEQ ID NO: 75158 - DNA, 114 bp, Oryza sativa
  Clone ID: PAT_MRT4530_75272C.1
tgctaacgtgactgtatgtgtgcgattcagggcacttttccacaaagagaggaggactaatggtgacaaggtctgcttcaagagattggattcagaatcttttgttttcaaggt

SEQ ID NO: 75159 - DNA, 248 bp, Oryza sativa
  Clone ID: PAT_MRT4530_75273C.1
gggctccttgccggcacattacttattctattcatatcataacgtttagtacatggatatgtcaatttatgatacagatgcaccatcggagtccaaatgttcagagatacatcatccacggaattcaggcagtggagaagaatcaatcggtgcgtggagctaaatgctgaggcctgatcatgccacattagcaagctcaccaggccgtgccctacgatcatatatgagatatgatgaacatgtccatg

SEQ ID NO: 75160 - DNA, 295 bp, Oryza sativa
  unsure (1)..(295): unsure at all n locations
  Clone ID: PAT_MRT4530_75274C.1
ccggagcagctcgccgaccccaagacctaccgccgctgcgtccantggtgcctccccggcctgcaggacacgtggaacnagctcctctncnccaagctcttctacccttgaaaataattaaaannacaactagaagcttctagancaatccatgtaggagtattatgtaatgtatgcatgcaggcatgcagctaggccgcggcatctagctaacatggttcaatatttcggaaagaaaaaaaaaggtaaaaaaatccttccatgaatctagngaaaaaaaaaaaaaaaaaaaaaa

SEQ ID NO: 75161 - DNA, 3578 bp, Oryza sativa
  Clone ID: PAT_MRT4530_75275C.1
atggaggggttgctgcaggacgcggggctccagcagatcgccgcgtccaccaccccctcctcctccgcctccaccgccggtagtggggtggccccgcgccgaacgggtggtgtcagcgcagggaccctcggtggcggcgctggcggggggagcttactcacgagcctcctcatgcatggacctggatcacggaccattgaagtgaagcagagacttagtatgttgttgataaatttgaagtttaactgagatatcgcacctccatcaatttctgagccctatacgccaacggctcagagctttggcggtggtaattccctagaggggttttattcacctgagcttagaggtgaacttggagctggcttgctggatcttcatgctatggatgacaccgagctactttctgaggatgtagcttcagaaccatttgagccttcaccctttataccaaaggaaatggatgaggatgatgatgacatgcttccaggaagccagccaggcccatcagacaactataatgcagtggcttttgaaaaagacagcactgccagaagaaacaatgtagtaaaaaatatagcagtggaaggcaacagacctctcaacgggaaggaggcctctcgtaaggaagagaacatcgtaagtgtgtatgatccgtcatctttggcaattttcgtccccaagctgaatgcggactcgatagcttaaatcgaagagcaagaataaggtatagaggctttgctgaatgagcaggtttggaattgtgaggtataccgcgagattgtcaagtccattatgcagatatcaatctaatatacaccagcgtgatgctttttgtagggtcaaacttttattggcaagatagattctatgcctcatttgcctttgatcgctgcacaagacttagttcgctatttgcatcatcctctcttctgtattcgaaattttaagatgtttgttagatactttcagtcatatgttgggaagctctttgatcttctctctgatagaagagatctactgatgagggaagatggcaagaaacaagtttgcattgttggtctgcaagaatttgaggtttctgatgttcagattgtcaaggaatatattgagagaggaaatgcagcccggagtacagggtcaacaggggccaatgaagaatcatcaaggtcacatgctattctgcagctggctatcaagaaacatatcatagtaactgataccaggcgacaaagagatcgagatgctaatgaatctaaaaacacaaaggctgtgggaaaaatttcatttattgatcttgctggaagcgagcgtggagccgatacaacagacaatgataggcagacgagaattgaaggagctgagataaacaagagcctgctcgctctgaaggaatgcattcgggcccttgataacgatcagatacacattcctttcagaggaagcaagcttacagaagttcttcgtgattcatttgttggttcatgtgaacacacattaaataccttgagatatgctgacagggttaaaagtctctcaaagggcagcaatacaagaaaagagcagcccactgggccaactataccttccagcaaggattcttcatctgccccttcatatcctatgcccatcgaaactgaggaaattgccaaccagattcaagagaagagacctgttgaaacttctaggaaggctgctgaaaatttcacctcgaactcttctatggaacctgacaggaatcctgttagtatgattccaagttattctaatagaggaaaagaagaaaatggttcatctggcttgaatgacagagaacgggttgatctgaattccagtcgaattagctacaacagtaaaccacagtctgttcagagttcagcaaatttacaagaagaggaaaaggttacaaaagtttctcctcctcggagaaaggcctatagggatgacaaacctgaaaggcagagcaactatgcgaagaaggatagtggacctgagacaagtaggcctgggtataaggtgcagcaggcaaagcagttgcaacagcaacaacggccgacatctgcttcagcttctcagaattcatcaaggcaatctgaaaaggaaagttcttgtgatgatgtggaaatagatgctattcttgaggaagaggaggctctcatagcagcacacaggaaggaaatcgagaacactatggagattgtacgagaagagatgaaccttttggcagaagttgaccagccagggagccttattgacaactatgtaacacaactgagttttcttctgtcacgcaaggctgctggcttggtcagcctccaagcacgcctggcgcggtttcagcatcgcctcaaagagcaggagatactcagccatgcatggcttggcctcttttgccagtttttccattgtatgatgagacgtgtaactactgtgtttgcagatatggatgggcccaacacaaaaggagaagtggagagaggagagagagagagagaaggaagagaaagctctagagctcgagctgcgcggcgtgaggagatgagcggcgaggtggcggcggcggtcggcggtggcgccccggaggagaacggcgcccctccgaacgtcaccatctacatcaacaacctcaacgagaagatcaagctcgaggaacttaagaaatcgctccgcgctgttttctcccagtttgggaagattcttgatgttctcgctttcaagactttgaagcataaaggccaagcctgggttgtgtttgaagatgttgcttcagcaactgaggctttgaagagcatgcaagacttccccttccataataaacctatgagaatccaatatgccaagaccaaatcggatattatagcaaaagctgatggcacctttgtacctcgagaaagaaggaagaggaacgatgagaaacctgaaaagaagcagaagcgtgagcagcaccatgatgtgagtcaagttggcttaggtgtgaatgcttaccccggtgtttatggagctcctccgctctctcagctaccttttgctggcgcacagaaggtcatgatgccggagataattgtaccgaataacatcctcttcgtccaaaacctcccacatgagacgacccctatgatgcttcagatgctcttctgtcagtacccagggttcaaggaagtcagaatggttgaagcaaagcctgggattgctttcgtggagtacggcgacgaggggcaggctaccgctgccatgaaccatcttcaggggttcaaaattacgaaagataaccagatgcttatctcgtatgcgaagaagtaaatgtactattgacttgctcgatgaatgttgtagtcccaagttttcgcataatccatagattttcattgttaggtagactacaccatgacaaccatgttaatgtactactgctcagctgcccgtgtgtgtttcaggaatgagatgaaatttgaaccatctttgcagtcgtgagttctcctagttagttccactcgtgttcccttgtgtaaaatatggcagcttgagacgatttacatttatgctattgctgttagcctcgttaaaatatttaccatctc

SEQ ID NO: 75162 - DNA, 1012 bp, Oryza sativa
  unsure (1)..(1012): unsure at all n locations
  Clone ID: PAT_MRT4530_75276C.1
gttcagcaaatttacaagaagaggaaaaggttacaaaagtttctcctcctcggagaaaggcctatagggatgacaaacctgaaaggcagagcaactatgcgaagaaggatagtggacctgagacaagtaggcctgggtataaggtgcagcaggcaaagcagttgcaacagcaacaacggccgacatctgcttcagcttctcagaattcatcaaggcaatctgaaaaggaaagttcttgtgatgatgtggaaatagatgctattcttgaggaagaggaggctctcatagcagcacacaggaaggaaatcgagaacactatggagattgtacgagaagagatgaaccttttggcagaagttgaccagccagggagccttattgacaactatgtaacancaactgagttttctttctgtcacgcaaggctgctggcttggtcagcctccaagcacgcctggcgcggtttcagcatcgcctcaaagagcaggagatactcagccgtaagaaatcttccagataaagcccccggtcatctctcggcgactttggccttttgccttgtcagagcaccgattggagctttgaccgccgtttcatgcgaagctcttcccctgtcgggctcctgtaacgttggatctaagcaaggagctaagcgaagatatagcgcagttgcttagagaggcgcctggttggtggtttcctttgggacgttttgtcaggtttggtcagcagtttgctaaaatagtccttccacagtggggctgcttgggcttgtgttgtttttttggcagatgcatggcttggcctcttttgccagtttttccattgtatgatgagacgtgtaactactgtgtttgcagatatggatgggttggtttccgatgtttgggagacaaatcctctcttcttttttttttatcaacatagagatattgctgctgtattctttactgattatttgcgttgagaaagaaaaaaaaaaaaaaggaagggcggcccgatagaaagcaag

SEQ ID NO: 75163 - DNA, 521 bp, Oryza sativa
  Clone ID: PAT_MRT4530_75277C.1
ctttttgtcaaggaatatattgagagaggaaatgcagcccggagtacagggtcaacaggggccaatgaagaatcatcaaggtcacatgctattctgcagctggctatcaagaaacatatcatagtaactgataccaggcgacaaagagatcgagatgctaatgaatctaaaaacacaaaggctgtgggaaaaatttcatttattgatcttgctggaagcgagcgtggagccgatacaacagacaatgataggcagacgagaattgaaggagctgagataaacaagagcctgctcgctctgaaggaatgcattcgggcccttgataacgatcagatacacattcctttcagaggaagcaagcttacagaagttcttcgtgattcatttgttggtaactctaggacggtgatgatctcttgcatttctccaaatgcaggttcatgtgaacacacattaaataccttgagatatgctgacagggttaaaagtctctcaaggggcagcatacaagaaaagagcag

SEQ ID NO: 75164 - DNA, 3500 bp, Oryza sativa
  Clone ID: PAT_MRT4530_75278C.1
ttgtcggcctccacggactcgccaccgccgcacctgggtctgaacccccgtcttgctgccgccggaaaccgcgtcgagaagttaaccatggggtctggctcactcctcctctccctcttgctggtgctcgtcgtcgtcaatgtcggggtggcggtgaaccaggacgggctgtccctgctcgacgcgaggcgcgcgctcgccgccccggatggcgcgctggcggactggaacgcgcgcgacgccacgccctgcagctggacgggcgtctcctgcgacgccggcgtcggcggcggcgccgtgacggggatctccctcgcgggcctcaacctcaccgggtcgttcccggcggcgttgtgccgcctcccgcgcgtcgcgagcatcgacctgagctacaactacatcggccccaacctgagctccgacgccgtcgcgccgtgcaaggcgctccggcggctcgacctgtcgatgaacgcgctcgtcggcccgctccccgacgcgctcgcggccctcccggagctcgtgtacctcaagctcgacagcaacaacttctccggcccgataccggagtcgttcggccggttcaagaagctcgagtcgctctccctcgtctacaacctgctcggcggcgaggtcccgccgttcctcggcggcgtgtccacgctccgggagctcaacctgtcctacaacccgttcgtggcggggcccgtgcccgccgagctcggcaacctctccgctctgcgcgtgctctggctcgccggctgcaacctcatcggcgccatcccggcgtctctcggcaggctcggcaacctcacggacctcgacttgtcgacgaacgcgctcaccggctcgataccgccggagattacgcggctgacgagcgtcgtgcagatcgagctgtacaacaactcgctcactgggccgattcccgtggggttcggcaagctcgcggagctccagggcgtggacctcgccatgaacaggctcaacggcgccatcccggatgacttcttcgaggcgccgaagctggagagcgtgcacctgtacgccaactcgctgacggggcccgtgccggagtcggtggcgaaggcggcgtcgctcgtcgagctgcggctgttcgccaaccggctgaacggcacgctgccggccgacctcggcaagaacagccctctggtgtgcgtggacatgtccgacaactccatctccggcgagatcccgccggcgatatgcgaccgcggcgagctcgaggagcttcttatgctcgacaataagctctccggtcgcatccccgacgggctcgggcgttgccggaggctgcggcgggtgcggctgtcgaacaacaggctcgacggcgacgtgcccgccgcggtctggggcctgccgcacatgtcgctgctcgagctcaacgacaaccagctcaccggagtgatctctccggtcatcggcggcgcggccaacctgtccaagctggtgctgtccaataaccggctaactggtagcatcccgccggaaattggctcggcctcgaagctgtacgagctctccgccgacggcaacatgctctccggcccgctccctgggtctcttggcggcctcgaagagctcggccggcttgttctccggaacaactcgttgtcaggtcagctgctccggggaatcaattcttggaagaagcttagtgagctcaacctcgccgacaatggctttaccggagcaattccagcagagctcggcgatttgccggtgctgaactaccttgacctctccggcaaccgtctcaccggtgaggtaccaatgcaattggagaatctgaagctgaaccagttcaatgtctccaataaccagctcagtggcgcgcttccgccacagtatgcgacggcggcatatcgaagcagcttcttgggcaacccggggttatgtggagataatgccggtctatgtgccaattcacagggaggtcctagatcccgcgctggcttcgcctggatgatgcgctcaattttcatatttgcggctgttgttctggttgctggagttgcgtggttctactggaggtaccggagcttcaacaattctaagctaagtgccgaccgttcgaaatggtcattgacatcattccacaagctctcattcagcgagtatgagatcctggattgtcttgatgaggataatgtgattggtagtggcgcatccgggaaagtgtataaggcagtgctcagcaatggtgaggtggttgccgttaagaagctttgggggttaaagaaggggacggatgttgagaacgggggtgaaggatccacagctgacaacagctttgaggcggaggtgaagactcttggcaagattcgccacaagaacattgtcaagctctggtgtagctgcacgcacaatgacaccaagttgctggtgtacgagtacatgcccaatggtagcctaggagatgtgctacacagcagcaaggctggtttgctggattggtcgacgcggtacaagattgctctggatgcagcggaggggttatcctatcttcaccatgactacgtccctgcgatcgtccatagggatgtcaagtcgaacaacatcctcttggatgctgaattcggtgcccgtgttgcagactttggggttgccaaagtggtagaagccactgtccggggccccaagtcgatgtcagtgatcgcgggttcatgtggttacattgcacctgagtatgcatacacactccgcgtcaatgagaagagcgacatatacagcttcggagtggttcttcttgagctcgtgacagggaaaccgccagtcgatccagagttcggcgagaaggacctggtgaagtgggtgtgcagcacaattgatcagaagggggtagaacatgtcctcgacagcaaactcgacatgaccttcaaggatgagatcaacagggtgctgaacatcgccctcctctgctcgagctccctaccgatcaaccgcccggcgatgcgcagggtggtcaagatgctgcaagaagtgcgcgccgaggccacaaggccaaggctggagaaggacggcaagctgtcgccatactactacgaggacacctccgatcaagggagcagcgtgtaactccgacagcacggttaactctggagctgtgcactccagtccggcaatggaggacagtaagctggtgggtgcccggtgttcttggttgtccttgctgtatgtggaccgtgccattgatgccggtagggcagatcgctcgtctgctgtccatcgagagaagaaaagtctgtgacggaatcaaatgtaggtgtgtactgtaattagtactgctactttgccttttctcctgagataagctaggagtattgttcaaggctcatggtgatggcccatggggtggttggatcaagtatttcctgctcttcaactcagcaggagagatggaaatactaatgcaaacgagtgaatgaatgaatctgacctctttattacgagtctcgagactagttctccctcgtgccgat

SEQ ID NO: 75165 - DNA, 672 bp, Oryza sativa
  unsure (1)..(672): unsure at all n locations
  Clone ID: PAT_MRT4530_75279C.1
gcttgaagtgcgcgccgaggccacaaggccaaggggggagattgacggcaagctgtggccatactactacgaggacacctccgatcaagggagcagcgtgtaaaggtaaaaacccccaaaagagaagaagatgacaataggccaatagctgcttccatgaatcttctcccatggcttgtagagctgtagctaggtaggaaagctgcaatcataacccagtcgtgtccaaaattctatagttgctgattttgagcgctgaatttgctcgccgccgacgccggcctccgacagcacggttaactctggagctgtgcactccagtccggcaatggaggacagtaagctggtgggtgcccggtgttcttggttgtccttgctgtatgtggaccgtgccattgatgccggtagggcagatcgctcgtctgctgtccatcgagagaagaaaagtctgtgacggaatcaaatgtaggtgtgtactgtaattagtactgctactttgccttttcccntcagcccagctaggagtattgttcaaggctcatggtgatggcccatggggtggttggatcaagtatttcctgctcttcaactcagcaggagagatggaaatactaatgcaaacgagtgaatccatccatctgacctctttattacgagtaaaaaaacaacccc

SEQ ID NO: 75166 - DNA, 561 bp, Oryza sativa
  Clone ID: PAT_MRT4530_7527C.1
ggcgaagtcgtgcaagggtttggccatggagctcgtcaagtgcctcagcgagacggactgcgtcaaggtgcagaagagtgccgtacaaggagtgcgccgtgggagaaggtccccaacatcaccagcgagtgcgtcggcctcagggagacctacttcaactgcaagaggggccaggcatgcgttcctccacctgctctcaatcactgcagaaattaccagctatgctagtgctcttgatccatggttgtgtggcttgctgattactgtctgatgagtgtgtttgggagggcctgtgaacgatctagtagcattttgcacattggttacttgtgaggttaactgcaatgaccattgaccagataatccgttatctatcccctcggtagcgcgggttctgattctgtatatatgttggtagtgactgttgttgtttgaaatcgatgcgtttcgagggtgtacatgggtgagaaacacacgcgcgcggtttcggcaaacctggtgaagcttcgaatagcctgaactgaacccagggggagattttattttctgtgtgttccttat

SEQ ID NO: 75167 - DNA, 373 bp, Oryza sativa
  Clone ID: PAT_MRT4530_75280C.1
attcccacggaaaaacaaaaaaaaaaaaatgagagagaatggagaaaacaaacggagagacaaatcccgtccagaaatcgtcgccccaattccagatttccagtcctctcttgtgccctccctgaaaccctcccgaaatcccacgaatcctcgcgattttttctccacccccaatccaccaccgcgttggccgccgccgccggcctccgacagatttcccattagggcgccgccggagtggtcgtcgccggccgaggggggcctcgaccccgcccctcccctgctccccccactgcgggggccgcgtccagcttgatcaatcgcgtcgcggtggattgatacgggggttgggggattcgagaggggggcggag

SEQ ID NO: 75168 - DNA, 535 bp, Oryza sativa
  Clone ID: PAT_MRT4530_75281C.1
cccacgcgtccgcttcaaaccattctgctgtagaattcctacaaataaaaaaaaatagcagtcttgtgtttgacccagattgtttctgtatcctctgttcgtctcaactggcctcaagaacacaactattttaaggaatatataagcagaatggagagtttaaactccattctaattttgttcggttttgtctgttgtgcgtgtaattaggcatttaattttcctatttcatgttttttttgccaaacggccaaatggccacactctggcattcgatgtaacaatttatcatatcgggaactattgttacaatctgtatcttctttgtgtgctgtctaccacaagtcttatctgtaagatgtcatattttttatgattggttctacctgttactgagaatatcttctactatttctctttttgccaggttttggtagaagcaaatggtgtaacacggacattggttttgaataggccaaagcagttgaatgccctctcctctgcaatgataacgtgttttttgaggtgcttcact

SEQ ID NO: 75169 - DNA, 365 bp, Oryza sativa
  unsure (1)..(365): unsure at all n locations
  Clone ID: PAT_MRT4530_75282C.1
tttttttttttgctatattaagttgtcatgtcacttatggcgggacttgtcattatacaaggaggttatttctgaaaaccccctangttgtataatgctcctttcttactcatgacgtgtggataactaccatgttccactacctcaccctctcctaatttttccaccgaaaacacaatctctattttctttagcaaatgttccaacactccgcacctgcttattggctacattttttcttaagggaaaacccccaaattttttttttccccccacggcctttcatgaatacattcctaaggtgtgggtgattttcccttatacctatttcccaaaaatatagaaatgggtttttacattccctt

SEQ ID NO: 75170 - DNA, 375 bp, Oryza sativa
  Clone ID: PAT_MRT4530_75283C.1
atggtgatgatggtgatagcgggcggcgccctggtggaagcggccatggcagcgcatgaggcggcaggcggacggtggcctcccctccactatatccggcgggaggagaggctgggcggtggaagcggtcgccgcggcgggctgccgagaggcagcggcagcggccgggaggcggcgcacggccgggtggcctcccctctgctagatccggcgttgaggggaggccaggcgtcaaaagcggccgcgacggcgtccgggaggcagtgtactgctgggcggctggcggcgccgaggctttcgtgtgtcagaggtctgcgaaggagagtagttgcaattattgctggatcctctggagttgtaggttacagcacataa

SEQ ID NO: 75171 - DNA, 555 bp, Oryza sativa
  Clone ID: PAT_MRT4530_75284C.1
atgtggggccggctccaaaaggtcccgcacaatggcagctggactatagtgaagtcctttccgcttaattatgccttggcctcttggggcgtcgggggtgatctcgccgcgcctcttcgacgccgtcctccgcccactgcggcgtcgcctccgtgcgcacgctccccgtcgctgccggcgccggggccgctcccctcctccctcgtgctcctcgccaaggtctccatcgcctacttctcaagaagctggcggtcccggtgcctcgactgccgcaacgccgacgacaacctgctctggaacctctacctcctctccatcctgatacctggtaccctggtatcaactgatacctgttaccctgggtatcgagctgatactaggtatcaagccttggtacctgggtatcaggccttgctacctgggtatcgactgatacctggtaccctgggtatcgagctgatacctaggcatggtataccatatgcatggtatcaggtaccaggtcaaaggtgtgggaatggggagcacgtcgtgtcgccgtcgccgcctggctga

SEQ ID NO: 75172 - DNA, 108 bp, Oryza sativa
  Clone ID: PAT_MRT4530_75285C.1
cggcacgaggtaacaaccttaccgcattgtttttggaagtgtgtgcgctgccgatgcgttgcttgagtgggttcatcttcacgtgataaaaccgaaagcgacttctcc

SEQ ID NO: 75173 - DNA, 822 bp, Oryza sativa
  Clone ID: PAT_MRT4530_75286C.1
tcacttgctctcactggtaggaacgcgccgttgaactggcattccctggcatctttttacactctcctctcccaaatcacacgacactgcagccctccccatcgccgtcgcccactgctcaccggagccagcggccgccgccgtgagggaggccgcgacggcgaggagctcggcggcgagcgagagggagagcgggagcggggtgcggtggagccggaacggggtgcggttgcggcgacatcctccatggccggcagcaagcagatctactacagcgtcggtgatgaagacctccatggccggcagcaggggtgcgccgagcacgtcgtcgtccacagccggctgaggaggctggggaggcatggtactaggtctgatacctagataccagctcgatacccagggtaccaggtatcagtcgatacccaggtagcaaggcctgatacccagggtaccaggtatcaggatggagaggaggtagaggttccagagcaggttgtcgtcggcgttgcggcagtcgaggcaccgggaccgccagcttcttctgcttctacggtggcagcggaggatccatctacgctcaccggcaaggaggcggcaggagcagcgggcaaggacagcggcacccgtggctcacgagaagtaggcgatggagaccttggcgaggagcacgagggaggaggggagcggccccggcgccggcagcgacggggagcgtgcgcacggaggcgacgccgcagtgggcggaggacggcgtcgaagaggcgcggcgagatcacccccgacgcccccttgacctcaccgacaaccccgcaaaaatag

SEQ ID NO: 75174 - DNA, 345 bp, Oryza sativa
  Clone ID: PAT_MRT4530_75287C.1
atggcttcatcttcactgacggcccacgtcaccaatccgccagtgataatggcttcatcttcgctggcggccgccgcctggacttcactgccaccccaaggtgctagcctctacgctgctccacccgcctccaccgactgcccatcattggccactgggtcgccgatcccaatggcactctcaagagagagacgtgagggattttctaggaaaagggatgtggtcgtcgcggacagacaagctccattcgcggcacctccaaccgtgcgccgcacgcgtgtcgacctgagcaccgcccacgaccaagccacatgtacccacattggccctaagcgcatgccctag

SEQ ID NO: 75175 - DNA, 453 bp, Oryza sativa
  Clone ID: PAT_MRT4530_75288C.1
atggaggaggagcaggaggcagcaaggggagccgcatgggactgcgggagcccgctgtacgactccttcgaggtggccaggctgcaccacgtcctcgagagcaacctgatgatcctgccgccgttcccgcccgacgacgacgacgacgccgcggcgcagcggatcatgctggacgatggccggcgtgccgccgaggtggacgacgcgaacggtgcggcggcgaggaagagcggcgggaggaggaggaagaggaggacggccgggtggaaggctgcggcggccatctacagggctgtcgcgtgctggaggcggccatggagcaacccgaccccccctcggggaaatcaggaggagggcggatacctcaccctcgggcccgacgtccccgaagggatgcggtcgggcatgacgccactcttaaagcctggtgacaggtgggaccggtctccgtga

SEQ ID NO: 75176 - DNA, 255 bp, Oryza sativa
  Clone ID: PAT_MRT4530_75289C.1
atgctggtggcgcggctcgacgttgcacggtggcgtgagatggtgccactagctagtgctactaatctcccatggtcaacacctgatccaatcacaagttcacaaagcactgcactaaccaagcagcttgtgttcgcggcgagccggcgaggcggccacctggcccggggcgcgcgcgctagcggccacggcgcgggggcgctcacgggcgagcaccgcgcgcgcgcgcggacgtacgcgcgccgacgcttctag

SEQ ID NO: 75177 - DNA, 1482 bp, Oryza sativa
  Clone ID: PAT_MRT4530_7528C.1
atggtcgccgccgccgaggccaaagccgccatcggggtggcaacgccgacgccgacggcggcgccatgcgggtcgacaacaacgccgcgcgatgccgacgtagacgacaagatgaccatcgtcggccacccggcggcgtcgctcccgctggagacgcggtggccgccgttcccgctccgtcggctcggcggcttctggatgcccgagtccctcctgccggccgtcgcggccctccacaccagcttcgcgccggcgccggatggcgtgctcctcgccagcttccccaagtccggcaccagctggctcaaggcgctcgccttcgccgccgcgaaccgcgcggcgcacccgccctccgacgccgaccacccgctccgccgtcgcaacccgcacgactgcgtcgagttcttcgagatgcgccccgacgagcacaccggcgccaccagcgacggcatcgccgtggacgcggcgtcgccacctccgccgccgcgcgtgctcgccacccacctaccctactccctgctgcccaagcgcatcaccgccggcgacggctgccggatcatctacatctgcagggaccccaaggacacgctggtctccttctggcacttctccaagaagatggcggcgaccatggcggtggacgccggcgcgttcacgttcgacgaggcgttcgagctcttctgcgacggcaactgcaccggcggcccgcaatggcgccacgtcctcgagtactgggaggcgagccggcggtgccccggcaaggtgctgttcctccggtacgaggacatgctgcggcggccggcgagcggcctgaggaagatggcggagttcatggggtgcccgttcgccgcggcggaggaggcggccggggtggccgacgccatcgtcgagctctgcagcctcgacgagctgaggagcctggaggtgaacaggaacggcaccgacgtgctcgggctgaagaacgagtcctacttcaggaaaggtgtcgccggcgactggcgcaaccacatgacgccggcgatggcggcgaggctggacaagatcgtcgacgacgccacgcgaggctctggattaagccttgccaatgcaaccccgtctccgcccatgcatgaaaatgaaattaagggaaatttaactatttaccactctcagaacgacatttaactatttttcacccatatttgaatgacatactactactctatccttaaaaaaaaaaaactctagctacgaacttagacatgtatatgtttagattcgtagttagaattaatttttttttaccgatggggtatgggcttaagtcactccagtttatttttttctatatatgttactgcgtgtttcttctgttctggatgtgcggtgtgaagaaggatagtgtgaattatttgtaatataaaatgtgcagttcaaagatcaatagagtcaatttaattgttgttaaaaaaaaaaaaaaaaaaaaaaaaaaaaaaaaaaaaa

SEQ ID NO: 75178 - DNA, 1554 bp, Oryza sativa
  Clone ID: PAT_MRT4530_75290C.1
ttttttttttttttttttttttttttgttttgaagcatcatcaggtaagttttattttggtcatacatcatggcagccatatacagtatacagtacaggagatcgatacaaaatgaccacctcaaaaaactcaaaaacattttacctcttctccaaagaatgcaatatcaggcatatcagctggtatacccacctccttcaccgccaccggcagacagacgctacgtaaaattgtggtccgcttcgtcggtgttcatccagacccagttacagaaacgaatcatcacagctaaaaactacacaagaattacatacaaacagaccgtggccaatgtacagcacacctactataagcaggaggaagttcctgcttgtgcttccggttttttccttttttttgtttgaccggttgtttcggtcacgctagaaggttgcgttccaaagcgccttctccccttcggcgcacttattgtgcacctcccagatcctcccctccgagttgcatatgccgctgcatctccagtcgaatgacgcggcgcaggtgttccccgcctgagctttccactcgcaatcaggcggagtaccacaacaaagtctccggtcgtcgatatgctcgacatctaatccaataaaccaacttcctaatgacacatcctcattgatatacttatgcaaaacacgtttgtttattgatatgtaagttgccaaatcttttgaaatagcatacaattgaccagttgcatgccggaaatactggtcaccaaatttccaatgctcaggttcatagtacctcacatctttgtcagataagacgggaccggacttcatgcatccaatatatactctgggcttcttaacatgattcgataaaatctgtccgagtgttgctatattaacatgcacatcatcgtcaaccttcacatagaagtcagcatcccataaagaaacagctgtagcaaagtatgtcttggttttgccagacaattcaaggtatccttcaacatggtcctgtgaccaataacaaaacggattacgatccccttctcttcttctagttttcttctctttattcctgtccccattgttagcttgaggcatccatgtgttacggatagaatcccttctctgtcgactgctaaaagcagtattaatgcctatcaccataagatatttctgccttcctgtagagtccgaacccttatgcccttctgaaaccggagaaccattgagaaatgattcctgcagagttctcgcagcggaaagttctgtctccagttttgctattgtcttatccaaagtccatacagcatgatgggtatcttgggtttgtaggatctccctgtaatctcgttttacattaaccttagcagaattacagtctccagcagtaagctcatcctccttctctctccttccatttggcctggcaacttcagtaacctcaggcagtgtccacatcctgtcggtgaagagcaggccgaggaagaagctcccggtgcagagcagcaggacccatctcctcgccacgcccccgtcccctctcctccagctcat

SEQ ID NO: 75179 - DNA, 528 bp, Oryza sativa
  Clone ID: PAT_MRT4530_75291C.1
aagaaccctacattagagtatatggcatgggtagcgatggaagaacagctcgattcacgagcgatacgaagtccaaggggggtactcgccgtgtctgccacctgaatctgacgcgatatctctggccggctgccttcagactcttcctcgcggcgaccctcggtgtcgatcttctcgaaggcgccctacactatctgcttacccggaggccggaggagctatgcggccaggcccacgactcgcacatgaggatctgggccgactacgaaccccacggcgagctaccactccatgaccacacgctgagcggacgagaacgctgaggactctccacagttcgtcagctcgtcttgtatggccgagagaacatgaagcgcctgtttgactacatcgtcctgatatctgggctcaacaggctcagcaccaagatcgccatgatccttggtcttgcaggtgctaaggctcgtaacgtgcacgataaacactctgtgacctatggaagttatcacgcgccttattactgacaga

SEQ ID NO: 75180 - DNA, 131 bp, Oryza sativa
  Clone ID: PAT_MRT4530_75292C.1
gccggcaaaatccgggtcgacacacacgcgcgcaaaagaataaagcacatcaagctagttgtggatgctaagcaatagttttatgtactttgttttgcaaagaacaaaattaaaacaaaactgagttcatg

SEQ ID NO: 75181 - DNA, 171 bp, Oryza sativa
  Clone ID: PAT_MRT4530_75293C.1
tcggtacaagcttggaaacgagttgatctgctgcggcacgtattgctactgaccaggtacagctgacgtagctaaagaggccatggcgctggtaatgatggtaggagaacgacgccaccggagggaagaaaggaggtaataaacgtttactgacttttatttttaattact

SEQ ID NO: 75182 - DNA, 596 bp, Oryza sativa
  unsure (1)..(596): unsure at all n locations
  Clone ID: PAT_MRT4530_75294C.1
gtcgccggcgccgactccgacggctgctgcttgacgacggcgggggcgagcgcgccggccgtcctccggcgatcccgctccttgacgagctcgtgcgcgaaccactccagcttctcggcgttcgtctgctccgccagcttcttcccccggaacagcaccgactccacgttcttctgcgacagcatctcctccgccacgccccaccccgcgccatcgccgccgccgccgccgccgcatctcatccctcctcggctcgcccgcggcgaccccatcgcctgcaagatcaaagacaccaatggagatggagattgatcaagctaaagcaaacgcaaagatatcatggtggntatagtgatggctgtgagttctctgacctgtatacggatgttagttgtttgtcctattatgtccgaacgccatggccactgcttgatccacctggagtcaaggatgcgtcggggagaaggcgttagccaagggagcacgaagaacaagaatgcatgcgagaaaggaagaagaggaccacacagagagacacactnggatggattngttttttttctgtaccatgtcgggcgacgccttcnggcggcgat

SEQ ID NO: 75183 - DNA, 777 bp, Oryza sativa
  Clone ID: PAT_MRT4530_75295C.1
aatcctccccggcccaaatccgagagacccactagccgccccccgcgccggagtctgttcctcgaatcttcgccggaggtagccgcggacgacggccatgctctccgccgccgcctcggccatcccgaggctccgctgggccgcgccgccgcggaaccagtctgcgaggaaccaatggttgctgctgcggcggcgttccctctcctcctcacctccctacgtgacgcccggtatcccggcggcggcggcggcggcagggagtggggctctcgagccgccggacctgccccgcctcgccaacgcggcacgcatctctctctcgccggaagaggctgaggagttcgcgccgaagattcggcaggtggtggattggtttgggcaacttcaagccgtcgatcttgaatctgttgagccttcacttagagctggtactgcggcaggtaattcattgagagaagacaggcctgaaacatttactaacagagatgccataatagagtctgtcccaagctatgatgatccatacatcaaggtgccaagagtgctgaacaaagaatgacctgtaatttgtagatcaatttttttttccgttgcacaatgtaacatggtttagcaataaatcttagtagtcaagtttagtatcatttcaactgaatgatatggctcgagatcatgatgtcaacatttgtaatttgtttactatggaagctatttttaatagtttaatattgtattatattttcagaccagaaaaaaaaaaaaaaaaaaaaaaaaaaa

SEQ ID NO: 75184 - DNA, 491 bp, Oryza sativa
  Clone ID: PAT_MRT4530_75296C.1
cccacgcgtccgggtgggcatctgcggagcgcagctgaccgagttgcagatgaggttaaaggacagagcagtggcagcgggaggtgcatgactgcccgctggacgcgtgcctgcaggtgcttgatcgtcatctcatcggccgtgagaggttccagccgatggtccgacgaccggacgcgcttggtctgggtatgcattggtgactgctgctgcaggacgttagccgagagtgtcgatgcgctgccatccttcggatggtgaggagctacgaagagagcatgccgatgcccatggagcaaggctggtcgccgtcgtcgtcggagtacatatggtggcgaggggtcgtcgtctgagcaagggtacgtacggcgaggtgtcgtctgaagaaggttactacagggagcaacagcaagatccggggatgacccgtttgaggctgaacagggcgagggagtacgcggtgcaggtgccgtcaatgtgccgggttgagc

SEQ ID NO: 75185 - DNA, 671 bp, Oryza sativa
  Clone ID: PAT_MRT4530_75297C.1
gttcaaacggagcctacttcaatgatgtaagaggggtcagagaatagacaacagtcatcctattcaccataaagcaacgaaattgacatgagaaatttctaaacatgctatacacgtatacagattgttagttacatgcataaaacttgtgatgcgtaacaggctgcgcaatgggttatattggtattgaaatctcatggttgttctaggcactggaacgtccatggacggtgtgatcagcttttccatctgtagttagactgaagtgtctgcttctgtcctctgtaccttatggctattccatcttggatttcttggtgaaaatattagcagctgataagcaggtaattcctagcaacaccacggctatgacaagaacagcatttgtaccaaacaacaacagagcaagacggtgccacactagccatggaagctctgtttcgagagcgcaatgccgttggtacgaatgcccttgttttgtaatggcatgtgcttttgatggatccagttcagatataggaaactccacaccaccaacagagtttccctctacatctcttagttcgagtttaatctggggaggcactgcattccaatctatttcgattgctccaaagtttggttgaccatatgtgcatgatttgtaacgacagttagggctaaagactcgc

SEQ ID NO: 75186 - DNA, 252 bp, Oryza sativa
  Clone ID: PAT_MRT4530_75298C.1
gcccgtaccgggcccggaccttttgccgccaccggttgaggggggccaccggaaatgagcctgggcccccccttcacccaggggaggacctttcaaggctttcgaaaaaacttaaaggggcccctttagatcttcatttggccaaatcaaattggggtgtgcgtgttccttcccacaacattttgggggcttttatacaggttccaaacatacccacatacaaggaaaagcttgggctctttttttgggggg

SEQ ID NO: 75187 - DNA, 336 bp, Oryza sativa
  unsure (1)..(336): unsure at all n locations
  Clone ID: PAT_MRT4530_75299C.1
gcagactggtggcctctgccgagggggggcgggaaggtgctccctcgtctctgttcgagcggcggtacttccgacaggacctcggcgagcagagcggttcctcatcgtcctcttcctcctcctcctcgggttcggcctcggacagggctcctgcgttggatgcggcccccactgtggtgggggggggagggcnnnnttatcttttttatgaccctcttgttngggaggaggtttcgggngtngagccggttgaggagctcgagcctgtggtccgcccngagagttccggggtcctttgtgagttccgctccggtctcggtgttgttgaaccttctg

SEQ ID NO: 75188 - DNA, 132 bp, Oryza sativa
  Clone ID: PAT_MRT4530_7529C.1
atggtgcgagggtttgggttgtggagctatggaaagggagatcgggtgggggcggcaatggtcgtggagaggcggtttccggaggcggttgtagaggcggtcgtcgactcggccacggtgacgctgtcgtga

SEQ ID NO: 75189 - DNA, 477 bp, Oryza sativa
  Clone ID: PAT_MRT4530_752C.1
ctgattttgaatgaaaatttggtagaaaattatgccggacttggaaacagcgcagcaggtactatttatttagccagtcactagattgggcccgtaattgtgggattgtagccaagctgtttattcccagtcaaaatgaacatggggatttaggagagggattaggaacatgcaagggattcaaacccccaaagggagggagtgatatgggagggattcactcaatccctccctggataggttccccttggggattggaacccaaggaaccgaataaggccttagggaggtgcctggttctcccatcaatcgaggagggcaagttggatgaacgagacagtaccgagtcctcttctgttaaagtgatattgttttcaaacatccatatttatagctatatataaaaaaataatttttctaatttttgttagtgttgaattgaagtcatcactaaatagttaaattctacaaattgaa

SEQ ID NO: 75190 - DNA, 645 bp, Oryza sativa
  Clone ID: PAT_MRT4530_75300C.1
tacacggaaatggcggctagaacgtgtgaagaaacgacgactagagggcagcggcgagaggatggtgcggtaaggcattagcagtttcatccgcgaaaccagcacggcccaaatcggcaccacccacgtcaatttcagcgaccgcacaattttccgagagctggggcagcaacgccggcagatcggggtttggtggtcgctggcaaggaggagctgctcacggacatcagtccttctggaaggttccccatggaagcaattcaggggcactttgtttccgggatcagggagagcagccacggacagcacaacaagctgcactgctgcaacccaccgcgccagtggcagcaaagcaggaatagacgcagcaggcagagggtgctcaagcgatagctctttgaataaggaaggattggatgtgggaagctgtccctcatggtgagaactcttttcttgttgcctccccttcttttgaggaattaaagaggatggatgacgttgaaatccgtatctggcagctttcataggttcataaattgccctcacaaaccaacacattgccctcacaaaccaacacaagtattttaggcacactttgtcctcactcgtgtgcacccaggaagaattttccggtcggtcacccat

SEQ ID NO: 75191 - DNA, 1077 bp, Oryza sativa
  Clone ID: PAT_MRT4530_75301C.1
atggcttctgcgacgacgctggtaatgctggtagctgccgtcgcttgcctgtgcgctccggcggctgccggcgacggcaacgccgacgcgacgcggcagccgccggtggtgagtggcctgtcgttcgacttctacaggaagagctgccccaaggcggagtccgtcgtgaggaagttcgtcagggacgccgtccgcaaggacatcggcctcgccgccggcctgctccggctccacttccacgactgcttcgtgcagggctgcgacgcctccgtgctgctcgacggctccgccaccggccccggcgagcggcaggcgccgcccaacctcacgctgcgcccgtcagcgttcaaggccgtcaacgacatccgcgaccgccttgagaaggcgtgcggcgcctccgtcgtctcctgctccgacatcctcgctctcgccgcccgcgactctgtcgtcgcgtcaggagggccggagtacaaggtgccactggggcggcgagacagcgccgagttcgcgtcgcagcaggacgtgctgagcgggctgccgccgccgaccgccgccgtgccggcgctgctggacgccctggccaagatcaagctcgacgccaccgacctggtggcgctctccggcggccacaccgtgggcctcgcgcactgcagctccttcgagggccgcctcttcccgcgccgggacccggccatgaacgccaccttcgccggccggctccggcgaacctgcccggcggcgggcaccgaccgccggacgccgaacgacgtccggacgcccaacgtgttcgacaacatgtactacgtcaaccttgtcaaccgggaggggctcttcacctccgaccaggacctcttcgccgacgccgccaccaagcccatcgtcgaaaagttcgccgccgacgagaaggcattcttcgaccagttcgccgtgtccatggtgaagatggggcagatcagcgtgctcaccggctcgcagggccaggttcgccggaactgctcagccagaaaccccggcaccgtcgccgccggcgacctcccgtggtccgtcctcgaggttgcagacagcttcgttttctag

SEQ ID NO: 75192 - DNA, 674 bp, Oryza sativa
  Clone ID: PAT_MRT4530_75302C.1
atcccggtcgacccagcgttcgcccacgcgttccgaaaaaaaaaaaaaaaaaaaaaaaaaaaaaaaaaaaaaaaaaaaaaaaaaaaaaaaaaaaaaaaaaaaaaaaaaaaaaaaaaaaaaaaaaaaaaaaaaaaaaaaaaaaaaaaaaaaaaaaaaaagggggggcctttttaaagtttcaaattttacttccccttttttgcaagtttttatttttttttttttgtcccttaatttaatttaattggccgtttttttaaaacgtgttgtttggaaaaaccttgggtttcccaattttatttgttttggaaaaattccctttttcgcaggttgggtttttggcaaaagggcccgcccgttttgtttttccaaacttttgccccctttttttggcatttggaaccccctttttttggtgtttttaggggggggggttttgttttttttccgctgtttgccctttcccttggcggggtcttttgcccctttttttttggttttttttttttttttttttcccttttttggggggtttttcccttgattttttaattggggtttttttttttggttttttttttttgtgttttcggggcccttggcccctaataattttttttttggggttgttttttttgtttttggtggcttttccttttttttggggttttttt

SEQ ID NO: 75193 - DNA, 159 bp, Oryza sativa
  Clone ID: PAT_MRT4530_75303C.1
atggcggtggaggccgttgttgcctccctcaccgcggccgtcattcggcgattccaccggcagcagagacgactcagcgttgacgacgtcgacccccgccgtggccacttcatcgtctacggaggtgacaatggggagcgtcatcccagtgtagggtga

SEQ ID NO: 75194 - DNA, 222 bp, Oryza sativa
  Clone ID: PAT_MRT4530_75304C.1
ttaggtcgccggcccgtgccctctttctctgccagcggagttcccgtcgtcgacagcgtcgagccccgtcgccgccgctgatgctttgctctctggagagttactcagtagtacagcactgaaagaaccgataactgcatctacgtcttcctctccacagacagtacggcgtgacggcattgacgcttccacaccatcagggtcatctcctgggtcatccat

SEQ ID NO: 75195 - DNA, 492 bp, Oryza sativa
  Clone ID: PAT_MRT4530_75305C.1
atgtcgcgcaccggaggaggggatgggggcgcggccgtagctgccggccgctgcggcggcccatctccatctccgccgccccgtccgacctcctcgccagcgtcgagtccgtcgcctccgccctcaccaccattgtcctcgttacgagtcaagccacttccttgccgccacctccccgatgacgacccggactccgacttcgcgcccgacaacctagacctcctccgcaaccttcccgtccctgaccgcctcctcgtcgtctccgtgggcgtcgccgccaacctcctcttcgcctttctcatcgtctatgccctcgcccgcccgccgccgcccctctcgtctccggcctcctcggccgcagatggggaagggggagagaaaggggggagagagagggggagggaggaggaagaagggttggagagagaggatgacatgtcaacaccgccacgtcagcgccacgtcagcaaaaccgccctccaataccgctga

SEQ ID NO: 75196 - DNA, 1363 bp, Oryza sativa
  Clone ID: PAT_MRT4530_75306C.1
atggcggcgcggcggcgacttgcggcagtgcacgcggctgccacggcggcgggcggtggtgccgtgcagggcactgccggcggcggctcacagcagtgcacacgacggccgcgactgcaggcggcggcaccgtgcggagtgttgccggcggcgcggtgcgacgccatgccgtggcgtggccgtcggcgcgacgccgtgcggtggcgtggccgcaggatgttcagagtaacacaacttctcagagagactaccaagagagttattggaacaaaaacaacttcccgtgcagatttaacactaagttgcttctccacggtgtccaatttacagaggttggctggtaaggtggctgtcatcaccggcgcggcgagcggcatcggcaaggcgacggcagcggagttcatcaagaatggcgccaaggtcatcctcgccgacatccaggacgacctcgcccgctcggtggcctccgagctcggcccggacgccgcgtacacgcgctgcgacgtcgccgacgaggcgcaggtcgccgcggccgtggacctcgccgtgaggctgcacggccgcctcgacgtgttccacagcaacgccggcatcccggggaggataccgcaggacgacgcgctgtccgtcgacctcgccggcttcgaccgcgtgatggcggtgaacgcccgcccggcgctcgcggccatcaagcacgccgcgcgcgtaatggcgcctcgccgcaccggctgcgtcatctgcacggcgagcggcgcgggcgtcgtccccatgccggcgctcgccatgtactccgtctccaaggccaccgtcatcgctgtggtgcgcgccatggcggagccgctggcgcgccacggcctgcgggtgaacgccatctcgccgggggcgacgaggacgccgatgatgctgaacgagatcccgcgcctcgccgtggtgtccccgggcctgagcggggagctgaggaggatggtggaggagggcgccagcgacgccgtcaaggtgctcgagccggaggatatcgcgagggcggcggtgtacctggcctccgacgaggccaggtacgtgaacgggcacaacatcgtcgtcgacgccggctactcggtgcacaaaggagcggagaactcgccggcgcgttgaacatggctagtagctggtgccatgcatgtatgcatgcatgtgcctttgtcagcgccgtaataattctgttattgacgttcttgaaataaagatgatgtggctgtgcagtgacgcgacaacagttgaaataaaatgctgtaactcgaaaaaaaaaaaaaaaaaaaaaaaaaaaaaaaaaaaaaaaaaaaaaaaaaaaaaaaaaaaaaaaaaaaaaaaaaaaaaaaaaaaa

SEQ ID NO: 75197 - DNA, 1967 bp, Oryza sativa
  Clone ID: PAT_MRT4530_75307C.1
ccaaccaaaatcggccgaagagatatgattctgcgacgacgagatcttgtctagtagaccgtgaatatatcgtcccgcgaccaaatctaggtctcgtcacacatatatccgcttcgaagcacgcgcgcgcgcgacgaccccgacccctactactactgctccagtatttagctgcctcgctcgcagcatccgcgtactcctgttcccatgtgcgactccccctcgtcctcgtcgtgttcgtcgttgtcgttggcgttggccatgggagagaggatgaggagggcggcgcacgcgatgctgttcccgttcccgtgctcggggcacatcaacccgacgctgaagctggccgagctgctgcactcgcgcggggtgcacgtcacgttcgtcaacacggagcacaaccacgagcgcctgctgcggcggcgcggcggcggcggggcgctgcgcgggcgggaggggttccggttcgaggcggtgcccgacgggctgcgcgacgacgagcgcgccgcgccggacagcacggtgaggctgtacctgtcgctgcggaggagctgcggcgcgccgctggtggaggtcgcgaggagggtggcgagcggcggcggcgtgccgcccgtgacctgcgtcgtgctcagtggcctcgtcagcttcgcgctcgacgtcgcggaggagctcggcgtgccggcgttcgtgctctggggcaccagcgcctgcggcttcgcgtgcacgctccggcttcgccagctccggcagagagggtacacgccgctcaaagacgagagctacctgacgaacggttacctggacacgccgatcgactggatcgccggcgtgccgacggtgcgtctcggcgacgtctccagcttcgtccgcacgctcgacccgaccagcttcgcgctgcgcgtggaggaggacgaggcgaacagctgtgccagggcgcagggcctcatcctcaacacgttcgacgacctcgagtccgacgtgctcgacgcgctcagggacgagttcccgcgcgtgtacaccgtcgggcccctcgccgccgaccgcgcgaacggcggactgagcctgtgggaggaggacgcggcgtgcatggcgtggctcgatgcgcagccggccgggtcggtgctgtacgtcagcttcgggagcctgaccgtgatgtcgccggaggagctcgccgagctcgcgtggggcctcgccgacacccgccgcaccttcctctgggtcatccgcccaggcctcatcgccggcgccggcgccggcgaccacgacgtcgtgaccaacgcgttgccagatgggttcgtcgcggagacgaagggccggtgcttcatcgccgagtggtgcgcgcaggaggaggtgctccggcaccgcgccgtcggcgggttcctcacgcacagcgggtggaactcgacgacggagagcatctgcgccggcgtgccgatgatctgctggccggggttcgccgaccagtacatcaactcgcggtacgtgcgcgacgagtggggcatcgggctccgcctcgacgaggagctccgccgcgagcaggtcgccgcccacgtcgagaagctcatgggaggcggcggcggcggcggcgacaggggcaaggaaatgaggcgcaacgccgccaggtggaaggcggcggcggaggcggcgacggcgaagggcggctcgtcgtacggcggcctcgacaagctggtcgagcagctgcggctgggtcagtgacgacatggcacacacgcgtacacgtcatcgtcgtgacaagttcggcagttcggctggctggctcactcatcggacgcatgtgcaaaatgcactttggatgtttctccttttcttttttttttcttcttcttttcatttcttgcagttgcagagtcgcagttgttcagttcttatctggttcttggatatgatttttagcgacaggagtgatagcggtacaacgttttcttaatgcagtggtttgtttagtt

SEQ ID NO: 75198 - DNA, 558 bp, Oryza sativa
  Clone ID: PAT_MRT4530_75308C.1
atggctgacactgatgatgagcttgaccccgtcatcgtcgccggcgccaaccgtgcgttcaccgacaacggtcgcaagcttgcagtcggcgctggtgtcatcatcaatcatcatcgtttatcctcacggctgccaccgatggcgaatctgatcctggtcatcgttgtcggcgccgaccgtctctccactgccgacacgctcaagcttggagctgtcatcggtgttgtcatcaaccatcggcgtctatcctcccggctgccaccaatggcgaacctgtccctggtcatcgtcctggcgccagtcgtttctctgccgatgacaagctcggccttgtcatcgttgccagtgccaatcgcgcattcgtcgtcaacactagaagggcgattctaccccatcaccagtgaccacaagcttggcatctctaccgacgaggctgtggaccgttgtcggcgcccacacacatctacaccaccatcaccgtcatgcatgggagaacgtgaagcgaagaccgatgacaacgaccagcgtagcttaatgagaggtttctcaggagtttaa

SEQ ID NO: 75199 - DNA, 1061 bp, Oryza sativa
  Clone ID: PAT_MRT4530_75309C.1
atggcgagcacgccgtcgaggttggagggcggcgcggtggatggcggagacggggtgcggaggacggcgagcagggtgcccgtcacgttcgtcaacacggagcacaaccacgagcggctgcggcggcggcggggcgctgcgtgggcgggacgggttccggttcgaggcggtgccggacagcacggtgaggctgtacctgtcgttgcggaggagctgcgcgcgatgctggtggaggttgcgaggagggtggcgagcgacggcagcagcggtgtgctgcccgtgacatgcgtcgtgctcagtggcctcgtcagcttcgcgctcgacgtcgcggaggagctcggcgtgccggcgttcgtgctctggggcaccagcgcctgcggcttcgcgtgcacgctccggcttcgccagctacggcagagagggtacacgccgctcattcgctcaaaggtccgtttcgtccgacgagagctacctgacgaacagttacctggacacgccgatagactggatcgccggcgtgccgacgcttcgcactacgcgtggacgaggacgaggcgaacagctgcgccagggcgccggggctcatcctcaacacgtacgttcgacgacctcgagtccgacgtcttcgacgtgctcagggacgagttcccgcgcgtgtacaccatcggcccgctcggcgccgaccgcgcgaacaacctagtcggcggcggcgccgctgggctgagcctgtgggaagaggacgccgcgtgcatggcttggcttgacgagcagccgaccgggtcggtgctgtacgtcagctttgggagcctgacgtgatgtcgcctcgagctcgccgagctcgcgtggggcctcgccgacacccgcgccccttcctctcggtcatccacccaggcctcgtcgccgccgccgccgccaccggcggcactgctccgctcccctctgctcggctgatcctctgggagagagtgggtagagacagagaagagaggaggggagaggagaggagaggagagagaggtggagaggggagggaaaaggaggttgacatgtggggcccacat

SEQ ID NO: 75200 - DNA, 458 bp, Oryza sativa
  Clone ID: PAT_MRT4530_7530C.1
ctattgttgcatcatatggttgaggtttgcgaactgttcatcaacagactgctgccactcccgtgactgcaccacatgatcctccagtgtgtgctgcatgttccccgcttgcagttcaagtgtatccatcctcgggtgagttctcccagatccccttaagaggagactgagcgacgcatccgagaggatcgagatggaccacttgaactggaggagcatgagtatccccagtgcagctcctgtggtacatgccactggctgtcgctggcactctggggcatccgcagtcgggtcccaactgccttcatacatctgcactggtggtgaagaggaagacgcctcttgaggtgctcctcttgccattcgtcgcgttatcctgcgtgggacatctcaaggcaactccacttggagtggaatggttagttctcggcagttatacaaatgaaactccggattag

SEQ ID NO: 75201 - DNA, 380 bp, Oryza sativa
  unsure (1)..(380): unsure at all n locations
  Clone ID: PAT_MRT4530_75310C.1
gtaaataatacgatgtatttatttcctttaagttttgctccgttactggatgcaaattaaataacgcgtcacaacagtcacaacagtgtcacaatatttcaagctacgcaatgggtagggtctcattatcaaatcttctccctttgccggaataaccaanggtaacacttttanaacacnnaagtgtttccgctattatttcatncnnttctcttttcaagtgnannagagcccnnaaaaaataatggcttgccctttgnnaagagattgntgatggtcttgtggttttgaggccaccttgactttggattagtacttttcatttatgatggttgcaaagtcctgtcacttttggactttggacaanccgacgccgccgt

SEQ ID NO: 75202 - DNA, 489 bp, Oryza sativa
  unsure (1)..(489): unsure at all n locations
  Clone ID: PAT_MRT4530_75311C.1
atatatactttctgaagatagtatgcatggctatttaaacttaagattttcttagcttgttatatgtncgatacctcactacctgaaactttttgtctggtccgataatttttaatgctatgaatttcaactggaagcagcagcattttgataaagtcatatcagatagatctgtaggaagaaatccctcaacttgagtttgatgtgaacttggaccccaattaaatagatgaatgaattaatatgtatggttagacatgtattagacatggtcccaaggattactgtggactactgttaagcacaatgatttgaagggttcatcactgctgtatgatactacctgtttaggaaaatgtttatggtgctaaaaccatagcagttaaggcaggtaataaatgctgcataaagtgggngttaggtttggccttgaccaatttatttaaaggtggtacattttaggcggggaatcacccaataacaggggga

SEQ ID NO: 75203 - DNA, 457 bp, Oryza sativa
  Clone ID: PAT_MRT4530_75312C.1
atggggtacgaccccagagaacatccagagtcgaagaaataccagcttcttgatttcaggataaggaaagagctgactgacaagagattgaagttgctgctgaagaagaagcgaatgattctctaccctcaccaatccctgaagcacaagaagggtgttcctacacccctactaggcagcaatcctggtcaacaggtggatcataaggaaactattgattcgtactacatcatgagacgagggatcctaccggcataccaccagatgttctaccagctgtgtgatctggaggacccagagctccaggccatcgtcaccaaccctctctggcacaagaagaggcccaacatgaagacgggttactttgaggtggagatgttccgtcagctccgggacgccctcactcagatgatcaaggataccgtgctggaagtcaatgcaaaaaaattgcagcaag

SEQ ID NO: 75204 - DNA, 1298 bp, Oryza sativa
  Clone ID: PAT_MRT4530_75313C.1
caggctacaccaaggcttagtgaagacaaggtgaagcaatgcgtagatccaaagcttggaggagcattcccactcaaggctgttgccaaggcttcctttgcccaccgtcaagctggtgtcggagtccagcgtgttgaaggtagaggagaggtcggtggtggaacaaggggctgaaggccatttcggaggggaagctagccgttatccttttagccggtggagacttggcctggcagctctgatcctaaagggtgtttcgttcaacatctggtgggataatcgatagagctatatatgcagaggataggacatggtgactttatgaaattgtgaaatatcttggaatatatgtcgattacttaagatcttgttgaaggatatctggaattggctgcagagacaatcatttttgtggcagtcatgcccgggtagggtgtagagtactgcattacagtggatgttgatctacatatttatagttacagctgggagctatttctagacagtcaactctcctgaaaatcgattcatattccaaaggcaaggcatcaggtaaccgcgggcgtacatttagggagctgtgcttttgcgaaaaaaaatgtccagcccacaactgatctaaaaaagtacatcgaagctattaagcggttcctacaccattcaagcagcttctatgctgtaaccatcaacagcacattcatcaagcaagatagagtttactttacaaaggaattttcacagaactacataaaaccgctaatggaaggtaaaaaaccgtcgacactgaagtacaagtagcaggaggtatttcaaccagcatgatcctccacgtttcaacagatgaccgttgcaacttgaagaaagggtggacaaagttcgcagcacagatgacatagctctcggatcagtttgcatcttccatttctacaggacaacctgcctggaggttactattgatgtcctgtgaagaccatatgggcattcatagctatcttatgatcatgcttctgctgccagtaaacaagctgatcactatcaggatcggccgcttccctcccctggaattgttaccatgcttattagttctacaccttaggtgcttactatccatagtgcactagcttggacattttaagaaacgtctgtgtatatccatgttgctgctaaagactactagatatcggtatgcctataactgtttggcactgcagtttacttctatttcacttcctgctttcgcgcgcgcttttttaacaccaaagaatacttacatttatatctcaaaaaaaaaaaaaaaa

SEQ ID NO: 75205 - DNA, 1132 bp, Oryza sativa
  Clone ID: PAT_MRT4530_75314C.1
cggtttaagcacggatggaatgtatccgtttagagagatgagcagcggctatagcacttggccggtcaccatgtgcatctacaatctaacgacattgatgtgtacctaaaatcattggttgtagatgcacatgccgattattattcaaggcccaaagcaacctggtaacgacattgatgtgtacctaaaatcattggttgaagatctgaaagtgctttggaggaaagagggcgtccccgtgtgggatgaggacaagcgggaacaatttaacctacgagcgttgcttttcgttaccattaacaattagcctacacttagtaatctatccggacagtcaaactagggtacaaggcatgcactcactgtatggatgaaactgagagtacgtatctgaagcattgcaggaaggttgtgtacatgagccatcgttgattccttgttgcgaaccaccatgtacggaagaaagacaagcactttgaacagaagccaaaccatcgtactaagcctaaacatcgcaatgagaaagcaatgttcgctatggtgaaggatctgaaagtagtatttggaaaggggcctagcagccaacttatagagagcgaagatggtcacgcggagatgtggaagaagaactctattttttgggaactaccttattaggaagtattggacggccgccatgcaatcgacatgatgcacctcactaagaacctttgcgtaaacctactggcttcttaggtgtatatgggaagtccaaagatacactcgaagcacgtaatgatctcaagcatatggaacaacgcgagggccttcattcggaaccgactgagaaaggaagccattacttgagtccagcaagctacacctgagcaaggaagagaaggagagtatgtttgaatgcctggagagcatcaaggtaccgtccggatactcctcgaatataaagagaataataagcacgaaggataagaagttcacaaacctgaagtctcatgactgtcacgtgctgatgacacagctgcttcttgttataattcgtggtatccttcctgataatgtacgggcaacaataacgaagttttgtgctttcatgaacgcaattttccgatctcacaaagtcgtagtatacgacaga

SEQ ID NO: 75206 - DNA, 576 bp, Oryza sativa
  Clone ID: PAT_MRT4530_75315C.1
taaaacgttctcgttcaaacgttccaccgtggagtcggcggtggagtcggcgcacggcggcggcggcggtggcggcggcggtggagtcggcgcgtggcggcggcggtggtggagtcggcggcagcggtggcggcggtggcggcggcggaggtggagtcggtgcgcggcggcggcggcggcggtggaggtggagtcggcgcgcggcggcggcggccggcggtggagtcggcgacgaagatgacggcgaggtcgatccggtcggccggcgcgtgtcaagatcgatcgagagagagagaatgcgagatcggaggcgcaagatttgcgcccctcaccttgagggaggcaacgctgccggttgcgttcgcgagggcagatgagcgcggcgagcacgacgacgatgacggcggaggcggcgacgacgtctggggcggtaatggcgcgggaggaagaagatcgatcgtggagaagtctaagtgtggtgcagggaagccgatgcagtggatatttatacccggtaatcttttgtcccggttcgtggcttcaaccgggactaaagatatctttagtcccggttgg

SEQ ID NO: 75207 - DNA, 885 bp, Oryza sativa
  Clone ID: PAT_MRT4530_75316C.1
atggcacaaagccgacccggtcgaacgacagcgtgcggcggcgtgcggccagacgaccgccggcgacggcagcgcgtcgcggcagcggacacgcggagcggcggaggatggggaaaaaggaagaggcggagggagagctcaccgagggctgcgacagcgaggggcggggaaaggcgaggaaactcggcgtcggcgctcctcgggacgaaggcggaacggcggcccggcggcattccgcgagcaggaaccggtggacggcggccggaaggacctagggaggataggggagaggttaggagggggagagagggctcccagcggcatgaatcactggtcggagcgcgacttggggtggctaggagcggcgccaagcggcggctggagtcagcggcggcggtggaaggaggtggtgcgcgtggcgacggtgcttcggaggcggggaggggaaatggagcagatgccggggtgcggcacgacgcggcgaagccgctggtggtggtcgcgcggaacggcggtggtgggagcggctgtggcgaccagatggagggtcgtcggcgagcggcggcgggaggtgcaacggtggcgggggaaggggaggccggaccgagcccgggagaggcggagtcggggcggcaaccgccggtggcgtgggcggcatcgtggggtgtgggtggcggttttggaggggagaggtgggggaaaacggcgcggacgtgggtggcgaggtcccacggacgagcgcgcgcgcgcggggtggaggaggtgggcggaaacggcggcgtcgtggggcggctcgggcggccatggcggcagttggagctggaggaaggggatgacagactttgcgagggagaggggaaacgggctgacggccgaagagattag

SEQ ID NO: 75208 - DNA, 156 bp, Oryza sativa
  Clone ID: PAT_MRT4530_75317C.1
aaggcttaaaaggtccatcgaacgaatcatgatttcacaacatgcattcagccaaaactaccccatggggatcagccaaaaagggtgcccctgataaactgaacccttacattgcaatcatacaggcctgcgatactactacacgctcttggaaag

SEQ ID NO: 75209 - DNA, 3075 bp, Oryza sativa
  Clone ID: PAT_MRT4530_75318C.1
atgtgcaaaaaccagaaggagtattccaccacacgaactattcatgcccacctgtttcagtgggggttcatgcgtagctacaattgttggacatcgcacggagaggttgggattgcaatggaagaagatgaagtagaagatgagaacattccggactgggctcagtatggcggatttgaagaaaacacaatgggcgaggcgaagctggatgttgaagggaatgacggtgttgataaacttggtcaaatattgcgggacttacaggaggactgcgaaagtgaaaaggaggtgcagaaactggagcgcatgttagcggaccacagaacagcgttgtacccaggttgcgagaagggctacaaaaagttgagtaccatcctagaattcttgcaatggaaggctaaaaatggtgtgagtgaccaggcattcggcgagttattgaaactcgtaaagaacattcttccggaggggaacgaattgcccgaaagtacgtacgaagctaagaagacagtctgccctctaagtctggaagtacagaagattcacgcatgtccgaacgactgtatcctgtatcgcggtgagtacgaaaacctggaagcatgccctgtttgcaaagcactacgatacaagataagacgagatgatccaggtgaagttgacggacaacctttgaagaagagaattcctgctaaggtgatgtggtatttccctataataccaaggctgaagcggtttttcaggaacaaatcacatgctagaatgatgtggtggcacgcagaagaacgtaaacaggatgggatgctgagacaccccgctgacgggtcgcagtggcgaaatatcgacagaacatttaaagacttcggcgaggatgcacgaaaccggaagtacatcatgatgccgattattattcaaggcccgaagcaacctggtaacaacattgatatgtacctaaaaccaatggttgaagatctgaaagtgctgtggaggaaagagggcatccccgtgtgggatgaggacaagcaggagcaatttaacctacgagcgttcctattcgttacaattaacgattggcctgcacttagtaacctatccggacaatcaaacaaggggtacaacgcttgcactcactgtttggatgaaactgaaagtacttatctgaagcattgcaggaaggttgtgtacatgggccatcgtcgattccttgctgcaaaccaccctgtacggaaaaaaggcaagcacttcgaacagaaggcagaccatcgtactaagcctaaacatcgcaacgggaaagcagtattcgaaatggtgaaggatctgaaagtagtatttggaaaggggcctggcagccaacctatagagagcgaagatggtcacgcggcgatgtggaagaaaaactctattttttgggagctaccctattgggaggtcttggacgttcgccacgcaatcgacgtgatgcacctcactaagaacctttgcgtaaacctgctgggcttcataggtgtatatgggaagtccaaagatacacttgaagcatgcaatgatctcaagcatatggaacaacgcgagggcctttatccggaaccgaacgagaaaggaagccattacttaagtccggcgagctacaccctaagcaaggaagaggagagtatgtttcaatgcctagagagcatcaaggtaccgtccggatactcctcgaatgtaaagagaataataagcacgaaggataagaagttcacaaacctaaagtctcatgactgtcacgtgcttatgacacagctgcttcctgtaataattcgtggtatcctttctgataatgtgcgggcaacaataacaaagctttgtgctttcatgaacgcaatttcacagaaagtcatcgatccagaaagtttagccgcccttcagcatgacgtggtgcaatgccttgtcagctttgagttgatctttccaccatcattcttcaatataatgacgcatcttctgtgctaccttgtaaaagagatcggtattctcggtcctgtgtacctacacaacatgtttcctttcgagaggtacatgggcgttctaaagaagtacgttcgtaaccgttctcgtccggaagcaagcatcgcgaaggggtatggaacagaggaggtcattgagttctgcgtagattttattgaagacctcgagccaatcggggtatccgaatcaatccatgaggggagactacggggaaagggcacacttggaaggagagcaattatgactgtagacaacgatttattccgtaaagcacatttcacggttttgcaacaatcttcgttggttgctccttacatcgatgagcaccttgtgattgttcgctcaaaaaacagtggcaagtccgatgcctggattacacgccatcatattgatactttccccgcttggctgcgagaacacctcctgggtaacgagacgattgaccgacaactagccttcttggctaggggaccctccggctcggtaactacattccaaggttatgaaatcaatggatacactttttacacaagagcccaagacaaaaagagcacgaaccagaacagtggtgttcgtatcgatgccataggacatgatggtccaactagcacgtattacggtgtcatcgacaacatttgggaactagagtatggacccctgaaggtccctctgtttcggtgccaatgggttaggctgactggtggaggcgtaacgattgatgacagcgggatgacaacggttgacctaaacaaggtaggatactcagatgaaccattcgttctagccaatgatgtaacgcaagttttttacgtgaaggacatggatagcaaaccaaagaaggggaaagggcccgatgagccaagacgctatgttgttctcccaggcaagaggaaaatcgttcgagtcgaggataagactgacgaaaattacgatctatttgaggggcaaccaccatttgcagtgacggttgacccgagcatcatactatcaaaggaggacacgccatactcacgcaacgatcatagcgaaggaacaatagtgaggagaaagtacgtgaggaagacagtgacctag

SEQ ID NO: 75210 - DNA, 342 bp, Oryza sativa
  Clone ID: PAT_MRT4530_75319C.1
ttttggggtttttttaaatttttattcgggtttttacaacctatatctttcttatttttttctcacacatgaacttgcaaactttctacaccgaacaatggccgaacagcttctcattaagaactgggcccaaaacaacaaaaaagaccccttcctaaattaacacagcccacacacccaaaaaaagaccgtccaaaaaaaaaaattcacacaaaccacactattcggctactcgtcgcattaaaaaccttccccctttccaccatgcacaggagtaacccgccaccaaacatgcaccccaaataaaagttgaagtacaagccacctaacaatgctctcctg

SEQ ID NO: 75211 - DNA, 414 bp, Oryza sativa
  Clone ID: PAT_MRT4530_7531C.1
atgggagcgggacggcggcgacgacagaagatgatgccgccgccgctgtccaactttgacgcgaggaacggcgtgcctacgccgggacaggcggagcaggagacgatggagctggtgcgcatgctcaccgcgtgtgccgactcagtctccgccggcaaccatgaggccgccatctactacctggcccggctctgcgagatggcttcgctggcagggcccatgccgatacaccgcgtggctgcctacttcattgaggtgctcacgctgcgcgtcgtgcgcatgtggccacacatgttcaacatcagcccaccgcgggagctcactaacgacgccttcagcggcgacgacgacgccatggcgctgcggatactcaacaccatcacgcccatcctcctcctcggcaagcacagctag

SEQ ID NO: 75212 - DNA, 6630 bp, Oryza sativa
  Clone ID: PAT_MRT4530_75320C.1
gccctttcctgagcgaatccatgatggatcggcaatggatgtacgtggactggcggtcgaaagaatttattgacggcgtgcattattttttgggtgtggccaatgataacaagcgtaacagttttataagctgtccatgcaacaagtgcaaaaaccagaaggagtattccaccgcacgaactattcatgcccacctgtttcagtgggggttcatgtgtagcgacaattgttggacctcgcacggagaagttggggttgcaatggaagaagatgaagtagaagatgataacattccggactgggcttggtatggcagatttgaagaaaacacaatgggcgaggaggagctggatgttgaaggtaatgaaggtgctgatgaacttggtcaaatattgcgggacgtacaggaggactgcgaaagtgaaaaggaggtgcagaaactggagcacatgttagcggaccacataacagcgttgtacccaggttgcgagcagggccacaaaaagttgggtaccatcctagaattctagcaatggaagactaaaaatggtgtgagtgacaaggcatacggcgagttattgaaactcgtaaagaacattcttccggaggggaatgaattgcccgaaagtatgtacgaatctaagaaggcggtctgccctctagatttggaagtacagaagatacacgcgtgtccgaacgattgtatcctgtatcgcggtgaggagtgcgaaaacctggaagcatgccctgtttgcaaagcactacaatacaagataagacgagatgatccaggtaaagttgacggatagcctttgaagaagagaattcctgctaaggtgatgtggtatttccctatataataccaaggctgaagcggtatttcaggaacaaatcacatgctagaatgatgtggtggcacgcagaagaacgtaaacaagacgggatgctaagacaccccgctgacgggtcgcagtggcgaaatatcgacagaacatttaaagacttcggcgaggatgcacaaaacgtgaggttcggtttaagcatggatggaatgaatccgtttggagagatgagtagtggccatagcgcctggcaggtcaccatgtgcatctacaatctgcccccttggctatgcttgaagcggaagtaaatcatgatgccgattattattctaggcccgaagcaacctggtaacgccattgatgtgtacctaagaccattggtagaagatctaaaagtgttgtggaggaaagatggcgtccccgtgtaggatgaggacaagcagaagcaatttaacctacgagcgttgctgttcgttactattaacgattggcctgcacttagtaacctatccggatagtcaaacaaggggtacaagcttgcactcactgtatggatgaaactgaaagtacgtatctgaagcattgcaggaaggttgtttacatgggccatcgtcgattccttgctgcaaaccaccctgtacggaaaaatagcaagcacttcgaacagaaggcaaaccatcgtactaagcctaaacatcgcaacgggaaagcagtgttcgaaatggtgaaggatctaaaagtagtatttggaaaggggcctggcagccaacccatagagagtgaagatggtcacgtggcgatgtggaagaactcttttttttgggagctactgtattgggaggtcttggacgtccgccacgcaattgacgtgatgcacctcactaagaacctttgcgtaaacctgctgggcttctagggtgtatatggtaagtccaaagatacacttgaagcacgcaatgatctgaagcatatggaacaacgcgagggccttcatccggaaccgaatgagaaaggaagccattacttgagcccggcgagctacaccctgagcaaggaagagaaggagagtatgtttcaatgcctagagagcatcaaggtaccatccggatactcctcgaatgtaaagagaataataagcacgaaggataagaagttcacaaatctaaagtctcatgactgtcacgtgcttatgacacagctgcttcctgttataattcgtggtatccttcctgataatgtccgggtaacaataaagaagctttatgctttcatgaacacaatttcacagaaagtcatcgatcctgaaagtttagccacccttcagtagtacgtggtgcaatgccttgtcagctttgagttgatctttccaccgtcattcttcaatataatgacgcatcttctatgccaccttgtgaaagagatcggtattctcggtcctgtgtacctacataacatgtttcctttcgagaggtacatgggtgttctaaagaagtacgttcgtaaccgttctcgtccggaagcaagtatcgcgaaggggtatggaacatagaatgtcattgagttctgcgtagattttattgaagacctccagccaatcggggtacccgaatcaatccatgaggggagacaacggggaaagggcacactaggaaggagagcaattatgactgtagacaacgatttattccataaagcacatttcacggttttgtaacaatcttcgttggtttctccttacatcgaggagcacctggcgattgttctctcagaaaacattggcaagtccgatgcctggattgcacgccatcatattgatactttacccgcttggctgcgagaacacctcatggtaacgacacgattgaccgacaactagccttcttggctagggaaccctctggctcggtaactacattctaaggttatgaaatcaatggatccacattttacacaagagcctaagacaaaaagagcacgaaccagaacagtggtgttcgtatcgatgccataggacacgatggtccaactaacacgtataacggtgtcatcgacaacatatgggaactagagtatggacccctgaaggtccctctgtttcggtgccaatgggttaggctgactggtggaggcgtaacgattgatgacagcgggatgacaacggttgacctaaacaaggttggatactcagatgaaccattcgttctagccaatgatgtaacgcaagttttttacgtgaaggacatggctagcaaaccaaagaaggggaaagggcccgatgagccaagacgccacgttgttctcctaggcaagagaaaaatcctctcgatcttgatgacgctggccgaccggacttcgccgccatcgccatcgccgccaccaccgctgccacctccgccgccgcctcgcaccgcacccgccgccgcgcgccaactccaccgccgccacctcgctgacgccaacgccaccgccgccacctcgacctcactatctttttttctttgcacacacagatggcagaccgcgatgacgaacaaatcctgttagacgcgatcgtagagggcagcaatcagtactgggtggatgaggaggggaacgaggatcccaaccaatacctgaataaggagggccacgaagagggtaaccaggaggctaaccagaaggggactgatagccaaccgtcggccggacagaacagcccacgcgggaaaagaggtcccgcgaagaagctggagggaaggcacattattactgagattgccccagacagcgaaccagtagccccggcaggtataggccgaaagtttgtgaatcatagcgattgggtcgtgagagacaacgtccccatcagcataatgtactggcgtcgaacaaggtcccgcggggatgaagatagttttctccctgacacagagaaagatatgctgtggacaaccatgctagagacattcacgatccatgaggcaaatcgtccaagatgcaaagaatggaccctcaagaaaatgtcagaactgttccaaagctacaaatctgatttgtacaagagatacatcgtcaagggcttgacacctgatttcaaacagcataagaagctaagggatcactgggatgtgtttgtggcctataagactggagcgcaagggcaagcacaaatagaaaagaacaaagccaatgcagctaggacgaaataccatcaccggctagggtcaggcagatatggaaaggcaatccccaagtgggacaaattggaagccgacttgataccacggggtaccgagccggcaatggctaaatggcctgagcgatcaaggaactggttctatgcacatggtggatctctcaatccagttgatggcttcctcatattcggcgatgagatccgagaagtagcccaccaacttcaggatgcagttgaagcctctatgcaagggactttcaggccagacagagagagaaggacgagctcacccatgcactacagaatcctgagcagccaggacgaacgcggggcaaaggcatcgttccttggaaatatggattcaaagtggacatccacacgtataggagtcggattaggagcaatagggataccgaggctaagatcgttgatcttgagtacagggtgtccacctacgaggcaaggatgcaagaggaggttacgagacaggtggaccaacgcttggccaagtagagcgaaatggaaacacaggcgcccgtcatggtgagcccctcaggcaaccgcagcagctgcgcatcaacgggccatgttggatctgagggcattgaggccgtggcagctaacgaagcaacccacttccccgttgatgagatcacacagtggacaccctgcaatatgcatactcccttcaggaattgtctatcaaggtggcgtcgggcatggccatacccacggacccttcgggtacataccattgcaggcccattccacctggatacgcgaaggtagagatagagctggtggaatgaacatacaaggatctcgagcttgacatccccggaggtgacggggagacgaaacttggagacacagcccaagccatcatactctggcggaagaagtacatcgtgtttcccgggcaagaaggttcgtccgctcctccttccccaccgcaagcaccgtctcctccacctcctcagtctcctttggctccttcggctacaccgtcacctcccgctcctccgccttcaccacctcctccatgtgtacctgctgccaagtctgcaccgtcgggtccgcgggaaacgactcctcggcctgcactagctaccaagtctacaccgtcaaggtcccgcccgtatgagcccatgctgtcaagaccgaagaagaaagccaaatctgacgagccaaggctccccgctctcaagaaaagggcgtatgacttgactccgaaggagctcgatgaagccgttagagcggaagttagggagcagttgaagccacagagtccggaaaagaagatccctatacccccggcggttcaagatcactttattaagatggccgaaccgagcaaacaggtcgtagtttctgactacgatcgaacattgaggaaggctcttaaagccaagccagtagcagtgaagtgtagaaaggaagtccctcagctggggtagcaaccacaacaagaggttgaaccgttcgtaaatccagaacaacttgagatacgcaagttcttgagagaaactagactaaggatggagcagttgctaaaggacacacctatcgaaatggctccagtgaagtacatgtttaaactcggtgaaccgctagtcacggctgataagataagagagctacctacacagatgtaccggtttcatcaatggtacttggacaaatcagggatgggtagagagatgttcggagcgagggtgcgaaactcaatttattaccaaggagatgatgttctttggatccattacaaagatgtctttgacttatatataccaccgagacgccctcgacgtctctcttctcagcacgtggactttaatggagattcagttgtgccattagcacaacaaattcaatacaggattcatggacccccacaaagtgaacacgctgatgctgcaaaactacgagaaacaaaccgaggacaatatcctccatttcctagtgcagcagcattataagacgttcatactacttccctacaacacatcattccactgggtccttcttcttttcgaccttgagagatccaaaatccatgtctacgattcaatggataaaccagagaaaactttcgcacatattttcgaagtgatagatagggcatggattcggttccgtacattggtccgcgggatttggaatgaaaaactcacccggatgttcaattttccgatgatttacatgatagatagcctcacccacgatgatttcataagggctgttcaagaacagatgatgggattcatcaatgagcagattatcgatcccacaggagaattctattacgatggaaaagagggctacccggaggttctggccgaaacttccgggcgctgtttaattgcaaaaaagttcctaagtgctgcccggaagttggcacttttgcccggaacctcctggcaggtttccaatcttgtggatgtcccgggaaagtttgtgaaggttttcctcacctccgcaaggaaacgagttttaatttatctctgctgcccggaagttcctggctcaagaactccggaagttccgggctactcatcctgcccagaagttccggtgttcatcaccaggaggttccgggccctgtcaatttaa

SEQ ID NO: 75213 - DNA, 6404 bp, Oryza sativa
  Clone ID: PAT_MRT4530_75321C.1
atgaatcggcaatggatatacgcggatcggtggtcgaaagagtttattgacggcgtgcattattttttgggtgtggccaatgataacaagcgtaacggttttataagctgtccatgcgataagtacaaaaaccagaagaagtattccaccacacaaactattcatgcccacctgtttcaatgggggttcatgcgtagctacaaatgttggacctcgcacggagaggttggggttgcaatggaagaagatgaagtagaagatgagaacattccggactcggctcagtatggcggatttgaagaaaacacaatgggcgaggcggagctggatgttaagggaatgatggtgctgatgaacttggtcgaatattgcgggacttacaggaggactgcgaaagtgaaaaggaggtgcagaaactggagcgcatgttagcggaccacagaacagcgttgtacccaggttgcgagaagggctacaaaaagttgagtaccatcctagaattcttgcaatggaaggctaaaaatggtgtgagtgacaaggcattcggcgagttattgaaactcgtaaagaacattcttccggaggggaacgaattgcccgaaagtacgtacgaagctaagaagacagtctgccctctaggtctggaagtacagaagatttacgcgtgtccgaacgactgtatcctgtatcgcggtgagtacgaaaacctggaagcatgccctgtttgcaaagcactacgatacaagataagacgagatgatccaggtgaagttgacggacagcctttgaagaagagaattcctgctaaggtgatgtggtatttccctataataccaaggctgaagcggtttttcaggaacaaatcacatgctagaatgatgcggtggcacgcagaagaacgtaaacaggatgagatgctgagacaccccgctgacgggtcgcagtggcgaaatatcgacagaacatttaaagacttcggcaaggatgcacgaaacgtgaggttcggtttaagcacggatggaatgaatccgtatggagagatgagcagtggccatagcacctggccagtcaccatgtgtatctacaatcttcccccttggctatgcatgaagcggaagtacatcatgatgccgattattattaaaggcccgaagcaacctggtaacgacattgatgtgtacctaagaccattggttgaagatctgaaagtgctgtggaggaaagagggcgtccctgtgtgggatgaggacaagcaggagcaatttaacctacgagcgttgctattcgttacaattaacgaatggcctgcacttagtaacctatccggacaatcaaacaaggggtacaacgcttgcactcactgtttggatgaaactgaaagtacttatctgaagcattgcaggaaggttgtgtcatgggccatcgtcgattccttgctgcaaaccaccctatacggaaaaaaggcaagcacttcgaacagaaggcagaccatcgtactaagcctaaacatcgcaacgggaaagcagtgttcgaaatggtgaaggatctgaaagtagtatttggaaaggggcctggcagccaacctatagaaagcgaagatggtcacgcggcgatgtggaagaaaaactctattttttgggagctaccctattgggaggtcttggacgttcgccacgcaatcgacgtgatgcacctcactaagaacctttgcgtaaacctgctgggcttcttaggtgtatatggcaagtccaaagatacactcgaagcacgcaatgatctcaagcatatggaacaacgcgagggccttcatccggaaccgaacgagaaaggaagccattacttaagtccggcgagctacaccctaagcaaggaagagaaggagagtatgtttcaatgcctagagagcatcaaggtaccgtccggatactcctcgaatgtaaagagaataataagcacgaaggataagaagttcacaaacctaaagtctcatgactgtcacgtgcttatgacacagctgcttcctgttataattcgtggtatccttcctgataatgtgcaggcaacaataacgaagctttgttctttcatgaacgcaatttcacagaaagtcatcgatccagaaagtttagccgcccttcagcatgacgtggtgcaatgccttgtcagctttgagttgatctttccaccgtcattcttcaatataatgacgcatcttctgtgccaccttgtaaaagagatcggtattctcggtcctgtgtacctacacaacatgtttcctttcgagaggtacatgggcgttctaaagaagtacgttcgtaaccgttctcgtccggaagcaagcatcacgaaggggtatggaacagaggaggtcattgagttctgcgtagattttattaaagacctcgagccaatcgaggtacccgaatcaatccatgaggggagactacggggaaagggcacacttggaaggagagcaattatgactgtagacaacgatttattccgtaaagcacatttcacggttttgcaacaatcttcgttggttgctccttacatcgataagcaccttgcgattgttcgctcagaaaacagtggcaagtccgatacctggattacacgccatcatattgatactttccccgcttggctgcgagaacacctcctgggtaacgagacgattgaccgacaactagccttcttggctaggggaccctccggctcggtaactacattccaaggttatgaaatcaatggatacactttttacacaagagcccaagacagaaagagcacaaaccagaacagtggtgttcgtatcgatgccataggacacgatggtccaactagcacgtattacggtgtcatcgacaacatttgggaattagagtatagacccctaaaggtccctctgtttcggtgccaatgggttaggctgactggtggaggcgtaacgattgatgacagcgggatgacaacggttgacctaaacaaggtaggatactcagatgaaccattcgttctagccaatgatgtaacgcaagttttttacgtgaaggacatggatagcaaaccaaagaaggggaaagggcccgatgagccaagacgccatgttgttctcctaggcaagaggaaaatcgttggagtcgaggataagactgacgaaaattacaatctgtttgagccgcgcgccgacaccaccgccggccgcgcgccgactccacctccaccgccgccgccgcgcgccaagtccacctccacctccaccgccgccgccaccgccaccgccgactccaccgccgccgccgccgccgcgcgctgttctttgcacgcacagatggcagaccgcgatgacgaacaaatcctattagacacgatcgcagagggcagtagtcagtactgggtggatgatgaggggaacgaggatcccaaccaatacctgaacaaggagggcaacgatgagggtaaccaggaggctaaccaggaggggaccgaggaggggactgatagtcaaccgtcggccggacagaagaggccacgcaggaaaagaggtcccgcgaagaagcttgagggaaggcacatcgttactgagattgccccagacggcgaaccagtagccccggcgggtataggacgaaagtttgtggatcattgtggttgggtcgtgagagacaacgtccctatcagcatagtgtactggcgtcgaactaggtcacgcggggatgaagatagctttctccctgacacagagaaggacatgttgtggaccaccatgctggagacattcacgatccctgaggtagatcgtcccagatgcaaagaatggaccctgaagaaaatggcagaactattccagaggtacaaatcagatatgtacaagagataaatcctcaagggcttgacaactgatttcaacgtgcataacaagcttagggatcactgggatgcgtttgtggcatacaagattggagcgcaagggcaagcacagatagaaaagaacaaagccaatgcagctaagaagaaataccatcaccggcttgggtcaggcggatatggaaaggcaatccccaagtgggacaagtttggaagctgacttgatagcaaggggtatcaagccggccacggctaattggcctgcgcgatcgaggaactggttctatgcacacggtggatcgctcaatccaggtgatggctccctcatattcggcgatgagattcgagatgcagcacgctgacttgcggatgcaattgaagcctctacgcaggggactttccggcccgacagagagaaggacgagctcaccctcgcactacagaatcttgagcatccaggacgaacgcgaggaaaaggcgtccttccttggaaatatggattcaaagaggacatccacacgtataggagtcagatgaggagcaagagggatacagaggctaaggtcatcgatcttgagtatagggtgtccacctacgaggcaaggatgcaagaggaggtgacaagacaggtggaccaatgcctggccgagtagcgcggaatggaaatacaagcacccgtcatggtgagcccctcgggcaaccgcagcagctatgcatcaacgggccaagttggatcagagggcattgaggcagtggcagctcacgaagcaacccacttccccgttgatgatatcacgcagcgaacaccctgcgatatgcatactcccttcaggaacttgtctatcaaggtcgtgtcgggcatggccatacccacggacccttcgagtacataccatttctggcccattccacatggatatgcgaaggtcgagatagagctggtggaatgaacctacgaggatctcgagcttgacatccccggaggagacggggagaagaaacttggagacacagcccacgccatcatactctggcgtaagaagtacatcgtgtttcccgggcaagaacggccgcccgctcctcgttccccgccgcaagcacagtctcctccgccatcaccgcctcatcagtctcctccggctccttcccctgcaccaccacctcctccgcgtgcaccagctgccaagtctgcaccgtcgggcccgcgggcaactactcctccgcgtgcacctgctgccaagtctacaccgtcaaggtcccgcccatatgaacccgcaccatcaaggccgaagaagaaagctagatctgacgagccacggctccccgctctcaagaaaagggcgtacgacttgactccggaggagctcgatgaagccgttagagcagaagttagggagcagttgaagccatgtagtccggaaaagaagatccctatagccccgaatgttcaggatcactttattaagatggccgaaccgggcaaaccggtcgaagtttctgactatgatcgaacattgaggaaggctcttaaagccaagccttcagcagtgaagtgcggaaaggaagtccctcagttggggcaacagccacgacaagaggttgaaccgttagtcgtagaaccggcacaactagagatatgcaacttcttgaaagatacgggactgagtatggagcagttgctagaggacggacctattgaaacggctccggtcatgtacacgtttaaactcggtgaaccgctagtcacgcctgataagatcagagagctacctacacagatgtaccggttccatcaatggtacatggacaaatcagcgatgggtagagagatgttcagagctagggtgcgaaactcaaattattaccaaggagaagatgttatttggatccggcacaaggaagtcttcgacttataccacctgaaggccctcgacgtctctattctcaacgcgtggattttaatggagattcagttgtgccgtcaacacaacaaattcaatactggattcatggacccacgcaaagtgaacacgctgatgatacaacaatatgagaaacaaaccgaggacaatatcgtccatttcctggtgcaacagcattataagaggttcatactacttccctacaacacatcatttcattgggtccttcttcttttcgatcttgagaaatccaaagttcatgtctacgattcaatggataaaccagagaaaactttcgcaaagattttcgaagtgatagatagagcatggattcggttccgtacattggtccgcgggatctggaatgaaaaactcacccggaggttcaattttccgatgatttacctgatagataacaccacccacgatgatttcataagggctgttcaagaaaagataatgggattcatcaacaagcatattcttgatcccacaggagaattctattacgatggatcgactattcataaagccggtccttcttcttccgatgccaccaagtcgagaggttgcccagccccttctgcatcctatcaatttcttcggtgcttc

SEQ ID NO: 75214 - DNA, 2044 bp, Oryza sativa
  Clone ID: PAT_MRT4530_75322C.1
acttcgtagtgcgacgccgcagaaggtcatgcgacaggcccgtcggtcctagtcctcggtcttcttgctgctcgtcgtcgtcacggtctactctcgctcttgcacctggtcgggtccacgtcatgatggacacggcgtgcggctcgatagaccgcgacaggcgacgcgactggtcccatctccgcgctcgctacctccaccgctgccgctgcctccttcgccacaccccgccgccactcgcctcctcctccaccgccacctcgcctcgagcaacgcgagctcccgccgccttttgcctcctccactgccttgccccatcactctgccccgccgctagcctccccgcgctcgctgcctccaccgccgcctcgcctcgccttgagcagcgcgagctcccgccgccgctcgcctcctccactgccctaccccgccgcttgcctccccgcgctcgctgcctccaccgctgcctcgccttgtcaccgccgcgctcgatgcctcctccgtcgccgaccgcccatgccgaccgcccgtccccgcgccgtcctcgccgaccgcgccgccgccgacgacgacttctccggcttggccttcttggccttgcccgacggcgcgggctcaggcgcggccctcttcttcttggcctcggctttggccttcttcgccgactccttcttgacgggctccggctccggctccgactccgacgagtcgccttccacctcctccccttcctcgtcgccgccgcctcctcctcctcctcctcctcctcatccgacgaggcggcgccgcggccgctgggcttctggggcggtggggcgacgggagactccctctcctcctcctcctcctcctcctcctcctcctcctccgccgcctcatcctcctcctcgtcttcctccccctcctcctcctcctcgcccctcgccgccgccgcgcgcgacgactgcgcggagctgctcgaggactccctcgacctccttgccggcgccggtgagcccagtgccgcccacgacgacgcggtcacgtggctctccgccgcgctcaccaaccacgacacctgcgccgacagcctcaatgaggccggcatcccccacggcgcggacgccgcgccccaccttgccgccgcccgcgccaccgccgccgtcctccagcgctgcaacctctggtcccgctcccctctccccggccagaagaacaccgtcaccgcccagaaccgccgcgatcccggccaatccaccggcctcgtcatccacgcctgccgcgtcgtcccctcgccgccgccgccacctcctccgcgagatcctgctccgcctcggcctccccaccaccctcgtccgcgccgccctcgtctccacccgctggctccgcctcgcctccgacccggccttcctccgccgcttccgcgcgcgccacccgccgcgcctcctcggcttctaccacacggccagggcgcgcttccaggacgaggtcccggcgttcgtgccgctgccccagccgccggagctcgccgccgcgctccgcggcgcccgcctccgcctggcgcccggctcctccggctccggccccgacgcgcccgtcatcctgagctgccgcaacggccgcgtcctcgccgcggagttccctcccgatgggccacgggtcagcatcatcagcccgatgcaccccgcccgccacccaccggctctcccgctggtctacgaactccctcgccagccggggcagattctgcatgcctcgtgtatgctcctcttcccagatgtcggcagcgacgaccaactacaagctccaattcatctatagccaatttaatagtcaattcatacaatagtgcttattatactattaattcctggtcccacctatcatacacacattacgttttaaagtccgtgctgcagctggttatagatctgtagcccgttgctcttctctctcctattttatctctttaaaatatatttatagctagcttatagcctgctattgtacctgctcttagggggggggggacgactatgttctatccttatcacgggttatgatt

SEQ ID NO: 75215 - DNA, 315 bp, Oryza sativa
  Clone ID: PAT_MRT4530_75323C.1
atggcgtcgcccgtctgtctcgtcctgctcccagtaatcttctgttcttccaggggaaaccatcaaagaccatggtggattgccttgccaccttcgtgtttgaaattacagtacagcaaggaagagatgcagtttcagatcaagctaatcctgaaaattccacgaggtcatgagacattgcacaatttggttgatgaagccctcttgctaaaggaggccaggagttggagccatgcaaacttgccttatgctaatgtcttcgggagctttaagattaggccctgctgcattgatcaaattaagcaggtcagttga

SEQ ID NO: 75216 - DNA, 418 bp, Oryza sativa
  Clone ID: PAT_MRT4530_75324C.1
ccctacaagattaaagtcttcatatggctgcttttttgtggcagactaaacacgagagatatattggatagaaggaattgtgctcctttgatctcacttgcgttctttgttcgttgcagcaaagagaaactccgtttcatctgtttttctagtgtccatttagtagaaagtgttggcataagcttggaatatcatggaacacctctttggaattctttcagatgttggtgctggcaagattgaggttcaggaggaagggctttttggaaatttgctttattgcgtgctgtcacatttgggaacaacgaaataggaagatttttcagaatatggatccttcttttgatagattcttctacatatgtgtagaatgaatgatccacttaggcaatcggtctctgattggttacaaacttta

SEQ ID NO: 75217 - DNA, 1541 bp, Oryza sativa
  Clone ID: PAT_MRT4530_75325C.1
gtggaattctaccacctttgaatcgaaattcttgttattcaagcatgtttgcaagaactactccacgcgttcgtattagcgctccagtgaaaaaagccaattttggatctgtgagaaactcacatagtctgaaacaaagactgcaacatttgatcccagaaaaggccgcagaaatcaaaaacattaaagataagcatggagacaaattgcttggaacttgcactgtgtctcaggcatacggtggtatgagaggagttaaagctatgatttatgaaacatcactcttggatgctgacgagggcatccgattcagaggatttaccatccctgaagttcaacaaaagttgccaaaggctccaggaggtgctgaaccccttcctgaaggattgttgtggcttttattgactggagaagttccaactcaagcacaagtttcagaactcagcgctgatcttgctcatcgtaacaaagtccctgagtgggtgttcaagttgttgaaggacctccctccagatatgcatccaatgactcaatttatcatcgctatcaatgctcttcaaaaggaatctctctttgctcaaaaataccaagagggtatgccaaagagcaagtactgggaatacgcccttgaggactccctcaacttgattgccagacttccaaccgttgctgctgccatctacagatacacatacaagaatggtcaaatcatccaaccagatagcaagcttgattggtctgccaacttttccagaatgctcggacacaacaacaagcaatttgacgacctcatgagactctacctcacaatccacagcgaccacgaaggaggaaacgtttctgctcacgccactcaacttgttggatctgctttgtctgatccataccttgcttttgctgctggtatgtgcggtttggctggacctcttcacggattggccaatcaagaagtcctcagatggattgtcaacttgaagaagaagtttggagacagaaacatcactaacgaagaactcaagaaggctctctgggataccctcaactctggacaagtcgttcctggcttcggacacgctgtgctgagaaagactgacccaagatacacttgccaaagagaattcgccttgaagcaccttcctaacgatccattgttcaagttggttgctcaactctacgaagttgttcctggtatcttgaaggagcacggaaagaccaagaacccatggcctaatgtggatgcccactctggagttctgttggttcactacggaatgactgaagaaaactactacaccgttctcttcggtgtttccagagctattggtgtcttatccaaccttgtctggaccagagccctcggattcccacttgaaagaccaaagagtgtcaccactgaatgggtcagaaactggtctcacaccgcccctatggctaacgatgatcaaatcgccacctccaaggccgattaaacaagtaaacacgatgttgtttcggtactttataacatagttttcccaataaaaaaaaaaaaaaaacaaaaa

SEQ ID NO: 75218 - DNA, 1155 bp, Oryza sativa
  Clone ID: PAT_MRT4530_75326C.1
atggcggcgcggcgatctcgcctcgccgctccgacgtcctcctccgccgcggccgcttcgatgcagcacgagctcctcgaggcggcggccagcggcgacctccgccacctcaagaggctggtgcgggcgctggataaggtcaggggccgcctccaggaggtggtggaggcggcgaggacggacggcggcatctgggcgctgcagctcgccgcgggcaacgagcagctggaggtgtgccgctacctcgtcgaagggctgcgcgtggatgtgaacgccgccgatgatgagggtagaacacctctagtttttgcggtgatcggtgaaaatgctgctattgtcaagtaccttcttgatcatggtgctgatccagacaaagctgatgatgacgggctaacccctctacattccgctgctggaataggagattgtgaaatgatagaaacgttgctggcaaagggggctgatattgatccggctgtaaatgtttcatcagtggaatgtgtgaagctcctggttgaggctggtgctgatgtcaactcagattgtatctcaactgctgcacttgattctgcaatgggcaatgatggttcaactgagtgcttaaatttcttaatggaggctggtgccaactatggtggccctaatgattttagggtctattcagtttgtggctgcagtttgccacatttctggcagccaaagtttggcaacatcctagtggaggacatgatccaccaaccttggcaccaggatcaacatgtgaataaaaagaaaatagaagagttgaagacatctgggaataaagcagtcgatagagaagattacatttctgcttcagcgttctacactaaggcaatggatcttgaccctaatgatgcaaccttgttctcaaacaggagcctttgctggctctgcatgggtgatggaaagaaggcttttctggatgctcttgaatgcagagaaatgcggcccgattggccaaaggcctgctaccggcttggtgctgctctgatgaccctgaaggacttcgagagcgcgtgcgatgcactttttgatggattcaagttggacccggacaatgcagagattgagcgtgcattacgggaagctatggaatctctgaagatatcatctaaaggcaccaaggcaacatga

SEQ ID NO: 75219 - DNA, 1002 bp, Oryza sativa
  Clone ID: PAT_MRT4530_75327C.1
tttgaggttccacgaataaaaaaaaagcaagctcgatgcatcggctcgattcaattcaagcatcgagcaactccccttcacccaaaccaatcaagaacatccaagaacatgggaacactcatcttcatccaagagacactacatcaagttcaataaccaagcttcactccactcaacttatcaatttttcctctgcatttcttgatggaaacattcgaaccttttcttggaggttgatctctgctagctctccatggacattaagctaaatggtaaaaattttcaagaatgggaactttcggtttatatgcttcgaatgttaattggccaagcatgtcaactcgcagatgatcctcctgatgatcgaacagatgcaactaaggttaaggcatggagaacatgcagttgatcctgttatggaataaatattcatgagtgtataggtggctattaattaaacaacaagaatagtccattgaagaattttatgatggttttattcagttgtctggccaagttcaggttgtgcacaatgcaaggcgagagaggagaacgaccaggaaaatctactgtaccaatttgtcatgcaatttccctcccaatttgagtccattcaagtccagttgattggatgacgtgcacatcctaccatggccagaggttcttgtagatatatataatcgctgaggatacacgtctttgctccctagacactacatttactcctattgattactcacaatgtcagggcagtaccaaaagttattgggcatacttcctatgattgcttctatcttcatctggagaagttagttgattatccagctaggcttaagtgatctccaattctaacgtggctgctagtgctcctgtgttttctcggacatcacagtcgctggtctttctagtacaagtgccaccagcactaggtctagctctatctcaggtgttccttactctttggtggcaagaccgtcttaccacatgttgtctccatcgcca

SEQ ID NO: 75220 - DNA, 135 bp, Oryza sativa
  Clone ID: PAT_MRT4530_75328C.1
atggcagatctgcgtgtcgcagtgccacctctactggatctgaccattgcgggggggacaaatgccaatgagagcaacaccaacactgacaatgagaatggcgacgagggcattgccgcagagaatgaggactag

SEQ ID NO: 75221 - DNA, 438 bp, Oryza sativa
  Clone ID: PAT_MRT4530_75329C.1
ggccgcgtatagcctgctcgtactggccgtgccggcagggagtgccctctccagattggcgctaacaacagatgtggtgttggggatggtgctcgccggtgccgtggcctccgccggcgccatatcggacatcgcgaagaacggcaactcgcacgccgggtggctgccggtgtgcgggcagatacacgcctactgcaaccacgtcatggcggcgctcatcgccggcttcgtcgcgctggccgtccacttcgtcgtcgtcatgtactccctccacattgtcaccgatgtcatttgcccctgccattagcagagtctatctatatatatagtccatagtagcagtatatatataggtcgtgatatatacttccatcaccaaaaattcgggtacgtatataccattttattttctctaaaaaaaaaaaaaaaaaaaaaaaa

SEQ ID NO: 75222 - DNA, 470 bp, Oryza sativa
  Clone ID: PAT_MRT4530_7532C.1
gctttaggactttgaggccgacttccgcgagtacgagcgtggcatgagcgacgacgaggcggaggggggcggcggttaggaggatgaggacgactacgactttgtcgtggtggtctcctcgccagcaggggcgatgttattcctcctctgccactgccaatgttttcttttttggctagtggtttttttgtcagacttcaaatgttttgctcaaaattgatcgtccctacttgtttttttccataacttcctttttttgcacccattttttcccaaggggtgtccatattcccttttttcttgtgataaattttgcacccctataattcgcgttactctctttttgggtttttcgcatatataagctttgcattcttttttatacctttcttcttctctttttcttagggggtttttatcccttttttttccgccgtaattcctcttctcctttaatctcagctcctcat

SEQ ID NO: 75223 - DNA, 414 bp, Oryza sativa
  Clone ID: PAT_MRT4530_75330C.1
gtcctttaaaggaaaagacatatttgttatctttgaatgtatgctttgtactgggaacagggttgtggatacacaatctggattgcactaatgaaaacaagagaaacaaagctggggtacgcaagtcatcgtgaaccacagcagttgtgtggcagccccttcaccgtatcttatgaactgccactgggttgcaaagaaatatgaatggcggtcccaaaaaaaaaaaaaaaaaaagaaaaaagaaaaaaaaaaaaatattaaaataacgcaaattcaaaaagattcagaacaaaaaaaaataaaaaataataacaaatatataacaataatgggggggccgttttaagggaccaaagttttcttccccggggcttggaaccaaaaagttttttttatgggggccctttaatttaa

SEQ ID NO: 75224 - DNA, 350 bp, Oryza sativa
  Clone ID: PAT_MRT4530_75331C.1
gtcttaccgaggaggaggaggagggcccagcagggaccacagcggcgggggggccggcaccaacccacacccacacctactactacgacgacacaagtagtggtcgtcgaatccgcggcggcgctcgcctgagcttgcgctgcacctgcacgcggcatatgcctcaccgccctcacctgggtcagctccgacggctactcctcctgccttgtcctgcgtccccgtacccgtccccgcccgccgcctctcctcccctcgcgccatggcctcctcctccgtctccgccgccgccgccgtcgcgcaggcaggtggtgctgtggcggcagcggagtacagggacgtgatggggc

SEQ ID NO: 75225 - DNA, 216 bp, Oryza sativa
  Clone ID: PAT_MRT4530_75332C.1
atggcgctgccgatcgccttcctggccgtcctcgccatcgccgtcaagaaggcgactaaggcccacacgcgcacctatccactagaagccgtgatgctgccggcgacggagcagctgctgcagcctgcaccgtcgccgtcgccgccgccaccgccgccgcagtgtgatggtcagcggttagtgggcggcgacgcggcggtggaaattgatagctag

SEQ ID NO: 75226 - DNA, 1225 bp, Oryza sativa
  Clone ID: PAT_MRT4530_75333C.1
agtggatcccccgggctgaggaatcgcacgagggttgaacctcacattacgtacgtttcagcaagcaggtgctcgatcgatcggccatggcaccgcccacggtgctcaactccggcgagcccgacgcccgacgccgcgagcggccgcacgtcgtcttcatcccgagcgccggcatgggccacctcctcccgttcttccgcttcatcggcgcgctgtcctcccacgacgtcgacatctccgtcgtcaccgtcctccccaccgtgtcggccgccgaggccgaccacttcgcccgcctcttccacgacttccccagcatccgccgcgtcgacttcaacctgctgccgctcgacgcctccgagttccccggcgccgacccgttcctgctccggtgggaggccctgcgccgctccatgcacctcctcgccccggccatcgccggcgtcgccccgcgcgccacggccgtcgtcaccgacgtcacgctggtgtcccacgtgaaccccatcgccaaggaccttcgcctccagtgccacgtgctgttcatctcatccgtgaccatgatgtccctctgctcctacttcccgatctacctcgacaacaaggatgccgaggccgacgtcggcgacatcgacatccccggcgttcgtcgcctgaagaggtcctggctgccgcagccgctgctcgacctggacagggctcttcacgaagcagttcatcgacaacggccgcgaggtggtcaagaccgacggcgttctgatcaacacgttcgacgcactggagcccgtggcactcgccgccctgagggacggcaaggtcatccgcgggttcccgtcggtgttcgccgtcggcccgtacagctccctggcgagcgagacgaaggccgccgacgcagagagctcggcgctcgcctggctcaaccagcagccggcgcggtcggtggtgtacgtcgccttcggcaaccgttaccacgtgagcaacgaccagctccgagagatcgcagcggggctggaggccagcggctgccgattcctgtggattgtgaagaccacggcggtggaccgcgacgaggccgccggcgtccgcgacgttctcggcgacgggttcgtggatcgcgtgcgggggcgcggcatggtgaccaaggcgtgggtggaccaggaggcggtgctcgggcacccggccgtgggcttgttcctgagccacagcgggtggaactcagtgaccgaggcgg

SEQ ID NO: 75227 - DNA, 707 bp, Oryza sativa
  Clone ID: PAT_MRT4530_75334C.1
ggtggtgcagtaacttttgattattcatgtcgcattcttgaccaagaaattgcgatacaatggtctaaagaagctctagagcaataaaggaaagcgtggtagccaccaccctccttcggaagtctaaggaactctaaatctgcatcttgcctccccaaaatgacaggttctgcagatcatctatgcaggaacctcagcagtctcggtgagccatttctggctcgactgagctccgatcatcaccatcatgtctccaatgaatgacttttgtttgcagcattatggtcgttgtggaaaagcaggcgcatccggtcgctgctataaacaaaaaaaaatgaaaggtttggaaacgccgccaacgccttgtccgtccttggacacccgtgaactccagtcgtgaatatgcttgcgtaaaaatgagtgagccgccttcagtgcagctttcgctaatctgtcatatcggccatcgctgtgtcgggattaaatccgatgtgaggagtggaagtgaggaaaaaaagaaaagccattgcccccatagccgcttagttcgacgtaataacatcaggagcgacttcatcgtcgtccttgatggtgctcttggccattctagcgctgagatctgcgcagtcgaatggaggcagtgagcgttcgccgtcagacatgctggcgcgtcttgatgtgcaaggactgacaccggtgcactggga

SEQ ID NO: 75228 - DNA, 3693 bp, Oryza sativa
  Clone ID: PAT_MRT4530_75335C.1
tccctcgcctccctcaccttcctctcctcggcggcgtccccctcctcctccatcttcccccgcctcgccgccgagggcctcccggcctcctccctctccagcccgctcgccgcctccctctcctccgcgcaccacccgctccccgccgccgtcgcctacctccgcctcctcctcgccccggcctcccctctcctctccctcttctcgccgctccccttcctctccctcctcctcgccctccgcaagtcggcgtcgtcgtccgccgcgtcgcacgatgcggcggcggcggccaaccctagctccggctccggctccggctccggctccggcaaggggaaccaccggaaccggaagcggaagagccaccagcagcgtcagtcgccggcggcggccccgtcgctcctccccagggcgctcgcgctcctcgccgacgccgcggggaggctgccgctcggggagcacccggacgcgcggaggtcgctcgtcgacaccgccgcggagctcgccgccttcgatgtcctcgtcgccgtcctcggatctggctactacgccgaggcgatgcccgatttggtgcgcgcgctggcccccgtggcgctctcagggtccagatcggcggcgcgggcgtccgcggtggaattcttggcgaggaaggttgtgccgttgggtgtggagggaggggaggatggggtgaggaaggcggtgggttacctaccgaggtatctggcggcgaaggcgccggagaagtcggaggctagggcgatggcggtggaggccatagtcgaggtggtgcgagcaatggggcaattggagatggagggatttgctgggtatgtggtggctatggcgaaggggaaggcgaaagggcggctgcttgctgtggatttgatcttggcgatgctgccattgctgctgccatcggaaggggatgattgtggtctacaggagggttcttgggggctgaagtttgtccgggtgcttgtggagaggtgctcggatacggtgggaggggtcagggctcgggccttgacgaacgcagcccaggcgctcgacgttttgtctgaaagaggcatggaggttgaccggttgcaggaggtgatgaggatagggaacataggccttggcgagttgctgaggctgcggtgcgctgatgataaggctgctgtgaggaaggctgcgcttgtgctcattactaagtcaatcagattgatcgggaggcctgttgacgagtcgctactcagtgctatgggggctgcgtgctctgatccgctagtcagcatacgcaaggcagctcttgcagccatctcagaggtgttcaggaacttcccggatgagagggtaacaaaagagtggcttcaggctgtgccaccactggttattgatagtgagacaagtatccaagaggaatgtgagaatttgtttcttgaattggtcctgaacagggtctgtcaagctgccaatttgaatctaaatgatgattccaatgatatggaggaagtgtttcctaaagggacactggatttgctgaaaagtatctgtgatggagaggttgcaccatgcataaaaaagatatgtgcaagccttgggaagaagaaaaagctgaaaccactgcttgcaagttcattgcagaatatcataacaatatcagagtccttgtggttgagaggttgtaaaccaattgagatgtggactgcaccagccggggcatggtggcttctttctgaggtctcatcatttgcacctaaatcagttaactggaaattcctctcacaccactggaaactccttgataatgttggccaagataaaggcaaagttcgtcctaaaggggaaccaaattctgcattatgggctgtggatcgtgtttcactcttgcaaactatttcaaatgtttccatggagctgcctgtggaacctgcagcagaacttgcacacagcttgctcacacggattgaaaattttgacatgaaccttagtgaggtgaacatgtcagtgatctataaggttgatgctcatgtaaaatccctgaaaacgttatgcaaacgaaaagcaaaaacagctaaggagggcgaaacactgatcctgaagtgggtgcagcaacttatatgtaaagctgttaacattcttgatgaatacataaaggagacatcagaagctgctaagggtcctaaattttttacacctttgagtggaaaactcaagggaagaaaagatgcatctgcacaaaagtcaatgtcacatgcagttattgctgtattcaccattggatcgctgatcctagcttgccccactgctaatgtgcaaggcgtcattccttcgctgcacacaatcataacatctggaaactctcagccaagaccaaaaaatcttgctggtgggactgtttctttcaaagagctagctccatctttatatatacagtcctgggatacaatggctaaaatatgccttgtggatgacaaacttgcgaaaagatatattccactttttgttcaggaacttgagaggagtgatttggctaccctccggaataacatcatgattgcactggcagacttttatgtccgttataccgcaatggttgactgttatatgtcaaaaataacaaaatcgttgcgtgatccctgtgaggtagtgaggaggcaaacatttatcctactctcaaagttgctgcagagggactatgtaaagtggagaggtgtgctcttccttcggttcctgccatctttagttgatgagtcagagaagataaggcatttggcagacttcctttttgggaacatcttgaaagctaaagcgccactccttgcatataatagtttcatagaagctatctatgtcctaaacaattgcttgggtaatggtgcgcaaaccgaatctcagggaagaggcactgacgaaaggtcgaggtcgaaaagaatgcacatatatgtatctctgctgaagcaaatggcaccagagcaccttttagctacgtctgccaagttatgtgccgagatcttggcagctgcttgtgatggcttgctcaatgtcgatgatgccgctggaagggctgtacttcaggatgctctacaaatactggcatgcaaggagatgcgcatccaccccaacatttgcacggacaattccgagatggatgaggaatgcggcgatggcgggtcgtccaatgccactctccaggcggcgaaagggagagccgtcacccaggtggcgaagaagaacctgatccagatcgccatcccgatcttcatcgagctgaagcgccttctcgagagcaagaacagcccgctcaccggctgcctgatggagtgcctgcggaccctgctcaaggactacaagaacgagttcgacgagatactggtggcggacaagcagctgcagaaggagctcctctacgacatgcagaagctcgacgtcgccggcaagggcaaggccaaggccgcagctgctgcggaggctgggccaagcggagcctcgccggcggtgaacggtggcggcaagagggcggcggacggctcggcgagggccacggcgaggtcggtgctcaaggaggtgaaccggaacacgccgacgccgccgctgaactcgatgagcgtgcccaaggtgaggtccatgctgggcgtcggctcgcgccggcccgctgtgctggagtcggtccggcggcttgagccgtttgggtccgacgatgagaattag

SEQ ID NO: 75229 - DNA, 492 bp, Oryza sativa
  Clone ID: PAT_MRT4530_75336C.1
cccacgcgtccggaagacgtctggactgaggagggacgacaggatgctgatcgaagcacacaggacttatgggaaccgttggtcagtaatcgcaagatgcctccctggccggtcggagaatgctgtcaagaaccattggaacgcgactaagcggagcctgaagtcaaagcgtcggatgaagaagaaaagcgtgcaagtggtgaattcaccgccggggcagctctccccccttgaagagtacatccgcagccagtacccgtcggccgttgagaccacaccgccgccaccggccgtgcctgcaccgccttccgacgtcattgtgcacggtgccggatcggtcagcgcaggtccaaccgttgccacacaggagcccaccggcaccaacccatcggaaatggggatctaccttggcctgggtaacccggctggaccgaccacccagcagctagcggcgatgaacctgaacatgtcactggcgccggacctcaacgc

SEQ ID NO: 75230 - DNA, 1736 bp, Oryza sativa
  Clone ID: PAT_MRT4530_75337C.1
tccattcttatctcacatatagatctgacagtttctggcaatgcagattctctacatgtgtttctgattatctcatcctcatgtagcacaggaagaattttacattcaagtgatcaataatttgaggtcacgaaactggggcctgggggcaatgagtcatgctgatggagcttggctgagctgatcgttggatcatctattatctggaacatatggaggtaatctggcacatgactttggtagaatcctcttccactccccatctgcagttctaaagccccaagctccaagggatatatccctgcttctcagcttcctctctgcctcacctcttggcaaggtgacggtggcagccaggggagcaggtcactccatccatggacaggcacaggcccttgatggcattgtagtggagatgagctccttgccttctgagattgaattctacagaagaggagaaggagatgtttcttatgctgatgtgggtggtggaatcatgtggattgagcttctggagcagagcttgaagcttgggctggctccaaggtcttggactgattacctctatctcaccattggtggaaccttgtccaatgctggcatcagtgggcagacattcaagcatggacctcagattagcaatgttctacagctggaagtagtcacaggcaggggtgagattgtgacctgttcacccaccaaggatgcagagctattcaatgctgttcttggaggccttgggcagttcggcatcattactagggcaaggatcctgctgcaggaagctccacagaaagtgaagtgggttagagccttctatgatgatttcgccaccttcaccaaagaccaggagttgctggtgtcaatgccggttttggtggactatgtggaaggtttcatcgtgttgaatgagcaatcccttcacagctcctccattgccttccctacaaatgttgacttcaacccagattttggcaccaagaacaaccctaagatctactactgcatagagtttgctgtccacgattaccagaacaagaacatcaatgtggaacaggtcgtggaaaatttcaaggcagatgagccacatagcatcccacttgtatagcgtggaggtgtcctactttgattttctcaacagggttaggatggaggagatgagccttaggaacagtgggctctgggaggtgcaccatccatggttgaacatgttcgtgccaagcgctgggattagtgacttcagggacctgctcatggacagcatctcaccggataacttcgagggcctcatcctcatctacccactcctcagacacaagtgggacaccaacacgtcggtcgtgttaccggactccgggtcgacggaccaggtgatgtacgcggtgggcatcctccggtcggcgaaccccgacgacgggtgctcccaccactgcctccaggagctcctcctccgccaccgccgcctcgccggcgccgccgcgtcgggcctcggcgcgaagcagtacctcgcccaccacccgaccccggccggctggcgccgccacttcggccggcggtgggagcggttcgccgatcgcaaggcccggttcgacccgaggtgcatcctcgggccaggccagggtatattccccagggacacaggcaacatcaagggacgatcaacacgtagcagcaacacagttacatccacaccacaagacgattacatttttctcctccccaccaaagccgatacc

SEQ ID NO: 75231 - DNA, 1249 bp, Oryza sativa
  Clone ID: PAT_MRT4530_75338C.1
atactaaaagagttttttttttcttttccaacgacaatattgctttttggtttttcctgtgatggttcagtagaagaagtacaagtacaaatgtgcaacaaaatctaatttgtcctgatatgtatgtccaggaatattgaactctacgaactaagctagctctcaaatgcttaaaggttcactcatcaaagagcagtaatttgtatcttctctgaaaattgtgctaatcagccataattagctagtagcagttcatgaggctctcatagatgaggagaaggtttggatcgtagaaataaggatcatctagatctgctcctagccctaatgcttcctccatcaccgtcgtctccaacatctgatgatggtcgaattcatcagcgtagtgagatatgacagatgaattggaagaagaaggaggcacctcttggcacacatgtaatcctggcgtttcatcgaaattgttagaaatggttgctagatcagcaggaggaggaggaggcagccaagcagcttgttcttcttgcttgatcatcttggtgaagatggtatcatcatcatctgaatcatggtgaccatttggattggctgtcaagttgtgcaatgctgcgggattattgatgttgttaataagcctagtggtggtgcaggtgtgttcgttgctgtatgtcacttggaacatgggtgggtcgttcttatccttttgttggatttgcttggtggcctggcaacctctatcatctctatacgtacacctgaagtagctccttgtgaagtgagtgccctggatcttcttctctccatattttctccactgaaagccatcctcatgaggcacgggcgtgaattgagaccatgacgacgacttgtactcctcaccattaatccttcttcttttggcggccgatgatgatcttcttggctttccaacgacatggttgtcagctgcaacatctgctgcaggggaactactgttcgctggagtcgccgcctctgctttgatcaagctcatcaccggaacggcagcagcagcagcagaagaagaagcatgtggttggttcatgacggagagggcgacgttgagggctcgcagggcgtggttgaggaggccgtgcgctagctgctgcggctgctggtgtacgaggaggagaggctgctgcgtcttgatcagctcgtacacctgcgccacctccctcactgccaccgcttcttgctcataactcaaacaagctgattcagtaactgccat

SEQ ID NO: 75232 - DNA, 501 bp, Oryza sativa
  Clone ID: PAT_MRT4530_75339C.1
atggcgaacgacaatgcacctcaatgcgggaagtgcagccgtatgatggaaaactacgaccacaccaactccaacagccgagattgtacctgcgacaagtgccatttccttctggccggctacagctgcccttacgcttcctgcaaatacatgatccacaaggtatgccccgtgccgccggcaagtgtacagggcggttccgcctcccagtcccaagacagcggccctccctgcgggctgtgcggtcgtttgacgtccatctacgactacaccaactccacctgcagcaaatgctactgtgacatcgacaactgcgggcttcttctcgccggctacatcgtctacggatgccttccctgcagatacgctgtccacaaggtctgccccaagggtcctcttcgcaacgaagtaatcaacggagcggtcagaggaacggtcagcggagtgatcggctgcattttcagcgggttattagccgcaagcggcgccagctccaattga

SEQ ID NO: 75233 - DNA, 537 bp, Oryza sativa
  Clone ID: PAT_MRT4530_7533C.1
atggtggagaccttggcgttttgtgaggaaaaaggggaagagagagaagaggaaacggatcggaggattccaggagggacagcaagcggcggcggcggcaccgccggaagatatacggacatcgccgccgatcttatagacagtgatagcgatgagtccagagatagaagtaggaagagatcaagaagtcaaaagggtccgaaggaaagatcatcgaggaagaagaagagcaggagggatggatcaacgaggaagaaggaggccagtgagggtgctcggttcgcgctggaagacggcaatggcggcaccgggtacgtgatgagcgggagcaggcacgcgaggatcaccgccgtgcgcctccgcaaggagaaccaggtgtacagcgccgaggagaagcgcgcgctcgccgcgttcaactccgagcagagggcgaggcgggagagcaaggtcagggacgacctccggtgcctcgtggacaggacgctcggcaagctcgccggctccgaccacgatgatgatccatcgtccgctcgatga

SEQ ID NO: 75234 - DNA, 150 bp, Oryza sativa
  Clone ID: PAT_MRT4530_75340C.1
atgccgcctccgacggggcggctgccggcgctctctcggatggagctggttggatgcgagtatgcgagggaggttgacgaggagactcaagactcggagccggagtcggagaaagcgagagcgagacacgacgctgacgtccgcgcctga

SEQ ID NO: 75235 - DNA, 1805 bp, Oryza sativa
  Clone ID: PAT_MRT4530_75341C.1
gaactgcaccacccgctgcggcgacatcagcttcgagtacccgttcggcgtggagcccggctgctaccacccaggcttcaacctcacctgcagcagcaacgacaccaggctgttcatgggcgacggcaccgtgcaggtgctcgacatctccatccccaactccaccttgcgcgtcaacgccaccgccatggcgttcgaccccgccgacgacgtgcagcgcggcgtcatcaacgcagatcgccggccgcatcgccactccggcggcgctcccggccacgctagactttgtgatcagaagcaactcgtcgtgttcgacgccggcgaactcgacggccggcggcgagtgccgcagcgaacacagcttttgtgaggattacaagggtggtggtaataccctccttgggtatagctgcgtctgctcggagggttaccgaggaaatccctacgttgctggtggatgccatgatatcgatgaatgtcattcccctggctactgttatggagattgcaagaacacagaaggagggtatctttgccagtgtcctctcggcttaacgggcaatgcttcaattccaaatggatgtaaaggtataacgacttaactaagtagcgggagtattcagttaggcatcatcaacattgctcgtattttaattatggcactttctgcacctttcatagtacagaaaataaagctacataaggtgaaaaggatgaaagagatatttttcaagcaaaatcatgggctactcctgcaacaattgatgtcacaaaatgcaaatattggtgaaagaatgatattgaccttacgggagctagaaaaagcaacggacaattttgataaaactcgtgaagttggtggtggaggacatggcattgtatacaaaggaattttagacttgcattttgttgccattaaaaaatcaaggattgtagtgcaaagagaaatagatgattttataaattaagttgcaatcctttcccaagtgaatcatagaaatgtggtgaagcttctaggatgttgccttgagacagaagttccattgttggtttatgaattcatttcaaatggatctcttgatgatcatcttcacgtcgatggacctatatctctatcatgggtggaccgaataaggattgcacttgaagttagtagagccttggtctatctacactcagccgcaacaacaccaatattccatagagatatcaaggcatctaacgtacttcttgatgataatttaacagcaaagatatcagactttggagcttcaaggtacattctaattgatcagactggagtgactacggttgttcaaggaacaattggttacctagatcccatgtactactataccggtcgtctaaccaacaaaagtgatgtttttagttttggtgttcttcttatagaactacttacccgaaaaaagcctatctataggactgatagaggtgatagtcttgttccacattttgcctcactactggaagaaggcaaattggttgaaataatagatccccaagtcaaggaagaggagaatggggaggttgaagaagtagcaacactagcggcaatgtgtactaagttgaatggacaagaccgaccaacaatgagagaagtggaaataaggcttgaaaacttgcgagctaaaaccaaacatgctccatataataaagaaccaagtagatatgaagtatcccgagttgcagggcattgcatatcagctagaggggacatcgaagaagtactaataagtagacacagcatggaagatgagatgttgtcgttagaaaggtatcctaga

SEQ ID NO: 75236 - DNA, 951 bp, Oryza sativa
  Clone ID: PAT_MRT4530_75342C.1
atgagaggattgcaggccgccgtgctgttcacggcggtggcggcggcggcggcgccgacgaactgcaccacccgctgcggcgacatcagcttcgagtacccgttcggcgtggagcccggctgctaccacccaggcttcaacctcacctgcagcagcaacgacaccaggctgttcatgggcgacggcaccgtgcaggtgctcgacatctccatccccaactccaccttgcgcgtcaacgccaccgccatggcgttcgaccccgccgacgacgtgcagcgcggcgtcatcaacgcgacgacgacatggcgcgccgccgccgccgccgacgacgacgggggcccgttcgtcgtgtcgaggcgcaacacgatcgcgctgatgggatgcaacgcccgcgtcgacctccgcggcggagaccgccgccacagcgacaacctggtcagctcctgcaccgccgtctgcccaccggtcggcggcggcgacgacgccgcggctcacgacgacggcgacggcggcgacggccacaccatcgcgatcatcgacgcctggaacggcaagtgctccggcgtcggctgctgccaggcaaacatcatgctgggctacccttcctacaccatccagatcaagcagctgcaggagaagaacctccatagcttcgacttccagtacatcgcctacatcacggacgagacgctgaatttcacggaagagatcgccggccgcatcgccactccggcggcgctcccggccacgctagactttgtgatcagaagcaactcgtcgtgttcgacgccggcgaactcgacggccggcggcgagtgccgcagcgaacacagcttttgtgaggattacaagggtggtggtaataccctccttgggtatagctgcgtctgctcggagggttaccgaggaaatccctacgttgctggtggatgccatgagcttaattgctaa

SEQ ID NO: 75237 - DNA, 717 bp, Oryza sativa
  Clone ID: PAT_MRT4530_75343C.1
gcatcgatatcggcgacgactggctactacgactacgacaacttcatctcgactacatcgactatggcacaaagggctatcatccatgttaagcactcttgccggtttcttctccagtccaagttatatctctcctatactatccaacaatggcatggcgcggtgcacggcgcggggcacagtgatgggacggcgcgcggcgacgggacgtggcacggggcttggtgtggtgcgacgcgacggacgacggcgcagcagtggcacatggcttggcggtgcgtgtctcagggcggcgacgcgacgggcaacggcgatgggacggcgggcgcgacggcaacggtacgcggcgcgggcggtgctcgaggtggtgatagcgatggcggcgacacgacgacggctgacgtcatcaagggggcggcggcgccgacgggcggggcccgcatgtcagcagctcaaggggagagaggggcgccggcaagtggggcccccggcgatggcaaccggcagcggaggcggcggcgcgaaggcgacgtgaaggcggcggcgacgaccggggcggcggctcgacccggcgcggctaggagggagagggaggggaatagaggagcgggagtgcctcaccgagagtggccggcacggaggaggatgacggtgaacggcgacggcgagctatgggaggacaacggcggcgggcggacgaggtccggaatgccctaa

SEQ ID NO: 75238 - DNA, 120 bp, Oryza sativa
  Clone ID: PAT_MRT4530_75344C.1
ccacgcgtgcgagacccgtacgtctactgcaagtgcgtgaggtgaagtcaccaatcagccgaacactagccgccggagaggcacctaccttaatctgtccacattaaaaaccactaatat

SEQ ID NO: 75239 - DNA, 265 bp, Oryza sativa
  unsure (1)..(265): unsure at all n locations
  Clone ID: PAT_MRT4530_75345C.1
tcatcagcctgagcancancatctcnctgcgggggtatttttaaaatgctcaccgtttatacccaataccctaaaaaagagacacctcgcttattgcttctcggaacttaaattaacacatttcccaaacgtgttttgccttttgaagaaacaccatcctaccacaataacatacttaaattttccaaccgctttttaaccaaacggaatgcatcgcatatactgtcattcctggccaaccatacgatttgcaaattttcaacat

SEQ ID NO: 75240 - DNA, 303 bp, Oryza sativa
  Clone ID: PAT_MRT4530_75346C.1
atgccgtcaacgctcaggctgccaccgtccgaagagatgtcgctgccttcgtctcgccgctacgtgcccgaccacctttactccaagcacgagtccggccacctccgactgccaccgcagcgcctccgccgcccgccttcccaccaccgcccggaggaacaccgccgcttcaccgctacccgcccggccacctccgttgccgccgccaacccacgcggccaggcacgagtctggccgtccgaccgccaccgcaacttctccgctgtctgtctccccgccgctgccatcctatccgccgcgtag

SEQ ID NO: 75241 - DNA, 435 bp, Oryza sativa
  Clone ID: PAT_MRT4530_75347C.1
atgcagggaaggagctcaaggaggcggagatggtggctgctggggatgttggtggaggcttctttctctgcaggagggagggaaggggcgggtgggggaaggggagatgagatctacgtgaagaagccagtggcggcggcggcgacgcaggatgagacgttggtggcaatgctgatgtcgttcatgacgaggtcggtggtggggaagtggttctaccgcaaggctcccgtgcggcgcaccgacgacaggaacaacgggagaagaggcagcggtggggcggcggccgggggagggggtgtctcgctttcggtcgcggaggtgatgcctcccgtgaaggcctcccgtgcgcacgggtgcacggagtgcggcgtggagtttgactcggcgtccacatacggtggcaccacgtcgtgggctccgaggctgaggaggtga

SEQ ID NO: 75242 - DNA, 444 bp, Oryza sativa
  unsure (1)..(444): unsure at all n locations
  Clone ID: PAT_MRT4530_75348C.1
gccgcccnntttttttttnnttttttttttttttttnntttttttttttnnttttttttgttttttttttttttnnttttttttntnnttttttttttggggcccccaccttggccaaaaggccacgataaaaaatacatgtgatacactgacaccggaaagaagccatgcacacacacttatttggacaaaaaaagggcaaggctgcaaaaaaaatcaagcaacaaaagctgaactcacggccccacctgtaaacctttaactggtcgaggccggaaacttttgtgaaaaacaggaacaccacccatgcaaaaaaaaacaaatttttacacacacaaattgtcgacacgggggccggagacatacgggaaggaccttgccccccccggaaactttgtgatgagggccatcaaccaaaaagggggtgcttttttttgccggggg

SEQ ID NO: 75243 - DNA, 765 bp, Oryza sativa
  Clone ID: PAT_MRT4530_75349C.1
ctgcaggaattcggcacgaggctgacttcccacacaaccttagtctctcctctttaccagatcgagccgcgtcatggtcggggggcagccggatcgcgccaggcccatcctcgggtggttcgagatggtgtcggcggctcggaataggtcgagcatcaacggctgccaagaacgaccgccagcggcgacggctgcatcgaccggcttgagcaagccgggacttcgaacggcgacagcagcaccaagcgctttgagctgtgacctcagctggttggatctgacaggcccaatgaaatgtcattatatcatgccatttaatgggtgggtcatggaagttatcctatctggcaggttcgactaaagtgtaattcaactgcaacttctcatacaagttttctgctcctggatgaatggaacaataaatcctggcagatgtgaccaatgtgctgtttcatacaggcttatggaagcttccccagaggataaatttagattattgcccttggaccagttttcagtgtgggctatggtcttcaagaaagccaaattgatatagatccttatgccacgttcttgttgagttcaggatgatacttcaaccgtgaagagcttgaacattttgaggttattttgttaggatttttgtaaactggtgtattgttggatgcttattaagatacatttgtatattaaaaatttatctttttgactacattaatttgcatgccaattaattgaacatttattgggatgttttagcaaaaa

SEQ ID NO: 75244 - DNA, 561 bp, Oryza sativa
  Clone ID: PAT_MRT4530_7534C.1
gaggggggaacgggcccactggtttcgggggtttaaaaacggggcccccccaaaagggggggggaacccctaggggccccacaacccaaaaaaaaaccaaaacagggagggggaaaacaaaccaaaaagggggggccccaaaaaaaaaaaaggtttgacccccactttttaaaaaaccccccctttttccaaagttttttttaaactttctggaacctaaagggaagggggaccctttttttggtaaggccaccaaaggggttaaaaaaagaccgggacctgttatttcctttttccccccttttaacctccatggccgatgcccagctggggggggggcgggacccccccaaatccttggacggggggggaggcccccggccccgaaaggggggccccccgagcgggggggcccgcgcggggagtttggcccccccccttttggccaaaaaggggtgggggatcccccccccaaagggggcccccccctttcccccctttgccccgggggatttttccatttttccccccccccccccccgcaaaggggggggggaaaaa

SEQ ID NO: 75245 - DNA, 1690 bp, Oryza sativa
  Clone ID: PAT_MRT4530_75350C.1
gtcgtttctcggctgccgccgccattacgtcactactggaacttccttccaggcaacccaccacccgccaccgcacctgcccataaaacccggccacatccatcaagcagcaacagcaactaccagtttggaactaccatcccccgtgaccacctgcccgctttcccgcacaaagttcactagtagttactgctccaatatggagtagtactaatcctccgtatactcgaatcccaggatctctcccggtcggatgctcactcgtcttccccaccactcgtcgccccttgtcttcccctgccgcctctccgccgccgccgccgcccggacgctctccaccgccaccggcagcaactccaccaccgtcaagatggctcggtcggcgctcgacgaggtcaccgacgccggcgccttcgaccggtcgccgtccaccttccggagctctatctccagggacagctccgcccggttccccgccgtgccggggaggtaccacctctacgtctcctacgcgtgcccctgggcgtcacgctgcctcgcctacctcaagctcaagggcctcgaccacgccatcggcttcacctctgtgaagcccatctttgagaggaccagggagacggacgaccatcttgggtgggtttttccggccaccggagacgaagagcccggcgcagacccggatcctttcaacggagccaagaccatcagggagctatatgagattgccagcccaaattacatcgggaaaccaactgttccggttctgtgggacaagcagctcaagactgtggtgaacaatgagagctcagagatcatccgaatgctcaacactgagttcaacgagatcgcaaagaatcctgacctggatctctatcctgctcatttgcaaacctccgtcaatgagatcaatgagttggtatacgatgcgataaacaacggcgtgtacaaatgtggctttgccaagaaacaggggccatatgatgaggctgtcacgagattatatgaggctctggacaaatgtgaggaaattctaagcaggcaacgttatatatgtggcaaccagttgacagaggctgatgttcgcttgtttgtaactcttataagatttgatgaggtttatgctgtccacttcaaatgcaacaaaaggctcctcagggaataccccaatctgttcaattacaccaaggacatctaccagattcctggcatcagcagcacggttaacatggagcacataagaaagcactactatggaagccatccgtccataaatccctacgggatcatccctgcaggccctaacatcgattacaacgctccacacgacagagagaggtttagtgcctaggagaagataagtagtactccctccgtttcacaatgtaagtcattctagcatttctcatgaacgtgagaaatgctagaatgacctgtaaaacggaggaagtatctcttatggtactttctgtattgagtcactatgcttcgttgctatggtatcgaggctgtggctaataatgcttggagggttggtttgtgttttggttgttgtattgtaatacagggattggaaaaaaaaaagttaccgatagagaataagaagtatcactcgaccaaacagagacaagcaaaagttatgtggtaataaataacaaaaagtttttggttccaaaaaaaaaaaaaaaaaaaa

SEQ ID NO: 75246 - DNA, 1925 bp, Oryza sativa
  unsure (1)..(1925): unsure at all n locations
  Clone ID: PAT_MRT4530_75351C.1
acaccaacanaactttgtacttcatggtaaaactgaggatcgacaagggttctttacaagggtaacaaaatctggttactagtcattcatgccttcgaggtcagctccttctgataacttaaacggtatagatgaagaaaggtgctttctgtgctcccctaaaacaaaactacacatatcgtagagtaaacgagttggaggactcatctacagaaaacatagtacggcggatattttaggggagcatagaagcacttctcgaaaagaagaagaagaagaaaagaaggggaaacgaccgattcctatgcctttatgtcttccagtctttgctaaatgtaaacctgttgcaatcacggtattgaactatattgaatatttgaccaaaccagacaggataatgaaatgttttcatgtcctattttctgtatctgttcagcattggagcctcaggaatcggcactgtttgagatctcctccgcagattgctgtgactcgacatcgacgcttcccatctggctgctgggccttttctgatcttgtcgatatgcattctgaactgcttcaagcatttggacaacatgactcatttttggccttttgtcagcatctggatcaacacacttcaggccaaccaagattgcccgcttaagggcacgttttgggggcttaatctcaaggtttggatccactacttcctccgccctcttgctgctgatcatcattttaagccattctaccagatttgtctcatctgcaggtttactgtaatcaactgggtctctagcagtcacagattccaagagcacaacgccaaaactgtaaatatcactcttttcatttagcatcccgctattcgcatattcaggtgcaacgtacccatatgttcccatcactcttgtattgatgtagctactatcagaattcagtagtttggccaacccaaaatcagaaaccttgctgttaaattcatcatcaattagtatattacttgacttaatatctcggtgtacaactttggggtctatagcttcatgaagatatgcaagcgcttttgcagtgccaaggagaatcttcatacggttttcccaagtaaggatgcccccactcatggccccatgaagccattgttctaggtttccattgttgacatattcatagacaagcatcctgtgtatcccttccacacagtaccccagaagtcgcaccagattcttatgccgaacgtgaccgatggcttcaacttcgactctaaattccttctctgcttgccccacattgttaaggatcttcttcacggcaacttcagtcccattcatcagtcgacccttgtagacaattccatagccaccctctccaaggacattactctttgcaaaccggttcgttgcgtactcgaggtccctcaaggtaaaccagtgaccccatcccaaatgtgatagctcaggcaacccaaccagcggtgaagcggacgcatacccatacgatgaactgcctttcctaccaggcccagagctgctgtaatcttcagaatatgagctcccagccttctctatgttgtacactgagctgcattggctgaacgcgtcgacatcgacagatctactctctgccaagtgcgaaacacccttcatctgttcatatttatcctgcactggcatgataggtgttccactgtcatgcaggctctgtgcatcaactctgtcaacattgatatctttcgacacaatagggatctccatatgtgatctcccgtcgaatccaaccgccgtcttctttttcctccgcatagagagccacaatgctatgatgaacaaaattgccatcagtatcccaatgccgatggcaatcaggacccaaactctcaagcgaagcacgggtgttgtctgtgacagtgctgaactgatggagttgctgtcggacgacat

SEQ ID NO: 75247 - DNA, 405 bp, Oryza sativa
  Clone ID: PAT_MRT4530_75352C.1
atgcccgtggtccggtccaaggcacgctattttggcccggcccaagcacggcacggcccgactggggtcgtgcccgtgctggcccggcccgacagccgggccgtgcctaggctacaccctcggatcaaatcaactggcacgctcgcgaacctaaaagcaagattttggacctgcacaggagttaagcagatctcccaggccagtgagcagcgggagcggacggccggcgggatgatctgccgcccccgtcctcaagagcgacgacggcgtgtggatccaccacctccactctcgagagcgacggtggcaggcagcggcggcgcgacaacgacgactggaggtgacggctgccccaacaatggtggtgatggtggttgctccaactatgacgacgatggcggctag

SEQ ID NO: 75248 - DNA, 551 bp, Oryza sativa
  unsure (1)..(551): unsure at all n locations
  Clone ID: PAT_MRT4530_75353C.1
aggatatggtgcttatggcggactggnaggtatgggcggtggtgggagcacaagtggtagaggctcgagcagataccacccgtacggaaaatgagcataagatcattgtggttttttagaactgataataaatctatacctttacattattcccattttctgctttgagaaagttggaacattacattcaccgtgttgaaccagcggcatcagacgtgttctttgatgctttgcattgcatcgcatccggcaactagtacattgattctgtccgctgaaccctgaacctctgtagaagctacagctaaaacaatgttgtatcattagtttaccatgcagccttagaacccttgaaactaaactttgtggtaggaagaatatttgtgtgttggaacaatgtatcgtgatgtaacactctcaatgagcagctaactgttgccagtttggcttatatgtagggagactcaaaaatcatttgacaaaaaaaaaaaaaaaaaaaaaaaaaaaaaaaaaaaaaaaaaaaaaaaaaaaaaaaaaaaaaaaaaaaaaaa

SEQ ID NO: 75249 - DNA, 366 bp, Oryza sativa
  Clone ID: PAT_MRT4530_75354C.1
ctatataactgttgtcgacttggcggtctgaagtgctgactcgtagtcgacaacagagtagccttcctcctcgaatctgcatccggcgagatcaaagacatcgttatgtctctccttccctctgcacattgccatggagcgcgcccgcgcccccgtcccgtccgtcgcccagatcggtgccgcccctaacctgacgctcgcgctgccgcactccgccaccgcctccccctcgtcgccgctagggccgccgccgcgccaagccgccgccgccgttagcttcgccgccgcaagagctttcccggccgccgactcacgttgctggaatcccaccggagcgcctatctcctcgcacaccggtgagtcgcg

SEQ ID NO: 75250 - DNA, 198 bp, Oryza sativa
  Clone ID: PAT_MRT4530_75355C.1
atggggaagcagcgcctagcgagctcacttagagacagcagggaggcgggtgagctcgtgcgtggaggcgcaccaagctcgggcaaagacaataaggagggggcacagcaacgctgccagcccgtcgtcacgcccaacacccactggcacctttgcgacgggacgtcagtgtcgcctagatcaggcctcctccactag

SEQ ID NO: 75251 - DNA, 444 bp, Oryza sativa
  Clone ID: PAT_MRT4530_75356C.1
tttggttttttattctctgggctttcttacttttatcggtttcttttttttatcgtttaatacaattcagaggggcacgttctacataacctgcaccggtaactggtcgacactcacccaaacggggccccggaaacactactgtaggctcctgacgtgcacgagcacgacaaattacaccgcgatccgaatcagcagactaagggggcgacgatcgcgctgggggccacgaactcaaggacatataaaactgcaagtagcttatcgcgcacggggaaagtgcgcctgccggagagggggtggccccacgacacgtgcacggatttccaaagcgacggccctttcgggggagggatgaactcgaccaggatgccgaagccgaggaagaggacaacctctaaaaagctgaccagcgccgcggaggccccgtttgtgagggggggg

SEQ ID NO: 75252 - DNA, 525 bp, Oryza sativa
  Clone ID: PAT_MRT4530_75357C.1
atggctgccttccatcctctcgcgatcctcatgttcgtgtccctcctggccgccggcgccactgcaaactatggctacaccacaccatcaccatcaccgccaccgccgccgcagcagcaagctgcgcgcaaaggaacacacagcctcgaaggcgtgaagccgctgcctaaggcggaagtgtccgtcatttgccacgacgccaacaatcgcgtcatggtgaggtgccgtcgggccgtcgccaacgataatggctacttcctcgtggagctcgatgagaccaaagtctccgacttctacatgggcgatccgcgcaaggcgtgctatgtgcggcttcggttgttgccggacttcgaatgcaataaccccacaaacatcaactactctagcattgagggtgcgccgctccgtgacggtgcgccgctccgtgacgagggcaagcggtgggccgaccatggctactataacttcatgtacgccaccggcccactcgctttgcggccagcgatctgccctcctaagcactag

SEQ ID NO: 75253 - DNA, 957 bp, Oryza sativa
  Clone ID: PAT_MRT4530_75358C.1
atggctgccttccatcctctcgcgatcatcgtgttcgtgtccctcctggccgccggtgcaaccgcaaactatggctacaccacaccatcgccatcgccgcccccgccgccgccacagcagcagtacaccccgccggcccacagcgacaagctgctggtaagggtggagggtatggtgtactgccagagctgcgcgcaaaggaacacacacagcctcgaaggcgcgaagccgctgcctaaggcggaggtgtccgtcatctgccatgacgccaagaatcgtgtcatggtgaggtgccgtcgggccgtcaccgatgataacggctacttccgcgcggagctcgatgagaccaaagtctccgacttctacatgggcgatccgcgcaaggcgtgctattcacactttcctctcccaccccccaccacgagctcctcctccccctcccatccactctcacgactggcggcaccgctcgtcctccgttgccccctctccgctgctccccctcccccaccgtcgttgcatgccccctctctccttggtccgagctcagcgggggcgctggatctggtgcccccagtcctctgctcgccacggagatcccctctgccggtggctcattctcatacctccacgttgagctcagcgacatcgcggtgttcctcgccgccgggaacataccgttggaggccgtcgtcagggtggtgcgcgcaatggcatggctgctgctcgcggcgtacctgcagttcacgcttgggtggcgccgtgaggagtggttccctgtgccgctgcggctctggtggtcacgccgccgcttgtgggtcgtatgcttcgccggagaagagagaagagagaaagtagggagagagatgaagagaggtaaggaagaaagaggagaggaggaggaggaagaggaagaggggcaattcggtcacgatgtttaacaaagtaggccccttc

SEQ ID NO: 75254 - DNA, 573 bp, Oryza sativa
  Clone ID: PAT_MRT4530_75359C.1
atggctgccttccttcctctcgcggttatcctgttcgcgtccctcctggccgccggcgccaccgcaaactatggctacaccacaccatcaccaccgccgccgccacctccgccacagcagtacaccccgccggcccacagcgacaagctgctggtgaaggtggagggtatggtgtactgccagagctgcgcgcaaaggaacacacacagcctcgaaggcgcgaagccgctgcctaaggcggatgtgtctgtcatctgccacgacgccaagaatcgtgccatggtgaggtgtcgtcgggccgtcgccaacgataacggctacttccgcgcggagctcgatgagaccaaagtctccgacttctacatgggcgatccgcgcaaggcgtgctatgtgcggcttcgggcctcgccggacttcgaatgcaacaaccccacaaacatcaactactctagcattgagggtgcgccgctccgtgacgagggcaagcggtgggccgaccatgactactataacgtcatgtacgccaccggcccgctcgctttccggccggcgatctgcccgcctaagcgctag

SEQ ID NO: 75255 - DNA, 421 bp, Oryza sativa
  Clone ID: PAT_MRT4530_7535C.1
taaaggggctcggaggcggtgacgaaagcccacggcggccggggaggagaaggaaacttcggggttcggaggaaagaggccgatccgaatcgaactcgattccacgaacttccaaaacgaattagcggatgtttccaaaagagaaaaggtagaggagatcccgatgatcatttcccctctatcaattcggccggaaacggaaaggatcgaccggatttggaaaggaacggcggcggcgcgaaactagggtttcgggcggcggcggcgcgacgaagacgacgactccgacaggtgggacccacctgtcagcgacagcgcactcgcgcgcgggcggctgcggctgcggactgggccggctgggccgaggagagagagaggaggttttgggccgactttcggcccaaagccaaaagaagacttt

SEQ ID NO: 75256 - DNA, 186 bp, Oryza sativa
  Clone ID: PAT_MRT4530_75360C.1
atggcgacggggtcgggctgggtgcttgttttcgggccgatttgtttttatgagcaaaagcgtaaccgatgggaatcaatggtgacgttgctccgggttgttggtactgggcagaagactgggcttatggggccacggcacgcggcaggaatggagcgggtgaagtggtgtaggggttacgagtga

SEQ ID NO: 75257 - DNA, 830 bp, Oryza sativa
  Clone ID: PAT_MRT4530_75361C.1
gcggcgccacagcaacagctaggacctactagtacaaagggtgagccagccactggtaatggcctcttcccctcctccgcctccccgctgctcctgctcgcttcctgccctgcaatggcggctctcctcctcctctcctccgccgctcgggttggcgtggctgcgccactggcgctgaggcagcagcgcccggtggtgctgcccggtggccagctccgcacgggaagcggcgccggcgcagcgtcggcgtgggcggcgcgccctctccggccggagctcgccgcgattgccagctccgccttcacctggggcaccatcgccgtcctccctttctacactctcatggtcgtcgcccccaacgccgacgtcaccaagcgtgccgtggatagcagcgcgccgtacgtcgccctcggcctcctctacccctacctgctctacctatcctggactcccgacaccctacgcgccatgttcgccagcaagtactggctccccgagttgacggggatcgtcaggatgttcgccagcgagatgaccgtcgcctccgcctggatccacctcctagccgtcgacctcttcgccgcaaggcaggtgtaccatgacggcatcaagaacaacatagagaccaggcattcggtttctctgtgcctgctcttctgcccaattgggatcgcgactcacgttctgactaaggtactggcgggttcaattggtcgctcacattgatcgattgtatgtaggttcatattgcttagatggtgtatttttatgtgattcatatatgaataaaatttattcaattaactatgtgttacatcgagttcaatgtg

SEQ ID NO: 75258 - DNA, 1830 bp, Oryza sativa
  Clone ID: PAT_MRT4530_75362C.1
ttttttttttttttttttttttttttttatatcggagaaaatattattagtttattatcttgcatgagtgcattctcacagctggtagaaatctagcaacggatgcatctttctatcatcctctgcagtccgtgtcttcatccgcggacagattagatactggcactatatatacttaacaaaagccatctgggcggtctttctcccaataagcccttttgtgaaacggcgagctgacgcagaaagaattacctagctctgattctactacacgaactagataaatgtccagctcttcccactgtagttttgcaaccacgattcttcgcctgataccgccactcatcctccatgttctcgcactttttgaaccaggggctgttaaaggcgcgggccccacttacggggtgacggcggcccttctccattccacccttcttgagagtcgctggcttccgctcctctcttggaaatagagcgtggtcctttgggtgatcaatcaaagtgtcatctgaatcctgtcttagggtccggaaatgcggagaagagctccttctccttcagtgtccggacctccgcttgcctccttcgcagctccccaggacggccgtgtagaggtacttttcctcccttgtgatgccgccgcgggacgccacaaggttgagcgccgtgtcggagtggccgccgctgcagccgaagctcccggtgtcgcagtccaccatcacctgctccgacagcgacaccagctcgccggtcttgatcttgtgcaggccctcgatggccgccgcggacgcgaacgcccagcacgacgcgcaattgccttggaacttgacgccggtgacggcgccgctggagcgccagtcgacgcagcacggctgccaggagtggggcgagatcggggtcggcggaggggagtggaatccggaggcgttgaacccggtgaactgctggacgaactcggtggaggtgaggtcgccgaacctgttcatgccgacgacggagtcggtgatggtctgcggcgcgaaggcgccaacgccggaggagagctgggtctggctgcggaacgcgccgatgaagttggtgttgcccttccacacctggtaccgcttctcctgctcctccgggcacgagtagtgcttcgcgtacttggccatccactgcgagaacatgaacctcagctccttgtcggacttgtcgcacgacggcggcggcggcggctgagggttcgccgccgccagtaggacctgctcctcccctccctcctgccccagtccactcgcgccgcaacctcggtaatgacctcggtaggtgtcggcgaagagcgtggcggcctcgacaatggagtccgcggaggcgttggcgttggcgatggcgcaggtggggaggagcgcaccgagcctcgcggtgttgacggggaagccgaggagcgagttgcggagcaggtggcagaagcacccctccccgccgccgccgctgggggagacaccgcggaggaaggccgcgcagcgggcctccgtgggcgcgggcacgggccgcacgggcggcgccaccaccgcgacgtgcgccaggcacggcgccaccgacacgatggccactgcgcacggcgtcgccggcggcacctctaagaacgcccccgccgccgacgctgccgccgtggccacgacaccacccccggcgccgggaagacggggacgaaatatcacaaaaggtacaatgtctttgaaactctcatttcaattttctcctttccaaggaagcatccttgttgtgattggcagattgaacacttccttttccctcaaaaagattgaacacttccttcgatattaa

SEQ ID NO: 75259 - DNA, 432 bp, Oryza sativa
  Clone ID: PAT_MRT4530_75363C.1
atggcggtggcggcgagcaccgaggccctggcggttgcggccgcggcgacggcgagggcgcctcagcaccaccacatcccatcgcagccgaggtgggtggtcatcctgtactcgccgctgcacggtatggtggccgccgcgccgccacctcccccaccgcagttcgtcaagcacttcgcgccgccggcaccggtcaccccgccgccgcatccacaaccgcagcagcagcaggcgacgggcggccgggggtggatccggcggcgggaacagggacgagaaccgaacgagggctacgacgatttgggcgccgacgatgaggagcagcagcaggcagcggcggccgggggtggccccagcggcgaggtccggtctcttctccccagcttgctcccccgatccaacggcgagatccggcgaggtagcagcatttaa

SEQ ID NO: 75260 - DNA, 162 bp, Oryza sativa
  unsure (1)..(162): unsure at all n locations
  Clone ID: PAT_MRT4530_75364C.1
tntgtgacacacggggagataccganaaaggatgtggatggccaatgatgggatgatgatgatggatggctgcacttgatgtgctgatgaccccaatgcaatgctgaatgttggggcacccgnaattgtgatgatgatgtgaaaaggagatggcttgccgtt

SEQ ID NO: 75261 - DNA, 375 bp, Oryza sativa
  Clone ID: PAT_MRT4530_75366C.1
atgcccgtcgggcacgggtatacccgacgggtatccattgggcttacctaccatgcgtcgccgcgccgctggtcgccgctcgtgcgcagccgcatcgccggccaccgccatcagccgtcgcctttaccgtcgagttgcccgtcgcgcccctcgctcgtgtgccgccgcccgcgagcctgctaccgcccgtgctcatacgccaccagccgccgcccgcgctcgtgcacagccgcggcgccgctagcaaccgcctgtgcagccgcgctcgtccgccgctacgtcgctagctcgcgccacgccgccaaccaccgctgcaccgcgcgtcgcgccgccagccacctgctttcccgtgcgctgccgccgcgtagggaatag

SEQ ID NO: 75262 - DNA, 572 bp, Oryza sativa
  Clone ID: PAT_MRT4530_75367C.1
cgcacgttcacggcgctagggctagcgtccacggcggcgcgcaggctcggggcggcatgagctcgccggcctccccgcccccctcgtgcgggccggcaggcggggcgaggcaggaaagggcgcccggcgacgggcggcggggtggtgtggcggcgcggcagcgggcgggccgggcgtaggcgggcgccgcggcgacgggcgctgaggtggaagcaggcaccgtggaagaggcactgcggcgatgcgccgctttgtttgttgttgtcgccgccaacgcttcgatccctctttgactcaccggagtggcaccacttgaagaggaaggagacggggagcccatctctcgcctccattctcctcatcctctccactacggcgcagcgcggcggcctcctagcgccatttcccccaccacttggaaccagcaaaagcggaagcccgtcgcccgcctggctcgagctcaaggccatggagtaatcagtaccaatcccttgctgtccattgctacctacctgtatttagtttgcccttgcatttctgtctctatatatgcctgatttattaattagtcg

SEQ ID NO: 75263 - DNA, 168 bp, Oryza sativa
  Clone ID: PAT_MRT4530_75368C.1
agataggctttatctacacccatccaaagacagtacagcacataacaggcaaacaattgctttctataaatttatataggtacttttgcttcgaaagccggggtaataagattcttccaaatcaaaaaccgttttgccggtctcctattggattcatatagttacacc

SEQ ID NO: 75264 - DNA, 150 bp, Oryza sativa
  Clone ID: PAT_MRT4530_75369C.1
cacgagcagaggatggattcgtgagccttcttactgagagcggaacacaaggatgacttgctccaactgtgcagttctgggtaagcagctatttgaggaggctgtgactattcaggagcgctaaagccaccagagacgctacacacctgc

SEQ ID NO: 75265 - DNA, 468 bp, Oryza sativa
  Clone ID: PAT_MRT4530_7536C.1
ggatcataagagcagtccactgagccttcacctgcctctacacgtgatacgcttgacacagtgctgccctctgcccttaagaaattcaaacgctggaataacaacgtcatgacaccgctcgcacgcggactgtgcataacatggcaggttacatgcattgacttgatcacattgcaggactggattcaggcatacacgcgtggctaactactgctgacctagaggagatggtatatactggctccattcaactgactagccaaatgggagcgaacgctgcatcgctaagtgtatccatttgtgccacctgcacgggatcaccttgagatacagatagccactcagccgaagttatgatagactgatagtacacaggtcattacattccgcctacaacgaaggaaatgactttttccttgtccctgggaaggcactaatgtcataggccgatgactctccctcggcaaa

SEQ ID NO: 75266 - DNA, 315 bp, Oryza sativa
  Clone ID: PAT_MRT4530_75370C.1
gtgtttgcttatgcaattactctatgtcatgacaatgatattagagtagtatctggtagtttaggcgtagtgtctagattacggtgtatcattatttggggttatatgctgcggatgagaggtcggccgctgatggtgacagctcagtacgggtattcctccgtgagtgtatatagttctaagttaatttcctagggaggctactcctccgtatttagccccggttgtatggtcatgacgggctgtcgtaaggaactcggcagtcagggatggcttcttgaagtaccaggagagcatcggatagagggtattagc

SEQ ID NO: 75267 - DNA, 441 bp, Oryza sativa
  Clone ID: PAT_MRT4530_75371C.1
atggagaggcgcggcggaaacgcgaagaggggcggcagcccccttgcgggaggctgttccacctccacagcgtgtcaccgatttcccgatttgcggatgttgaatagtagagggagacctagtggagcacaagagatgttgtcatggggatggccggtggaccggagtcgcacagtcggctcaggtgacgaagagaagttggcgggacgagcaggccctggtgagtctcgtcatggccaagggtcctactcaatagacctgggcaacgggcaagcacaacaggcacggaaccatgatggtggagagtgcgagatcgacgttgtggtgctagatcgagagagcctgaagcagcttgccgccgcagtgcgccgcaagcattgctccgactcctacagtgttcccgccctgttaggcggaggcagggactggcgcagggagtag

SEQ ID NO: 75268 - DNA, 445 bp, Oryza sativa
  Clone ID: PAT_MRT4530_75372C.1
atgaatgccaactttactttatgttcatgttatactgattatactgctagcttatctggaagatgcataggtacgggtataatgtttgctattgcaattactctatgtcatgacgatgatattagagtagtatctggtagtttaggcgtggtgtctagattattattgggtatcattatttggggttatatgttgcggatgagaggtgggccgctgatggtgaaagctcagtacaggtattcctctgcgcgtgtatatagttctaagttaatttcctgggaagggtactcctccgtatttagccccgtatggtcatgacagattgtcgtaaggaactcggcagtggggtggcttctcgaagtactaggagggcatcggaaagaggaggcaggactgagcccctagcagcaggacaccagccctgtgccatgacatctcgactacc

SEQ ID NO: 75269 - DNA, 388 bp, Oryza sativa
  Clone ID: PAT_MRT4530_75373C.1
atgaatgccaactttacatgatgttcatgttatactgaatataccgctagcttatctgggagatgaattggtacgtgtgtagtgtttgcttatgcaattactctatgtcatgacgatgatattagagtagtatctggtagtttaggcgtggtgtctagattacgggacatcattatttggggttatatgctgcggacgagaggtgggccgctgatggtgacagctcaatacgggtatttctccgcgcgtgtatatagtcctaagttaatttcctggggaaggtactcctccgtatttagccccggttgtatggtcatgacgggctatcgtaaggaactcggcagtcaggggtggcttcttgtagtactaggagggcatcggatagagg

SEQ ID NO: 75270 - DNA, 603 bp, Oryza sativa
  Clone ID: PAT_MRT4530_75374C.1
atgcgggcgctgcggcgcggcggccggcgagggagcaaggtcatcgtgacgagcagcgacgccaggcacgtcgcgggcctcgccaccgcggcggacaccatcaccctccgccccccgccgccagcggagtactggctcttcttcaaggcgcacgcgttcggcggcgcggacgacgccgacgccgaccggcggctggcggcggcggggcaagccatcgccgagaggctccgcctgcgcgcgtcctacttcggcgggaaggcgctgggcgccctcctccggtggcgccccgaccaccggctctggcgcagggtgctgagcagcggcgccgcagacctgccatgcctcggcaccggcgactacatcgccgcggcggccggctgcctgttcccgccgcacctgaacctccacggcgtcaccgtctcccgctcgccgctgagaggtctcgtcggcctccatggctcctccttgatgactcctcctcccaccgactccggccgccgctcgccggagttgcccgtgttgctgtgcaagtcagtcttcccttcctactgcctctactacgccgcgcattgcaccatcgatgatacggaaatcaaacagtaa

SEQ ID NO: 75271 - DNA, 389 bp, Oryza sativa
  Clone ID: PAT_MRT4530_75375C.1
atgagtacctactttacgttatgttcttgttatattgtatgtacggctagcttatttaggagatgctttggtgcgggtataatgtttgcttgtgcaattactctatgtcatgacgatgatattagagtagtatctggtagtttaggcgtggtgtcttagattacgggatatcattatttggggttatatattgcggatgagtggttggccgctgatggtgacaactcagtacggttattcctccgggcctatatataatcctaagttaattccctggggagggtattcctccgtatttagccccggttgtatggtcatgacgggctgtcgtaaggaactcggcagtcaggggtggtttctcgacttactaggagggcatcggaaagagg

SEQ ID NO: 75272 - DNA, 296 bp, Oryza sativa
  Clone ID: PAT_MRT4530_75376C.1
cagaaaaactaccgcagttttcattagaatctttggacgggaaacaacaatggattggcatggcctagaccaccaggacagataacccccggggacacagccgccagggggaagggaaaaaaaaacacggtgggcaccataggaaaaataaaccctggtttagacccccgaaaccggacccttaaagaaaaaacaaccacttctagctggcaagaagagacccatccatgaaacccaaaaaagggcaagcccctgaaggcgggatgtgctcaaggttaaaccctagagcccccccc

SEQ ID NO: 75273 - DNA, 876 bp, Oryza sativa
  Clone ID: PAT_MRT4530_75377C.1
agcacggtggccttcggattcagtcgagaggatagcggaacaagcgggaggagtctccgtcgaggccaccgaatttacccccatgccacctcctccaacacaccggagaggagagggaggagccggcgcaagccaaccgccaccatcacgagctcaggttgctgtagccagccatcacgcgcactgttgccttatgtgcaccgttgaggagaagggtaggtacacgtcatgcaggggacttctacaccaccactgcccattcactagatctggtgctcaacattttttttctgatatgtttggttttttcttgttcatgttgttctttcccttttgacgcatgcaaatgatctgtgtaattgattttaattggaggaatgatggaatttgttcgtttgtgtcaaaatttgtgatttgggttatatgatttgtgctattgaggaacaatttgggattcatgaagaataatttaggattattttgtcattttctttactgcaagcataggctcaagacgagctgactttttttttggaatcgtgcaactaatcggtaccggttctcaattcggcaccgatgagccttctgatcagtgccgcctctgtgatgccggttggaaaatacagcatatatgtaggtttccatgcggcacccattagattttgtgtagtagtgacatttgaatgggctttatcgccctaaattgatgccctttttgacccaatttggttggaaaatagtgtggccttggaaggtcacaattatgtcgttgcattaagcactgacgctcttgtcccggttatgatttgcacctttttctttttaataaaaaggattaaaatccgatctttacatccaaaaaaaaaaaaaaaaaaa

SEQ ID NO: 75274 - DNA, 274 bp, Oryza sativa
  Clone ID: PAT_MRT4530_75378C.1
gcagcaagaaagtcaaaactatgatggagttcgtggagcttgtgactgtgacacaacaagttgtcactaacactatgcactatatcacaattgaggtgaaggaaggggaagacaataagctctatgaaggtaaggtctgggagaaaacattgatggacttcaaggaactgcatgaggtcaagcctgtctactacagggcaaaagccttaaggccaattgggaatctatgggggtcaagttatcaataaggacgggaaaaatatcgcatggatat

SEQ ID NO: 75275 - DNA, 388 bp, Oryza sativa
  unsure (1)..(388): unsure at all n locations
  Clone ID: PAT_MRT4530_75379C.1
ccgacagccnactatacattatgtccatgtgatactgaatataccgctagcttatctgggagatgctttggtgcgggtataatgtttgcttatgcaattactctatggggggatgaggatattagacgcgcttctggtattgtagacatggtgtctagattacgggataccattatttggggttatatattgcagatgagaggtgggccgttgatggtgacagctcagtacgggtattcccccacgccagtatataatcctaagttaatttcctggggagggtattcctccatatttagctccggttgtatggtcatgacgggctgtcgtaaggaactcagcagtcagcggtggcttctcgaagtaccaggagggcatcggatagagg

SEQ ID NO: 75276 - DNA, 552 bp, Oryza sativa
  unsure (1)..(552): unsure at all n locations
  Clone ID: PAT_MRT4530_7537C.1
cctttgaccatttacaataccaggagcttgcttcaaagacttccacaacatgtatcgcattcagccaaggaaaaagttcttgctttgttagggatcgctcttgttgccaccagtgtaaacagggacaaaccgaccttaatnttaaacaatctataatgatggacacacaactcaacctctgggacaattcagatttcgagtgatgtccgccttggatgcccatttggtgtgtaagttataacaggtcnccttggcaaatggacaaagcttttgccacaactgggggataatgtcgcaaaatgcagctgctcctctgctgttgtgctttctggtgttgttgttgcctggccactgctaatttacgcaagtttcataaagggccaaacaccccagcttcctgggaattgtcgcatgttggaggatcgcaggaaataaatagcaattgtataatcatctacatatttataccctgtcacattgttcccataagagaccagaaaattcaccttggtggtcccgnctttagtttgtcaaaaaaaaaaaaaaaaaaaa

SEQ ID NO: 75277 - DNA, 313 bp, Oryza sativa
  Clone ID: PAT_MRT4530_75380C.1
atgtttgcttatgcaattactctgttatgacgatgatattagagtagtatcttgtagttgagacgtggtgtctagattacgagatatcaatatttggtgttatatattgcggatgagaggtgagccgctgatggtgacagctcagtatgggtattccttcgcgccgatatgtaattctaagttaattccctggggagggtattccaccgtatttagctctggttgtatggtcatgacgggctgtcgtaaggaactcggcagtcaggggtggcttctcgaagtaccaggagggcatcggatagagggtattagc

SEQ ID NO: 75278 - DNA, 707 bp, Oryza sativa
  Clone ID: PAT_MRT4530_75381C.1
gtgagaggtgtgagactaatcacaagaaacattgctcaacccgcccatgaccgcgggcacggctattcgaatagttttactctggccagaggtgtaccactgtacccacaagacaaagcctcaacatcatgtctaccatgcgtcgcgatactggaaagtacccgaatagaggctgtgacaatatcctctgcacaacacaactcaccacagtgcaccgttcctggatcataatcacccccttataaaacaaggcatggactccccagcgacccccacgaacttctcgccgcttctcagtctggcaccccgtgatgaaccatgctatacaaaagcactggtccgcgaggtcgccggtgttaggaggctcagccgggctatccgagagcaccaacgcggagaggacgacgagacgaactcaccggtggtgacggtgacgagaatcgatgacggaaaacggccggcgaccgtaggtgacgatgggagcaacggaggtgtggacgggcttcgtcttggcgctgtgatgccgaggaaggcaacggcgaagcttggcgttgacggaaacaacggtggtgttcggccggaggcggagtagatcggattcaaagtgacgaagggcttccggcgagtttcggcgcaagggcgaccgcgggtagggcgctacaggcaacagcgatggctgggacttgaggcaaacgaaagaggagagg

SEQ ID NO: 75279 - DNA, 489 bp, Oryza sativa
  Clone ID: PAT_MRT4530_75382C.1
atttgaattaaatctagaaaatacggaaaggtactttttatgggcccacctgtcagtctttttcccttttctttttctttctcttcttcttcctcccgtctcctctatccgatgccctcttggtacttcgagaagccacccctgactgccgagttccttaggacaacacttcatgaccatacaaccaaggctaaataaggaggaataccctccccaggaaattaacttaggactatatatacgcacggaggaatacccgtactgagctgtcaccatcagcggcccacctctcatccgcagcatataaccccaaataatgatatcccgtagtctagacaccatgcctaaactaccagatactactctaatatcagcgtcatgacatagagtaattgcataagcaaacactatacacgtaccaaagtatctcccagataagctagcagtataattagcataagatgaacatattgtaaagttggcattcat

SEQ ID NO: 75280 - DNA, 777 bp, Oryza sativa
  Clone ID: PAT_MRT4530_75383C.1
atgaaaaggaacaatagattaaagtgggtttctgacatcctgaaaccggatggttcttgggacgagaacttggtttctgcaatcttcctcccggtggatgttgaagaaattgtaaagatcaagatatcctcccgccaagaggaggattttgttgtttggtttcctgatcggcttggtcgtttttcggatgaatgctcgtgctcctcggactacgccatcaagaaagggtggaacctgatctggtcctgtaatgtgccccaaaaagtgaaaatctttggttggagagcagccacaaatagcttaccaactatggaaaacaagaagaagaggaattttggaattgttggactcaatgttaggcaagtgtggcttgccacactttttgtggcctacaaattatgcaatggggccctggaatcagagctgattgcttgcagagatggcctcaacctggcgttgcagtggaccctgcttccgattgccgttgaatctgattgtctggaaattattcagctgttgaattcaaaggagaagctgctgtcagccgaaggatttatagtcagggagattcgctttctcatgactggaacaaaggaagtgtcttttgccaaagtgcataggaaccaaaatagagttagtcactttttagcaaataaaggccgttgtgaatccatgatggaattctggccagacgataattgtaatatgatctcgcaccttgtgtgcgaggactcgtttattcgagtaaatcccttgttccccgcaaaaataaattaa

SEQ ID NO: 75281 - DNA, 1574 bp, Oryza sativa
  Clone ID: PAT_MRT4530_75384C.1
tccacgcgtccgcagagacacacctcaccagcttgatcaagagctagccaagccaaatggagctcctgccatggcttctcggcttcgtggtcaagtacccggagatcatggcgtccgccgcttgcttcttgctgctcttctgcaggtttaggaggaggagcaagcggattccgacgaactggccggtggtcggcgcgctcccggcgatcgtggcgaacgccgggcgcgtccacgactgggtgacggagttccttcgcgcggcggcgatgtcgcacgtcgtcgagggaccgtggggctcgccgggggacgtgctcatcaccgccgacccggcgaacgtggcgcacatgttcacggcgaacttcggcaactaccccaagggggaggagttcgccgccatgttcgacgtgctcggcggcggcatcttcaacgccgacggcgagtcgtggtcgttccagcggcggaaggcgcacgcgctgctgtcggacgcgcggttccgcgccgccgtggcggcgagcacgtcgcggaagctcggcggcgggctcgtgccgctgctcgacggggtcgccgcgtcgggcgccgccgtggacctgcaggacgtgttcatgcgcctcacgttcgacctcacggcgatgttcgtgttcggcgtcgaccccggctgcctcgccgccgacttccccaccgtccccttcgccgcggccatggacgacgccgaggaggtgctcttctaccgccacgttgcgcccgtgccatggctaaggctccagagctacctcaagatcgggcactacaagaagatggccaaggctcgggaggtgctcgacgcgtccatcgccgagctcatcgctctccggcgagagcgcaaggcggccgacgccaacgccaccggcgacgccgacctgctcacggcgtacctggcatgccaggacgagatcggcatggacggcgccgcgtttgacgcgttcctgcgcgacacgacgctgaacctcatggtcgccggccgcgacacgacgagctcggccctgacatggttcttctggctgctctccaaccaccccggcgtcgaggccaggatcctcgccgagctccgcgcgcacccgccgtcacccaccggcgccgagctgaagcggctggtctacctgcacgcggcgctgtcggagtcgctccggctgtacccgccggtgccgttcgagcacaaggcggcggcgaggccggacacgctgccgagcggcgccgccgtggggccgacgcggcgggtgatcgtgtcgctctactccatggggaggatggaggcggtgtgggggaagggctgcgaggagttcaggccggagcggtggctgacgccggcggggaggttccggcacgagcgctcgtgcaagttcgccgcgttcaacgtcggcccgcgcacgtgcctcggccgcgacctcgcgttcgcgcagatgaaggccgtcgtcgccgccgtcgtgccgcggttccgtgtcgccgccgccgcggcgccgccgcggcccaagctgtccatcatcctccacatgagggatggactgaaggtgaaggtgcacaggagacaagaggattga

SEQ ID NO: 75282 - DNA, 376 bp, Oryza sativa
  Clone ID: PAT_MRT4530_75385C.1
aactaatgtactacacgaattagctgacaaacatggctagagcttgcctgactacaggacaacttcagatggaacagagcagggacctatgtgcaaatcaactggggtatgccatgatggaagccatcacggagaaccagcaactactaacaagcaagcagagatgaatgctgctagggcagcttatgaacattccgaagacagaagaaaaaatgctcttgctttcactggtctaagaggaccgcattggggacaaggaacagacgcacatatctgctggacaagacaagatcgcagaacctgctctttcagttgcccagagaattaacagttgcaagcgccagtgcaactgatcgtgaatgcactcacttgggtg

SEQ ID NO: 75283 - DNA, 447 bp, Oryza sativa
  Clone ID: PAT_MRT4530_75386C.1
atattattttttattggttacaaacagtgtaatcctttgatctttttgtttcccttttgcctctatcggatgccctcctggtactttgagaagccacccctgactgccgagttccttacaacaacccgtcatgaccatacaactggggctaaatacggaggaatactctccctagggaattaacttaggattatataccggcgcggaggaatacccgtactgagatgtcaccatcagcggcccacctctcatcctcaatatataaccccaaataatgatatcccgtaatctagacaccacgtctaaactaccagatactactctaatatcatcgtcatgacatagagtaattgcatatgcaaacattatacccgcaccaaagcatctcctagataagctagccgtatattcagtataacatgaacataatataaagtaggtactcat

SEQ ID NO: 75284 - DNA, 388 bp, Oryza sativa
  Clone ID: PAT_MRT4530_75387C.1
cctctatccgatgccctcctggtactacgagaagccacccccaacggctgaattccttacgacagcccgtcatgaccatataaccgaggctaaatatggaggaatacccttccaagggaataaacttaggattataaacaggcgcggaggaatacccatactgagttgttaccatcagcggcccacctctcatccgcagcatataaccccaaataatgatatcccgtaatctagacaccatgtctaaactaccagatagtactctaatatcatcgtcatgacatagagtaattgcataagcaaacattatacccacaccaatgcatctcccagataagctagccgtatattcagtataacatgaacataatgtaaagtaggtactcat

SEQ ID NO: 75285 - DNA, 393 bp, Oryza sativa
  unsure (1)..(393): unsure at all n locations
  Clone ID: PAT_MRT4530_75388C.1
ggtggttcctcggcatcaccagggcaagctcatcgaccccatgctcgactgcctcaaggagtggaacggcgagccccttcccatcaactaagccagagatcccatcgccaatngccatgggccatacacccatcatcgaggaggagaggagactaaaaataaaagaaaacgaaccgcttcgtgtatcttcagacaagacccgtattttcttcgttcttcctttgtttatatgatctcgtgttctttgtgttactgctctgctcagctccaccatgccgcaaacaaccggctttttaagatattgtcgctaaactgtattttgggtgaaatatctactcgattccacctaaaaatggggtaatagaaangtttgatcctataaaaaaaaaaaaa

SEQ ID NO: 75286 - DNA, 388 bp, Oryza sativa
  Clone ID: PAT_MRT4530_75389C.1
cctctatcctatgccctcctggtacttcgagaagccacccttgactgccaagttccttacgacagtccgttatgaccatacaaccggggctaaatgcggaggagtaccctccccaggaaattaacttaggactatatacacgcgcggagaaatacccgtactgagctgtcaccatcagtgggccacctctcatccgcagcatataaccccaaataataatatcccgtaatctagacaccacacctaaactaccatatactactctaatatcatcgtcatgacatagagtaattgcataagcaaacattatacccgtacctatgcatctaccagataagctagcagtataattagtataacatgaacataaagtaaagttggcatttat

SEQ ID NO: 75287 - DNA, 444 bp, Oryza sativa
  Clone ID: PAT_MRT4530_7538C.1
atgaacttggtgttccagatagatcaggatgattgtttatcggaaacgatccaatcatgcatgataattgattgggccacagaaacattttggaccatatatttgctgcatgcatcgaagattagaaagcatcctacactgtgtaagatatttatcttgcgacggccgccaccactgccagatccatgcaggggacggccaccaccgccggatccagacgcgagggggccggttgccgttgcccctcaacgccgtgcacggttgctgccgcctcgcctcgtcgacatgcagcaaaagtcgggagaggagaggagtgaaagtcgggagaggagacgagaggaagtgagagagatagaggggagtaaagtgaaaataaaagggaagagagagaggaggtttgaacattttgaaatgagtaagggagaggaggtgtgaaaattttaa

SEQ ID NO: 75288 - DNA, 9786 bp, Oryza sativa
  Clone ID: PAT_MRT4530_75390C.1
atggatcggtcagatgctttagcttgcatcaccagtgtcctcattctcctggcgccgccatgtgcatcggacgatcggcttgtccccggcaagccgctctcccctggcgctaccgtcgtctccgacggcggcgccttcgccttgggcttcttctccccctcgaattcaactccggagaagatgtacctcggcatatggtacaacgacatcccccggcgcacggtggtgtgggtcgccgaccggggaactccggtcacaaacagcagttcgtctgcgccgacgctgtcgctgaccaactcctccaacctcgtcttgtccgacgcagatggcggcgttcgctggacgaccaacatcaccgacgatgcagcgggcggcggctccacggcggtgctcctgaacaccggcaacctcgtcgtccggtcaccgaacggcaccaccctgtggcagagcttcgagcacccgagtgactcgttcctgcccggcatgaagatgcgggtcatgtacaggacgcgcgccggcgagcgcctggtgtcgtggaagggccccgacgacccgtcgccggggagcttctcgttcggcggcgacccgggcacgttcctccaggtgttcctctggaacgggacgcgcccggtttcgagggacgggccatggacgggcgacatggtgtcgagccagtaccaggcgaacaccagcgacatcatctactccgccatcgtcgacaacgacgacgagagatacatgacgttcaccgtctccgacggctcgccgcacaccaggtacgtgctgacctacgccggcaagtaccagctccagagctgggacaacagctcgtcggcgtgggcggtgctcggcgagtggccgacctgggactgcaaccgctacggctactgcggcccgttcggctactgcgacaacacggcgagggcgcccgccgtcccgacgtgcaagtgcctcgccggcttcgagccggcgagcgcggcggagtggagcagcggcaggttctcgcgtggttgccggcgcacggaggcggtggagtgcggcgaccgtttcttggccgtgccggggatgaagtcgccggacaagttcgtgctcgtcccgaacaggacgctcgacgcgtgcgccgccgagtgcagcagcaactgctcgtgcgtggcgtacgcgtacgccaacctgagcagcagcgggtccaagggcgacatgacgaggtgcttggtgtggtcaggggagctggttgatacagagaaggaaggtgaagggctaagcagcgacacgatctacctcaggcttgctggtcttgaccttgacgcgggtggaaggaaaaagagtaatgcaatcaagatagtactgccagtgttaggctgtattctgattgtcctatgcattttctttgcatggttaaaaatcaaaggcaggaaaacaaaccaggaaaagcacagaaagctaatttttgatggcgaaggaagcactgtccaagattttgaactcccatttgtaagatttgaggacattgctctagcaaccaacaatttctcagaaacaaataagattgggcaaggaggtttcggaaaagtttacatggcaatgctaggtggtcaagaagttgctattaagcggttaagtaaggattctcgacaagggacaaaggaattcaggaatgaagttattcttatcgcgaaattgcaacacagaaatttggttcgccttcttggctgttgtgttgagggagatgaaaaactgctaatatatgagtacttgcctaacaaaggcttagatgctaccctttttgatggttcaagaaaaatgaaactagactggacaacacggtttaatataatcaaaggggtggcaaggggacttctttatctgcaccaagactctagattgaccataattcacagagatctcaaagctggcaatgttttgctagatgctgaaatgaaacccaagatagcagattttggcatggcaaggatctttggtgataatcaacaggatgcaaatacccagcgtgttgttggaacatatggctacatggctcctgagtatgcaatggaaggtatcttctctactaaatcagatgtctacagctttggtgtgttattgttggaaattgtgactggtataaggagaagctccactagcaatatcatgaactttccaaacctcatagtttattcatggaacatgtggaaggaagggaaaagcaaggatttggtagactcatcaattatggatagttgcttactacatgaagttttgctctgcatccatgtagcattgttatgtgttcaagaaagcccagatgacaggccacttatgtcatctattgtgttcaccctggagaatgggagtagtgttgcactgctcccagccccaagttgccctgggcactttacacaaaggagttctgagatagagcaaatgaaagataatactcagaactcaatgaatacttttacgctaacaaacatagagggaagaattctgctgaagaaagttttgatggatcggtcagctgcggctttagcctgcatcaccagtgttcttctcctcctcctgccgccgccatgtgcatccgacgatcggcttgtcaccggcaagccgctctcccctggcgccaccatcgtctccgatggcggcgccttcgccttgggcttcttctccccctccaactcaactccggagaagatgtacctcggcatatggtacaatgacatccccgggcgcacggtggtgtgggtcgccgaccgaggaactccggtcacaaacagtagttcgtctttgccgacgctgtcgctgaccaactcctccaaccttctcttgtccgacgccgacggccgcgttcgctggacgagcaacatcaccgacgatgcagcgggctccggctccaccgcagtgctcaagaacgacggcaacctcgtcgtccggtcaccgaacggcaccaccctgtggcagagcttcgagcacccgaccgactcgttcctccctgggatgaagcttggggtgacgttcaagacgcgcacatgcgagcgcttggtgtcgtggaagggccccgacgacccgtcgccggggagcttctcgttcggcggcgacccggacacgttcctgcaggtgttcatctggaacgggacgcgcccggtttcgagggacgggccatggacgggctacatggtgtcgagccagtatcaggcgaactccagcgacatcttctacttctccatcgtcaacaacgaggaaaagagatacataacgttcagcgtctccgagggctcgccgtacaccaggtatgtgattacctacgccggcaagtaccagttccagcgctggaacatcagctcgtcggcgtgggatgtcgcggagtggcctagatgggactgcaactattacaactactgcggcccgaacggctactgcgacaacacagcgagggcgcctgctgtcccgacgtgcaagtgcctcttcggcttcgagccagcgaacgcggcggagtggaacagcggccggttttcgcagggttgccggcgaaaggaggcggtgcagtgcggcgaccgtttcttggccgtgccggggatgatttcgccggacaagttcgtgctcttcccgaacaggacgctcgacgcgtgcgccgccgagtgcagcagcaactgctcctgcgtggcgtacgcctacgccaacctgagtagcagcatatctaagggcgacaagacgaggtgcttggtgtggtcaggggagctgattgacgcggagatggtaggcgaaaggcttggcagcgacacgatctacctcaggctcgccggtcttgacgcgggtcataggaggaagagcaatgcggtcaagattgttctagcagtgttaagcagtattttggttgtcctatgcatttcctttgcatggttaaaaatcaaaggccggtatattcagtgctcttttatttacttagatgcgtatggcaagaaaagaaaacgcgaaaagcacaggaagctatttttggatggtgcgtgtacatctgaagagattgaggatgggagccctatccaagatcttgaactcccatatgtaagatttgaggaaattgctttagcaacccacaatttctcagaagaaaataagattgggcaaggaggttttggcaaagtttatatggcaatgctaggtggtcaggaagttgctgttaagaggttaagtaaggattctcgacaagggacagaggaattcaggaatgaagttattcttatcgcaaaattgcagcataggaatttggttcgccttcttggttgttgtgttgagggagatgaaaagctgctaatttatgagtacttaccaaacaaaagcctagatgctaccctttttgatgtttcgaggaaattgaaactagactggagaacacggtttaatataatcaaaggagtggcaaggggacttctttatctacaccaagactcaagattaaccataattcacagagatcttaaagctggcaatgttttgctagatgcagagatgaaacccaagatagcagactttggtatggcgaggatcgttggtgataatcaacaaaatacaaatactcgacgtgttgttggaacatatggttacatggctcctgagtatgcaatggaaggtatcttttctactaaatccgatgtctatagctttggtgtgttactattggaggttgtaactggtataaggagaagctcgactagtaacatcatgggttttccaaacctcatagttttttcgtggaacatgtggaaggaagagaagatgaaggatttggcagactcatcaattatggatagttgcttactgcatgaagttttgctctgtatccatgtagcactgttgtgtgttcaagaaaaccctgatgatagaccacttatgtcatccgttgtgttcttcctggacaatgggagtaatactgcacttccagccccaaatagccctgcctattttgcacaaaggagttctgaaatagagcaattgagagataatattcagaactcaatgaatacttttacgctaacagatatagaggggagcctgctcacttcacttgctcagtgcaagctcatactgaaaaggaagaaggttctgatggatcgatcagctgcggctttagcctgcatcaccagtgttctcctcctcctgccgccgccatgtgcatccgacgaccggcttgtcaccggcaagccgctctcccctggcgccaccctcgtctccgacggcggtgccttcgccttgagctttttctccccctcaactgccactccggagaagatgtacctcggcatatggtacaacgacatcccccagcgcacggtggtgtgggtcgccgaccgaggaactccggtcacaaacactagttcgtctgcgccgacgctgtcgcttaccaactcctccaaccttgtcttgtctgacgctgacggccgcgttcgctggtcgaccaacatcaccgacgatgcagcgggctccggctccacggcggtgctcctgaacaccggcaacctcgtcatccggtcaccgaacggcaccatcctgtggaagagcttcgatcaccccaccgactcgttcctccctgggatgaagcttgggatgacgttcaagacgcgtgtctccgatcgcttggtgtcgtggaggggccccggtgacccgtcgccgggaagcttctcgttcggcggcgacccggacacgttcctccaggtgttcgtccggaaagggacgcgcccggtttcgagggacgcgccatggacgggctacatgatgttgagccggtacctgcaagtgaattccagcgacatcttctacttctctgttgtcgacaacgacgagaagagatacataacgttcagcgtctccgagggctcgccgcacaccaggacgctcgacgcgtgcgccgccgagtgcagcaacaactgctcctgcgtggcgtacgcctacgccaacctgagtagcagcatatcagagggcgacgtgacgaggtgcttggtgtggtcaggcgagctgattgacacagagaagataggcgaatggcctgaaagtgacacgatccaccttaggcttgccagcattgacgcgggtcggaggacgaagatcaatgccgtactcaaggttgttctgccagtgttaagcagcattattattgtcctatgcatgtcctttgcatggttaaaaattaaaggcaagaaaagaaaccgggaaaagcacaggaagctaattttcgatggtgcgaatacatctgaagagattgggcaagggaaccctgtccaagatcttgaacttccatttgtaagatttgaggatattgctctagcaacccacaatttctcagaagcaaataagattgggcaaggaggttttggcaaagtttacatggcaatgctaggtggtcaggaagttgctgttaagaggttaagtaaggattctcgacaagggacagaggaattcaggaatgaagttattcttatcgcaaaattgcagcacagaaatttggttcgccttcttagttgttgtgttgagagagatgaaaagctgctaatttatgagtatttacctaacaaaagcttagatgctaccctttttgattgcttacatttacttctttctatggatgtttcaaggaaatttaaactagactggagaacacggtttactataataaagggagtggcaagaggacttctttatctacaccaagactcaagattaaccataattcacagagatcttaaagctggcaatgttctactagatgcagagatgaaacccaagatagcagactttggtatggcaaggatctttggtgataatcaacaaaatgcaaatactcgacgtgttgttggaacatatggttatatggctcctgagtatgcaattgaaggtatcttctctactaaatccgatgtctatagctttggtgtgttactactggaagttgtaactggtataaggagaagctctactagtaacatcatggactttccaaacctcatagtttactcatggaacatgtggaaggaagggaagatgaaggatttggcagactcatcaattatggatagttgcttactacatgaagttttgctatgtatccatgtagcactgttgtgtgttcaagaaaacccagatgacaggccacttatgtcatccgttgtgcccaccctggagagtgggagtaccactgcacttccaaccccgaattgccctgcttactttgcacaaaggagttctgaaatagagcaattgagagataatattcagaactcaatgaatacttttacgctaacagatatagaggggagagtacagaagggaatacaaatcttggtgatggatagtacagcttgtactaccatcgtcgtcttcctcctcctcttgccgcggttgtgttcgtcggccagcgacaagatagagcttggcgagcaactgttgccggggcaaacaagagcttcggatggcggggccttcgtgctaggcttcttctcgccgtccaattccacaccggagaggcagtacatcggcatatggtacaacatcaccgaccgcaccgtggtgtgggtggccaaccgggaagctccggcgatcgccgccggcaggtccatcgccccgaggcttgcgctgaccaacgactccaacctcgtcttgtccgacgccgacggccgcgttctttggtcgaccaatgtcaccgccggcgtcgcggctgggcgctcgacctcgccgccggtggccgagctcctcaacaatggcaacctcgtcatccggtcgaacggcgccatcctgtggcagagcttcgaccacccgaccgacacgctcatacctgagatgaagatccagctgaacaaacggacgcggcgtggcgcgcgccttgtgtcctggaaggacgccggcggcgacccctcgccggggagcttctcgtacggcatggacccggagacgtcgctccagctcgtcatgtggaacgggtccaggccgtactggcgcaccaccgtgtggacgggctacctcacctccggccagtacctcgccgccaccggcacgaccatctacctcgacgtggtggacaacgacgatgagatctacgtgaagctcagggtctccgacggcgcctcgccgacgcggtacgtgatgaccagctccggcgagttccagctcctgggctgggacaagagctcgtcggagtggatcaccttcagctcgttcccgacgcaccactgcaccacgtacggctactgcgggccgaacggctactgcgacatcacgacgggcgccgccgccgcgtgcaagtgcctcgacggcttcgagccggcaagcggcggggagtggagcgccggcaggttctcggggggttgccggcggaaggaggcgccgccgtgcggtggcggggatggtttcttggcgctgccgcggatgaaggtgccggacaagttctcgacgctcgtcgggaacatgacgttcgacgagtgcgcggcgaggtgcgccatgaactgctcgtgcgaggcgtacgcccacgccgacctgagcagcagcagcgcccggggggacatcggccggtgcttggtgtgggccagtgagcttatcgacatggtgatgatcggccagacgacatggggccgcgccggcgagacgctctacctccgtgttcctgcaagttcaacaggtagcaggggaaggggaaatgttgtgaaaattgctgtgccaatactggccagcgctttagtgctcacctgcattttctttgtatatttctgcaagtccagagagaatagaagaaaaagagatagccagaagacgttggttcctggaagtaggaatacttcaagtgaacttcttgaggaaaatcctactcaggatcttgaatttccatccatacgattcagtgatattgttgctgcaacagacaacttctccaaatcatgtttgatcggacgtggaggatttggaaaggtttacaaggtaacattagaaaatggtcaagaagttgcaatcaaaaggctcagcaaggattctgaccaaggaatagaggagttcaaaaacgaggctattttgattgccaaattacagcataggaacttggttcgacttcttggctgttgcactgagggatctgaaaagttgttgatatatgaatacttagctaacaaaggcctagatgctattctttttgatggtgcgagaaaatcactgctagactggccgacacgattcgggataatcaaaggtgtcgctagaggacttctttatctccaccaagattcaagattaactgtaatacatagagatctcaaggcaagcaatattttgctggatgctgaaatgagacccaaaatagcagattttggtatggccaaaatttttggtgaaaaccagcaaaaggcgaataccaaaagagttgtgggaacatattttggagtactgctcttggagattgtaagtggtatccggataagctctaccgatatcatggaattcccaagccttatagtctatgcatggagcctatggaaggaaggcaaggcgaaaaacctgatagattcatccattgcggagagcagttcattggatgaagtccagctttgcatccacgtcgggctcttgtgtgtagaagacaacccgaacagcaggccgctcatgtcatctgttgtgtccatcttggagaatggaagcacaacatttctggcaatgccaaatcagcctgcatattttgcacaaacaacaagtgaaatggacaaaatgacagacggtagctctagaaacaccatgactatgacagttcttcagggacggtag

SEQ ID NO: 75289 - DNA, 686 bp, Oryza sativa
  Clone ID: PAT_MRT4530_75391C.1
tggtcgacggcccgggcggccgcaaggggttcgcgttggccgattcattaatgcagctggcacgacaggtttcccgactggaaagcgggcaagagcatctggagcgtccataccaaaacctggatccaatggtgatcaccagggctgaacctggattgggccagatggctcctagatttggtattggcggcataaaactagcatttaatagctgccaagacagagcaaccgctgtccaccacaccatgttgccgccaaatccgcaccctcccacgcgcgcccgcacgtccaagcgtgtggaaccggcctcgtatcgcacccctgagccctataaaaaccctccccagacctccctcctcctttttccccacttgcctaagctcctcgcgctctctctctcgtgctccccacgctgctcgccgcctccgccactcaccggagctctctggctatgcgtcaccgctagctccgccatcccgagtagaaccacggctgccactccaattccgcaaatcgcaactgggtcatcctcttccccatgctaccgaggccgccgccgcattcgccacttctggccggcgatagccgtcgaccggtgccaccccaagccatgccgtttcctccactggctctgcagctttaagccgcacctaggccaccacttccccgccatcgggagcagctga

SEQ ID NO: 75290 - DNA, 3639 bp, Oryza sativa
  Clone ID: PAT_MRT4530_75392C.1
atggatcgatcagctgcggctttagcctgcatcaccagtgttctcctcctcctgccgccgccatgtgcatccgacgaccggcttgtcaccggcaagccgctctcccctggcgccaccctcgtctccgacggcggtgccttcgccttgagctttttctccccctcaactgccactccggagaagatgtacctcggcatatggtacaacgacatcccccagcgcacggtggtgtgggtcgccgaccgaggaactccggtcacaaacactagttcgtctgcgccgacgctgtcgcttaccaactcctccaaccttgtcttgtctgacgctgacggccgcgttcgctggtcgaccaacatcaccgacgatgcagcgggctccggctccacggcggtgctcctgaacaccggcaacctcgtcatccggtcaccgaacggcaccatcctgtggaagagcttcgatcaccccaccgactcgttcctccctgggatgaagcttgggatgacgttcaagacgcgtgtctccgatcgcttggtgtcgtggaggggccccggtgacccgtcgccgggaagcttctcgttcggcggcgacccggacacgttcctccaggtgttcgtccggaaagggacgcgcccggtttcgagggacgcgccatggacgggctacatgatgttgagccggtacctgcaagtgaattccagcgacatcttctacttctctgttgtcgacaacgacgagaagagatacataacgttcagcgtctccgagggctcgccgcacaccaggacgctcgacgcgtgcgccgccgagtgcagcaacaactgctcctgcgtggcgtacgcctacgccaacctgagtagcagcatatcagagggcgacgtgacgaggtgcttggtgtggtcaggcgagctgattgacacagagaagataggcgaatggcctgaaagtcggaggacgaagatcaatgccgtactcaaggttgttctgccagtgttaagcagcattattattgtcctatgcatgtcctttgcatggttaaaaattaaaggcaagaaaagaaaccgggaaaagcacaggaagctaattttcgatggtgcgaatacatctgaagagattgggcaagggaaccctgtccaagatcttgaacttccatttgtaagatttgaggatattgctctagcaacccacaatttctcagaagcaaataagattgggcaaggaggttttggcaaagtttacatggcaatgctaggtggtcaggaagttgctgttaagaggttaagtaaggattctcgacaagggacagaggaattcaggaatgaagttattcttatcgcaaaattgcagcacagaaatttggttcgccttcttagttgttgtgttgagagagatgaaaagctgctaatttatgagtatttacctaacaaaagcttagatgctaccctttttgattgcttacatttacttctttctatggatgtttcaaggaaatttaaactagactggagaacacggtttactataataaagggagtggcaagaggacttctttatctacaccaagactcaagattaaccataattcacagagatcttaaagctggcaatgttctactagatgcagagatgaaacccaagatagcagactttggtatggcaaggatctttggtgataatcaacaaaatgcaaatactcgacgtgttgttggaacatatggttatatggctcctgagtatgcaattgaaggtatcttctctactaaatccgatgtctatagctttggtgtgttactactggaagttgtaactggtataaggagaagctctactagtaacatcatggactttccaaacctcatagtttactcatggaacatgtggaaggaagggaagatgaaggatttggcagactcatcaattatggatagttgcttactacatgaagttttgctatgtatccatgtagcactgttgtgtgttcaagaaaacccagatgacaggccacttatgtcatccgttgtgcccaccctggagagtgggagtaccactgcacttccaaccccgaattgccctgcttactttgcacaaaggagttctgaaatagagcaattgagagataatattcagaactcaatgaatacttttacgctaacagatatagaggggagagtacagaagggaatacaaatcttggtgatggatagtacagcttgtactaccatcgtcgtcttcctcctcctcttgccgcggttgtgttcgtcggccagcgacaagatagagcttggcgagcaactgttgccggggcaaacaagagcttcggatggcggggccttcgtgctaggcttcttctcgccgtccaattccacaccggagaggcagtacatcggcatatggtacaacatcaccgaccgcaccgtggtgtgggtggccaaccgggaagctccggcgatcgccgccggcaggtccatcgccccgaggcttgcgctgaccaacgactccaacctcgtcttgtccgacgccgacggccgcgttctttggtcgaccaatgtcaccgccggcgtcgcggctgggcgctcgacctcgccgccggtggccgagctcctcaacaatggcaacctcgtcatccggtcgaacggcgccatcctgtggcagagcttcgaccacccgaccgacacgctcatacctgagatgaagatccagctgaacaaacggacgcggcgtggcgcgcgccttgtgtcctggaaggacgccggcggcgacccctcgccggggagcttctcgtacggcatggacccggagacgtcgctccagctcgtcatgtggaacgggtccaggccgtactggcgcaccacctgcctcgacggcttcgagccggcaagcggcggggagtggagcgccggcaggttctcggggggttgccggcggaaggaggcgccgccgtgcggtggcggggatggtttcttggcgctgccgcggatgaaggtgccggacaagttctcgacgctcgtcgggaacatgacgttcgacgagtgcgcggcgaggtgcgccatgaactgctcgtgcgaggcgtacgcccacgccgacctgagcagcagcagcgcccggggggacatcggccggtgcttggtgtgggccagtgagcttatcgacatggtgatgatcggccagacgacatggggccgcgccggcgagacgctctacctccgtgttcctgcaagttcaacaggtagcaggggaaggggaaatgttgtgaaaattgctgtgccaatactggccagcgctttagtgctcacctgcattttctttgtatatttctgcaagtccagagagaatagaagaaaaagagatagccagaagacgttggttcctggaagtaggaatacttcaagtgaacttcttgaggaaaatcctactcaggatcttgaatttccatccatacgattcagtgatattgttgctgcaacagacaacttctccaaatcatgtttgatcggacgtggaggatttggaaaggtttacaaggtaacattagaaaatggtcaagaagttgcaatcaaaaggctcagcaaggattctgaccaaggaatagaggagttcaaaaacgaggctattttgattgccaaattacagcataggaacttg

SEQ ID NO: 75291 - DNA, 537 bp, Oryza sativa
  Clone ID: PAT_MRT4530_75393C.1
atgagacccaaaatagcagattttggtatggccaaaatttttggtgaaaaccagcaaaaggcgaataccaaaagagttgtgggaacatatggctacattgctcctgaatattctaccgagggaagcttttctgtcaagtctgacgtctatagttttggagtactgctcttggagattgtaagtggtatccggataagctctaccgatatcatggaattcccaagccttatagtctatgcatggagcctatggaaggaaggcaaggcgaaaaacctgatagattcatccattgcggagagcagttcattggatgaagtccagctttgcatccacgtcgggctcttgtgtgtagaagacaacccgaacagcaggccgctcatgtcatctgttgtgtccatcttggagaatggaagcacaacatttctggcaatgccaaatcagcctgcatattttgcacaaacaacaagtgaaatggacaaaatgacagacggtagctctagaaacaccatgactatgacagttcttcagggacggtag

SEQ ID NO: 75292 - DNA, 252 bp, Oryza sativa
  Clone ID: PAT_MRT4530_75394C.1
gctgactgaacgaagcttacctagctactcgatcgatcatccatcagtctagatagatatggcggctttgaacttcaaggcggtggccgccgtgatggtgatggcgatggtggtggcggcgccgggggcgtcggcggcgataacgtgcgggcaggtggggtcggcgatcgcgccgtgcatctcttacgtgacggggaggggtggcctcacccagggatgctgcaacggcgtcaaggggcttgaacaacgccg

SEQ ID NO: 75293 - DNA, 1119 bp, Oryza sativa
  Clone ID: PAT_MRT4530_75395C.1
atgcgtaaggagaacataccgcatcaggcgccattcgccattcaggctgcgcaactgttgggaagggcgatcggtgcgggcctcttcgctaaaacgccagctggcgaaagggggatgtgctgcaaggcgattaagttgggtaacgccagggcatgcaagcttggggtgacgttcaagacgcgcacatgcgagcgcttggtgtcgtggaagggccccgacgacccgtcgccggggagcttctcgttcggcggcgacccggacacgttcctgcaggtgttcatctggaacgggacgcgcccggtttcgagggacgggccatggacgggctacatggtgtcgagccagtatcaggcgaactccagcgacatcttctacttctccatcgtcaacaacgaggaaaagagatacataacgttcagcgtctccgagggctcgccgtacaccaggtatgtgattacctacgccggcaagtaccagttccagcgctggaacatcagctcgtcggcgtgggatgtcgcggagtggcctagatgggactgcaactattacaactactgcggcccgaacggctactgcgacaacacagcgagggcgcctgctgtcccgacgtgcaagtgcctcttcggcttcgagccagcgaacgcggcggagtggaacagcggccggttttcgcagggttgccggcgaaaggaggcggtgcagtgcggcgaccgtttcttggccgtgccggggatgatttcgccggacaagttcgtgctcttcccgaacaggacgctcgacgcgtgcgccgccgagtgcagcagcaactgctcctgcgtggcgtacgcctacgccaacctgagtagcagcatatctaagggcgacaagacgaggtgcttggtgtggtcaggggagctgattgacgcggagatggtaggcgaaaggcttggcagcgacacgatctacctcaggctcgccggtcttgacgcgggtaagcaccaatttaaattgagcaattttactgttcgtaaggagaagtacggattacaatttgaggtattttactgtttgaggtttatacttttagtccttgagttgagaaagtactaccagatacagcgaggtgctaatgaaatataa

SEQ ID NO: 75294 - DNA, 263 bp, Oryza sativa
  unsure (1)..(263): unsure at all n locations
  Clone ID: PAT_MRT4530_75396C.1
tacagagaccctcccgttttctgtttcccntanctgatgtttcaggcgncttggtngantngtcaaggctttcaggtgacatgaaatctcaaatgccatcagaaggtgtagctgtgcgtgatcaaaatgtcacgccattcagaattggtctgcgatctgttatttatttgtcatcaggctcatgcggctaactgtgtgtacaaacaagaataagccggtttacatgaaaggtngnttnatgttaaaaaaaanaaaaanaaaaa

SEQ ID NO: 75295 - DNA, 4644 bp, Oryza sativa
  Clone ID: PAT_MRT4530_75397C.1
atggatcgatcagctgcggctttagcctgcatcaccagtgttctcctcctcctgccgccgccatgtgcatccgacgaccggcttgtcaccggcaagccgctctcccctggcgccaccctcgtctccgacggcggtgccttcgccttgagctttttctccccctcaactgccactccggagaagatgtacctcggcatatggtacaacgacatcccccagcgcacggtggtgtgggtcgccgaccgaggaactccggtcacaaacactagttcgtctgcgccgacgctgtcgcttaccaactcctccaaccttgtcttgtctgacgctgacggccgcgttcgctggtcgaccaacatcaccgacgatgcagcgggctccggctccacggcggtgctcctgaacaccggcaacctcgtcatccggtcaccgaacggcaccatcctgtggaagagcttcgatcaccccaccgactcgttcctccctgggatgaagcttgggatgacgttcaagacgcgtgtctccgatcgcttggtgtcgtggaggggccccggtgacccgtcgccgggaagcttctcgttcggcggcgacccggacacgttcctccaggtgttcgtccggaaagggacgcgcccggtttcgagggacgcgccatggacgggctacatgatgttgagccggtacctgcaagtgaattccagcgacatcttctacttctctgttgtcgacaacgacgagaagagatacataacgttcagcgtctccgagggctcgccgcacaccaggacgctcgacgcgtgcgccgccgagtgcagcaacaactgctcctgcgtggcgtacgcctacgccaacctgagtagcagcatatcagagggcgacgtgacgaggtgcttggtgtggtcaggcgagctgattgacacagagaagataggcgaatggcctgaaagtgacacgatccaccttaggcttgccagcattgacgcgggtcggaggacgaagatcaatgccgtactcaaggttgttctgccagtgttaagcagcattattattgtcctatgcatgtcctttgcatggttaaaaattaaaggcaagaaaagaaaccgggaaaagcacaggaagctaattttcgatggtgcgaatacatctgaagagattgggcaagggaaccctgtccaagatcttgaacttccatttgtaagatttgaggatattgctctagcaacccacaatttctcagaagcaaataagattgggcaaggaggttttggcaaagtttacatggcaatgctaggtggtcaggaagttgctgttaagaggttaagtaaggattctcgacaagggacagaggaattcaggaatgaagttattcttatcgcaaaattgcagcacagaaatttggttcgccttcttagttgttgtgttgagagagatgaaaagctgctaatttatgagtatttacctaacaaaagcttagatgctaccctttttgattgcttacatttacttctttctatggatgtttcaaggaaatttaaactagactggagaacacggtttactataataaagggagtggcaagaggacttctttatctacaccaagactcaagattaaccataattcacagagatcttaaagctggcaatgttctactagatgcagagatgaaacccaagatagcagactttggtatggcaaggatctttggtgataatcaacaaaatgcaaatactcgacgtgttgttggaacatatggttatatggctcctgagtatgcaattgaaggtatcttctctactaaatccgatgtctatagctttggtgtgttactactggaagttgtaactggtataaggagaagctctactagtaacatcatggactttccaaacctcatagtttactcatggaacatgtggaaggaagggaagatgaaggatttggcagactcatcaattatggatagttgcttactacatgaagttttgctatgtatccatgtagcactgttgtgtgttcaagaaaacccagatgacaggccacttatgtcatccgttgtgcccaccctggagagtgggagtaccactgcacttccaaccccgaattgccctgcttactttgcacaaaggagttctgaaatagagcaattgagagataatattcagaactcaatgaatacttttacgctaacagatatagaggggagagtacagaagggaatacaaatcttggtgatggatagtacagcttgtactaccatcgtcgtcttcctcctcctcttgccgcggttgtgttcgtcggccagcgacaagatagagcttggcgagcaactgttgccggggcaaacaagagcttcggatggcggggccttcgtgctaggcttcttctcgccgtccaattccacaccggagaggcagtacatcggcatatggtacaacatcaccgaccgcaccgtggtgtgggtggccaaccgggaagctccggcgatcgccgccggcaggtccatcgccccgaggcttgcgctgaccaacgactccaacctcgtcttgtccgacgccgacggccgcgttctttggtcgaccaatgtcaccgccggcgtcgcggctgggcgctcgacctcgccgccggtggccgagctcctcaacaatggcaacctcgtcatccggtcgaacggcgccatcctgtggcagagcttcgaccacccgaccgacacgctcatacctgagatgaagatccagctgaacaaacggacgcggcgtggcgcgcgccttgtgtcctggaaggacgccggcggcgacccctcgccggggagcttctcgtacggcatggacccggagacgtcgctccagctcgtcatgtggaacgggtccaggccgtactggcgcaccaccgtgtggacgggctacctcacctccggccagtacctcgccgccaccggcacgaccatctacctcgacgtggtggacaacgacgatgagatctacgtgaagctcagggtctccgacggcgcctcgccgacgcggtacgtgatgaccagctccggcgagttccagctcctgggctgggacaagagctcgtcggagtggatcaccttcagctcgttcccgacgcaccactgcaccacgtacggctactgcgggccgaacggctactgcgacatcacgacgggcgccgccgccgcgtgcaagtgcctcgacggcttcgagccggcaagcggcggggagtggagcgccggcaggttctcggggggttgccggcggaaggaggcgccgccgtgcggtggcggggatggtttcttggcgctgccgcggatgaaggtgccggacaagttctcgacgctcgtcgggaacatgacgttcgacgagtgcgcggcgaggtgcgccatgaactgctcgtgcgaggcgtacgcccacgccgacctgagcagcagcagcgcccggggggacatcggccggtgcttggtgtgggccagtgagcttatcgacatggtgatgatcggccagacgacatggggccgcgccggcgagacgctctacctccgtgttcctgcaagttcaacaggtagcaggggaaggggaaatgttgtgaaaattgctgtgccaatactggccagcgctttagtgctcacctgcattttctttgtatatttctgcaagtccagagagaatagaagaaaaagagatagccagaagacgttggttcctggaagtaggaatacttcaagtgaacttcttgaggaaaatcctactcaggatcttgaatttccatccatacgattcagtgatattgttgctgcaacagacaacttctccaaatcatgtttgatcggacgtggaggatttggaaaggtttacaaggtaacattagaaaatggtcaagaagttgcaatcaaaaggctcagcaaggattctgaccaaggaatagaggagttcaaaaacgaggctattttgattgccaaattacagcataggaacttggttcgacttcttggctgttgcactgagggatctgaaaagttgttgatatatgaatacttagctaacaaaggcctagatgctattctttttgatggtgcgagaaaatcactgctagactggccgacacgattcgggataatcaaagcaaaaggcgaataccaaaagagttgtgggaacatactcttccacaggatggtgccgttcggtgaccggatgacgaggttgccggtgttcaggagcaccgccgtggagccggagcccgctgcatcgtcggtgatgttggtcgaccagcggacgcggccgtcagcgtcagacaagacaaggttggaggagttggtaagcgacagcgtcggcgcagacgaactagtgtttgtgaccggagttcctcggtcggcgacccacaccaccgtgcgctgggggatgtcgttgtaccatatgccgaggtacatcttctccggagtggcagttgagggggagaaaaagctcaaggcgaaggcaccgccgtcggagacgagggtggcgccaggggagagcggcttgccggtgacaagccggtcgtcggatgcacatggcggcggcaggaggaggagaacactggtgatgcaggctaaagccgcagctgatcgatccatcagaaccttcttccttttcagtatgagcttgcactga

SEQ ID NO: 75296 - DNA, 267 bp, Oryza sativa
  Clone ID: PAT_MRT4530_75398C.1
ctactccaccttggacgccgtgcaccccatcgccccctactaggcctgaaaacggtacgaaatctttccggattccagacctattttcgaaaacggaatctgtcggtcggaatttttcggaaacggaaacgaattcggaaatattttcttgggaacggaatcggaaatgataagggcagtttccgtcggaactcgaaatcggtcggaaactttccgaaaattttctcggaatttctggaaattttcttggaattagtagaaatttcg

SEQ ID NO: 75297 - DNA, 455 bp, Oryza sativa
  Clone ID: PAT_MRT4530_75399C.1
atgggcgccgccgcgaagcccccacccttcgtctgcttcaagtggccatggggccccgaccccaaggcaacgagccctagccctagcccgagcccctgcggcgacctcgagatgccctggctgctcaagtccatccgcaccgtggcgcagggcctcctcatcgccggcgacctcccctccccctcgtcggacgggggaggaggcggcggtggggcgaggacgaggtggaggaggaggaggcggctgggccctgggctggcggcggaggcggaccgcggggaggcggagcagcgggcgctcgcggcagcgctggcgagcgggagggacgcgaccgtgctggagttctactcgccccggtgccgcctgtgctcgtcgctgcaggggctcgtgcgcgagctcgaggacggcgcaggcgggcgggccggcttcgtgctcgccgacgccgaggacgaccg

SEQ ID NO: 75298 - DNA, 417 bp, Oryza sativa
  Clone ID: PAT_MRT4530_7539C.1
atggccatgcacaaacttaattgctctactaatcacttcttgcatgcagtcgcaaccctcgtgttcaccgtccacgaccccgtcgtcatggccctgcacgtccgccgcgccgcgctacgctcgccggttttgcccttccgtcagtggcctccctgccgccgcggatccgcgttcaccacatgcattgggcgcgccatccatggcgctacccctccgatctctccggtcgcctttggccacatccggtctcgtcttccgatcacgttccgccatcgccggtctgatcgcaagcgaggtcgtcgcctacgcgacgtccttgttgtcgccatcgatctcatcgccacgattgacgatctcctgtcaatgcgcgatccccacctcgtgtttccttctccacatgtcttcttgctccaatgc

SEQ ID NO: 75299 - DNA, 123 bp, Oryza sativa
  Clone ID: PAT_MRT4530_753C.1
atggcgtcctctctaacgacggaggatggtggcggcaccaccaaattaggatttggagcgacagccaagtatagtaaatgggccggggaagtagtggctctatggtggccgcggcatgattaa

SEQ ID NO: 75300 - DNA, 1713 bp, Oryza sativa
  Clone ID: PAT_MRT4530_75400C.1
atggcgtacatgcatccagggctcgtcattaccctcaaccttctcctagagagcagaaaaattatcgcgtccgcgctgtggcacaagaaagcacaaaagcataaaaaattaggcttcttagtcttagccgcgtgtgtattcttctcctacaagcatgtgcggtgcggacgggtgctaccgtacaccaccggtccaccaccaccctactccgcactcagtgagtgcctcgctggtcagtgctcccgtccctactccctacaagtcccttcgggctccaaggcgctgcgtgccacagcaaatccacctaccaagcctagcttcttccacatccttcgatccgcccggaacgtctgcacgtacataagtaagcacgccgcaacctttcccgccacccttccgtgccaccttttccacgagttccgcttcacacagcaagctctcctcatggaaagcctcgcctatccacagaaacagaaacctcctgctctcgagccgctgccacggccaaccgccgccatggacgacaaaggcaaagccaaggctgctgacgccgctgctgctgccgaggcggcgccggagcaggaggagttctttagtgactccgagtccgggtccgagtccatcgagatcgccgacctgaagaagcggatgtggaaggaccagatgctgctcatgaagctcgagggccggtcgggccacgaaggcgccctggccgcgcaggaccaccgggtcgtcaggcgggaggaggaggcggcggaggaggagccgcccgaggcgcgcctccgcgggtggtggaaggacgacgtcgcattcgaccgggcggggccgacggcgctgtcgggccgaggcggccgggggagcccgcggagccccgcggcggcggcgtcgttcctgcacgggctcctcgacatccaggacagcacgctggggtcgctgctgtcggcgctgatccagcactgcgagccaccgcagcggagcttcccgctcgaccgcggcctgccgccgccgtggtggccgaccggcggcgaggcgtggtggggcctgcagggcgaggcgcaggccagccagggcccgccgccgtaccggaagccgcacgacctcaagaaggcgtggaagatctccctgctcagagctagcgccgtcatcaagcacctgagcccgcggttcgaccagattcgcaagctcgtgtggcagtccaagcggcttcagcacaagatgagcgccagggacgccgatacctggtcccgcgtcatcacccaggaggaggcgctcagccgccacgcgctgcgctccctccacatcacgccgctcgacgacgacgacgacgaacccaacgaggggccgacgccgcgcgagtcgcacgccgacaagcgcaagcgcgaggtcggcggcggcggcggcggcggcggcgaggagatgcagctctctctgccggcggacatcgacgtcgtcccggaggcggaccgcagctccatcgacgagctgatgaagctctactacagctgcctgcaggggaccgacaccgacggcggcggcggcgagcaggggaaggacgtggcggccggagccggcggggatgggagcgtcgctccggagaccgtgcatgtcgacgacgacgacatgctggagggtctcctcggtgtcgcgcaagtggtggacatgagcgacttcccggacagtcccatctgtcactgggggtcgagctcggattag

SEQ ID NO: 75301 - DNA, 162 bp, Oryza sativa
  Clone ID: PAT_MRT4530_75401C.1
taagctcgttggaagctcaagctcggctcgtctggagctcgagccgagctcgagcagctcgcgagcctcaagctttttgacagccctaattacaccgtgtgctccagtctggttctgatccggctgctccccatccccaacaggcccattggccgtgcgtag

SEQ ID NO: 75302 - DNA, 389 bp, Oryza sativa
  Clone ID: PAT_MRT4530_75402C.1
ggcccccaaaaatggaaaccccttttcaaaaattgaaaataaaaactttcatttttgacccccacccccaagccggtggttcaaaaaagggtacatttacccaactcaaccaacaaactggtccattttacaagccctttttcccggttatttcacttaacaagggccaacaaaattcaaggggtttattcccgggggccaacccaaccattgggtgcttaataaagcccagggagaaactttgctgtgtacccccaaacccgcctaagggaaccaaaaacaagtcacatgtcggccccttgttctgggaagccctctgtaaaaatggcaaaatgtgcacgttggtagggcaaggaaccttaaaaaaacttggattattattttcaaaa

SEQ ID NO: 75303 - DNA, 1854 bp, Oryza sativa
  Clone ID: PAT_MRT4530_75403C.1
atggcgtacatgcatccagggctcgtcattaccctcaaccttctcctagagagcagaaaaattatcgcgtccgcgctgtggcacaagaaagcacaaaagcataaaaaattaggcttcttagtcttagccgcgtgtgtattcttctcctacaagcatgtgcggtgcggacgggtgctaccgtacaccaccggtccaccaccaccctactccgcactcagtgagtgcctcgctggtcagtgctcccgtccctactccctacaagtcccttcgggctccaaggcgctgcgtgccacagcaaatccacctaccaagcctagcttcttccacatccttcgatccgcccggaacgtctgcacgtacataagtaagcacgccgcaacctttcccgccacccttccgtgccaccttttccacgagttccgcttcacacagcaagctctcctcatggaaagcctcgcctatccacagaaacagaaacctcctgctctcgagccgctgccacggccaaccgccgccatggacgacaaaggcaaagccaaggctgctgacgccgctgctgctgccgaggcggcgccggagcaggaggagttctttagtgactccgagtccgggtccgagtccatcgagatcgccgacctgaagaagcggatgtggaaggaccagatgctgctcatgaagctcgagggccggtcgggccacgaaggcgccctggcggcgcagcaccaccgggtcgtcaggggggaggagcaggcggcggaggaggagccgcccgaggcgcggtaccggcggaaggcgatgctccgggcgcaggacggcgtgctccgccacatgctcaagatgatggaggcctgcaacgcgcgcgggttcgtgtacggcatcgtggacgagtccggcgtgccggtgtccggctcctccgacagcctccgcgggtggtggaaggacgacgtcgcattcgaccgggcggggccgacggcgctgtcgggccgaggcggccgggggagcccgcggagccccgcggcggcggcgtcgttcctgcacgggctcctcgacatccaggacagcacgctggggtcgctgctgtcggcgctgatccagcactgcgagccaccgcagcggagcttcccgctcgaccgcggcctgccgccgccgtggtggccgaccggcggcgaggcgtggtggggcctgcagggcgaggcgcaggccagccagggcccgccgccgtaccggaagccgcacgacctcaagaaggcgtggaagatctccctgctcagagctagcgccgtcatcaagcacctgagcccgcggttcgaccagattcgcaagctcgtgtggcagtccaagcggcttcagcacaagatgagcgccagggacgccgatacctggtcccgcgtcatcacccaggaggaggcgctcagccgccacgcgctgcgctccctccacatcacgccgctcgacgacgacgacgacgaacccaacgaggggccgacgccgcgcgagtcgcacgccgacaagcgcaagcgcgaggtcggcggcggcggcggcggcggcggcgaggagatgcagctctctctgccggcggacatcgacgtcgtcccggaggcggaccgcagctccatcgacgagctgatgaagctctactacagctgcctgcaggggaccgacaccgacggcggcggcggcgagcaggggaaggacgtggcggccggagccggcggggatgggagcgtcgctccggagaccgtgcatgtcgacgacgacgacatgctggagggtctcctcggtgtcgcgcaagtggtggacatgagcgacttcccggacagtcccatctgtcactgggggtcgagctcggattag

SEQ ID NO: 75304 - DNA, 329 bp, Oryza sativa
  Clone ID: PAT_MRT4530_75404C.1
caagtagaaacctcccggggtgcatttataaaggtactcaatagcttataggccattgatagcacctatttcctaccccaaaatcgacaaatctatagatcattatggacacctaacgtctgaattttatagtttatataatgaactggtgcacatccatttaaatgcactacggattagtgctgaggcctcgatctattgtcttacgtagaactgtgttcgcgtacggcgcatgaagcgcgtggcgtttaccttgactatcaatgtgatcccaatgctaaaagataaaagcaagtctttgactccatactcgatctccactgatatat

SEQ ID NO: 75305 - DNA, 735 bp, Oryza sativa
  Clone ID: PAT_MRT4530_75405C.1
gaaatggctaatcaagatatgatgatggcgatgggatgctttggattcttcagaggtcgaggaatccggtctgccggagcacggcgttgcggacgcggcggaggtcgcgccccttgagcgtcctcccggcgccctccagcaccgacgacgaccgcgcgtgccgccgcgccgccaccacgtgcggcggcaccatctcgtcgtcctcgttgtcgtcggactcctcgccgccgacgacgttgttggcggcggcgcccttgcccggccacatcgggaccctcaccggtgccgaccgcctcggtgccgcggcgcctccacccggcgccgccgcggccctcacgggcacggccactccatcctgacgcccgtcgtcgctgccgccgccgcgccccccgttggcgagcagcgacgacagcccgaagctctgcggcaccgtgtgggcgcggcggggcgcgcgcggtgggccctccgggtgtggcggcgccgggcagcagtaaccgtcgtccccgacaccgccggccggccacaccacgtcgctctcgtcgagctcgaacggcggcgccgcgccgtcgggccccgactccggctgcttcaggaggccaagaaaccggagcgagcccgcgcccggcgaccgcggcatcgccatccacgcgtccgcccacgcgtccgcccacgcgtccggctctgttctccccttcgccgtcgacgctgcggcctcgtgccgaattcctgcagccc

SEQ ID NO: 75306 - DNA, 132 bp, Oryza sativa
  Clone ID: PAT_MRT4530_75406C.1
atgtcggatgatcaagccgacgtcgttcgcgagggattacccgttaacgacatattctcccatagtccggacgtggttgggtgcgacaactctgcatttgtcgagaacgttctcgataatggagtaaaatag

SEQ ID NO: 75307 - DNA, 199 bp, Oryza sativa
  Clone ID: PAT_MRT4530_75407C.1
acgctgcactcacacgcatagcacaggagaggcgacactgagaagggacggaggaagacatgcggttgggaccgaacagctactcgcagaggccgacgataggtacagcgagccagggcgccggcgactacaaggactacaaggagccaccgccggcgctgtttatcgagccagggaagctcaagtcgtggtcatttta

SEQ ID NO: 75308 - DNA, 645 bp, Oryza sativa
  Clone ID: PAT_MRT4530_75408C.1
atggactccccagcgaccctcgtgggcttatctccgccacttctcagtctggtgctccgcaatgaaccatgctatacaaaagggaaaagaggattattgcgtcatcaaaggcgatccacggtaaaccgggtgcacgggacggtctaaggaaacgaacggccgagatcgatcctatccacaacggacggccaagatcgactggtccacggccggaccacgggagacgacgacgatgacgtcagcggtgacatcaccaccggcagcggctcgggcgcgcaagctcgccggcgaacaacggcgcgacagcgcgaaaggagagcaccaaaacgatgcgggcgacgcggcgaactcaccggtgaccaaaacagcggcggaagatcaacggacggcaacggcgacgaggaagaagcggcgacgacatttggcttgacgatggcgatggtgttccggcggtcgacagcaacggcggaggggcggacgaggacggcgacgcgacggcgaccacgacggcaaccttcccgagcagcgacgacgaccggagcgacggcggcgcatggctggagctgcggcggcgacggcggcacgaggtctcacggggctagggctctacgggcgatggcagtcgaagacgagagtggcggcggg

SEQ ID NO: 75309 - DNA, 3307 bp, Oryza sativa
  Clone ID: PAT_MRT4530_75409C.1
atggcgagttcgtctagttccagcggcgccaaccctctctcgggacaacctattccagagaagcttaccaggaataacttcctgttatggaagacacagatcttaccagcaatcagaggtgcatgcatggaaggttacatcaccggcgcaaagcaagctccagctgcagaagttgacgccaaggaaggtgataagcttgtcaaggtttccaatccagcctatgagacttgggttgctgaagaccagcagtctcgatcgcgtgctctgaacacgcatctcgcgttgtcgacaactcgcaagggtgacctcagcgttgcagagtatatcgggaagatgaaatcattggcagatgagatggcatctgctcggaagccgcttgatgacgaggagatgatgtcttatattctcgctggactcgatgatgactatgagcctgttgtgtccaatctggttggaagggcagagccggctcctatcacagaaatctattctcagcttctaagctttgaaagcagagctagattgcggcagcaggcgagctcttcatctgtcaacagcgccaagcatggagggaagaataatggcggcttcaacagcaacttcaacagcaactcagccaattccttccgcgggcgcggaggtggtggtcgcggcgatcgtggcggtcgcggccgaggaaatggtggcgcgcgcggtttcagcaacaaacctcgtcttacctgccagctttgtggaaaaatcaaccatgtagtggctgattgttggcacagatatgatgaaagcttcgttccggatttccgaacagcagcagctgcctcctatggtgtagatacaaactggtacatggacatcggagctaccgatcacatcacaggagagttggagaaattgtcgactcatgagaaatacaatggcaaagatcaaatccacacggcgagtggagcatgtatgaatattaagcatattggtcattctactattcataccccagttcgcaatatttatctcaaaaatattcttcatgttcctaaggctaaaaagaatctcatatctgcccatagattagccgttgataacaatgcttttgttgaagttcactctcgtttctttgccatcaaggatcaggtcacgaagaatcttcttcttagagggccatgccgcaatggattttacccgttgccaacatcttcgttttcctcatccaagcaagtcctcggagtcgtcaagcctacctattctaagtggcacagtcgtctgggtcacccatctttagccattgttcaaaagattgttagcaacaataaactcccatgtttaggagaaattaatgagttaggagctaggttgagatcagaaatattgcttttaccttcatttttaagtccttctggggttgaatatagtaatgatcatatgcttaatactcctgaacattctaatggtgtatatgagaatgttacagatcagcaggggcaaagttcagattatggggagcatataaatacgggtgatacaagaatttttggcgcaaatacagaagatcctggtggcacagaaaatccagatcatgatgcaaataatcagtctaatagcgaggactcccatggtgttttttctgatgccgtgcggtttgatgctgacgaggatgttagtgttgcgtcgcaaggggagcaagagagccaatcaccgcctgccactgccaccacgtcgtcttcatcatcgcctgttgagtcgcctgtatcaccagtcacgtctttgcaggaagatgtgcagcagcaggacatgcagataatacaacaacagcaagatgtacaacagacaggacatcagactcgacccactactcgtcttcaacgagggataagaaaagaaaaggtatacacggatgggactgtgcggtattcttttcttgctactaacggggaaccaaataatttaagtgaagcattagctaataatgattggaagaatgctatggatattgagttatttgctcttttgaataataaaacatggcatcttgttccacctagtcatggcaagaatattatagattgcaagtgggtatataaaatcaaaaggaagtctgatggaagtctggatcgttataaagctcgattagtggctaagggctttaaacaacgatatggaattgattatgaagatactttctgtccagtggttaaagcggctactatcagaattatcttgtctattgctgtatctagaggatggtgtcttcgacagcttgatgtgcagaatgcttttatttatggttatcatgaggaggaagtatatatgagacagccccctggatatgaagataaaagtaagcctaattatatttgcaagttagacaaagctctttatgggttgaaacaggctcctcgtgcttggtactcaaggttgagtatgaaattatgtgatcttggttttaaggcatctaaggctgacacatcattgttcttttataataaaggggatgttacaatctttgtgcttatctatgttgatgatataattgttgcaagttctacagaaggggcagctattgcattattggcagacttgagacaagagtttgcactgaaagacttggggaattttcattatttcttgggtatagaggaaaaatatgctacggatttgctgaagaaagctggaatgatggattgtaaaccagttagtactcctatttctacttcagagaaattatcagcctatagtggtactgttctgggtgaaaatgatgcaactaaatatagaagtatagttggagctttgcaatatttgactttaaccagacctgatatttccttctcagtgaacaagatgctgattgggcaggatctgtggatgatagaagttaatcctgtgttttatgccagaactaagcatatagaagtggattatcattttttcagagaaagagttgccaggaaacaattggtgataaaatttatatcttcaggagaccaagttgctgatggttttactaaaccattgtcggttcagctgctaagaaattttagacacaatcttaacttagataagttatgattgagggggagtgttagaattacaagagtccttgtacatgtgacaatgatacacgcatatgttaatgtagtgtatatgtcgtatctatggttagagatagaatcggttttggttttctttcttgtattgcaagatgtaatatgtctccaatctgtacacgtctcggtgagggctattctcatctatattaacatgcaacgcggcctcgagagaggtaagacgcttctgccaaaaaaaaccccccccc

SEQ ID NO: 75310 - DNA, 186 bp, Oryza sativa
  Clone ID: PAT_MRT4530_7540C.1
atggcggcggcaatcgtcgtggaggagcatgtagcggtgtcaatcatcgtcccatggagtgagaccatgctcacatgtctgcccccatgctccaagctcatgaacgcctccaatcttgccctcttcggtgaatatggtggcagcgagctcattttgccattaccagggtatgcctccctcggctag

SEQ ID NO: 75311 - DNA, 222 bp, Oryza sativa
  Clone ID: PAT_MRT4530_75410C.1
atggaggttgatgcggcctccatctctggccaatggcgactgctcgaggcagacgcggtggcctccctcggcgatagcattctgaagcaacagaagatgaatgagaagatcgaagaggaagaaaacgaagaacaagtgaagaagaagaagaagaagaagaagaagaagaagaagaagaagaagaagaagaagaagaagaagaagaagaaggcgccggggtga

SEQ ID NO: 75312 - DNA, 318 bp, Oryza sativa
  Clone ID: PAT_MRT4530_75411C.1
atggcggcggatccatccccacagatgcagaagacgaagaaactagtcagggtgaggaagaaagtagaggtcgtgctgccagtagaggtgctgccgccgctgccgccgtcgttggccatcatctgcaagcacaaggtacacgaatggatcacgccggaggattacacattcaggttgttagatctcaacctggtgctcaccttggctgccgtcgggaaaaatggtgacactactactgaggatgagggaatagactatagatggaaaaatggtggcactattactgaggatgagggaatagatggttttgacgtgtag

SEQ ID NO: 75313 - DNA, 139 bp, Oryza sativa
  Clone ID: PAT_MRT4530_75412C.1
cccacgcgtacgccatctcctcctattaacaggcaagcgcgagaagagacaccttcatcgatacatgggcggcaccgcgaccgccatagctgggcttatgttcttggtcggcgggctagcaaggtagttatttattgtt

SEQ ID NO: 75314 - DNA, 261 bp, Oryza sativa
  Clone ID: PAT_MRT4530_75413C.1
atgacaaacattagtgtgaaggaatgggggttggccggcgaacgggagcttggggtagaccatgcgggaagacggagttcgctggagctaaacatgcagggaggagagccatgccgttgccacaaactccttccatcggctgcgcaggactacgtccgcaagccccatcctctgctagttccactaacactcaagggcggcgacaatcctagtttactggcaattggcagtttgaggacgtcaggacaatccgacctgtaa

SEQ ID NO: 75315 - DNA, 471 bp, Oryza sativa
  Clone ID: PAT_MRT4530_75415C.1
acgagtaccaactttacattatgttcatgttatactgaatatactgctagcttatctgggagatgttttggtgcgggtatagtgtttccatatgcaattactctatgtcataacgatgatattagagtagtatctggtagtttagacgtggtgtctagattacgggatatcattatttggggatatatattgtggatgagaggtgggccgctgatggtgacagctcagtacgggtattcctccgcgtctatatataatcctaagttaatttcctgatgagggtattcctccatatttagccccggttggatggtcatgatggactgtcgtaaggaactcggcagtcaggggtggcttcccgaagtaccaggagggcatcggatagaggaaacgagtgtcggggacgcacacgcgccaactaggcgctcccgtgacttaagtcctttttgttcctcttgtaaatctctaggg

SEQ ID NO: 75316 - DNA, 358 bp, Oryza sativa
  Clone ID: PAT_MRT4530_75417C.1
cctctatctgatgccctcctggtacttcgagaagccacccctgactaccgagttccttatgatagcccgtcatgaccatacaaccggggcaaaatacggaggagtaccctccccatgaaattaacccgtactgaactgtcaccatcagtggcccacctctcatctgcagcatataaccccaaataatgatatctcgaaatctagacaccacgcctaaactaccagatactactctaatatcatcatcatgacatggagtaattgcataaacaaactttatacccgtaactatgcatctcccagataagctagcagtataatcagtataacatgaacataaagtaagttggcattccct

SEQ ID NO: 75317 - DNA, 290 bp, Oryza sativa
  Clone ID: PAT_MRT4530_75418C.1
ggcttgcaaaagccacggaaaaagaattgcaagggggggaggctttacattggttggaaccccggcgggacaacctagatacaacaagctcaaaagggcgtttctgaaagaaacaaactagccataggttatccttagtttgtggacaaattcataccatgaaataccacaaccttttttaaaccaacttgaacttcgggggaagcacaaccgggggtgccatttcttttatatacccaccggatgatcttttggggagcccagaaggggctaattcacattggcccgga

SEQ ID NO: 75318 - DNA, 491 bp, Oryza sativa
  Clone ID: PAT_MRT4530_75419C.1
atattgttgaacatatatttggcattaaatttcttccaatcacaagttttccctcctacgtgcttgacttttcgcagcctacggagatcggcctctccatgtgcctctatccgatgccctccttgtacttcgagaagccacccctgaatgccgagttccttacgacagcccgtcatgaccatacaaccggggctaaatacggaggaataacctccccagggaattaaacgtggtccaatgaggagtgcggaggaatatccgtactgagctgtcaccatcagcggcccacctctcatctgtaatatataacccaaaataatgatatcccgtaatttagacaccacgtctaaactaccagatactactctaatatcatcgtcatgacatatagtaattgtataagcaaacactatacccgcaccaaagcatctcccagataagctagtagtatattctgtataacatgaacataacgtaaagttggtactcat

SEQ ID NO: 75319 - DNA, 3114 bp, Oryza sativa
  Clone ID: PAT_MRT4530_7541C.1
atgttcccgagcgatgctcacccaaggaggcagtcggctggcaaagggagtgagggaagaggccggaacggcggcggcaagtgcttacctccggccgacatggatggtggtgggctgtggaagaggagatcggccggtggcaatggtggtggccggagcaggggccacgacgagcgatctgttcactcgcctcccgagcgacacaaggagcgccgagttgaacgtcctcgctccccacttcgccggcgtcctgtcgatcttcgcgatacgatcaaccagcgccgtgcagcacgagccggcctcaagccaactggaatcgagacgtatgacggcaccaccaatccggagtcctggcttaccgtctacggtctcgcaatccgcgcagcaggaggagacagcaaggccatggcaaactacttacctgtggccttagcggattctgcccggtcctggcgccatggattaccccgtggcacgattggatcatggacggaacttcgtgaccacttcatcgccaacttccaaggcacctttgaacgccccggcacacagtttgatctctacaacgtcattcagaagtctggagaatcccttcgagattacatccgacgcttctccgaacaacgcaacaagatctccaacattaccgacgacgtcatcatcgccgctttcaccaaaggaattcatcacgaagaactagtcggcaagttcgggcgcaaacctcccaagacagtcaaacagatgtttgaaaaagccaatgagtatgccaaagacgaaaacgccattgccgcatccaagcagttgggtcctacttggaagccaaagaaagatgcgccgactacgggagagggtggaagtaacaatcacaaggaccgcaagcgtaagcccgaggaacttgttgcgactactacacactcctcccgacaacagcaatatgccaagaatgcacagaagacctctgacggaggacaaagcacgtcgaaaaagaaggatgatgatgatgatgatgccccgacagtggttcgcaacgtcaagcttcgcagatccctcatcgatggtggcagtgcactgaatatcctcttcgccaagacactggatgacatgcagatccctcgcaccgagttaaagccgagtaacgcgcccttccacggagtcatcccagggttatccgctatgccactcggccagatcactcttccagtcacctttggtactcgggagaatttccgcacagagaacgtctgcttcgatgttgctgatttcgagacagcgtatcacgccatactcgtacacccggcgttagccaagtttatggccatcccgcactacacctacatgatgatgaagatacctggtcctcgaggagtcatatccgtacggagcgacatcaaacaagccgtcacatgtgataaggaaagttgcgagatggccaaaacccgcgagatcgcgatagctcgagaagacatccgactggctacaaccacgtcaagggaaggagaggtgcctactaccaaggtctcaaagagtggaggaagcgaagccaagaccaagaaaatccccctagatccttctgatcctactaaaactgctgtagtaggcgccgagttagattacgctaaacctatcaaacaacgactccgccgctttgcacaaaacaggaaggacgcgatcaaggaggaattgaccaagctgttagcagcaggcttcatcaaagaagtccttcatcccgactggctggctaacccagtcctagttcgaaagaagaccgggcaatggcgcatgtgtgtcgattacaacgacctcaacaagtcttgccccaaagatcctttcgggttgcctcgcattgaccaggtagtcgactcgaccgccggctgcgagctgctcagtttcttggattgctactcggggtatcatcaaatccgattgaaggaatccgactgcttgaagacttcgttcattacgcccttcggggcctactgctacattaccatgcctttcggactaaagaacgatggagcaacttatcaatgcatgatccagagatgtttctcaactcaaattggtcgcaatgttgaagcctatgtggatgatgtagtcatcaagaccaagcagaaggatgatttgattacggatctggaaaaaaccattgcgagcatccgcgctttcaggatgaaactaaaccctgaaaaatgcaccttcggagtaccgtcagggaagttgcttggatttatggtgtctcacagaggcatacaggtcaacccggagaaagtcaacgccatcctcaacatgaagccgccgagttcccagaaagacgttcaaaagctgactggatgcatggcggcgctcagccggtttgtctcacgactcggcgagcgggggatgcccttcttcaaactgttaaagaaaacagacaatttccagtggggacctgaagcacagaaagcctttgaagatttcaagaaacttcttactactccactagttttggcctcaccacacccacaagaaccgctattactatacgtatcagccacctctcaggttgtgagcacggtcctggttgtcgagcgtgaagaagaaggccatgttcagaaggtccagcgaccgatctacttcgttagcgaggttttggccgactccaagacgagatatcctcaagttcagaagctgttgtacggtgttctaatcaccgtcaggaaattatcccactacttccaaggccactcggtcacggtggttacatcgtttccactcggcgatatcctccataatcgcgaagcaaacgggcgaatcgcaaaatgggccttaggactgatgtccttggatataccgttcaagccgcgaacttcggtcaaatcccaagctttagccgactttgtcgccgagtggaccgagtgccaagaggacacgcccgaggaaaagatggagtattggactatgcactttgacgggcgtctgatagttcgcggagattcacagttagttgttaacaaagttatgaaagagtggtcctgcctcgacgacaatatgatcgcttatcgacaagagagcgctacagggaagaccgagtggatgacctacaccgactggaagaggcccgcgaagcagccttaa

SEQ ID NO: 75320 - DNA, 448 bp, Oryza sativa
  Clone ID: PAT_MRT4530_75420C.1
agtagtacgtcacaggaaaaagatcattttttttccggtgggctgcatgcttgccaataccctctatccaatgccctcctggtacttcgagaagccacccctaactgccgagttccttacgacagccagtcatgaccatacaaccgggactaaatacgtaggaataccctccctaggaaattaacttaggactatatacatgcgcggaggaatacccatattaatctatcaccatcagcggcccacctctcatccgcagcatataacccaaaataatgatattccgtaatctagacaccacacctaaactaccagatactactctaatatcatcgtcatgacatagagtatttgcataagcaaacattatacccgtaccaaagcatctcccaaataagctagcagtataatcagtataacatgaacataatgtaaagttggcattcat

SEQ ID NO: 75321 - DNA, 385 bp, Oryza sativa
  Clone ID: PAT_MRT4530_75421C.1
atgaatgccaactttacattatgttcatgttatactgaatatgctgctagcttatctgggagatgctttggtgcgggtataatgtttgcatacgcaattactctatgtcatgacgatgatattagagtagtatctggtagtttatacgtggtgtctagataacgggatatcattatttggggttatatgctgcggatgagaggtgggccgctgatagtgacagctcagtacgggtattcctccgcgcgtgtatatagtcctatgttaattctctggggagggtactccatattttgccctggttgtatggtcaagacgggctgtcgtaaggaactcggcagtcaggggtggcttctcgaagtaccaggagggcatcggatagagg

SEQ ID NO: 75322 - DNA, 587 bp, Oryza sativa
  Clone ID: PAT_MRT4530_75422C.1
ttatatattacttgtgataatcttattctaagcaggggttaagataatccaagggtagagtgacacacaagcattactactcatcctcataataattaatctaagctaggtggaaagaaaagagaaagagaatctattcctatacttctaatatacatagtatacatacattctagttaactggtttactagctaataccctctatccgataccctcctggtacttcgagaagccatccctgactaccgagttccttacgacagcccgtcataaccatccaaccgaggctaaatacgaaggaataccctccccaggaaaataacttaggattatatataggcgcggaggaatacccgtactgagctgtcaccatcagtggcccacctctcatccgcaatatataaccccaaataatgatatcccgtaatctagacaccacgtctaaactaccagatactactctaatatcatcgtcatgacatagagtaattgcatcagcaaacactataaccgcaccaaagcatctcccagataagctagcagtatactcagtataacatgaacataatgtaaagtaggtactcat

SEQ ID NO: 75323 - DNA, 388 bp, Oryza sativa
  Clone ID: PAT_MRT4530_75423C.1
ggtaggtttttgatttttggcctttttccgatgccctgctagtacttcgagaagccactcctaactgtcgagtttcttacgacagcccgtcatgaccatacaatcggggctaaatacggaggagtacccttcccaggaaattaacttaggactatatatactgagctgtcaccatcagcagcccacctctcatccgcagcatataaccacaaataatgatatcccgtaatctagacaccaggtctaaactaccagatactactctaatatcatcgtcatgatatagagtaattgcaatagcaaacattatacccgtacctatgcatctcctagataagctagcagtataatcagtataacataaacatactataaagttggcatttat

SEQ ID NO: 75324 - DNA, 388 bp, Oryza sativa
  Clone ID: PAT_MRT4530_75424C.1
cctctatccaatgccctcctggtacttcgaaaagccacccctgactgctgagtttcttatgacagcccgtcatgaccatacaaccggggctaaatacgtaggagtaccctccccagggaattaacgtagtattatatacacgcgcggaggaatacccgtactgagctgtcaccatcagcggcccacatctcatccgcagcatataaccccaaataatgatatcccgtaatctagacaccacgtctaaactaccggatactactctaatatcatcgtcacgacatagagtaattgcatatgcaaacattatacccgcaccaaagcatgtcctagataagctagcagtatattcagtataacacgaacataatgtaaagttgtcattaat

SEQ ID NO: 75325 - DNA, 388 bp, Oryza sativa
  Clone ID: PAT_MRT4530_75425C.1
cctctatccgatgccctcctggtacttcaagaagcaactcctgactgccgagttccttacgacagcccgttatgactatacaaccgaggctaaatacggagtagtaccctccccaggaaattaatttaggactatatagacgcgcggaggaatacccgtactgagctgtcaccatcggtggcccacctcttatccgcagcatataaccccaaataatgatatcctgtaatctagacaccatgcctaaattaccagatactactctaatatcatcgtcatgacatagattaattgcataagcaaacactatacccgtaccgatgcatctctcagataagctaacagtataatcagtataacatgaatataaaataaagttggtattcat

SEQ ID NO: 75326 - DNA, 416 bp, Oryza sativa
  Clone ID: PAT_MRT4530_75426C.1
atgaatgccaacttcacattatattcatgttatactgattatactgctagcttatctgtgagatgctttggtacggatataatgtttgcttatgcaattactctatgtcataacgatgatattagagtagtatctggtagtttaggcgtggtctctagattacgggatatcattatttggggttatatgctgcggatgagaggtgggccgctaatggtgacggctcagtacgggtattcctccgcgcatgtatatagttctaagttaatttcctggggagggtactcctccgtatttagtcccggttgtatggtcatgacgggctgtcgtaaggaactcagcagttaggggtggcttctcgaagtaccaggagggcatcgcatagaggtaaaaattaagataaaatctaaatctta

SEQ ID NO: 75327 - DNA, 645 bp, Oryza sativa
  Clone ID: PAT_MRT4530_75427C.1
atggccgatagctcgtcgccgccgctgccgccgccgtccttccttggctatctcaaccactactccggcggcttcccggcgccggcatacggaatgggaggtcgcggcgagcttgtgatgacggtgagcggcggcgggtcgccggagaacgccgtggtgtggacgacggtcgccgagccggggcactggttctacgtgccaccgtcgggacagtatggcggcgctatcatgatcaattctgcggcggtgactggtgacgccaccggcatcaccggtactggcattggcaccggcgtgttcataccggagcggcctcgcatccgcaggatgaagcatccaatcaattgggtccccttggtgcccgatagaggtggcaatggcaggaagcctgaactgaagactgcaaatgcaagcaagggcaaagggatacaaatgagctatgctgctgctgtgaagactgcaggtccaagccatgaagctgtgagggcaaatcaaagcaagaagggacacaagttttcacggcagaagaagagtgcggcaacggcggcggtggaagcgccggcaccggagaaggaggaggcaacggctactacggtggaggacatcccggagctggcgctgctgccggaagaatgggtctactga

SEQ ID NO: 75328 - DNA, 1008 bp, Oryza sativa
  Clone ID: PAT_MRT4530_75428C.1
atgggggcgaggcggagggggaggagggatcccgctccagttccggccatcactctcgccaggcagcgcggcgcggcgcggcgcagctcggccgcatcacggatgaccgccgcggctgccattccggggcggcgaatcagtcagatgttcgatcgtggtccccctggccccgtcccctttcatgccgcgtgcgccgcgtcacctgcccgtcgcgcgtgccgccgccgctaccgcgccgtcaccgtcgcgtcgctgtcggcatcgcgccttgagccgccgcgcgcccgtcccctcgccgtcgccctgcgccgctgccgcgccgcccattccatcgcgccgagccccgtgccgccgcgcgcgtcacgtcgcctcgcctgtcacgccgctcactcgccactcgccgcgtcgccgtcccatcgccgcgtcgccgtcccatcgccgcgtgccgtcaccatcgccgcgtcgagcctcacgccacccgtcgcgtcgcccgtctcgagccccgcaccgccgcccgtcgcattgtcgctccgagccccgcgccgccatcgcgtcgccgcccgcgcgtcgccgtcgtcccgccccgagcgtcgctgtcgcgtcgccattacgccgcagcccctccccctctccttctcccctctctacaaataccccccctctctccattttcccccaccccatctcacccttcctcccctcttccctctccactgcgccaccgctctcgtgccgccgcgccgctctgccgccgtcgtcgccgctcccgcgccaccgtgcgccaccgtcgctgccgccgtcgtcgccgctgccgccgccggtgagccgccctccttccccctcgcgtccaccgccgccgccgctcgggtgcgctacggtgggacagccgttgaggtagggccgagaggcgtgccctacatcggtgtcgccattgaggtcggagatgaagcttcggagaatccctacgcttactaccaggagggtgatgaagacgatggcgcccagtag

SEQ ID NO: 75329 - DNA, 870 bp, Oryza sativa
  Clone ID: PAT_MRT4530_75429C.1
atgtcgcacggcgacaccatcccgctccactcctcgtccgcgcagtcggacatggacgagatcgagagcctcatccacgcggcgccgccctccgcggccgcggtgctccccgcgcggccgccgtcgcctccgcgggcctcgatccccgtctccagctcgccccccctgctgcctcctccggtggccgggtccaagccgcagctccccccgttctcctcctcctcctccgtggcgtcgtcgtcgtctccgccgctcccctcctccgtctcggtcgccatcgccggcgacgggttcggccccccgcccaacacgctcaccgagcccgtgttggacaccgtcaagcgcgacctcgctcgcatcgtcagcaacctcaagctcgtcgtcttcccaaaccctttccgtgaggaccccgggaaggcgctgcgcgactgggatctctggggccctttcttcttcatcgtcttcctcggcctcaccctctcctggtcagcctccgtcaagaagattataatgtttaccaggttcttatgtaagtctgaagtgtttgctgttgcttttgctgtactagctgctggtgctataattctcacattgaatgtgctgctcctgggtgggcgcatcaacttctttcagagcctgagtcttcttggatactgcctgttccctttggatgtcggagctttgatttgcatgctgaaggataatgtactactgaagatcattgcagtagtggttacattggcctggagctcctgggcagcatatccattcatgagtgctgctgttaacccaaggagaaaggcgttggcactatatcctgtcttccttatgtacgtctctgttgggttcctcatcatcgcaatagattaa

SEQ ID NO: 75330 - DNA, 306 bp, Oryza sativa
  Clone ID: PAT_MRT4530_7542C.1
atggcttgtttttggattggtcgacctaaaagggattctgttggtttcggctatgataaactcacatattcggctgatgatgcggcggttggattggtggaggtcgacatcgtcgcgggtgaagatctggccgggagtggaatcgcctggaaatcgccctgcgcgttgaggaggtcgccggagagagaggacgggatctgtttaagcggtgaaaacgaaaatcacggcgtgaagattctttggggcaacggtgaagatcagatcgaagtggaatccaagatgaagatcgttgcggaagcagagtaa

SEQ ID NO: 75331 - DNA, 270 bp, Oryza sativa
  unsure (1)..(270): unsure at all n locations
  Clone ID: PAT_MRT4530_75430C.1
accactcacgatcgcgagacgcgggagatcgttcgacgcggcaagatgcagatctcgtgaagacgctgacgggaagacgtcacgctggaggtggagagcagcgacacatcgacacgtcaaggccaagatccaggcaaggaaggtatcccgcggaccagcagcgctcatcttcgcgggaagcagctggatgacgncgaccctggcgctacacatcagaggagtcgcgtgcacctggtgctccgctcgcgcgcanaggggcgctacaccatc

SEQ ID NO: 75332 - DNA, 1476 bp, Oryza sativa
  Clone ID: PAT_MRT4530_75431C.1
atgacggttgtgacggctggaaaggtcggtaatactgttaataaccaaatttgtgatatgtttgggcaaaagtttgccgcaaagacttatggtatcttagagtttgttagagataagagtcgtatccggatcaaatcaactggcacacttgcatacccgaaggcgagttttggacctgcactggagttaagcagattccagaagttaggtttcacagacgttgatgaagggaaccttaagtataaaataaaggtggttgctgacgatcccgggactggttcctctaaggatggaaaagggaaacaagctccagatggctcggctcaaccgagtgacaaaggtgctacagatggttccctagcaaatctaggtgacaactctcaaggagtccacggggttcaaggtgatggttctcaagggattcaaggtgatggttctcggggagtccaaggtggaggtttcaatcaagatggcaatgtggcacaggtgcagttcaacaactttcaagatcagattgactatgccgtacaccatgctttgatcaaccaatctggcatactgaccaacaccttggcaaacaaggtaaagtcaatgattgatggttcgatggctgaatatcaagctacaggactggtttacctacaaggaggagtgttcccgaattatcggccattagtcaccgataatctaccagtcgtccagtcagtccctcttaatgcaccgtcggctcagccgatggcaccagcatcggctccagcacctactacaccgccttcggctccaggccaattaatcaatccccggttgttagtgagggaacaaccacagcacgcaggacagaattttcatagctatttctatagtgggattcatgagatgaaattgtccgatctaatgtcaatcaagcaaaagcatgatgagccaatgcatgagtatgttcagagattcagggagatgagaaataaatgttacagcttgagtttgactgatgcccagtttgccgatttggcttttcagggtatgatccctccaattagggagaagttctcatcggaagactttgaaagcttgtcacaccttacacagaaggtagccttgcatgaacaaaggaatgcagaggctaggaaaaattctagaaaggttaatcatgtatgtccttatatatatgggtcggacgatgaggatgatgattttgagatagctacagacgagtgggtaaggagtaaaaaggttgtaaaatggcaatgggtaaagaactcaggaaaaaaggagaggtatgactttgatatcactaaggctgacaagattttcgacttgctactccgagagaagcagattcaactttctgctggtcatacaattccatcggctgaagaattgggcaagaaaagttattgcaaatggcataattcatggtctcatacgactaatcattgcaaggtattgtcacgtcctgataaattcatcccgaaataa

SEQ ID NO: 75333 - DNA, 258 bp, Oryza sativa
  Clone ID: PAT_MRT4530_75432C.1
tcataccagccacgcgccgatctccgatagccgtcgcgcgaatcttagcgagaggcttttctcccttcctttttccccttcttcttctttctctggaaacaccgagcactcaagctcatccctgccctcaaacctctccaaactgccgccaaggtcactggccaaatccaccgtcgccggccctttttctttggttcggccacctctagacacaatttcttccggtttccagtacccaaacctctgcatcatgtccat

SEQ ID NO: 75334 - DNA, 412 bp, Oryza sativa
  Clone ID: PAT_MRT4530_75433C.1
ggggaggtaatttgatcccggcaggagcggagtaaatttgcttttaaaatttaaataaatttgtaaagcaatttccaaaaatccaaaaaatagcagtccaaattttccaacatgggccggatcaggagccgatgactatctaaaaaaccgtgttttcacacccaaccaaacctgaggggagaaaaaataaaatgccgggatatgccgatgcctacttttttccgccgtttttttccttggggccggggcccccgttgcccaactgcccgggggcctgcgccccctttttggccgcctttttctggagggccttggggttccttttgcggggttttttcggggtgagcccctttttctgcccctttacaaccgggtttcgcgcctgggccctttggcttgcccggttcctttg

SEQ ID NO: 75335 - DNA, 354 bp, Oryza sativa
  Clone ID: PAT_MRT4530_75434C.1
atggtggctacctcttcctctcccccagaccggggtgtgaactaccggatccggttgccacaagtttggggtggccatatcctggctcgattgtggcctcttcctctcctctacccgatggctatggcgggtgcctctcttccactcccctccctggtgcgacggctaccggatctggccaccgcgagctcaggtgatccacgtgaggtcgcctcttcctctccccggctctacaatggcctcttcctctcctctatgtggcggcggcagtggcggctgcctattccattccctagcccggtgcagtggccaccagatccgaccagtagcgtgtctaattcgagtgatttgtga

SEQ ID NO: 75336 - DNA, 213 bp, Oryza sativa
  Clone ID: PAT_MRT4530_75435C.1
atgtcagccccactgtgcgccgctttcgcctgggccatcctgccaaggacgaaagagaaccttaccgctgggctcgttgccttccggcaggttccgagcacggaggagaacatcctcctcgtcttcggaacattactgccacttgtggtggcagcaacagcgtctgatgcctacttggcgacgccctccttcaaagacgtcgccgcctggtga

SEQ ID NO: 75337 - DNA, 186 bp, Oryza sativa
  unsure (1)..(186): unsure at all n locations
  Clone ID: PAT_MRT4530_75436C.1
ccgtccgttgggaagggagcttcgaggttgctgtacgaggcgcgccttttcgtgccggcttggncggtggcacgggcccttgggggcttgcgcccctaacgtgggtcggggcgcgcggcgtccacacagcgccgctagcttgcttgaataatgacttatacgcgctcaattatagtcaggcacacg

SEQ ID NO: 75338 - DNA, 236 bp, Oryza sativa
  Clone ID: PAT_MRT4530_75437C.1
agcttgaagaacgcaatgccgagctggatatagaacataaaaagctggccgatctcccaaaatccgttgaagaacagaagtcacgattaaaatcggctatcaagaatgttgctgagctgaccaagtctttgaaaatcatccctggaaccgatgctcaagacgcccaagccattgaagaagtagaacagattaggcaaagggcaatatcggctatccagcactatttgtctcagtga

SEQ ID NO: 75339 - DNA, 1263 bp, Oryza sativa
  Clone ID: PAT_MRT4530_75438C.1
atggcgaacatcgacatggggaagatcctggcggggctggagaacgacgacgcgcgggtgcccaagaccaagctggtctgcacgctcggcccggcctcccgctccgtccccatgctcgagaagctgctccgcgccgggatgaacgtcgcgcgcttcaacttctcccacggcacccacgagtaccaccaggagaccctcgacaacctccgccaggccatgcacaacaccggcgtcctctgcgccgtcatgctcgataccaagggtcctgagattcgtactggatttttgaaggatggcaagccaatcaagctaacaaagggtcaagaactcactgttaccaccgattatgagatcaagggtgatgagaacatgattaccatgagttacaagaaactgccagttgatgtgaagcctggaaatgtcattctctgcgccgatggtacaatctctttgactgttttgtcctgtgatccaaaggctggaactgtgaggtgtaggtgtgagaacacagcaatgcttggcgagagaaagaattgcaatctgccaggaattgttgtggaccttcctacactgactgagaaggataaagaagacattttgggatggggtgtgccaaatgacatagacatgattgctctgtcgtttgtccgtaaaggatcagatttggttaccgtcagacaacttcttggacagcatgcaaagcgcatcaagctgatgtcaaaggttgaaaaccaagagggtgttgtaaacttcgatgagatcttgagggaaacggatgcatttatggttgctagagagtcttcccttgacaacgaagctgtcttcaaggagatgatcaggtctgcgccccttccgatgagcccattggagtctctcgcatcctctgctgtacgcacagccaacaaggccaaggcagccctgattgttgtcttgactcgtggtggtaccacggcaaagctggttgccaagtatcgtcccagggttccaatcctctctgtggttgtccccgtgttgacaaccgattcattcgactggacaatcagctcggagggcccagcaaggcacagcctaatctacagaggtcttgttcctctcctggctgagggttctgccaaagccaccgattcggagtcgacagaggtcatccttgatgctgctctcaagtcagctgtacagaagcagttgtgcaagcctggtgatgctgttgttgctctgcaccgtattggcgtcgcatccgtgatcaagatctgcatcgtgaagtaa

SEQ ID NO: 75340 - DNA, 1164 bp, Oryza sativa
  Clone ID: PAT_MRT4530_75439C.1
atggagagtgaaaaacatatcatttgtagacatccaccaacttatggcaacctcataacagttctctcgattgatggtggagggattcgaggaatcattccagctgttgttcttacctttctagaatcagagttgcagaaacttgatggagaggaagcccgaatagccgactattttgatgtcattgctgggactagcacaggggggttagtgactgcgatgctggctgcaccaaacaagaaaagaagaccactttttgcagccaaggatattaaagcattttatatgaaccatgctccaaaaatttttccacagctaaggggtccattcggtaggatgatgaggatatttcgatcaatgtcaggaccttcctatgatggcaagcaccttcatgaagttgtaagagagaaattaggaagcaccaggctgcatcagactttaacaaatgtggtcataccaactttcgacatcaagtggttacaaccaaccattttctcttcctacgaggttaagaagaagaacaacaacactatggatgctctgctatcagatatttgcatcagcacgagcgctgctccgacttacctgcctgcgcacttcttcaggactgaagattgtcatggaaacatcaaggaattcaatcttattgatggtggagtagctgccaataatccggctttagttgccattggagaagtaagcaagcagatattcaagaaaaatccagatttcttcccagtaaaaccaatggactacggccgttttttggtcatttcacttggcacgggctccccaaaaattgaagggaaatacaatgcacaaaaagctaaatcatggggagttctggattggttgcttgttggtgggtccactcccttggtagatattttcacacaagcaagtgctgatatggtggatatccacatcgctgctgttttcaaagttttacattctgagcagaactatctgaggattcaggatgatactctcgaagggacactcgcatctgttgatgttgctactagggataatctggagaaacttgctaatgttggagaaatactgctaaacaaacctgtctcacgggcaaatttggagactggccagatgatgcctgcttgtgatgactcagaaattaccaacggggaagctctcaagaggtga

SEQ ID NO: 75341 - DNA, 4459 bp, Oryza sativa
  Clone ID: PAT_MRT4530_7543C.1
ttaaggctgcttcgcgggcctcttccagtcggtgtaggtcatccactcggtcttccctgtagcgctctcttgtcgataagcgatcatattgtcgtcgaggcaggaccactctttcataactttgttaacaactaactgtgaatctccgcgaactatcagacgcctgattcccaaagagattgcgatccgtagtccgtgaaggagcacctcgtattctgccacgttttgagatgcggaaaaatgtatccatagcacatagcttagtctttctccagttggggaaattaaaacaactccggccccagtgcttgaaagtctctttgacccgtcaaagtgcatagtccaatactccatcttttcctcgggcgtgtcctcttggcactcggtccactcggcgacaaagtcggctaaagcttgggatttgaccgaagttcgcggcttgaacggtatatccaaggacatcagtcctaaggcccattttgcgattcgcccgtttgcttcgcgattatggaggatatcgccgagtggaaacgatgtaaccaccgtgaccgagtggccttggaagtagtgggataatttcctgacggtgattagaacaccgtacaacagcttctgaacttgaggatatctcgtcttggagtcggccaaaacctcgctaacgaagtagatcggtcgctggaccttctgaacatggccttcttcttcacgctcgacaaccaggaccgtgctcacaacctgagaggtggctgatacgtatagtaatagcggttcttgtgggtgtggtgaggccaaaactagtggagtagtaagaagtttcttgaaatcttcaaaggctttctgtgcttcaggtccccactggaaattgtctgttttctttaacagtttgaagaagggcatcccccgctcgccgagtcgtgagacaaaccggctgagcgccgccatgcatccagtcagcttttgaacgtctttctgggaactcggcggcttcatgttgaggatggcgttgactttctccgggttgacctgtatgcctctgtgagacaccataaatccaagcaacttccctgacggtactccgaaggtgcatttttcagggtttagtttcatcctgaaagcgcggatgctcgcaatggttttttccagatccgtaatcaaatcatccttctgcttggtcttgatgactacatcatccacataggcttcaacattgcgaccaatttgagttgagaaacatctctggatcatgcattgataagttgctccatcgttctttagtccgaaaggcatggtaatgtagcagtaggccccgaagggcgtaatgaacgaagtcttcaagcagtcggattccttcaatcggatttgatgataccccgagtagcaatccaagaaactgagcagctcgcagccggcggtcgagtcgactacctggtcaatgcgaggcaacccgaaaggatctttggggcaagacttgttgaggtcgttgtaatcgacacacatgcgccattgcccggtcttctttcgaactaggactgggttagccagccagtcgggatgaaggacttctttgatgaagcctgctgctaacagcttggtcaattcctccttgatcgcgtccttcctgttttgtgcaaagcggcggagtcgttgtttgataggtttagcgtaatctaactcggcgcctactacagcagttttagtaggatcagaaggatctagggggattttcttggtcttggcttcgcttcctccactctttgagaccttggtagtaggcacctctccttcccttgacgtggttgtagccagtcggatgtcttctcgagctatcgcgatctcgcgggttttggccatctcgcaactttccttatcacatgtgacggcttgtttgatgtcgctccgtacggatatgactcctcgaggaccaggtatcttcatcatcatgtaggtgtagtgcgggatggccataaacttggctaacgccgggtgtacgagtatggcgtgatacgctgtctcgaaatcagcaacatcgaagcagacgttctctgtgcggaaattctcccgagtaccaaaggtgactggaagagtgatctggccgagtggcatagcggataaccctgggatgactccgtggaagggcgcgttactcggctttaactcggtgcgagggatctgcatgtcatccagtgtcttggcgaagaggatattcagtgcactgccaccatcgatgagggatctgcgaagcttgacgttgcgaaccactgtcggggcatcatcatcatcatcatccttctttttcgacgtgctttgtcctccgtcagaggtcttctgtgcattcttggcatattgctgttgtcgggaggagtgtgtagtagtcgcaacaagttcctcgggcttacgcttgcggtccttgtgattgttacttccaccctctcccgtagtcggcgcatctttctttggcttccaagtaggacccaactgcttggatgcggcaatggcgttttcgtctttggcatactcattggctttttcaaacatctgtttgactgtcttgggaggtttgcgcccgaacttgccgactagttcttcgtgatgaattcctttggtgaaagcggcgatgatgacgtcgtcggtaatgttggagatcttgttgcgttgttcggagaagcgtcggatgtaatctcgaagggattctccagacttctgaatgacgttgtagagatcaaactgtgtgccggggcgttcaaaggtgccttggaagttggcgatgaagtggtcacgaagttccgtccatgatccaatcgtgccacggggtaatccatggcgccaggaccgggcagaatccgctaaggccacaggtaagtagtttgccatggccttgctgtctcctcctgctgcgcggattgcgagaccgtagacggtaagccaggactccggattggtggtgccgtcatacgtctcgattccagttggcttgaggccggctcgtgctgcacggcgctggttgatcgtatcgcgaagatcgacaggacgccggcgaagtggggagcgaggacgttcaactcggcgctccttgtgtcgctcgggaggcgagtgaacagatcgctcgtcgtggcccctgctccggccaccaccattgccaccggccgatctcctcttccacagcccaccaccatccatgtcggccggaggtaagcacttgccgccgccgttccggcctcttccctcactccctttgccagccgactgcctccttgggtgagcatcgctcgggaacatgtttccccgccaacgtctccgtcccccgccatctagagcaccggcgcccctcgtctccctctcctctgtgttcggctggaagaagaagcagaaggagagaggatacgggaggaagaagaaggagaaaaagaaaaagaaaagatactgacagagagtctattttattctggatggcaacctgtggtatttcgagcatcggataatcaggttgcctatctcggatttatttgcgttggagcaaggcaagttattatctctctcctttgagcataattatcctttattctatatctccattatctcatgcattagtcattcatgatttcgaatgcgtaacctgaacatagcaaaccagatatgctagctttgcttagccctgcctaattagactgcataaaatataatgaacttagattggaacaatatggtagaaatggttgatttccaggtggctagtactgttccaaccgacataaaactgccaagtacatgtgaagaacatacgagtacgaccgcaattatggggacgttcgcgtttactattcccgacgtcggaccgttggttgtaaagcccggcaaaaccaaacctaaggtcgaagtgctgcttctggcaccccacgcctttatgcgtacagtggaattggttgatttccgggtggctagtattgtctcagtcgatatagttattaccaagtacttatgtcaaacgaacgagtacgaccgcaattctagaatggggacagaccttgcaaagaggcaaacttatgccgcgaagggcatatgccgcgaagggcatatgccgcgaagggcatatgccgcgaagggcaaatataacatttaccgaggcacagagcgcatgaagatgagagttcatggaacaggtgccactgatggcttgatacagttaaacatgtcggtttccgaatcattagttttgggagccgacacgctgccgcctcccggacggccggccggccggctgccgccactcccgttcacctgtggccgcctgatccccgtcggggcgatctgggtcgtccacgtggccctccccgtgcagcccgacatcggtgcccccgtggcgccacgttggcgccacctcatcctccccgtccgccgtggccaccacgtggctgccacgtgggatcaagaagaatacatcaagatcaagccgtccaagtga

SEQ ID NO: 75342 - DNA, 682 bp, Oryza sativa
  Clone ID: PAT_MRT4530_75441C.1
ctgtactaagtgccccaacattgacatcgacgagaccatcagtccggttgtcaagccagccaccgtccgcacagttctgagcttggcagtttctcgggactggcctattcatcagcttgatgtcaagaatgccttcttacatgggactctacaggagacagtgttttgctctcagctagctgggttcgtcgatgccttcaaacctgacttagtgtaccatttgaacaagtcactttatggtttgaagcaagcaccccacgcttggtacaatcggttcgccaacttcctcctatcctttggatggtacagtcagttcgccaacttcctccaatccactggattcaaagaggctaagtccgacacctcgctgttcatctatcgtcacgggcccgctgtggtttatctttttctatatgttgatgatattgttctcactgcttccacttgcgatctcctctgcttcttggaaccctgcaccactttcttggagttcgtgtcagccgcattccgtctggactcgttctcagtcagcgtcagtatagtattgagattcttgagcgggctgggatggctaactgagccacaccttgctactctcaagcgcatcattcattatgttcatggaaccctggattacagtcttcatattcatcgctgtcccactattgacctggtgtcttaa

SEQ ID NO: 75343 - DNA, 2829 bp, Oryza sativa
  Clone ID: PAT_MRT4530_75442C.1
atgttcggacgcgccagcagctggacgtcaacgcccggggcgatccggcggcgggatctccgggggcaaactccggcaccggctcggctgctggtgacctcggcggcggcgcccggcgcgggcgccccagcccccacgacgggagagcgtctcggcctcccctcgccgcctcgctccccgtatgcgtcactcgcgccggcggagactgcggcgggggcgccaacatcggacctctcgtcgtttgtggacgaggtgctttaactaagcgccgggctgagggcgcactcagcaccgcacggtcttgtgccaagactgttgctgttccctctcgcggccggagtgtggcggtgtgcttgttgagaaggctgcgcggcaaagatgacattgttaatgctgggatagctggttgttgcactggccttgctttgagctttccaggaacaccacaagccttgctccaaagctgtgcaacctttgcgagcattctcatgcatcatggagggggctcaacaaacagcaggctgcaatggcacagacacttggtgggacgtgctttgaccgtttcacaccagaatggtggcgttctcccaccattcactctgccaccacttcttgatgcatcagatgctttatcttcatgctgccagcccttagtactaaagccgaagcactagactcttcagcatagggagaaggagatgctcaagaaagctatagcttagtgaattttgttttgggacatgtctcatatctagatttgctttctgtatgacgccaggtttttcttgctgcactgtggcaagcgctggcttaactagatttcattggtttggcagataaaatttaagaaaaagcatctggatgacaatgcagagcaccgtcgccgccgccgcggggacttactcctttgacacgtccaccgccacatggaccaagctcggcgactggttgcttccgttcagaggccgcgccgagtatgcgcccgagcacaagctctggttcgcgctctcctccgacggcaacgagctgtgcgcgtccgacctcgccgccgcggcgcaatgtgtggaaggtgagccccgtgtcgcccagcggctcaccgcgttctacgagaagctggggtcagcggcgacgtcaatcgtggcggggcggtgtgatgagcgcgcaatgttcggacgcgccaggtgctcgacctcggcccccgccgccggcgagcggcgcgctcttcccgtcgaccctctctccctccctcgcctactcgtctccgccgccaccacccccggggccgccgccccggccgtctccaccctacacgccgccgctctcaagctgggggtcctcccctcctcgctcccggcctccaacgccctcgtctccgcctactccctttccggcctcctcccctgcgcgctccgcgccttctccctcatcccccacccttccaccggatcctacaccgccatcctttccgcgctctcccgccacggccgcccccgggaggccctctccctcttctccgccgccgcggtcgcccgccccgacgccgagctcctctcctgcgtcgtctcctgctgccgccgcgcatccgcctccctccccgctcgcgccgcgcacgcctacggggtaaagaccgcgccactgctggccttctacgcctcggccggcccggcgctcgtcgcgctgtatgcgatgtgtgggagggtgagcgcggccaagaggatctttgatcgtatggacggcgaggacgtggtgtcctggaacgcgatgattggggggttcgctggtgccgggatgaatggcgaggcgtgggattgcttccgggagatgcgcgcaagaggtgttcgagggaatgcccgtaccgcggttgctgtgctgggggcttgtgatttggagtctggaagacaggtccatgggcacatggtgagaaaccatggtgatagtggttcaaacgcaattctgtggaatgcgttgatgaacatgtattcacgtgttggatgtgtcgacaatgcagaacatgtgttcttcgagattgaacggaaggatgttgtgtcatggaatgtgatgataggtgctttcgcaaagaatgggcatggagagagggcacttgaacttgtggatgcaatgttgcgttgtgggatgcagccagattcagtgacattcacaactctgctcatggcatgctgccactgtggcttggttgatgaaggtcttgcgctttttgagcggtttgtggaaaattctgccctcatccctactatggagcagtgtgcttgtattgtggatttgctttcacgagctgggaggttcagagaggctgctggatttattgatcagatgccaatcagaccaaatgcagttgtatggggtgctttgttatctggaagtaggatgcaccatgatgtggatcatgcacagatcgcttttgagaaactggttcaattggagccagataaccctggaaattttgtgactatgtcaaatatatatgcaaaggccggaatggttgaggatgcaaagagagttaggatgatgattgacagggaggagttagtgaagccttctggacaaagtcgtgttcaagctatgctgcgtggcaaagatgacattgttaatgctggaatagctggttgttgcactagccttgctttgagctttccagccggcctgcacatccccttctgtcaggagatcgatcgccggcgaggagtcggagatggagtgccggcgtggtcccccaggttgacggcggtggaggtgacgacgatggcaccggtccgaagccgcgaggtcgaggaagagcagatcgggaggagacatggtgtccagatctag

SEQ ID NO: 75344 - DNA, 567 bp, Oryza sativa
  Clone ID: PAT_MRT4530_75443C.1
gtgtgggggggttttttttttttttttttttttttttttttttttcaaacaaataactacttcacatagctaacaggggcagttgagttatcatacaggttacaacgaagaactgactgttttgccaggggggaccttctcatagaaatgaaaccgggtagcgggagcactttcacaacccacaatgaaaaccccctttctttggcctttttttttttctaaaaacaggttgcccaagggattgaatgaaaaaattcccccagggtctgccttgttaaacgcaaggccgccactgcaaacaaaaggaacatccaattctgaaatgccctgcctggttggaagggagaaaaaaatgaccaatcggcctggatgagccaccaaagggaaacccgccatcagctgttgcccaattaatggcccttcgttggggggggaagtttttaagacccaccccctaacatcggaagttggggacccatgttttcgttgtccgctgaggaacggggaacctccttaaaacgggaggatccatcagcaccaggtctctaaccagctcgtttgccaagg

SEQ ID NO: 75345 - DNA, 936 bp, Oryza sativa
  unsure (1)..(936): unsure at all n locations
  Clone ID: PAT_MRT4530_75444C.1
gcgcccacgcgtncgcccacgcgtncgagaaagaggggggggttgtgttgtgagcagcgatggcggcgaaacgcgggagcgagtcggacggcgacgagctcggcggcggcggcgccgccgagggaaccagccccaacgacgggggcgcgtctccgcctcccctcgccgccgcgcccgccgtatgcttcatccgctccgccggagacttcgccggtggcgccttcatcggatctatcgtcggatatggacaaggtttgttcactaagaagggatttaagggctcattcagcaccgcagggtcttctgccaagagtctggttgtgtgcttgttgagaaggctgcgcggcaaagatgacattgttaatgctgggatagctggttgttgcactggccttgctttgagctttccaggaacaccacaagccttgctccaaagctgtgcaacctttgcagcattctcatgcatcatggaggggctcaacaaacagcaggctgcaatggcacagacacttggtgggagtgctttgaccgtttcacaccagaatggtggcgttctcccaccattcactctgccaccacttcttgatgcatcagatgctttatcttcatgctgccagcccttagtactaaagccgaagcactagactcttcagcatagggagaaggagatgctcaagaaagctatagcttagtgaattttgttttgggacatgtctcatatctagatttgctttctgtatgacgccaggtttttcttgctgcactgtggcaagcgctggcttaactagatttcattggtttggcagataaaatttaagaaaaattcgtctctgtggcacctgttctgtaatctttccatcttgctatccatatctgggatgctgaacgttatcagttatcactgaaagcaatggtattcttcatatttatcactgg

SEQ ID NO: 75346 - DNA, 1494 bp, Oryza sativa
  Clone ID: PAT_MRT4530_75445C.1
atgtgtgggagggtgagcgcggccaagaggatctttgatcgtatggacggcgaggacgtggtgtcctggaacgcgatgattggggggttcgctggtgccgggatgaatggcgaggcgtgggattgcttccgggagatgcgcgcaagaggtgttcgagggaatgcccgtaccgcggttgctgtgctgggggcttgtgatttggagtctggaagacaggtccatgggcacatggtgagaaaccatggtgatagtggttcaaacgcaattctgtggaatgcgttgatgaacatgtattcacgtgttggatgtgtcgacaatgcagaacatgtgttcttcgagattgaacggaaggatgttgtgtcatggaatgtgatgataggtgctttcgcaaagaatgggcatggagagagggcacttgaacttgtggatgcaatgttgcgttgtgggatgcagccagattcagtgacattcacaactctgctcatggcatgctgccactgtggcttggttgatgaaggtcttgcgctttttgagcggtttgtggaaaattctgccctcatccctactatggagcagtgtgcttgtattgtggatttgctttcacgagctgggaggttcagagaggctgctggatttattgatcagatgccaatcagaccaaatgcagttgtatggggtgctttgttatctggaagtaggatgcaccatgatgtggatcatgcacagatcgcttttgagaaactggttcaattggagccagataaccctggaaattttgtgactatgtcaaatatatatgcaaaggccggaatggttgaggatgcaaagagagttaggatgatgattgacagggaggagttagtgaagccttctggacaaagtcgtgttcaagctattcatcatgatttgtctaccgtgcttcagagtgcagcaacactcatgcatccactaccaacagttcatttggtgtctaccattggatatggacaaggtttgttcactaagaggggatttaagggcttgttcagcacccagggtcctctgccaagacaccttgctcataacataaatttatcggatcaaagttttgcagttctctctggcgtccattgtctagttgtgtgcctgttgagaaggctgcgtggcaaagatgacattgttaatgctggaatagctggttgttgcactagccttgctttgagctttccaggagatcgatcgccggcgaggagtcggagatggagtgccggcgtggtcccccaggttgacggcggtggaggtgacgacgatggcaccggtccgaagccgcgaggtcgaggaagagcagatcgggaggagacatggtgtccagatctagaaaagacgttccacagcgaggccgatggtggagggggtcgtcaaagatggctagggctagagatgttcgcaccggcgctgtcgcccgtgacgaagaggcccgcctctaactcgagcggctcaccaatgtctggctga

SEQ ID NO: 75347 - DNA, 673 bp, Oryza sativa
  unsure (1)..(673): unsure at all n locations
  Clone ID: PAT_MRT4530_75446C.1
ggtttcttatcgaatgagcctagtgaacaagcanncacgngccggangngncnacaacgcacaacatgnggnccccgagaaggaacggaagtttgttgtgtcatggaatgtgatgataggtgctttcgcaaagaatgggcatggagagagggcacttgaacttgtggatgcaatgttgcgttgtgggatgcaaccagattcaatgacattcacaactttgctcatggcatgctgccactgtggcttggttgatgaaggtcttgcgctttttgagcggtttgtggaaaattctgcccttatacctactatggagcaatgtgcttgtattggggatttgctttcacgagctgggaggttcaaagaggctgctggatttattgatcagatgccaatcagaccaaatgcagttgtatggggtgctttgttatcttgaagtaggatgcaccatgaatgtggatcatgcacagatcgcttttgagaaactggttcaattggagccaaataaccctggaaaatttgtgactatgtcaaatatatattcaaaggccggaatggttgaggatgcaaagagagttaggatgatgattgacagggaggagttagcgaaaccttttggacaaacctggattttaactgatacataaatgataggttattgttggggctgggcaag

SEQ ID NO: 75348 - DNA, 412 bp, Oryza sativa
  Clone ID: PAT_MRT4530_75447C.1
ctgttcagttaattaggttcaccagatttgtttagtaaaaaattgactatcaaccaacttctaaaagtaaaaagtttactacgtgtcatatccatttttatctgctaagaaaatttgtcctctaagtaatattgatgatctattggatcagttgagaggtgccaagatattttctaagattgagctgagatcaggatattatcaatagatgattaagaaagaagataggcgaaagacaacatttacaacaaggtatggactgtaccaattcacagttatgccatttggagttaccaatgctccagctgtgtttatgagattgatgaatcacacactgttggattatcttgataagtttgtcattgtctttcttgatgacatccttatccactcaaaaagtaaagaagaacat

SEQ ID NO: 75349 - DNA, 626 bp, Oryza sativa
  unsure (1)..(626): unsure at all n locations
  Clone ID: PAT_MRT4530_75448C.1
gtcaaaagcaagagaaagaggggggggttgtgttgtgagcagcgatggcggcgaaacgcgggagcgagtcggacggcgacgagctcggcggcggcggcgccgccgagggaaccagccccaacgacgggggcgcgtctccgcctcccctcgccgccgcgcccgccgtatgcttcatccgctccgccggagacttcgccggtggcgccttcatcggatctatcgtcggatatggacaaggtttgttcactaagaagggatttaagggctcattcagcaccgcagggtcttctgccaagacttttgcagttctctctggcgtccagagtctggttgtgtgcttgttgagaaggctgcgcggcaaagatgacattgttaatgctgggatagctggttgttgcactggccttgctttgagctttccaggaacaccacaagccttgctccaaagctgtgcaacctttgcagcattctcatgcatcatggaggggctcaacaaacagcaggctgcaatggcacagacacttggtgggagtgctnntgaccgttcacaccagaatggtgggcgttctcccaccattcactctgccaccactttcttgatgcatcagatgctttatcttcatgct

SEQ ID NO: 75350 - DNA, 131 bp, Oryza sativa
  Clone ID: PAT_MRT4530_75449C.1
ctccaattttttttatacctctcacaactcacgagcgcggaggggggatatttaacattgctgcagcaaatcccctctctcgaccccacttcctacctgattcctgcgggctagatgaccgcggttgtagg

SEQ ID NO: 75351 - DNA, 589 bp, Oryza sativa
  Clone ID: PAT_MRT4530_7544C.1
cagaaacgaccatccagcacaatgaattgacgaaagtgaagcccgcccggcaggtccaagatctgagcaacatgtagcgccgtttgattccccccacaaaaaactaacccttccccattagttatagttagttcgaccccgtccgatccggccggccggcggcgatggcgcccgtggcgacgtggtgctggtgcagccactgcggcgtggaccgtcgcctgaggagggagggcgactacgcctcctgcagctcctgcggcaaggtcctcctgcagctccggggtgacgacgacgccgccgccgccgaggcccctcgccttcgcctgctcctggggccgaggatgcggaggaccaaaaagcgcgcggcggcggctgatgctgcaggcggcggtggagttgccgccggcggcggcggcggcgagaagtactccaggcgcgaagcgtcgtctgacgccgagtccaacactggatgatctatgacggcgtatgtaataattgactattgatcagtagcgtggatctttttctatctgtggggatttgcctttcactgaaataaaagaagttcgtgttgattcccttatggcac

SEQ ID NO: 75352 - DNA, 387 bp, Oryza sativa
  Clone ID: PAT_MRT4530_75450C.1
ttttgtttatttcacaacgccggatcaaagtgagcaggttcaaaacctcaacgtaaatacccactaccctaccacatttcaccatctcttcaaaactaacacatacatccacgcgactcacacaaataccaacatgaataccgaacacgtccggacacatactgagccaattactcacagcacacactatatgggtatcagacccgcaatggttggcaattcgtaaatagcgttaaatgaaagtccttgcttttgaaggcctacccggtggatgagcccttgacttgcttgatacgatcatgaggagggcactccacactggtcttgatgctcctaaaggcactctccctggcaccagttttgaggaggcacatggcctggctgacc

SEQ ID NO: 75353 - DNA, 506 bp, Oryza sativa
  Clone ID: PAT_MRT4530_75451C.1
ttacgccaagcttttaatacgactcactatagggaaagctggtacagcctgcaggtaccaggtccaggaattgcccgggtcggaccacacagcagtccagtgcaagcaacagtgttgccaaacaagctgcaggctgggtagcgcaaacaaatctcaactgaccaaggccattaagtgagcgttcaggcggattggtgcagcaactgacaggctggcagcagtgcggtggttggtctactttggatgcagactgcaagctgcaagctcaagctttggctggccctgtaaactgggccatgccatatggtgggtatctatcgctgaactgactacattggctccagagggaccaattgcccacccgttgggtgggtgtctgggtactgaatggtaatagtagtaatggttcaaaagggtaaaataaagtcagtgcatcatcaggcgtacagttgaaacttgaggtcatagaaatctaaatattcacctattaagtaccaaaaaaaaaa

SEQ ID NO: 75354 - DNA, 467 bp, Oryza sativa
  Clone ID: PAT_MRT4530_75452C.1
ctttgccttaccaaactgcacgttctgctcttggactgatcagtttgtttgaagacagtcttgctcctgtagctaatatcctctatccgatgccctcctggtactttgagaagccacccctgactgccgagttccttatgacagcccgttatgaccatacaaccggagctaaatacgggggaataccctccccagggaattaacttaggattatataccggcgtggaggaatacccatactgagctgtcaccatcagcggtccacctctcatccgcagtatataatcccaaataatgatatcccgtaatctatacaccacgcctaaactaccagatactactctaatatcatcgtcatgacatagagtaattgcatatgcaaacattatacccgcaccaaagcatctcccagataagctagctgtatattcagtataacatgaacataatgtaaagtaggtactcat

SEQ ID NO: 75355 - DNA, 315 bp, Oryza sativa
  Clone ID: PAT_MRT4530_75453C.1
gtatttacttatgcaattactctatgtcatgacgatgatattagagtagcatctgttagtttaggcgtggtgtctagattacgggatatcattatttggggttatatgttgcgcatgagaggtgggtcgctgatggtgacagctcagtacgggtattcctccgcgcgtgtatatagtccttagttaatttcctggtgagggtattcctccgtatttagccccagttgtatggtcatgatgggctgtcgtaaggaactcggcaataaggggtggcttctcgaagtaccaggagggcatcggatagagggtattagc

SEQ ID NO: 75356 - DNA, 855 bp, Oryza sativa
  Clone ID: PAT_MRT4530_75454C.1
atgatgctcatcgccaagaagccgctgctgctgcttcttcttctgctcgttctcctggtgttggagccaagatcatcagcagaagctaacctcgtcggcgtcaatggcggagagacggatgagaggcggcttgagagcttggtttacgacgagctgcccttctcccagctcggcttgggattccctaccaccgtcgtcgccggtggctccgagaatgatgtggaggaagttgtgcaagcatggtacatggacgacgacgacaacgcggaggaagaccagaggcttcctcatcgccgccagcctgatgatcttcttcctctcgccaaattgcttgacctcggactcgttgcaatgcgattagatgcagataaccatgagcacgatgagaaccttaagataatgcgtgaacagagaggctacttgcacatggacatcgttgaattgaccccagagaaaatgccaaattatgaggtgatgatcaagagattcttcgaagaacatctccacacagatgaagaagttcgctattgtcttgatggtagtggttacttcgatgtgagagatgagaatgacaagtgggtccgggtttcagtgaggaaaggggcactcatcgttgtgccagccggcatctatcaccgcttcacacttgataccaacaactacataaagatggggcctgggggcctcttgtttgggtttttacagaccatgcgtttattttcaggtgggccagattggacggcttacaatcgtcctcatgatcatctgcctgaaaggaagaagtatctagaagcgctgcataacaggaccccgagatttggacaactgcatcgaattcgctcaaaaatggagtaa

SEQ ID NO: 75357 - DNA, 2748 bp, Oryza sativa
  Clone ID: PAT_MRT4530_75455C.1
gtacggtacggtgtagcagaatcggttgggttaatgaagtttttgatacactctccccccttgtatggaagtacaagtacgccacattctgctggtaagtgtccgttggatttgagttggccaaactatgaactgatggcttctgtatgctcggatgaaaatggacactcaaaatgttgccgttacatcaatgctattattgcggtctcgtctgccatgtatgcaaatacgacaggcattcttggggtcccagccgaaatttctgatgcttgcattggcaacatctctgacacattggtatcaaagggaattctgcctaccgccgcttcattttgtggccttgggatcaaaattcaagtttcctatcaatgtattgggatgactaccgtcctccagatgttacagtctccgaatttcagtgatgtcactaggagctgtgcaactctactttcagatgatgtcagttgcaagaggtgcttaaactctggtctgtcatacctccgccatcttgtgggagaacaagataatgtcacattgaatacctgccgtgatgctgcctttgttgcatttgcgagtcaagggaatatatctaccgttgatacggcgagttgcttttttagcgtccaggggcttagtgctcttcaagttttactcatccgtaaaaagagtagagaattagagaagattgaaggaactaaccctcttgatgcgtggagttcctctgcttaacatgatattttttcaggttcttccaccattttcgacagatttacttacagacaaatgaagaaggcaacaagaaactttggcactgtgttgggaggaggtgaaaagggcacaatattcaaagggaaactgagtgatggttctgtggttgctataagacgcatagaaagctcgccaaaacaaggtcagctggaattttgcaaagaaatggaacttcttgggcggctgcaccatcgtcatcttgttggacttaaaggcttttgtctaacaagatttgagagggacataaagcctagcaatgtcctattggacagaaactatcttgccaaggtacttgacgtgaaactttcctacagtgagaacaataccaccatcagttccaccctagtgaacgtgaagatcccggcaactcctggctacgtggacccttgctacgtggtgaaccaggtggtgacgccgaagagcgacgtgtacagctacggcgtgctgctgctggagctggtgatggccgatgtgatccactggtgcacccaccgggacggcgccgcgcggccgtcgatgaagcaggtgctccgcatcctgtacgagcgcctggacccgctctccggcggcctcgcccgcgccgtcgccggcgaggaagggtactactacggcggctggcagagcgggcggaaggggaaggagggcgcggagatgctggccggcggcggcggcgacggtggtcggtgcctgccgtcgtcgtcgagcacgtccaggtcgtactgcagccgcagcgtgctgcttgagtgcaactcgccggaggaggcgccgccccagtcgtcgccgcgaaggatgcacctgcacgcgaagacggactcggaggtgacgtcgagcatggcggcgtcgtcgccgccgcgggcggcctactacgtgcagtcgccgagccacgacgacggggagaacaagacggcggcgtcgtccttccactcctcccccgcggcgtcgccgccgcgctccctcggcaaccactcccgcgagtcctcctcctcccgcttctccgccgccaagtccggctcctcccgccgcaccgccgccgccgggggagacggcggccaaggctggatggagcttgtgcccagcgcaaaggaaggccggaccacggacgatgacgacctagacggcgtccagagcccggggagctatgcgtacgtctacctctgcgccttgttcgcgctgttcgtgtcgttggcgctcgtcgtctacagcgccagcctgaaccagaaggaggtggtgtccagcaacagcatcgcgttggacaacctcgcggcccaggcggcgacggacgcgtcgctgcggctcacggagctggcgtcggtgaagggcacgctgatgatgacgtactggatgacggagggcctgttcggcgtgcaggtcgcggcggcgaccctcgcgcactacttctacctgctcctcgctgcctccgtcaacttgacgaacctctaccactcgaggaagagctcgccgcccgtggcggtggcggtggtcggcgacaaggtgccgctgtacggcggcgggtcggggctgagcagcacgccggtgaagggcgcgccgccggcgccggtgccgctgcagctggcggtgcggttcaggtcgcgggcgttcgtgctgggcaagctggtgaagcccaagttcctgaccaacgtgcagtgcagcgtcaggctcgacgtcgccaagctcggcaagcccgtctccctcaacaaggcttgcagcctcgtctaatctaagctgcaatgccggcgagctagctgctcatcactgcgtcatcttcgaaatatcgtcttcttttttttcttcttcttgtttctttcttgtctgatatttacagtatattgtcactgcatactttgcgagttggttagtttggaaggagggtgaggagatcgatcaggttgtgtgtacagggaaattttgtcgcgaacattttgagatatcgaattttgggtggataataataattaatcacgccgttgccgttccccaaaa

SEQ ID NO: 75358 - DNA, 496 bp, Oryza sativa
  Clone ID: PAT_MRT4530_75456C.1
aaaagagatgtatcctacgtctctacagcaatgtgccaacggatcacgaattcaaggcacaaggttcttgcacccgaggtgtgtgcatgactaaactacttgcctgagtcctctattcgatgccctcctggtacttcgagaagccacccctgactgccgagttccttacgacagcccgtcatgaccatccaaccagggctaaatactgaggaataccctccccagaaaattaacttaggatatatataggcgcggaggaatacccgtactgagttgtcaccatcagcggcccacctctcatccgcaatatataaccccaaataatgatatcccgtaatctagacaccacgtctaaactaccagatactactctaatatcatcatcatgacatagagtaattgcataagcaaacattatacccgcaccaaagcatctcccagataagctagcagtatattcagtataacaagaacataatgtaaagtaggtactcgt

SEQ ID NO: 75359 - DNA, 636 bp, Oryza sativa
  Clone ID: PAT_MRT4530_75457C.1
atggcgttggccggaaccctcaacgcctccaccgtcttcttcctcctcctgctgctcctctgcgtgtcagtgatgtcaccacccttcacacctgcatcggcgagtcccatgggcctcaccgccgacgcgaaggtggcgctcctgctgtaccacgccgtcgcggcgcacttctccgaggaggcgctcaaggcgatcaacggggaggtgaacacgctggccaccgacggcggcggaggaggcaaggtcttgaacctcaccatcgaggaggacgacgacggcgccggagccaccgtgaaactgtcgtcgtcgtccgggaacgtggcgcgggtgaccaagacgatccaggacgcggacccccacgccgtgtacctcatcgacgccgtgctaatgccattggatgtggtggtcaacgtctcttccggcggcggcgcggctgccccttcaccggcgccggtcacttcacctgcacccgcacctgctcaggccacaaatccgtccccttcgccggacagcaagcccgacaatcagccggccgcggagcagcctccggagaacagcgcgagcaggggcggcatggcagcgtggagtctgctctcggtggtcgtgccggccatagcgtcgttggtgctccggtga

SEQ ID NO: 75360 - DNA, 446 bp, Oryza sativa
  Clone ID: PAT_MRT4530_75458C.1
atgagtacctactttacattatgttcatgttatactgattatacggctagcttatctgggagatgctttggtgcgggtataatgtttgcatatgcaattactctatgtcatgacgatgatattagagtagtatctagtaatttagacatggtgtctagattatgggatatcattatttggggttatatgctgcggataagaggtgggccgctgatggtgacagctcagtacgggtattcctccgcgccggtatataatcctaagttaattccctggggagggtattcctccgtatttagccccggttgtatggtcatgacgggctatcgtaaggaactcggcaatcaggggtggcttctcgaaatgccacgaggaggggtggcttctcgaaatgccaggagggcatcagatagagggacactgttcttcaccggtgaaacctctct

SEQ ID NO: 75361 - DNA, 165 bp, Oryza sativa
  Clone ID: PAT_MRT4530_75459C.1
tcgattttttttttagcaagaggagattcaccaaaccactatggggtgactaataaggttgtaggccccgaagagcaacttatatgaacaggacctgtgatagatatagaacgccaataatggactcctactacggttgttatatagaacgaaacatgagcttgg

SEQ ID NO: 75362 - DNA, 241 bp, Oryza sativa
  Clone ID: PAT_MRT4530_7545C.1
gtacgagcgggcggtcagccgggcgcagatcaaggcagtatgggggtggaacagtgacatccgcacaagcaagcccgctgttagcgggtacaagcgagagtttaaatatgatcgattgcgaaaacgccggcctgtccttgacgcgagcattaagcaccgattccccatggcgacatgcacaactggggctgtgagatcctgccctcctgtgaaagcagcactggttgctggggctggcctc

SEQ ID NO: 75363 - DNA, 426 bp, Oryza sativa
  Clone ID: PAT_MRT4530_75460C.1
gtcttgagctattcatgatggctcagattgattactctctttccgatgccctcctggtacttcaagaagccacccctgactgccgagttccttacgacagttcgtcatgaccatacaaccagggctaaatacggaggagtaccctccctaggaaattaacttaggactatatacacgtgcggaggattacccgtactactgagctgttaccattagcgacccacctctcttctgtagcatataaccccaaataatgatacccagtaatctaaacaccacgcctaaactaccagatactactctaatatcgtcgtcatgacatagagtaattgcataagcaaacattacacccgtacctatgcatctcccagataagctagcagtataatcaatataacttgaatataaagtaaagttggcattcat

SEQ ID NO: 75364 - DNA, 540 bp, Oryza sativa
  Clone ID: PAT_MRT4530_75461C.1
ataagtaccaactttacattatgttcatgttatactgaatatacggctagctaatctgggagatgctttggtgcgggtatagtgtttgcttatgcaattactctatgtcatgacgatgatattagagtagtatttggtagtttaggcgtggtgtctagagtacgggatatcattatttggggttacatattgcggataagaggtgagccgctgatggtgacagctcactacgagtattcctccgcgcctatatataatcctaagttaatttcctggggagggtattcctccgtatttagccccggttggatggtcatgacgggctgtcgtaaggaactcggcagtcaggggtggtttctcgaagtaccaggagggcatcggatagagacccatggtaggtcggttagatctcggccgttcgttttgtttagattagatctcagccgttcgttccgtagaccgcttctgtccactcggtccaccatgaacccgagccccgctgacgcaataaatcctttttccgtttcaaaaataattctt

SEQ ID NO: 75365 - DNA, 1212 bp, Oryza sativa
  Clone ID: PAT_MRT4530_75462C.1
atggccatgcatacaccaccgtgggaggagctccctgccgacgtccttaggatcgtcttctccagggtcgcatgccgtgcataccgccaggtgatggccggggtctgcggggcttggcgccgcgccgtgaaggtgaaggtagcaacaggccagccgccacgcccgcgccagcttccctgtctgctgcgccccaacggtggtgattcctccgtcagcagcctgctctgctccggcggccacgggatcagcgtcgtccacgccgcccacctcccgcagcagcccgtcgacgcacgccacgcccgcttcttcgggtctcacgacggcagctgggcgttcctcgcctccgcccaaacaagcggccacgtccttcagaagttcggcaccgacaccatcatcccgctccccgacttcatggatgtgcagggaggagagagctcctccatcgtccacctcgccgcgacgctctcgcaccagccgggccacgccagttgcctcgtcgcggcgatcgtcaagacgtaccccatcgatgtcatgtctttgagagctgtcgcgttctggcgcatggaccatggcaccatggcctccgagctccacagaacagagatcgaggctatggagccagaggacatcatcttccacaagggcgtccttctcgtcctcacccagcaggagaatctactggcgtggatcccagagtacacggacgaggggcgtggagtcgagatgcacggaccggagcaccgcgcctgcggcaagcccaggatctacaacgaactggccgttcagtcacggtacctcgtggagtcccagaactgcctactgctgatcgtgagatacagggagggtcatcccacttcttccacccaagaactcaagatattccagctggtggagcttgagataccggatgagaacggtattatgatgacacgttacaattgggtagagctgttctctctgtttggcgagatgatcttccttgggcgaggctgctccagatcctacaatgtgtccaactacccgggcttcacagaaggcgtatacttcctggacgacgggagcttctaccatgctgacctcctgtcccatgacgctgccgaccagaagtacacctgcagtgacaatgggaggtgggtgaacctccaggtcgaccgctgcttcccgccggagcaaagctgctcctgctctcctccgatttgggttctcccttga

SEQ ID NO: 75366 - DNA, 1907 bp, Oryza sativa
  Clone ID: PAT_MRT4530_75463C.1
atgagtacctactttacattatgttcatgttatactgaatatacggctagcttatctgggagatgctttggtgctggtatagtgtttgcttatgcaattactctatgtcatgacgatgatattagagtagtatctagtagtttagacgtggtgtctagattacgggatatcattatttggggttctatattacggatgagaggtgggccgctgatggtgacagctcagtacgggtattcctccgtgtcagtacataatcctaagttaattccctggggagggtattcctccgtatttagccctggttgtatggtcatgacgggctgtcgtaaggaactcggcagtcaggggtggcttctcgaagtacaaggagggcatcggatataggagctttcttccagagcgtcaggccgcgagtcgttgctccacagaaaactctaccgacaaagaaaccagccgtaccagcgcaaccaaccttcaagactatggctgacaagacccttcgcgagttcgctgctctctctgctaacaatatggccattgggccgcaaatcaacatgggagacatggatttcaacttgaagtccaacctcatcacgatggcgcaggctagcccattctatggcaagcctaacgaggatgccaatgctcatctgcagcagttcttggagatctgtagcacgtacaccatcaagggcgagtatgtggccacctgtcctcatcatgggatggacgactggctgatcctgcagaacttttacaatggactcaccccgatgtcccgcgatcgcctggatgcggcagctagaggagcattcttctctaaaacggttcgaggagccattgatttaatagagaagatggtcttcaatatgggttggagcgaggaacgactccagacccgtcagcgaggcatgcacaccgtcaaggagacggaactgcttgctgccaagctggacctcctaatgaaacgattggacgaccacgacaaacggctacaaggcaccatcaaggctttggactcacacgttacgtgtgaggtctgcagcaacacgggtcactctaggaatgactgctcggaaacccgtgaggaggcgatatacatgggcaacaacaacaacggtactgtccacaaggagatctggggtgaaaacaaccacgcccatattatcaaggagctagctcagttagcatccttagtccctacaaatgaaactgggaggattccggggcaacctgactcctccgttgagaatgtcaaggcgatcacgacgaggggaggaactaacgggattgcaaaagaagcgccatctagtgactcggctgacaaggaagttcagccagagaagaccatgctgcaggagtactgtgacacacgattgctaccgtttcctcaacggagtaggaaaccgtcagttgacgaacaattcgctcgttttgttgaagtaattcagaaaatccacatcaatgtgctgctgttggacgctatggaagtgccaacatatgcccgttatctcaaggacatactcaacaacaagagaccgctcctaacaacggaggtggttaagctgacagagcaatgcagcaacgtcatactccacaagctcccggagaagaagaaggatccgaggtgtcctacaatcacctgctcgatcggggcacaacagttcgaccaggtcttgcacgatcttggagccagtgtcagcatcataccaaaggacgtctttgacaagctcaacttcacggtgttggcatcgacaccgatgcgcctacaactggctgactcatcagtccgttacccggcagggatagcgaagatgtgccagttaagatacgggatttcttcatcctggttgatttcatggtgttggatatgggcacagcaaaggagacgccactcatcctag

SEQ ID NO: 75367 - DNA, 388 bp, Oryza sativa
  Clone ID: PAT_MRT4530_75464C.1
atgagtacctactttacattatgttcatgttatactgaatatacggctagcttatctgggagatactttggtgcgtgtataatgtttgcatatgcaattgctctatgtcatgatgatgatattagagtagtatctggtaatttaggcgtgttatctagattacaggatatcattatttggggttatatattgcggatgagaggtgggtcgctgatggtgacagctcagtacgggtattcctccacgcctatatataatcctaagttaattccctggggagggtattcctccgtatttagccctggttgtatggttgtcacgggctgtcgtaaggaactcggcagtcaggggtggcttctcgaagtactaggagggcatcggatagagg

SEQ ID NO: 75368 - DNA, 417 bp, Oryza sativa
  Clone ID: PAT_MRT4530_75465C.1
atgaatgccaactttacattatgttcatgttatactgattataccgctagcttatctgggagatgcatcggtacgggtatagtgtttgcttatgcaattactctatgtcatgacgatgatattagagtagtatctagtagtttaggcgtggtgtctagattacgggatatcgttatttgatgttatatgctgcggatgagaggtgggccgctgatggtgacagctcagtacgggtattcctccgcgcgtgtatatagtcctaagttaatttcctagggagggtactcctccgtatttagccccggttgtatggtcatgacaggctgtcgtaaggaactcggcagtccagggtggcttctcgaagtaccaggagagcatcggatagaggacaaattaaaatccccttcattgtctttg

SEQ ID NO: 75369 - DNA, 334 bp, Oryza sativa
  Clone ID: PAT_MRT4530_75466C.1
atgaatacctactttatattatgttcatgttatattgaatatactgctagcttatctgggagatgctttggtgcgggtataatgtttgcttatgcaattactctatgtcatgacgatgatattagagtagtatctggtagtttagacgtggtgtctagattacggatatcattatttggggttatatgctgcggatgagaggtgggccgctgatggtgacagcttagtacggggtattccccacgcatgtatatagtcctaagttcattccctagggagggtattcctccgtatttagccccggttgtatggtcatgacgggctgtcgtaggaa

SEQ ID NO: 75370 - DNA, 811 bp, Oryza sativa
  unsure (1)..(811): unsure at all n locations
  Clone ID: PAT_MRT4530_75467C.1
ggaacgacacacgaacgctgcacattcacacgactctggacggtaccacctcaccccgncacacgaacgaccnaccgttcgtacgacggaaccgaacgaccgggcactggacgactcnccgaacacctgaccgncacgacncgtggaaccaancancccacccctggacccccactggcgaaccgaacgcacaacncaanttggcattgaccacgaccctgnccgngacncggtgggacgnggcgccccgngacgcgacgcgaacgacggggccgcccggttcgaacgacggaacgaaccacccaccaacactaccgggccggggcgacgacgacgacgagaaccaacctgggcccggccccagagcgactncggcccaccggcacccccacccccacccgaacccccaacctgggggaaccgaacggggcaccgncaaatgggcatttggcaccggaccctcgnacgcgtaccccggggcgacccggacggaaccaccgaacgttcgttcgaccgactgaaccacccacccaacgggcggggcgggccgggcgggccacttggggcggggcgaacccaccctgggcccgggaacggggcncacttgggcccaccggcacccccaccccccggccgaaccgtttggggccaacgaaacaacggggcacaggcgggtggcccttgacgacgaactggccnccgagacgccgccctggatgggccacggtggccgccgaagcctcctccaggccgtgtaattaaaggtaacgtaaataaagacaactggcttcgccccgggtgtacgggtata

SEQ ID NO: 75371 - DNA, 685 bp, Oryza sativa
  Clone ID: PAT_MRT4530_75468C.1
atgtcggaagatgaggtggaggcaggcaccagaggtggaggcgatggggaggcggcggaggaggtggggaagagggtggagtcaactgcggcaatgggaaggcgttgggcggaggagccgatagcggaagccagcgtgcaggtcgagtcaaaggggctgcgtggtggaggcggcgcgtggtgggagaggagcgagcaggcggggggcgctggatttggcggaggaggtggtgcgcggtggcggggggcgcacgcggtggatttggcggaggaggcggcggcgcgggcggtggatggcgacaaaggcgcgcgcggtggaagggggcacgaggtggcggcgcctagggtcggcctcttgctcgttgaagagcgtgacggcccaccgacgaggacggttgccgtgcgaacaaaacatataccgaagctcgatggttgtcgcctctatgagtgtactccccatcttttctggcagacgggagcatggattgctcagatctagcgacggagaagaccggggattggattcgggtcagagtagaggaagaagcaggaagtaggcttttttctttagcttttcatgtttttcacctgatgttgatccttgttccacttagtgtattcgaatgtttcactctattttaaccatacgttccacacatttgattgttggtaaaaaaaaaaaaaaa

SEQ ID NO: 75372 - DNA, 267 bp, Oryza sativa
  Clone ID: PAT_MRT4530_75469C.1
aatccagttcggtctctggagacagcactaacttcaaacggacccagcactttcatgtcaactccgatttgggcgatcttggattgttggaaagaatatatcgtcacctttcaaatgcatctggtctcatattaaaattcatcccgagtcaatgggaatcatcaaaataagcctgtgttgtttctgaaaccaaacatggaccctgtgccttgtaatagactaggcctatcttggaagtgtctccctagctctatttttctctataaa

SEQ ID NO: 75373 - DNA, 451 bp, Oryza sativa
  Clone ID: PAT_MRT4530_7546C.1
cttccgccacgccttcggccacgccttccggttaccgcaaaccttttattttaagccagaacccggaaacttggtttaaccttccccgaaaaccagggcctggaaagggaaaaaaagaaccaatgggtggaacctccgccgcccaggtttcgggtccattgaaaaaggctaattggccgaaccgagggagcaaccgccagaaccagccccggggttttttttttccagcaaaatggtttcccagggatctgttggtttgcccgcctgcctacctgcccgagtggaaagctgtggaaagcaccgaaaatggaggcctgcagctgctggcgggggtatccccaccggccaagcaagttgctgttgttgaccctggttgggtttccaccgaattgattccaccaaacactggattcggaagtgagtaccacgcacacaggtgactgtaaatatt

SEQ ID NO: 75374 - DNA, 219 bp, Oryza sativa
  Clone ID: PAT_MRT4530_75470C.1
gatctatatctagttccgtgttgaaaaggatgctgaaaatcctgttgttcctccgcattagagcatcttactcatcatctgcgaacaaatcaccatgctccaggcgtggagagtggaaggcatatgtcctagaatataccaattgttgaaaacaggataactttatgcaaacgactggaataggaaccagatacctacctgcatttgtcttgcggatca

SEQ ID NO: 75375 - DNA, 582 bp, Oryza sativa
  Clone ID: PAT_MRT4530_75471C.1
gcgtgctctccctagcccacgccgccgcctcctcctcctcctcgcgcctcccgcccccgctacgccgcgccgcaaactctcctcactgcgtcgccgccgccgcgcctcccgcactcttctagcacccagatccagagccggtggggaagttggatgtgacagatcaaggccgccggatctgttgagctcagcagcggcagcagcttggcgatgatggcagcaatgtctcagacatgccctcctccccactggtgacaagcatgaggccacggccgaagcttatctttcgcacctccatcagaccttgtaattctagggaagaagctcggtcaactgcgaccttctaacgcagggaaggatggaaaggagtggctcctgcttgaagagctgcagggacagatcgccaggatacagggcagtctcgaggaatgtgaaccatggcaatctgcatagcccttcatttggaagctatgtccccccaactattgagtactattttttagctccacctcccttttcattcaggtaaaatggaaatatcattgaaagttggaaaaactatgtattggcgttgaatctaca

SEQ ID NO: 75376 - DNA, 182 bp, Oryza sativa
  unsure (1)..(182): unsure at all n locations
  Clone ID: PAT_MRT4530_75472C.1
ggggggcatagttacatgttggatggtaattagtttttatcttcacgtagttgaattttgtncacactatttagtcacatgcttgtgaaacattgtaacatcctgttcaagagccagatcatttgcaaggcgaataaaatgtttttgtgtctagtaaaggccaaaaaaaaaaaaaaaaaaaa

SEQ ID NO: 75377 - DNA, 582 bp, Oryza sativa
  Clone ID: PAT_MRT4530_75473C.1
atgtcagtcggcaagaggcagcctatcaagatagcggcggcggtggccgcgccctcccctccgccagatccagcggaggcggcgggcaccccatgggcggaggcggccagcggtagcagccgtgccctcccctccgcggatccggcgagaagggaggcggcgggctccgtggccgccagcggttgggagtcggcgagctcccacgccggcagctgcctggcggaggcagttgcggcgcacctcggcagcggcggcggctgcgccatgcccatgcggcgatggcggcaggggtggagaaggacaccggtggcgcatcacgacattgaagacggcagcaggaatgcatgcaggattacaggtacatacgccatgtttgctgcggtacatacgcctctgttttctgctgcatcgcgcgctcgtcgacagctcctgaggtcctggatctacaaagggattgaggaccagatcgactccagagtaccacactcccgaatccttgaacggagaaacgatgccaatgcacataatttccatcaacccgagaaaaaccagctcaccgttcagtactcgaactgctactga

SEQ ID NO: 75378 - DNA, 294 bp, Oryza sativa
  Clone ID: PAT_MRT4530_75474C.1
ttcggcacgagggtttccatatccggagaaatatttataatttgtcctatttagttaatcagatctctttgcaacctattttttttctcactgccactcaataagatttcatggttcatatgctttacccctatggtgaaattttcgtaaccatgcttggaagtgcaacagcgtttcctgatcctgtgtaccttttaaatattgaaaagagtggttactctggcagttagtaccactggagtctcatcctttatacctgacagtttttcctaacatgtcaatgtatcatgcata

SEQ ID NO: 75379 - DNA, 1093 bp, Oryza sativa
  Clone ID: PAT_MRT4530_75475C.1
atggaggccgaggcggcggcgaagagggcgcgggagagcggtgacgcggcggcggccggtgccggcgagcaggcgggtatctctgccgtcatccctggatggttctccgagattagccccatgtggcctggtgaggcacactcattgaaggtcgaaaaggtactattccaaggaaagtcggactaccaaaatgtgatggtgtttcagtcctccacgtacggcaaggtgcttgtgctggatggagtgattcaggtcactgagagggatgagtgtgcttaccaagagatgattacccacctccccctttgctctatcaaagatcccaagaaggtgttagttattggaggtggagatggtggtgttttgcgtgaagtttcacgacattcctcggtggagcaaattgacatatgtgaaattgataagatggtggtagatgtctccaaacaattttttcctcatctggctgttggatttgaagacccccgtgtgtcattacacattggagatggcgtggcctttttgaaaaatgctccagagggtacttatgatgcagttattgtggattcctctgatccaataggtgatttgttaatcattggtgttattggttttatgctttgctccaccgaggggcctactgttgatttccagcatcctatttttaacattgaggataatgagttctcaacaaaatcgaaaggaccacttaagttctacaattccgagatccactcagcatcattttgtttgccgtcttttgcgaagagagtcattggatccaaggccaactagatcaaagatccttgagcccaaggccaactggactggaatccctccgacaaaagatttggttgtagcagaaagagcaatgaccccttttttcccatttaaataaaaattggagatgtaaacggttatccaagtgcttttgaattttgtctcagtatgagaacgttttgtatttggtaactgttttcccgcatctcccttaccatttaccaaaatgagtattgctgtagttttcatctgaggtgcttcttgaattcttgcagtcagtctcattttcagctcgagtgaaacggtggtttctttg

SEQ ID NO: 75380 - DNA, 1422 bp, Oryza sativa
  Clone ID: PAT_MRT4530_75476C.1
gcacgagggcccaactcccccggccgggccagaaagagagacaggggagaaaaccctaatctcaaggccgcggctgtgagcgctcctcccgtctctcccccaacccgccgccagccaccgagctcgccaccgtctccgttgcctcgccgtgctctaggttctcggatggaggccgaggcggcggcgaagagggcgcgggagagcggtgacgcggcggcggccggtgccggcgagcaggcgggtatctctgccgtcatccctggatggttctccgagattagccccatgtggcctggtgaggcacactcattgaaggtcgaaaaggtactattccaaggaaagtcggactaccaaaatgtgatggtgtttcagtcctccacgtacggcaaggtgcttgtgctggatggagtgattcaggtcactgagagggatgagtgtgcttaccaagagatgattacccacctccccctttgctctatcaaagatcccaagaaggtgttagttattggaggtggagatggtggtgttttgcgtgaagtttcacgacattcctcggtggagcaaattgacatatgtgaaattgataagatggtggtagatgtctccaaacaattttttcctcatctggctgttggatttgaagacccccgtgtgtcattacacattggagatggcgtggcctttttgaaaaatgctccagagggtacttatgatgcagttattgtggattcctctgatccaataggaccggctcaagagcttttcgagaagcctttcttccagtcagttgccagagctttgcgtcctggtggtgttgtatgtacccaggcagagagcatatggttgcatatgcatattattgaagatattgtagctaattgtcgccaagtttttaaaggctcagtgaattatgcttggacaacagtaccaacataccctagtggtgttattggttttatgctttgctccaccgaggggcctactgttgatttccagcatcctatttttaacattgaggataatgagttctcaacaaaatcgaaaggaccacttaagttctacaattccgagatccactcagcatcattttgtttgccgtcttttgcgaagagagtcattggatccaaggccaactagatcaaagatcactgagcccaaggccaactggactggaatccctccgacaagagatttggttgtagcagaaagagcaatgaccccttttttcccatttaaataaaaattggagatgtaaacggttatccaagtgcttttgaattttgtctcagtatgagaacgttttgtatttggtaactgttttcccgcatctcccttaccatttaccaaaatgagtattgctgtagttttcatctgaaaaaaaaaaaaaaaaaaaaaaaaaaaaaaaaaaaaaaaaaaaaaaaa

SEQ ID NO: 75381 - DNA, 257 bp, Oryza sativa
  unsure (1)..(257): unsure at all n locations
  Clone ID: PAT_MRT4530_75477C.1
atgcgtaatgctggaagacctcttgaagagatgcagaagaaggagagcaaaattnnnnnnnnnnnnnnnnnnnnnnnnnnnnnnnnnnnnnnnnntcgccctatagggagtcgtattacaaatcactggccggcgttttacaacggcgggactgggaaaaccctggcgttacccaacttaatcggcttggagaacatacccctttcgccagctggcgtaaaagcgaagaagcccggaccgatcggccttaccaaaag

SEQ ID NO: 75382 - DNA, 4354 bp, Oryza sativa
  Clone ID: PAT_MRT4530_75478C.1
atggggatggaggctgacaatgtcgacggccaccaccagcagcagctccgcgcgtcgtcagcgtcagcacgccaccagcacggcgtcagcggcacctcggtggcggaggtgaacctgtccacccgccgccccttcgtggagaaggtgtggtcggacctggccgagacgttcttccccaacaacccgttccgtgggatcagcgtgctgctcctggccaggcatgcgtggggcgcgctcaagtacctcgtcccagtgctggactgggccccgcgctacggcctcgtcaagttcaagtacgacctcctcgcaggcatcaccatcgctggcctcgccatcccgcagggcatcagctacgcccgcctcgccaacctccctcccatcatcggcctttgtacattcgagcttcgtgccgccattgctgtacgcggtgttcgggagctccaacaacctgtggtggggatggtggcggcagcgtcgcagctgcggaacaatggaggggacaaggagacacttggagaaggacttagagccatggaggatcatcgaggacgtccaagtcaaggtggaggcccaaaccaagtcgacgtcggggaacgatgctgagaagagtccccaggattttgctgactgtgtcagtcaagagcaactacgaactctccaagaaaatactcaaaaggacatcacggaggccgttgcaaagtctgtccaagatactttcactaaaatcggcttcctgaaccacatggagaggttggacaagcggatatccacgctaactgatcgggttgctgcgttggagacaccttccaatgaggaagtgagcggtgacgacgatgctcatcctgaagacacggtgtatgattctagtggctatattgacatgccagttacaaggcaagcacggctacgacgtcgtctatgcacaaaccgcacaagtatgggtggtactcgccaccaacaaggtaataataatcgtgtgcccgaggatccttatgctaaggtaaagtttaaaataccatctttttcgggatattatgatgctgagaaataccttgattgggagatgacagtagaacaagccagtagtgagttcaaagattttgctatcatgtggtgggctgggttatctgataagggagctttatctactatttgggaagaacttaaggtagctatgcgcgataggtttgttcctccatcttatcatagagatttacgcaagaaactgatgcgtttagaacaaggggataaatctgtacaagattactatggtgagctacaaaagggtgtgagacgttgtggcatagtggagggggtcgaggatgccatttgtcgtttttattctggtttgagggaggaaattcagaacattgttgattataaggaatttaactctgtcaaccagttgtttcagtttgctatgcttgcagagaaggaattgcaggggcgtgagcagcagggcaagaacaaggcgaaagatggctacattaccacctccgacgtggaagaagaagaggaggaagaagaagttgaggatgaggatggcgaagtctttggtcgtgatgacacaatggcctacaggaccatcattgtgcagcggattttctttgtcatcaacaaccgtcgtgcacgtgtgatcattgatggaggtagctgcaacaacttgaaaattactttgctacctttgacccctgctgaaattgtagaagctgataaagaacaagctgctagtttgaaacttgatgaatctaagaatcagctagttgctaaatctgtttttccacctaaaaaagataagctttcacctagttataaagttgaggggattaagttgatgggtagtgttatgcttgcaaccaaatgtgacattgctgaaatttcagatgatgatatttgctattccttgatatgcaaacaagctttggtttctctagatgatattgctggttcgatacctcctgttgttactaaccttttgcaggagtatgaggatgtctttccagctgagatacctctgggcttgccacctatgagagggatagagcatcaaattgatttgattccaggagcattattgccaaaccgtgctgtttatcgaaccaacctagaggagactaaggaaattcagcggcaagttcaagatcttttggaccacgggtatatacgtcaaagccttagtccttgtgcagttcctgtaattttggttcctaagaaagatggttcttggcaaattactttcatgtgcttaatgaatgaggttttaagaccttttattggacgatttgtggtagtttactttgatgacatattgatttacaacaagtctttggatgaacacatggatcatttacgtgctatttttaatgctctacgcgatgcacgtttgtttgctaaccttgaaaagtgcatattttgcacggaacgagtttcttttcttggatatgttgttactccacagggaattgaggtggatgagacaaaaattgaagccataaaaagttggccagttccccaaaccatcacagaggtgaggagttttcttggtcttgcaggattctatcgccgtttcatcaaagatttcagtacctttgctacaccattgaatgagttgacgaagaaaggggtggtcttccattggggaaagacacaggagaagtcgtttgacactttgaaggacaagcttacacacgcaccattgctacaacttccaaactttggtaagacttttgagttggaatgtgatgctagtggagttggcattggaggtgtgttgatgcaagatggtaagccggttgcatattttagcgagaagttgcatggttctgttttgaatcattccacgtatgataaggaattgtatgctcttgaagcacatggaggagggttgatgggacattttgaagctaagaagacggaagatgttttggccttgcatttcttttggccaagaatgagaaaagatgttgagagaactaagagggggagggatagcatttttgttgtggtggatcgtttttctaagatggcacatttcatatcatgtcataaaagtgatgatgctgttcatattgctgatctgtttttccatgagattgttcgcttgcatggtatgccttctactattgtttcagatcgtgatgcaaaattcttaagtcatttttggcacatgctatggaataagttgggtacaaagctattgttttctacaacatgtcacccacaaacatatggacaaacggaggtagtcaaccgcactttgggtaccatgctgagggctattttgaagaaaaatttgaagatgtgggaagaatgtttgcctcatgtggagtttgcatacaattgggcaacacattctactaccaaggtaagtccttttcaggtagtgtatggtttcaaccctcgtgctcctattgatattttgcctttacctactagtgagagggttcataatgatgctatggcacgcgctgaatttattttgaaaatgcatgagtcaaccaagctcaacattgaaaagatgactgaaaagtatagaattgctcgtagtaaaggtaggcaagaggttaagcttgaaccgggtgatttagtttggttgcacttgcaaaaggatagatttccggaattgagaaagtctaagttgatgcctcgtgctgatggtccttttaaaattattgagaagattaatgataatgtatataaacttgagttgcctcccgagtttggggttagtaccacatttaacatttcagatttgaagccatacttgggagaagaggatgagcttgagtcgaggacaacttcaattcaagagggggaggataatgcggacatcactacctcggatatacacaacaatcctccaacgatcattcaaggaccgataacaagagctcgtgcacgacaattaaatttagagcaaacagggattagccttctcggcgaggtcatccgcgtttcgacacgggtgataaccagaggagacgtggtgctgcgattgcgggactcaagagcgtgcgcgttcaagaagccggatcgatttatgtcgcgactccgcccaaatcgctgtgtatcagaacctttcggaagatcgggaaccctagtgcacatcagggctccccacgaccaaaacggccaaaaggggaggagcacgacagagaggaggaaggtacagccggtgaagaaattgacccatcaccgctgtccgcgatgccgagcagcaggattcaggcgcggggccccaaattcgacggcggctccacaggatgcacctgcatcgccaccaccatcgccgggtcctaggtcccagccgcccatcaccgtcgttgccgtcagagacgtcgggaaaagcacctag

SEQ ID NO: 75383 - DNA, 3477 bp, Oryza sativa
  Clone ID: PAT_MRT4530_75479C.1
atggaggggacaaggagacacttggagaaggacttagagccatggaggatcatcgaggacgtccaagtcaaggtggaggcccaaaccaagtcgacgtcggggaacgatgctgagaagagtccccaggattttgctgactgtgtcagtcaagagcaactacgaactctccaagaaaatactcaaaaggacatcacggaggccgttgcaaagtctgtccaagatactttcactaaaatcggcttcctgaaccacatggagaggttggacaagcggatatccacgctaactgatcgggttgctgcgttggagacaccttccaatgaggaagtgagcggtgacgacgatgctcatcctgaagacacggtgtatgattctagtggctatattgacatgccagttacaaggcaagcacggctacgacgtcgtctatgcacaaaccgcacaagtatgggtggtactcgccaccaacaaggtaataataatcgtgtgcccgaggatccttatgctaaggtaaagtttaaaataccatctttttcgggatattatgatgctgagaaataccttgattgggagatgacagtagaacaagccagtagtgagttcaaagattttgctatcatgtggtgggctgggttatctgataagggagctttatctactatttgggaagaacttaaggtagctatgcgcgataggtttgttcctccatcttatcatagagatttacgcaagaaactgatgcgtttagaacaaggggataaatctgtacaagattactatggtgagctacaaaagggtgtgagacgttgtggcatagtggagggggtcgaggatgccatttgtcgtttttattctggtttgagggaggaaattcagaacattgttgattataaggaatttaactctgtcaaccagttgtttcagtttgctatgcttgcagagaaggaattgcaggggcgtgagcagcagggcaagaacaaggcgaaagatggctacattaccacctccgacgtggaagaagaagaggaggaagaagaagttgaggatgaggatggcgaagtctttggtcgtgatgacacaatggcctacaggaccatcattgtgcagcggattttctttgtcatcaacaaccgtcgtgcacgtgtgatcattgatggaggtagctgcaacaacttgaaaattactttgctacctttgacccctgctgaaattgtagaagctgataaagaacaagctgctagtttgaaacttgatgaatctaagaatcagctagttgctaaatctgtttttccacctaaaaaagataagctttcacctagttataaagttgaggggattaagttgatgggtagtgttatgcttgcaaccaaatgtgacattgctgaaatttcagatgatgatatttgctattccttgatatgcaaacaagctttggtttctctagatgatattgctggttcgatacctcctgttgttactaaccttttgcaggagtatgaggatgtctttccagctgagatacctctgggcttgccacctatgagagggatagagcatcaaattgatttgattccaggagcattattgccaaaccgtgctgtttatcgaaccaacctagaggagactaaggaaattcagcggcaagttcaagatcttttggaccacgggtatatacgtcaaagccttagtccttgtgcagttcctgtaattttggttcctaagaaagatggttcttggcaaattactttcatgtgcttaatgaatgaggttttaagaccttttattggacgatttgtggtagtttactttgatgacatattgatttacaacaagtctttggatgaacacatggatcatttacgtgctatttttaatgctctacgcgatgcacgtttgtttgctaaccttgaaaagtgcatattttgcacggaacgagtttcttttcttggatatgttgttactccacagggaattgaggtggatgagacaaaaattgaagccataaaaagttggccagttccccaaaccatcacagaggtgaggagttttcttggtcttgcaggattctatcgccgtttcatcaaagatttcagtacctttgctacaccattgaatgagttgacgaagaaaggggtggtcttccattggggaaagacacaggagaagtcgtttgacactttgaaggacaagcttacacacgcaccattgctacaacttccaaactttggtaagacttttgagttggaatgtgatgctagtggagttggcattggaggtgtgttgatgcaagatggtaaaccggttgcatattttagcgagaagttgcatggttctgttttgaatcattccacgtatgataaggaattgtatgctcttctaaccgctatgcattccagttggttccgtcctcttttgttgatacaagaagcacatggaggagggttgatgggacattttgaagctaaaaaaacggaagaagttttggccttgcatttcttttggccaagaatgagaaaagatgttgagagaactaagagggggagggatagcatttttgttgtggtggatcgtttttctaagatggcacatttcatatcatgtcataaaagtgatgatgctgttcatattgctgatctgtttttccatgagattgttcgcttgcatggtatgccttctactattgtttcagatcgtgatgcaaaattcttaagtcatttttggcacatgctatggaataagttgggtacaaagctattgttttctacaacatgtcacccacaaacatatggacaaacggaggtagtcaaccgcactttgggtaccatgctgagggctattttgaagaaaaatttgaagatgtgggaagaatgtttgcctcatgtggagtttgcatacaattgggcaacacattctactaccaaggtaagtccttttcaggtagtgtatggtttcaaccctcgtgctcctattgatattttgcctttacctactagtgagagggttcataatgatgctatggcacgcgctgaatttattttgaaaatgcatgagtcaaccaagctcaacattgaaaagatgactgaaaagtatagaattgctcgtagtaaaggtaggcaagaagttaagcttgaaccgggtgatttaatttggttgcacttgcaaaaagatagatttccggaattgaaaaagtctaagttgatgcctcgtgctgatggtccttttaaaattattgagaagattaatgataatgtatataaacttgagttggcttccgagtttggggttaataccacatttaacatttcaaaattaaagccatacttgggagaagaagatgagcttgagttcaggacaacttcaattcaagaaggggaggataatgcggacattactacctcggatatacacaacaattccttcaacgatcattcaaggacccgatacaagagcttgtgcacgacatttaaattaaagtga

SEQ ID NO: 75384 - DNA, 228 bp, Oryza sativa
  Clone ID: PAT_MRT4530_7547C.1
aagctttttttttttaagtattgatccgttcttgagtagaagcaactaaatttcttaccctgtccttatacattgtatatagaggtgtcttaaagagaaataaatcttatctctactctgacttaattgattcacaagaaatgaatttatgttcgaaaataacattccataacagtcagtatcggtagcgccatgccatgcatgcaaattcactccgttgagaagctt

SEQ ID NO: 75385 - DNA, 2549 bp, Oryza sativa
  Clone ID: PAT_MRT4530_75480C.1
atgggccccacttgggccggggtcccaaacgaagttacaagcccaaaggaccatgacagtaggtggccgaatcggattccagcatttggaggccttgaccttgatgtcttcttgttcatctatgatgtgagcaatggttgtatccatagtagctatggtcacatcacaaaggctagtgggccccacagaatgaggaggcgattgtctcaactgttcaaagggtccggcccttcatcaagtcatcatgacgggtctagcactcgttcatcagctaatatctcgatggaagacgccgaagctccgcgacatgatacggacatcactacctcggatacacacaacaatcctccaatggtcattcaaggactgatagcaagagctcgtgcgcgacaattaaatttagaggtgagctcgttcctatgttcttctttgtatgaattcgagaaaagattgctacctaatgaatatattgtgattagaaataatagaggggacaaggagacacttggagaaggacttagagccatggaggatcatcgaggacgtccaagtcaaggtggaggcccaaaccaattcgacctcggtgcaattcggagtctaggaccagtctgcactaaaacgggcgcccaggtcgcatacgtgctcggattggggcgttctttatatgaatggaaaactaagaagataacctttccaatggttttggtcccacatccaaatactttccgagtcaatgggtatcgaccgaacaagttgacatccagaatctgtcccggtgctgtgtcaccgtatttgggcctttgggccataacctttcggaagatcgggaaccctagtgcacatcaagtggtatcggaggccgttgtaaagtctgtccaagatgccttcactaaaatcggcttcctgaaccacatggagaggttggacaagcagatatccacgctaactgatcgggttgccgcgttggagacaccttccaatgaggaagtgtgggctgggttatctgatgagggggtactacctactacttgggaagaacttaaggtagctatgcacgataggtttgttcctccatcttatcatagagatttacgcaagaaattgatgcgtttggaacaaggggataaatccgtacaggattactatggtgagctacaaaagggtgtgagacgctgtggcatagtggagggggtcgaggatgctatttttcgtttttattctggtttgagggaggaaattcaaaacattgttgattataaggaatttaactctatgaaccagttgttttggtttgcaatgcttgaagagaaggaattgcaggggcgtgaccatcagggcaagaacaaggcaagcacatacactccacgcacgatgccatctacgggactacccagggccgtttcttttcgggcgccttcccagccagcgagcaagcgaccagctgcattcggagcttctgcggcaccaaaaccatctccaccacaaccagcagagtcaggtaatggttcttcgcaggtacccgccaagagtgcctcatctgtcgcctcgacgggacgcattcagtgccaccgttgccaagggtttgggcatgtgcagaaagattgccctattcaacgggcctatgttgctacagaagatggctacatcaccacctccgacgtggaagaggaagaggaggaagaagaagttgaggatgaggatggagaagtctttggccgtgatgacacaactgactacaggaccatcgttgtgcagcgggtgctcagcatgcagattttcttcgtcatcaacaaccgtcgtgcacgtgtgatcattgatggaggtagctgcaacaatttggtgagttctgatttggtcaagaagcttggcttgactacacgtacacatccacatccttaccatattcagtggttaaacgattttggaagagcaaagattctgttgattgtgatgtggttcctatgcaagcttgttcacttttgcaaggagcatcattgccaaaccgtgctgcttatcgaaccaacccagaggagactaagggaattcagcggcaagttcaagatctcttggaccgcgggattctatcgccgtttcgtcaaagatttcagtacctttgctgcaccattgaatgagttgatgaagaaaggggtggtcttccattgggaaaagacacaggagaagtcgtttgacactttgaaggacaagcttacacacgcaccattgctacaacttccaaactttggaggcaagactgagccacaaactaagccttacccactagacatgtggaagtacggtagtgctttgcaacagaggcccgagcttaatcctgatagtacccgaggtgtgttgatgcaagatggtaagcctgttgcatactttagcgagaagttgcatggtcctgttttgaattattccacgtatgataaggaattgtatgctcttgaagcgcatggaggagggttgatgggacattttggagctaagaagacggtagatgttttggccatgcatttcttttggccaaggatgagaaaagatgttgagag

SEQ ID NO: 75386 - DNA, 414 bp, Oryza sativa
  Clone ID: PAT_MRT4530_75481C.1
atggcgacgaccgcagtccggcgaagcaagagcgtgcgacaggcattgagcgccgagtggctccggacttcgccggctggggagcggagcacaaggcgacaccaagtaatgtactccgctaggcgccccgtgctcgtcggctggggagcacgcctgagggtggcgccaagcctagccaggcattggtgttccggcgaggcggtcgcgcaaaacggcggcgagcaccgatgtggcccggacttcgttggcgggacggcggagcccgaaggcagctgccaagccgacgcttcccgtccccggcgagggacggtggagggaccgggaagaccgacgcggccacaaggaggtgaagtggcggcaatgccgcttgccggagaaattccggtgggtttagggcttcaaaatccagcctga

SEQ ID NO: 75387 - DNA, 282 bp, Oryza sativa
  Clone ID: PAT_MRT4530_75482C.1
gagggagtttagtaatcaccaccgcaccgacccaaaaaccggggggcattttaaaacacattcaccctaactccccctcacatacactcccaaacaatcctactcttcatacaaaatcacaacactctaacaccattaatacaaagaatgagagagaggaagcagattgcagtgagtgagcgagtgagtgaagcagcttatttcagccttataacaggacaaccaacccggcccggcactagcgctgctgctcgcggtggtgggcgtcggcgcgcaagacta

SEQ ID NO: 75388 - DNA, 207 bp, Oryza sativa
  unsure (1)..(207): unsure at all n locations
  Clone ID: PAT_MRT4530_75483C.1
atgccgggtgttggggaaggggaccctctccgctgtggcggcagcggagacgtctccgccctcattcctgaattccgccaacccttccgggggcccnngnggccgtggggtgagtttggatgccccgcctcggcgagggaggggtggatatgctccactcgctggctcggattcgagtcgctgttagtcggggaagatagaggatag

SEQ ID NO: 75389 - DNA, 1554 bp, Oryza sativa
  Clone ID: PAT_MRT4530_75484C.1
atgaaaattgaagccatcaagagttggccggttccccaaaccatcacacaggtgagaagttttcttggtcttgcaggattctatcaccgtttcgttaaagatttcagcacctttgctgcacccttgaatgagttgacgaagaaatgggtggtttaccattggggaaagacacaggagaagtcgtttgatactttgaagaacaagcttacacacgcaccattgctacaacttccaaactttggtaagacttttgagttagaatgtgatcctagtggagttggcattgggggtgttttgatgcaagatgatcgcgatgcaaaattcttaagaaatttttggcgcacactatggaacaagttgggtacaaaactattgttttctacaacatgtcacccacaaatagatggacaaacggaggtagtcaaccgtactttgggtaccatgttgagggctattttgaagaaaaaattgaagatgtgggaagaatgtttgccttatgtggagtttgcatacaatcgggcaacacattatactaccaacataagtccatttcaggtagtgtatggtttcaaccctcgtgctcctattgatattttgtctttacctactagtgagagggttcataatgatgctaaggcacgtgctgaaattattttgaaaatacatgagacaactaagtactatgttgaaaagatgactaaaaagtatagaattgctggttgtaaagatttggagccatacttgggagaagaagatgagcttgagtcgaggacgagttcagttcaagaggaggaggatgatgtggacatcactctttcggatccacacaacaatcctccaacggtcatacaaggaccgataacaagagctcgtgcgcgacaattgaatttagaggaatttgagaatagattgctacctaatgattatattgtgatttggatcaatggaggggacagggagacatgtggagaaggacttagagccatagaggatcatcgaggacgtccaagaattagttttctcggcgaggtcaaccaggtttcgatataccacttcgtaccctttcaatgcatttataaaaatattttggacgaaatcctgtgtctcccacccggcaatggatctcaggtggacgggcgcttacggtgccagcggttgccggggggaacggtgacgacggcggttgtgcctctggctgcagcgcacacgacagtcagcaacggtcattgctggggtggcgactacgtcgccttcttttctgatgagagggcgaacaccagctcgcatttggttgtgaaattagtaccttcagattcagattcacaccccggtttgaatggccagcagtgtatgcagtctccaatttttccttcggttgaaaagaagatgaagctgcttgctcgattgtcccttgcttatccaggcatgatggacttgcggtggcgagatgaacaagaaagatgggaggaggaagaaacgggggtaatttggtccaacaaatttgatagatgctttaaaggggatctaaagaatttatggcatggatccaattaa

SEQ ID NO: 75390 - DNA, 567 bp, Oryza sativa
  Clone ID: PAT_MRT4530_75485C.1
atgatggtcatcctgaagacacggtgtatgattctagtggcaatgttaatgcacaagctacaaggaagcacgactacaacatcatcttggacaaaccgcacaggtatcggtggcactcaccactaccaacaaggtaataataatcgtgtgcccgatgaaccttatgctaaggttaagtttaaaataccatctttttcgggatattatgatgctgagaaataccttgattgggagatgatagtagaacaaaagtttaatgtccaccttgtgcctgagcaacatagagttcgacaagccagtagtgagttcaaagattttgctatcatgtggtgggatgggttatctgacgggggagttttacctactacttgggaagaacttaagaaagattaccctagtcaacgggcatatgttgctacagaagttggctacatcaccacctccaatgttgaagatgatgaggaagaggaggaagaagaagttgaggatgaggatggcgaagtctttggtcgtgatgacacaacggcctacaggaccatcattgtgcagcgggtgctcagcatgtag

SEQ ID NO: 75391 - DNA, 635 bp, Oryza sativa
  Clone ID: PAT_MRT4530_75486C.1
ggctgttcaatagatgcattcttttctgccttgtaacctaagactttggtttcatgtgcaccttatagatatctctgtacgtgttctgtagttatctttaacaagtagccaatgctttaaaggcttcttcaagaatatgatataaaaaaggtggatatactattcccgtcgactttgttctatatatgatatcacggtaaatatttttgcttctgttcagtgatgaatgcttgctttataaaatttaacctatttaattcacggcctatagtgtgcctttaattgtagatttctgctttctttttggcttagacataacaatgggtttcattgagcaggtaatttggtccaggttgtatcatagcatttcacaccccttttacttgcagtagaaatgtcagagagggacatcaccatatcctcaaacaattaagttccaattaactgaatcactaaagttgttttctgttcaaaggctatgcaagtgcatccttagaaacatttgttgcggcattagcaggatgccgcatcaatcacgtatatcatttatctccattctccagtcttttggaactaaatagtctcacaccatggagttctggaaatctacagaggtgatcacgtgattagtggat

SEQ ID NO: 75392 - DNA, 2286 bp, Oryza sativa
  Clone ID: PAT_MRT4530_75487C.1
atgggatattatgatgctgagaaatatcttgattgggagataacagtagaacaaatgtttaatgcccaccttgtgcctgagcaacatagagttcgacaagccagtagtgagttcaaggattttgctatcatgtggtgggctgggttatctgatgagggggttatacctactacttgggaaggacttaaggtacccgccaagagtgcctcatctgtcgcctcgacgggacacattcagtaccactgttgccatgggtttgggcatgtgcacaaagatttccctagtaaacgggcatatgttgctacagaatatggctacgtcaccacctccggcgtggaagaggaagaggaggaagaagaagttgaggatgaggatgacgaagtctttggtcgtgatgacacaacggcctacaggaccatcattgtgcagcggattttcttcgtcatcaacaaccgtcgtgcacgtgtgatcattgatggaggtagctgcaacaacttggtgagttctgatttggtcaagaagcttggcttgaccacacgtacacatccatatccttaccatattcagtggttaaatgattccggaagagcaaaggtaacacaggtttgtagggtttcgttttccattggctcatatgcagattctattgattgtgatgtggttcctatgcaagcttgttcacttttgttgggtcatccttgggaacatgataatgatgctacacaccatggtaggagtaataaatacacttttgtgcataatggaaagaaaattactttgctacctttgacccctgctgaaattgtagaagctgataaagagcgagctgctagtttgaaacttaatgaatctgaaaatcagcaagttgctaaatttgtttttccaactaaaaaggataagctttcacctagctctaaggttgagggaattaagttgaagggtggtgttatgcttgcaacaaaatgtgacattgctgaaatttcagatgatgatatttgctattccttgatatgcaaacaacatcactgccaaaccatgctgcttatcgaaccaaccccgaggagactaaggaaattcagcggcaagttcaagatcttttggaccacgggattctatcgccgtttcgtcaaagatttcagcacctttgctgcaccattgaatgagctgacgaagaaaggggtggtcttccattggggaaagacacaggagaagtcgtttgacactttgaaggacaagcttacacacgcaccattgctacaacttccaaactttggtaagacttttgagttagaatgtgatgctagtggagttgtcattaggggtgtgttgatgcaagatggtaagcctgttgcatactttagcgagaagttgcatggtcctgttttgaattattccacgtatgataaggtagtatatggtttcaaccctcgtgctcctattgatatcttgcctttacctactagtgagagggttcataatgatgcaaaagcacgtgctgaatttattttgaaaatgcatgagacaaccaagcagaacattaaaaagatgactgaaaggtatagaattgctggtagtaaaggtaggcaagaagttaagcttgaaccaggtgatttagtttggttgcacttgagaaaggatagatttccagaattgagaaagtctaagttgatgcctcgcgctgatggtccttttaaaattgttgagaagattaatgataatgcatataaacttgagttgcctcccgagtttggggttagtcccacgtttaacatttcagatttgaagccatacttgggagaagaagatgagcttgagtcgaggacgacttcaattcaagagggggaggatgatgcgcacatcactccttcggatacacacagcaatcctccaacggtcattcaaggaccgataacaagagctcgtgcacgacaattgagtttagaggggacaaggagatatctggagaaggacttagagccatggaggatcatcgaggacgtccaagtcaaggtggacgcccaaaccaagtcgacctcgggtgcaattcggagttcaggaccagtcttcactaaaacgggtgcccaggtcgcatacgtgctcagattggggcgttctttatatggatggaaagctaagaagataacctttccaatggttttggtcccgtatccaaattctttcagagtaaatgggaatcgaccgaacaagttgatgtccagaatctatcctggtgctgcaccaccgtacttgggcctttgggccgtgtatcgtgttggaacccattag

SEQ ID NO: 75393 - DNA, 569 bp, Oryza sativa
  Clone ID: PAT_MRT4530_75488C.1
gcacgaggtgcagtttcagtcagagttaataccaagttagagatgacaaagcatggcagctccagttttggtggtgctctgtccctttgcaaggtgatcttgatggtcctcgccctcatctgcaccctgcacactgcctccgtgcaaggagggagagcggcggcggcaattggtgggggtgggaagggttcagtattggatccaacctacacgccgccgacgccccccggcgggtcttacaccggcggccggggatgccgcggaccctacagatgccctcctggagcaggctcgccatgaccatgacccacactccatctctctgctacatacagtgctactgcatgatcgaagaccatatcgatctcgatctcattatctaaaattaaagtatcgatctcgatctactcatgtcgatcgatgctatgcctatatatacaaacaaataaataaaccagcaggcatctaacgcagatcgatggatcgagtaggtgtcttttaattcctctgtatgcgttccatactcggagtatatataaaagtagtatctgctcaaaaaaaaaaaaaaa

SEQ ID NO: 75394 - DNA, 557 bp, Oryza sativa
  Clone ID: PAT_MRT4530_75489C.1
acacaacaatcctccaacggtcatttaaggacagataacaagagctcgtgcgcgacaattaaatttagaggaacaatggaggggacaaggagacacttggagaaggacttagagccatggaggatcatcggggacgtccaagtcaaggtggaggcccaaaccaagtcgacgtcgggtgtaattcggagtccaggaccagtctgcactaaaacgggcgcccaggtcgcatacgtgctcggattggggcgttctttatatggatggaaagctaagaagataacttttccaatggttttggtcccacgtccaaattctttccgagtcaatgggaattgaccgaacaagttggcgtcaagaatctgtcccagtgctgcgtcacggtatttgggcctttggcccgtttcgacacgggtgataaccagaggagacatggtgctgcgattgcggggctcaagagcgtgcgcgttcaagaagccggatcgatttgtgtcgctactccgcccaaatcgttgtttatcagaacctttcggaagatcgggaaccctagtgcacatcag
